(19) United States
(12) Patent Application Publication
(10) Pub. No.: US 2010/0029500 A1
(43) Pub. Date: Feb. 4, 2010

(54) OLIGONUCLEOTIDE ARRAYS TO MONITOR GENE EXPRESSION AND METHODS FOR MAKING AND USING SAME

(75) Inventors: MARK W. MELVILLE, MELROSE, MA (US); TIMOTHY S. CHARLEBOIS, ANDOVER, MA (US); WILLIAM M. MOUNTS, ANDOVER, MA (US); LOUANE E. HANN, BOSTON, MA (US); MARTIN S. SINACORE, ANDOVER, MA (US); MARK W. LEONARD, MANCHESTER, NH (US); EUGENE L. BROWN, NEWTON HIGHLANDS, MA (US); CHRISTOPHER P. MILLER, ARLINTON, MA (US); GENE W. LEE, CHELMSFORD, MA (US)

Correspondence Address: WYETH;PATENT LAW GROUP, 5 GIRALDA FARMS, MADISON, NJ, 07940, US

(73) Assignee: WYETH, MADISON, NJ (US)

(21) Appl. No.: 12/492,832

(22) Filed: Jun. 26, 2009

Related U.S. Application Data
(62) Division of application No. 11/128,049, filed on May 11, 2005, now abandoned.
(60) Provisional application No. 60/570,425, filed on May 11, 2004.

(51) Int. Cl. C40B 30/04; C40B 40/06

(52) U.S. Cl. 506/9; 506/16

(57) ABSTRACT

The present invention provides an oligonucleotide array capable of identifying genes and related pathways involved with the induction of a particular phenotype by a cell line, e.g., the genes and related pathways involved with the induction of transgene expression by the cell line. The invention is particularly useful when there is little or no information about the genome of the cell line being studied, because it provides methods for identifying consensus sequences for known and previously undiscovered genes, and for designing oligonucleotide probes to the identified consensus sequences. Additionally, when the array is to be used to determine optimal conditions for expression of a transgene by the cell line, the invention teaches methods of including oligonucleotide probes to transgene sequences in the array. The invention also provides methods of using the array to identify genes and related pathways involved with the induction of a particular cell line phenotype. The invention also provides novel polynucleotides of undiscovered genes (i.e., a gene that had not been sequenced and/or shown to be expressed by CHO cells) and novel polynucleotides involved with the induction of a particular cell phenotype, e.g., increased survival when grown under stressful culture conditions, increased transgene expression, decreased production of an antigen, etc. These novel polynucleotides are termed novel CHO sequences and differential CHO sequences, respectively. The invention also provides genetically engineered expression vectors, host cells, and transgenic animals comprising the novel nucleic acid molecules of the invention. The invention additionally provides antisense and RNAi molecules to the nucleic acid molecules of the invention. The invention further provides methods of using the polynucleotides of the invention.

[0001] This application is a divisional of U.S. application Ser. No. 11/128,049, filed May 11, 2005, which claims the benefit of U.S. Provisional Application Ser. No. 60/570,425, filed May 11, 2004, both of which are incorporated herein by reference in their entirety.

[0002] This application incorporates by reference all materials on the compact discs labeled “Copy 1” and “Copy 2.” Each of the compact discs includes the following files: Table 2.txt (3,230 KB, created 11 May 2005), Table 2v2.txt (429 KB, created 11 May 2005), Table 3.txt (77.1 KB, created on 11 May 2005), Table 3v2.txt (7.82 KB, created on 11 May 2005), Table 4.txt (90.6 KB, created on 11 May 2005), Table 4v2.txt (3.93 KB, created on 11 May 2005), Table 5.txt (2,260 KB, created on 11 May 2005), Table 5v2.txt (425 KB, created on 11 May 2005), and “Sequence Listing” 01997027700.ST25.txt (7,150 KB, created on 11 May 2005). This application also incorporates by reference all materials on the compact disc labeled “CRF”; the compact disc includes “Sequence Listing” 01997027700.ST25.txt (7,150 KB, created on 11 May 2005).

LENGTHY TABLES
The patent application contains a lengthy table section. A copy of the table is available in electronic form from the USPTO web site (http://seqdata.uspto.gov/?pageRequest=docDetail&DocID=US20100029500A1). An electronic copy of the table will also be available from the USPTO upon request and payment of the fee set forth in 37 CFR 1.19(b)(3).

### BACKGROUND OF THE INVENTION

[0003] 1. Field of the Invention

[0004] The present invention is directed toward 1) methods of forming an oligonucleotide array for monitoring (e.g., detecting the absence, presence, or quantity of) the expression levels of genes, including previously undiscovered genes, of a cell, 2) methods of using the array to verify expression by a cell of previously undiscovered genes and to discover genes and related pathways that are involved in conferring a particular cell phenotype, e.g., that can be used in the optimization of cell line culture conditions and transgene expression, and 3) sequences involved in conferring a cell phenotype optimal for transgene expression.

[0005] 2. Related Background Art

[0006] Fundamental to the present-day study of biology is the ability to optimally culture and maintain cell lines. Cell lines not only provide an in vitro model for the study of biological systems and diseases, but are also used to produce organic reagents. Of particular importance is the use of genetically engineered prokaryotic or eukaryotic cell lines to generate mass quantities of recombinant proteins. A recombinant protein may be used in a biological study, or as a therapeutic compound for treating a particular ailment or disease.

[0007] The production of recombinant proteins for biopharmaceutical application typically requires vast numbers of cells and/or particular cell culture conditions that influence cell growth and/or expression. In some cases, production of recombinant proteins benefits from the introduction of chemical inducing agents (such as sodium butyrate or valeric acid) to the cell culture medium. Identifying the genes and related genetic pathways that respond to the culture conditions (or particular agents) that increase transgene expression may elucidate potential targets that can be manipulated to increase recombinant protein production and/or influence cell growth.

[0008] Research into optimizing recombinant protein production has been primarily devoted to examining gene regulation, cellular responses, cellular metabolism, and pathways activated in response to unfolded proteins. Currently, there is no available method that allows for the simultaneous monitoring of transgene expression and identification of the genetic pathways involved in transgene expression. For example, currently available methods for detecting transgene expression include those that measure only the presence and amount of known proteins (e.g., Western blot analysis, enzyme-linked immunosorbent assay, and fluorescence-activated cell sorting), or the presence and amount of known messenger RNA (mRNA) transcripts (e.g., Northern blot analysis and reverse transcription-polymerase chain reaction). These and similar methods are not only limited in the number of known proteins and/or mRNA transcripts that can be detected at one time, but they also require that the investigator know or “guess” what genes are involved in transgene expression prior to experimentation (so that the appropriate antibodies or oligonucleotide probes are used). Another limitation inherent in blot analyses and similar protocols is that proteins or mRNA that are the same size cannot be distinguished. Considering the vast number of genes contained within a single genome, identification of even a minority of genes involved in a genetic pathway using the methods described above is costly and time-consuming. Additionally, the requirement that the investigator have some idea regarding which genes are involved does not allow for the identification of genes and related pathways that were either previously undiscovered or unknown to be involved in the regulation of transgene expression.

[0009] To overcome the limited number of transcripts that can be detected with hybridization protocols similar to Northern blot analysis, U.S. Pat. No. 6,040,138 provides a method of monitoring the expression of a multiplicity of genes using hybridization to oligonucleotide arrays, e.g., high-density oligonucleotide arrays (or microarrays). Hybridization to high-density oligonucleotide arrays provides a fast and reliable method to determine the presence and amount of known mRNA transcripts and can be readily applied in detecting diseases, identifying differential gene expression between two samples, and screening for compositions that upregulate or downregulate the expression of particular genes. Additionally, U.S. Pat. No. 6,040,138 teaches methods of optimizing oligonucleotide probesets to be included in the array.

[0010] However, the method described in U.S. Pat. No. 6,040,138 requires that oligonucleotide probes be made to the polynucleotide sequences of known genes. Consequently, the methods of making and using an array directed toward an organism as described in U.S. Pat. No. 6,040,138 cannot be used to detect the expression of previously undiscovered genes of a cell or cell line, i.e., genes that have not been previously sequenced and/or previously shown to be expressed by the particular cell line derived from an organism to which the array is directed. In other words, high density oligonucleotide arrays have not been directed toward, and thus have not been useful for, monitoring gene expression levels in cells or cell lines derived from an organism for which little genomic information is available (i.e., an unsequenced organism, e.g., monkeys, pigs, hamsters, etc.) (see, e.g., Korke et al. (2002) J. Biotech. 94:73-92). Monitoring the gene expression levels of such cells or cell lines has been performed using high-density oligonucleotide arrays directed toward other organisms for which the whole genome is available (or the sequencing effort is near completion) and that are phylogenetically close, e.g., use of human arrays to monitor gene expression levels in monkey cells (Gagneux and Varki (2001) Mol. Phylogenet. Evol. 18:2-13) and use of rodent arrays to monitor gene expression levels in cells derived from hamsters (Korke et al., supra). Additionally, the method described in U.S. Pat. No. 6,040,138 does not disclose a protocol with which sequences or subsequences (i.e., consecutive nucleotides identical to, but less than, the full sequence) of unknown genes can be determined. Consequently, whereas U.S. Pat. No. 6,040,138 allows for simultaneous monitoring of a multiplicity of genes, it does not solve the problem of identifying previously undiscovered genes and related genetic pathways, e.g., those that may be regulated in a cell in response to a particular culture condition. Additionally, U.S. Pat. No. 6,040,138 does not teach the use of microarray technology to either confirm or improve transgene expression by genetically engineered cells.

[0011] The present invention solves these problems by providing methods that will generate the sequences and subsequences of previously undiscovered genes in a cell or cell line, e.g., cells or cell lines derived from unsequenced organisms. The invention also provides a method by which these sequences are used to generate an oligonucleotide array that may be used to 1) verify expression of previously undiscovered genes, 2) verify expression of a transgene, and 3) determine genes (including previously undiscovered genes) and related genetic pathways that are involved (directly or indirectly) with a particular cell phenotype, e.g., increased and efficient transgene expression. Discovery of these genes and/or related pathways will provide new targets that can be manipulated to improve the yield and quality of recombinant proteins and influence cell growth.

### SUMMARY OF THE INVENTION

[0012] The present invention utilizes oligonucleotide microarray technology to identify genes and related pathways regulated in response to specific culture conditions, especially those conditions that result in optimal expression of transferred genes (transgenes) by genetically engineered cells or genetically engineered cell lines. In particular, the invention provides methods for forming an oligonucleotide array directed toward unsequenced organisms, which methods generally comprise determining the sequences or subsequences of genes expressed by the cell line, and designing an oligonucleotide array for these sequences. The sequences or subsequences of genes expressed by the cell line are determined by collecting a plurality of nucleic acid sequences, clustering and aligning said plurality of nucleic acid sequences, and identifying consensus sequences from the clustered and aligned plurality of nucleic acid sequences. Oligonucleotide probes are then designed based on identified consensus sequences, as well as transgene and control sequences. The oligonucleotide probes may then be immobilized in a random but known location on a surface to form the oligonucleotide array.

[0013] Thus the invention provides a method of forming an oligonucleotide array directed toward an unsequenced organism, wherein the method comprises the steps of (1) identifying a plurality of template sequences, wherein the plurality comprises at least one consensus sequence for a gene expressed by the unsequenced organism, and (2) selecting a plurality of oligonucleotide probes, wherein the plurality of oligonucleotide probes comprises a first set of oligonucleotide probes, each of which is specific for one of the plurality of template sequences, and wherein at least one oligonucleotide probe is specific for the at least one consensus sequence for a gene expressed by a cell derived from the unsequenced organism; wherein the step of selecting the plurality of oligonucleotide probes forms the oligonucleotide array. In one embodiment of the invention, the at least one consensus sequence for the unsequenced organism may be generated from at least two nucleic acid sequences of different genera of the unsequenced organism, and/or from at least two nucleic acid sequences of different species of the unsequenced organism. For example, the unsequenced organism may be hamster, and the consensus sequence may be generated from a nucleic acid sequence of a cell derived from, e.g., Mesocrecetus auratus (Golden Hamster) and a nucleic acid sequence of a cell derived from, e.g., Cricetulus migratorius (Armenian Hamster). Alternatively, the consensus sequence may be generated from a nucleic acid sequence of a cell derived from, e.g., Cricetulus migratorius (Armenian Hamster) and a nucleic acid sequence of a cell derived from, e.g., Cricetulus griseus (Chinese Hamster). In some embodiments, the plurality of template sequences comprises at least one template sequence selected from the group consisting of the polynucleotide sequences of SEQ ID NOs: 19-3572 and SEQ ID NOs:3661-7214, complements thereof, and subsequences thereof. In other embodiments, the plurality of template sequences may further comprise at least one other hamster sequence (e.g., a hamster sequence selected from the group consisting of the polynucleotide sequences of SEQ ID NOs:3573-3575 and SEQ ID NOs:7215-7217, complements thereof, and subsequences thereof), at least one transgene sequence (e.g., a transgene sequence selected from the group consisting of the polynucleotide sequences of SEQ ID NOs:1-18 and SEQ ID NOs:3643-3660, complements thereof, and subsequences thereof) and/or at least one control sequence (e.g., a control sequence selected from the group consisting of the polynucleotide sequences of SEQ ID NOs:3576-3642 and SEQ ID NOs:7218-7284, complements thereof, and subsequences thereof). Also, the plurality of oligonucleotide probes may further comprise a second set of oligonucleotide probes, each of which is a mismatch probe for a different oligonucleotide probe. The method of forming an oligonucleotide array may also include a last step of immobilizing the plurality of oligonucleotide probes to a solid phase support.

[0014] The invention also provides oligonucleotide arrays (that may or may not be immobilized to a solid phase support) directed toward an unsequenced organism. Generally, such arrays comprise a first plurality of oligonucleotide probes, each of which is specific to one of a plurality of template sequences, wherein the plurality of template sequences comprises at least one consensus sequence for a gene expressed by a cell derived from the unsequenced organism. In one embodiment of the invention, the consensus sequence may be generated from at least two nucleic acid sequences of different genera of the unsequenced organism, and/or from at least two nucleic acid sequences of different species of the unsequenced organism. In some embodiments, the plurality of template sequences comprises a template sequence selected from the group consisting of the polynucleotide sequences of SEQ ID NOs:19-3572 and SEQ ID NOs:3661-7214, complements thereof, and subsequences thereof. In other embodiments, the plurality of template sequences may further comprise at least one other hamster sequence (e.g., a hamster sequence selected from the group consisting of the polynucleotide sequences of SEQ ID NOs:3573-3575 and SEQ ID NOs:7215-7217, complements thereof, and subsequences thereof), at least one transgene sequence (e.g., a transgene sequence selected from the group consisting of the polynucleotide sequences of SEQ ID NOs:1-18 and SEQ ID NOs:3643-3660, complements thereof, and subsequences thereof) and/or at least one control sequence (e.g., a control sequence selected from the group consisting of the polynucleotide sequences of SEQ ID NOs:3576-3642 and SEQ ID NOs:7218-7284, complements thereof, and subsequences thereof). Also, the array may further comprise a second plurality of oligonucleotide probes, each of which is a mismatch probe for a different oligonucleotide probe.

[0015] It will be clear to one of skill in the art that the present invention is particularly useful for a cell line when both known genes and previously undiscovered genes (i.e., genes that, at the time of experimentation, have not been sequenced, or were sequenced but not shown to be expressed by the cell line) are included in said plurality of nucleic acid sequences. Generally, the nucleic acid sequences of known genes will be available from public databases. In contrast, the nucleic acid sequences of previously undiscovered genes must be obtained using other methods, such as generating a complementary DNA (cDNA) library for the cell line and identifying expressed sequence tags from the library. It is part of the present invention to provide nucleic acid sequences of previously undiscovered genes such that the oligonucleotide probes specific for the sequences (or subsequences thereof) of previously undiscovered genes may be included on an oligonucleotide array, and such that, via methods of using the oligonucleotide array, expression of such previously undiscovered genes by the cell line may be determined and/or verified to be involved in conferring a particular cell phenotype.

[0016] The invention is also related to methods of using the array, generally comprising the steps of providing a pool of target nucleic acids comprising, or derived from, mRNA transcripts isolated from a sample of the cell line; incubating the pool of target nucleic acids with the oligonucleotide array to allow target nucleic acids to hybridize to complementary oligonucleotide probes; and detecting the hybridization profile resulting from the target nucleic acids hybridizing with the corresponding complementary oligonucleotide probes. The invention comprises analyzing the resulting hybridization profile for useful information; for example, the analysis of the hybridization profile will yield information regarding the genes and related pathways activated during a particular culture condition that influences the expression of a particular cell phenotype.

[0017] Thus, the invention provides methods for detecting the absence, presence, and/or quantity of expression levels of a plurality of genes in a cell derived from an unsequenced organism. These methods generally comprise forming a hybridization profile by incubating target nucleic acids prepared from a cell with an array of the invention, and detecting the hybridization profile, wherein the hybridization profile is indicative of the absence, presence, and/or quantity of expression levels of a plurality of genes in the cell. As described above, the method may be particularly useful for detecting the absence, presence, and/or quantity of expression level of a previously undiscovered gene of the cell and/or a transgene. In some embodiments, the unsequenced organism is a hamster. In other embodiments, the cell is a CHO cell.

[0018] The invention also provides a method for comparing expression levels of a plurality of genes in a first cell derived from an unsequenced organism to expression levels of the plurality of genes in a second cell derived from the unsequenced organism, the method comprising the steps of (a) forming a first and second hybridization profile, wherein the first hybridization profile is formed by incubating target nucleic acids prepared from the first cell with a first array of the invention, and wherein the second hybridization profile is formed by incubating target nucleic acids prepared from the second cell with a second array identical to the first array; (b) detecting the first and second hybridization profiles; and (c) comparing the first and second hybridization profiles. In one embodiment of the invention, the first cell and the second cell are from the same cell line, wherein the first cell is modified with a transgene, and wherein the second cell is not modified with the transgene. In another embodiment, the first cell differs from the second cell with respect to a culture condition, e.g., duration of culture, temperature, serum concentration, nutrient concentration, metabolite concentration, pH, lactate concentration, ammonia concentration, oxidation level, sodium butyrate concentration, valeric acid concentration, hexamethylene bisacetamide concentration, cell concentration, cell viability, and recombinant protein concentration.

[0019] In another preferred embodiment of the invention, information related to gene expression levels aids in the diagnosis and remedy of suboptimal culture conditions, and/or in determining whether a cell line has been successfully engineered to express a transgene. One of skill in the art will recognize that such information can be particularly useful in optimizing transgene expression by various cell lines.

[0020] As such, the invention also provides isolated polynucleotides that are of previously undiscovered genes and/or are involved with the survival of cells when grown under stressful conditions, transgene expression, and/or the production of potential antigens, and methods of using polynucleotides of the invention to identify compounds capable of increasing transgene expression by a cell population. An isolated polynucleotide of the invention may have a polynucleotide sequence selected from the group consisting of the polynucleotide sequences of SEQ ID NOs:3421-3574, complements thereof, and subsequences thereof (e.g., a polynucleotide sequence selected from the group consisting of the polynucleotide sequences of SEQ ID NOs:7063-7216, complements thereof, and subsequences thereof). The invention also provides genetically engineered expression vectors, host cells, and transgenic animals comprising the nucleic acid molecules of the invention. The invention additionally provides inhibitory polynucleotides, e.g., antisense and RNA interference (RNAi) molecules, to the nucleic acid molecules of the invention. The invention further provides methods of using inhibitory polynucleotides of the invention to increase transgene expression by a population of cells, e.g., CHO cells.

### BRIEF DESCRIPTION OF THE DRAWINGS

[0021] FIG. 1: Generation of a Consensus Sequence and Complementary Oligonucleotide Probes for a Multi-Sequence Cluster

[0022] The GenBank sequence designated Accession No. AB014876, subject to clustering and alignment analysis, formed a multi-sequence cluster with two expressed sequence tag (EST) sequences (SEQ ID NOs:7287 and 7288) obtained from a Chinese Hamster Ovary (CHO) cDNA library. Regions of low-complexity sequence and vector sequence were replaced with X's (boxed regions), and the unambiguous and consecutive homologous regions were used as templates to generate perfect match oligonucleotide probes 25 nucleotides in length (SEQ ID NOs:7289-7300). Examples of such probes are shown in the figure, which presents nucleotides 1-300 (SEQ ID NO:7286) of the full-length GenBank sequence (i.e., 709 nucleotides).

### DETAILED DESCRIPTION OF THE INVENTION

[0023] The invention disclosed herein is directed toward an oligonucleotide array that can be used to verify the expression of a plurality of genes (including previously undiscovered genes) by a cell (or cell line) derived from an unsequenced organism, and to identify genes (including previously undiscovered genes) and related pathways that may be involved with the induction of a particular cell phenotype, e.g., increased and efficient transgene expression. Thus the invention provides the arrays, methods of making such arrays, and methods of using such arrays to 1) monitor (e.g., detect the absence, presence, and/or quantity of) expression levels of a plurality of genes, including previously undiscovered genes and/or transgenes, by a cell or cell line, and/or 2) determine genes and related pathways involved with conferring a particular cell phenotype, e.g., increased transgene expression, the methods comprising the steps of using an array of the invention. Accordingly, the present invention also provides sequences that are shown to be involved in transgene regulation, some of which are previously undiscovered genes, i.e., genes that, at the time of experimentation, had not been sequenced, or were sequenced but not verified to be expressed by the cell line.

### Method of Making an Array of the Invention

[0024] An object of the present invention is to provide a method of forming an oligonucleotide array that can be used to verify the expression of previously undiscovered genes by a cell (e.g., a cell line) and to identify genes (including previously undiscovered genes) and related pathways that may be involved with the induction of a particular cell phenotype, e.g., increased and/or efficient transgene expression. As taught herein, the method of forming an oligonucleotide array directed toward an unsequenced organism comprises the steps of (1) identifying a plurality of template sequences, wherein the plurality comprises at least one consensus sequence for a gene expressed by a cell derived from the unsequenced organism, and (2) selecting a plurality of oligonucleotide probes, wherein the plurality of oligonucleotide probes comprises a first set of oligonucleotide probes, each of which is specific for one of the plurality of template sequences, and wherein at least one oligonucleotide probe is specific for the at least one consensus sequence for a gene expressed by the unsequenced organism; wherein the step of selecting the plurality of oligonucleotide probes forms the array of nucleic acids.

### I) Identification of Template Sequences

[0025] Template sequences are those sequences to which oligonucleotide probes of the invention will hybridize under oligonucleotide array hybridization conditions. Additionally, a template sequence may be a consensus sequence to a gene of a cell (including a previously unidentified gene), a transgene sequence, or a control sequence. The identification of consensus sequences to known or previously undiscovered genes of a cell derived from an unsequenced organism is described.

[0026] The consensus sequences are identified by the well-known method of clustering and aligning a plurality of nucleic acid sequences. Nucleic acid sequences may be gene coding sequences and/or expressed sequence tag (EST) sequences.

[0027] Whether gene coding sequences are open reading frame (ORF) sequences or exon sequences, which may include 5′ or 3′ untranslated regions (UTRs) in addition to the ORF sequence, depends on the source organism from which the gene coding sequences are obtained. For example, if the source organism is prokaryotic, gene coding sequences are single-exon ORF sequences that do not contain 5′ or 3′ UTRs. However, if the source organism is eukaryotic, the gene coding sequences are comprised of multiple exon sequences, which may include 5′ or 3′ UTRs. As protocols used in the invention, such as the in vitro transcription protocol, are 3′-biased (based on the utilization of the oligo-dT primer), exon sequences, specifically those containing 3′ UTR sequence, as opposed to simply the ORF sequences, should be used whenever possible. However, if these transcription protocols are replaced with unbiased protocols, the inclusion of 3′ UTRs becomes less important. For the sake of clarity, use of the phrase “gene coding sequence” includes ORF and/or exon sequences, whichever is appropriate according to source organism and transcription protocols of the invention.

[0028] Preferred gene coding sequences of the invention may be obtained from incomplete and complete genomic sequences that are publicly available, or may be generated by prediction algorithms that are well known in the art. For example, gene coding sequences that are generated by prediction algorithms may include previously undiscovered genes. In a preferred embodiment, when both incomplete and complete genomic sequences are used, the incomplete genomes are oriented based on alignment to complete genomes. Additionally, gene coding sequences are separated based on whether they are oriented 5′ to 3′ on the sense (plus) strand or the antisense (minus) strand of their respective genome prior to clustering and alignment, such that plus and minus gene coding sequences are analyzed separately. Separately analyzing of the plus or minus gene coding sequences prevents the clustering and alignment of gene coding sequences that overlap each other on opposite strands of the genomic sequence. Although the strand assignment is arbitrary, it may be performed such that the genomic sequences that provided the gene coding sequences are highly conserved in primary and secondary structure. For example, upon orienting the genomic sequences, sequence fragments for each incomplete genome can be bridged with six-frame stop sequences, an example of which is 5′-CTAACTAATTAG-3′ (set forth as SEQ ID NO:7285). The plus or minus assignment then proceeds such that gene coding sequences obtained from incomplete genomes are assigned the same designation as highly homologous or identical regions on complete genomes. In another preferred embodiment, the genomic sequences are also screened for low-complexity sequence regions (repeats, etc.) and contaminating vector sequences. Any stretch of a genomic sequence meeting these criteria may be masked by replacing the nucleotides with a poly-X sequence of similar length prior to clustering and aligning. Three examples of such poly-X sequences are shown in FIG. 1.

[0029] One of skill in the art will recognize that it will be easier to assign gene coding sequences to the plus or minus strand when differences among the genomic sequences are small. In other words, the orientation of incomplete genomic sequences to complete genomic sequences will be easier when, e.g., the genomic sequences are obtained from different strains of a bacterial species as compared to when, e.g., the genomic sequences are obtained from different species and/or genera of an animal. Although strand assignment of the gene coding sequences may not be possible, e.g., when they are obtained from different species and/or genera of an animal, the lack of gene coding sequence separation will not affect the invention, as separation of gene coding sequences prior to alignment and clustering is just one embodiment of the invention.

[0030] Preferred EST sequences of the invention may be obtained from cDNA libraries generated from cells or cell lines using methods well known in the art; such methods are exemplified in Example 1.1. One of skill in the art will recognize that including EST sequences obtained from cells or cell lines grown in different culture conditions will increase the potential of including sequences of genes involved in, e.g., cell growth and maintenance and/or transgene production. A skilled artisan will also recognize that EST sequences generated from a cDNA library are generally submitted in a 3′ to 5′ direction. In one embodiment of the invention, an internal 3′ read, e.g., a poly-T tail, is included in all EST sequences. This internal 3′ read provides quality assurance regarding the directionality of the EST sequence (e.g., whether the sequence is disclosed 3′ to 5′, or vice versa). Additionally, the 3′ read provides a means by which to orient a consensus sequence identified from the EST sequence. When necessary, suspicious EST sequences, e.g., those for which orientation is unknown and/or may not be inferred from other sequences in the sequence collection, may be excluded from the cluster and alignment analysis. Alternatively, it may be beneficial to include the reverse complement of the suspicious sequence in the initial cluster and alignment analysis.

[0031] It also will be apparent to one of skill in the art that, whereas any gene coding sequence and/or EST sequence may be used, the most useful nucleic acid sequences are isolated from either the cells or cell line(s) to be monitored or the unsequenced organism (e.g., unsequenced animal) from which the cell line was derived. Gene coding sequences and EST sequences of the animal from which the cell line was derived can be isolated from any genus, species or strain that has the same animal classification. As a nonlimiting example, when culturing and monitoring the Chinese Hamster Ovary (CHO) cell line derived from the hamster (an unsequenced organism), gene coding sequences and EST sequences isolated from CHO cells, Cricetulus griseus (Chinese hamster), as well as other hamsters, such as Cricetulus migratorius (Armenian hamster) and Mesocricetus auratus (Golden hamster), can be clustered and aligned to identify consensus sequences. A skilled artisan will recognize that inclusion of gene coding sequences and/or EST sequences from animals other than the genus and/or species from which the cell was derived increases the likelihood that a consensus sequence to a previously undiscovered gene of the cell will be identified.

[0032] Gene coding sequences and EST sequences are clustered such that homologous sequences (defined by parameters such as sequence identity over a certain number of base pairs), and single transcripts that were included in the plurality of nucleic acid sequences multiple times, may be aligned. Suitable clustering and alignment methods include, but are not limited to, manually curating the sequences, utilizing well-defined computer software packages, or a combination of both. In a preferred embodiment, clustering and alignment methods are repeated and the parameters that define homologous sequences become more stringent with each repetition of clustering and alignment. For example, one of skill in the art may begin the clustering and alignment method by defining homologous sequences as those that demonstrate a minimum threshold of 85% sequence identity over a 300 base pair region. In subsequent repetitions of clustering and alignment, the definition of homologous sequences may become more stringent, e.g., it may be defined as sequences that demonstrate 90% sequence identity over a 100 base pair region. Such parameters are well known to one of skill in the art. In a more preferred embodiment of the invention, all clusters are manually curated to verify cluster membership. Upon manual curation, and prior to the identification of consensus sequences, some clusters are joined or separated based on homologies well known in the art.

[0033] One of skill in the art will recognize that some of the methods by which the plurality of nucleic acid sequences is obtained may cause the gene coding sequences or EST sequences to contain regions that are not truly contained within the genomic sequences or cDNA sequences from which the gene coding sequences or EST sequences are derived. These regions may include, e.g., portions of the expression vectors used to sequence the gene coding sequences or EST sequences. As such, screening the plurality of nucleic acid sequences for these regions, and similar regions, e.g., low-complexity regions, prior to the clustering and alignment analysis will aid in clustering and aligning homologous gene coding sequences and/or EST sequences. One of skill in the art will recognize that masking vector regions or low-complexity regions will increase the likelihood that homologous sequences will cluster because they represent single transcripts included in the plurality of nucleic acid sequences multiple times, and not because they contain similar vector regions or low-complexity regions.

[0034] Consensus sequences are generated for singleton clusters containing an exemplar sequence (i.e., only one gene coding sequence or EST sequence), and multi-sequence clusters containing more than one gene coding sequence and/or EST sequence. The consensus sequence for a singleton cluster is simply the sequence of the exemplar sequence. However, a consensus sequence for a multi-sequence cluster is derived after aligning each of the sequences within a multi-sequence cluster, and identifying a consensus nucleotide for each position of the consensus sequence.

[0035] The consensus nucleotide at a particular position of the consensus sequence depends on the nucleotides present at the same position in the clustered and aligned sequences. If the nucleotides at a given position of the alignment are identical for each of the clustered and aligned sequences, then the resulting consensus nucleotide at that position is the nucleotide in common. However, if the nucleotides at a given position of the alignment are different among the clustered and aligned sequences, then the resulting consensus nucleotide at that position is designated with an ambiguous nucleotide code according to International Union of Pure and Applied Chemistry (IUPAC) base representation, which is consistent with the WIPO standard ST.25 (IUPAC-IUB Symbols For Nucleotide Nomenclature: Cornish-Bowden (1985) Nucl. Acids Res. 13:3021-30). These nucleotide differences may be due to variations in the sequences clustered in the multi-sequence clusters and/or the inability to distinguish the correct nucleotide for a particular position, i.e., areas of low homology. Regardless of the cause, nucleotide differences among clustered and aligned gene coding and/or EST sequences are not resolved in the consensus sequence; this prevents biasing probes towards one particular gene coding sequence and/or EST sequence. In other words, consensus sequences containing ambiguous nucleotides may still be used to generate oligonucleotide probes. During probe selection, as described in greater detail below, these areas of low homology are taken into account and oligonucleotides to these regions are excluded.

[0036] In addition to gene coding sequences and EST sequences (e.g., from cells or cell line(s) to be monitored, animals from which the cell line was derived, etc.), it will be clear to one of skill in the art that inclusion of transgene sequences in the alignment and clustering analysis will prove beneficial, especially when the array is used to determine the optimal conditions for expression of the transgene by a cell line. Transgene sequences can include product sequences that code for the recombinant protein of interest and product-related sequences that are often transferred with the product sequence, such as the gene for the resistance marker neomycin. When transgene sequences are included in the clustering and alignment analysis, it may be the case that they will cluster with consensus sequences of the cell line, even if the transgene sequence and cell line are from different animals. However, due to the disparity between gene sequences of different animals, a transgene sequence, or portions thereof, should align by itself. Again, manual curation of all multi-sequence clusters ensures proper sequence membership for all clustering and alignment results. Nonlimiting examples of exemplary transgene sequences are shown in Table 1.

TABLE 1
Exemplary transgenes

| Name | SEQ ID NO |
|---|---|
| Neomycin phosphotransferase II | 1 |
| Internal ribosomal entry site (IRES) | 2 |
| Human bone morphogenetic protein 2A | 3 |
| Hamster dihydrofolate reductase | 4 |
| Human beta-1,6-N-acetylglucosaminyltransferase | 5 |
| Human alpha(1,3)fucosyltransferase | 6 |
| Human antibody against A-beta protein (light chain) | 7 |
| Human antibody against A-beta protein (heavy chain) | 8 |
| Mouse dihydrofolate reductase | 9 |
| Human paired basic amino acid cleaving enzyme (PACE) | 10 |
| Human p-selectin glycoprotein ligand-1 | 11 |
| Human recombinant coagulation factor IX | 12 |
| Human recombinant coagulation factor VIII | 13 |
| (B-domain deleted) | |
| Human soluble interleukin-13 receptor, alpha 2 | 14 |
| Human blood platelet membrane glycoprotein IB-alpha | 15 |
| (N-terminus) | |
| fused to mutated Fc IgG1 | |
| Human soluble TNF receptor-2 p75 | 16 |
| Human antibody against myostatin (light chain) | 17 |
| Human antibody against myostatin (heavy chain) | 18 |

[0037] In one embodiment of the invention, publicly available and predicted gene coding sequences and EST sequences from hamsters (e.g., gene coding sequences and/or EST sequences from Mesocricetus auratus (Golden Hamster), Cricetulus migratorius (Armenian hamster), Cricetulus griseus (Chinese Hamster), the CHO cell line, etc.) are aligned to identify consensus sequences. Exemplary consensus sequences identified by clustering and aligning publicly available and predicted gene coding sequences and EST sequences from hamsters are listed in Table 2 and set forth as SEQ ID NOs: 19-3572. Table 2 provides the SEQ ID NO of each listed sequence, an accession number for each listed sequence, the one or more species from which the consensus sequence was obtained, a header for each consensus sequence, wherein each header includes a qualifier as well as other information for the corresponding sequence, and the nucleotide sequence of each sequence. As demonstrated in Example 3 below, a plurality of the consensus sequences listed in Table 2 were previously undiscovered genes of CHO cells (i.e., have not been sequenced before or shown to be expressed in CHO cells) but the expression of which in CHO cells is now verified, and/or were not previously known to be involved in the survival of cells grown under stressful conditions, transgene expression, and/or production of possible antigens, but of which the downregulation is correlated with survival, increased transgene expression, and/or decreased production of possible antigens. Listed in Tables 2 and 3 and set forth as SEQ ID NOs: 3439-3573 are nonlimiting and exemplary gene sequences that were previously undiscovered but are verifiably expressed by CHO cells. Listed in Tables 2 and 4 and set forth as SEQ ID NOs: 3421-3572 are nonlimiting and exemplary gene sequences demonstrated to be involved in cell survival when cells are cultured under stressful conditions, with increased transgene expression, and/or a lower production of the sialic acid N-glycolylneuraminic acid (NGNA); thus, these sequences may serve as exemplary targets to increase the survival of cells grown under stressful culture conditions, increase transgene expression by gene modified cells, and/or decrease the production of possible human antigens by cells. Also listed in Table 2 are other hamster sequences, i.e., hamster caspase 8, hamster caspase 9, and hamster BCLXL, which are set forth as SEQ ID NOs:3573-3575, respectively. Table 2 also provides a list of control sequences set forth as SEQ ID NOs:3576-3642.

### II) Selecting Oligonucleotide Probes

[0038] Oligonucleotide probes used in this invention comprise nucleotide polymers or analogs and modified forms thereof such that hybridizing to a pool of target nucleic acids occurs in a sequence specific manner under oligonucleotide array hybridization conditions. As used herein, the term “oligonucleotide array hybridization conditions” refers to the temperature and ionic conditions that are normally used in oligonucleotide array hybridization. In many examples, these conditions include 16-hour hybridization at 45° C., followed by at least three 10-minute washes at room temperature. The hybridization buffer comprises 100 mM MES, 1 M [Na+], 20 mM EDTA, and 0.01% Tween 20. The pH of the hybridization buffer can range between 6.5 and 6.7. The wash buffer is 6× SSPET, which contains 0.9 M NaCl, 60 mM NaH2PO4, 6 mM EDTA, and 0.005% Triton X-100. Under more stringent oligonucleotide array hybridization conditions, the wash buffer can contain 100 mM MES, 0.1 M [Na+], and 0.01% Tween 20. See also GENECHIP® EXPRESSION ANALYSIS TECHNICAL MANUAL (701021 rev. 3, Affymetrix, Inc. 2002), which is incorporated herein by reference in its entirety.

[0039] As is known by one of skill in the art, oligonucleotide probes can be of any length. Preferably, oligonucleotide probes of the invention are 20 to 70 nucleotides in length. Most preferably, oligonucleotide probes of the invention are 25 nucleotides in length. In one embodiment, the nucleic acid probes of the present invention have relatively high sequence complexity. In many examples, the probes do not contain long stretches of the same nucleotide. In addition, the probes may be designed such that they do not have a high proportion of G or C residues at the 3′ ends. In another embodiment, the probes do not have a 3′ terminal T residue. Depending on the type of assay or detection to be performed, sequences that are predicted to form hairpins or interstrand structures, such as “primer dimers,” can be either included in or excluded from the probe sequences. In many embodiments, each probe employed in the present invention does not contain any ambiguous base.

[0040] Oligonucleotide probes are made to be specific for (e.g., complementary to (i.e., capable of hybridizing to)) a template sequence. Any part of a template sequence can be used to prepare probes. Multiple probes, e.g., 5, 10, 15, 20, 25, 30, or more, can be prepared for each template sequence. These multiple probes may or may not overlap each other. Overlap among different probes may be desirable in some assays. In many embodiments, the probes for a template sequence have low sequence identities with other template sequences, or the complements thereof. For instance, each probe for a template sequence can have no more than 70%, 60%, 50% or less sequence identity with other template sequences, or the complements thereof. This reduces the risk of undesired cross-hybridization. Sequence identity can be determined using methods known in the art. These methods include, but are not limited to, BLASTN, FASTA, and FASTDB. The Genetics Computer Group (GCG) program, which is a suite of programs including BLASTN and FASTA, can also be used. Preferable sequences for template sequences include, but are not limited to, consensus sequences, transgene sequences, and control sequences (i.e., sequences used to control or normalize for variation between experiments, samples, stringency requirements, and target nucleic acid preparations). Additionally, any subsequence of consensus, transgene and control sequences can be used as a template sequence. In one embodiment of the invention, at least one consensus sequence listed in Table 2 is used as a template sequence. In a preferred embodiment of the invention, at least one consensus sequence listed in Table 3 is used as a template sequence. In another preferred embodiment of the invention, at least one consensus sequence listed in Table 4 is used as a template sequence.

[0041] In one embodiment of the invention, only certain regions (i.e., tiling regions) of consensus, transgene and control sequences are used as template sequences for the oligonucleotide probes used in this invention. One of skill in the art will recognize that protocols that may be used in practicing the invention, i.e., in vitro transcription protocols, often result in a bias toward the 3′-ends of target nucleic acids. Consequently, in one embodiment of the invention, the region of the consensus sequence or transgene sequence closest to the 3′-end of a consensus sequence is most often used as a template for oligonucleotide probes. Generally, if a poly-A signal could be identified, the 1400 nucleotides immediately prior to the end of the consensus or transgene sequences are designated as a tiling region. Alternatively, if a poly-A signal could not be identified, only the last 600 nucleotides of the consensus or transgene sequence are designated as a tiling region. However, it should be noted that the invention is not limited to using only these tiling regions within the consensus, transgene and control sequences as templates for the oligonucleotide probes. Indeed, a tiling region may occur anywhere within the consensus, transgene or control sequences. For example, as described in greater detail below, the tiling region of a control sequence may comprise regions from both the 5′ and 3′-ends of the control sequence. In fact, the entire consensus, transgene or control sequence may be used as a template for oligonucleotide probes. Tiling sequences that may be used for each of the transgene sequences set forth in Table 1; and the consensus sequences, other hamster sequences, and control sequences set forth in Table 2; are listed in Table 5 and are set forth as SEQ ID NOs:3643-7284, where SEQ ID NO:3642+n is an exemplary tiling sequence for SEQ ID NO:n (e.g., SEQ ID NO:3643 may be used as the tiling sequence for SEQ ID NO:1; SEQ ID NO:3661 may be used as the tiling sequence for SEQ ID NO:19; SEQ ID NO:7213 may be used as the tiling sequence for SEQ ID NO:3571; etc.).

[0042] In one embodiment of the invention, an oligonucleotide array is designed to comprise perfect match probes to a plurality of consensus sequences (i.e., consensus sequences for multi-sequence clusters, and consensus sequences for exemplar sequences) identified as described above. In another embodiment, the oligonucleotide array is designed to comprise perfect match probes to both consensus and transgene sequences. It will be apparent to one of skill in the art that inclusion of oligonucleotide probes to transgene sequences will be useful when a cell line is genetically engineered to express a recombinant protein encoded by a transgene sequence, and the purpose of the analysis is to confirm expression of the transgene and determine the level of such expression. In those cases where the transgene is linked in a bicistronic mRNA to a downstream ORF, such as dihydrofolate reductase (DHFR), the level of transgene expression may also be determined from the level of expression of the downstream sequence. In another embodiment of the invention, the oligonucleotide array further comprises control probes that normalize the inherent variation between experiments, samples, stringency requirements, and preparations of target nucleic acids. The composition of each of these types of control probes is described in U.S. Pat. No. 6,040,138, incorporated herein in its entirety by reference. For a more detailed description, the purposes of the control probes are briefly described below.

[0043] It is well known to one of skill in the art that two pools of target nucleic acids individually processed from the same sample can hybridize to two separate but identical oligonucleotide arrays with varying results. The varying results between these arrays are attributed to several factors, such as the intensity of the labeled pool of target nucleic acids and incubation conditions. To control for these variations, normalization control probes can be added to the array. Normalization control probes are oligonucleotides exactly complementary to known nucleic acid sequences spiked into the pool of target nucleic acids. Any oligonucleotide sequence may serve as a normalization control probe; in a preferred embodiment, the normalization control probes are created from a template obtained from an organism other than that from which the cell line being analyzed is derived. In another preferred embodiment, an oligonucleotide array to mammalian sequences will contain normalization oligonucleotide probes to the following genes: bioB, bioC, and bioD from the organism Escherichia coli, cre from the organism Bacteriophage P1, and dap from the organism Bacillus subtilis, or subsequences thereof. The signal intensity received from the normalization control probes are then used to normalize the signal intensities from all other probes in the array. Additionally, when the known nucleic acid sequences are spiked into the pool of target nucleic acids at known and different concentrations for each transcript, a standard curve correlating signal intensity with transcript concentration can be generated, and expression levels for all transcripts represented on the array can be quantified (see, e.g., Hill et al. (2001) Genome Biol. 2(12):research0055.1-0055.13).

[0044] Due to the naturally differing metabolic states between cells, expression of specific target nucleic acids vary from sample to sample. In addition, target nucleic acids may be more prone to degradation in one pool compared to another pool. Consequently, in another embodiment of the invention, the oligonucleotide array further comprises oligonucleotide probes that are exactly complementary to constitutively expressed genes, or subsequences thereof, that reflect the metabolic state of a cell. Nonlimiting examples of these types of genes are beta-actin, transferrin receptor and glyceraldehyde-3-phosphate dehydrogenase (GAPDH).

[0045] In one embodiment of the invention, the pool of target nucleic acids is derived by converting total RNA isolated from the sample into double-stranded cDNA and transcribing the resulting cDNA into complementary RNA (cRNA) using methods described in more detail in the Examples. The RNA conversion protocol is started at the 3′-end of the RNA transcript, and if the process is not allowed to go to completion (if, for example, the RNA is nicked, etc.) the amount of the 3′-end message compared to the 5′-end message will be greater, resulting in a 3′-bias. Additionally, RNA degradation may start at the 5′-end (Jacobs Anderson et al. (1998) EMBO J. 17:1497-506). The use of these methods suggests that control probes that measure the quality of the processing and the amount of degradation of the sample preferably should be included in the oligonucleotide array. Examples of such control probes are oligonucleotides exactly complementary to 3′- and 5′-ends of constitutively expressed genes, such as beta-actin, transferrin receptor and GAPDH, as mentioned above. The resulting 3′ to 5′ expression ratio of a constitutively expressed gene is then indicative of the quality of processing and the amount of degradation of the sample; i.e., a 3′ to 5′ ratio greater than three (3) indicates either incomplete processing or high RNA degradation (Auer et al. (2003) Nat. Genet. 35:292-93). Consequently, in a preferred embodiment of the invention, the oligonucleotide array includes control probes that are complementary to the 3′- and 5′-ends of constitutively expressed genes.

[0046] The quality of the pool of target nucleic acids is not only reflected in the processing and degradation of the target nucleic acids, but also in the origin of the target nucleic acids. Contaminating sequences, such as genomic DNA, may interfere with well-known quantification protocols. Consequently, in a preferred embodiment of the invention, the array further comprises oligonucleotide probes exactly complementary to bacterial genes, ribosomal RNAs, and/or genomic intergenic regions to provide a means to control for the quality of the sample preparation. These probes control for the possibility that the pool of target nucleic acids is contaminated with bacterial DNA, non-mRNA species, and genomic DNA. Exemplary control sequences are set forth as SEQ ID NOs:3576-3642, and are listed in Table 2. As noted above, exemplary tiling sequences for these control sequences are set forth as SEQ ID NOs:7218-7284, and are listed in Table 5.

[0047] In a preferred embodiment of the invention, the oligonucleotide array further comprises control mismatch oligonucleotide probes for each perfect match probe. The mismatch probes control for hybridization specificity. Preferably, mismatch control probes are identical to their corresponding perfect match probes with the exception of one or more substituted bases. More preferably, the substitution(s) occurs at a central location on the probe. For example, where a perfect match probe is 25 oligonucleotides in length, a corresponding mismatch probe will have the identical length and sequence except for a single-base substitution at position 13 (e.g., substitution of a thymine for an adenine, an adenine for a thymine, a cytosine for a guanine, or a guanine for a cytosine). The presence of one or more mismatch bases in the mismatch oligonucleotide probe disallows target nucleic acids that bind to complementary perfect match probes to bind to corresponding mismatch control probes under appropriate conditions. Therefore, mismatch oligonucleotide probes indicate whether the incubation conditions are optimal, i.e., whether the stringency being utilized provides for target nucleic acids binding to only exactly complementary probes present in the array.

[0048] For each template, a set of perfect match probes exactly complementary to subsequences of consensus, transgene, and/or control sequences (or tiling regions thereof) may be chosen using a variety of strategies. It is known to one of skill in the art that each template can provide for a potentially large number of probes. Also known to one of skill in the art, apparent probes are sometimes not suitable for inclusion in the array. This can be due to the existence of similar subsequences in other regions of the genome, which causes probes directed to these subsequences to cross-hybridize and give false signals. Another reason some apparent probes may not be suitable for inclusion in the array is because they may form secondary structures that prevent efficient hybridization. Finally, hybridization of target nucleic acids with (or to) an array comprising a large number of probes requires that each of the probes hybridizes to its specific target nucleic acid sequence under the same incubation conditions.

[0049] An oligonucleotide array may comprise one perfect match probe for a consensus, transgene, or control sequence, or may comprise a probeset (i.e., more than one perfect match probe) for a consensus, transgene, or control sequence. For example, an oligonucleotide array may comprise 1, 5, 10, 25, 50, 100, or more than 100 different perfect match probes for a consensus, transgene or control sequence. In a preferred embodiment of the invention, the array comprises at least 11-150 different perfect match oligonucleotide probes exactly complementary to subsequences of each consensus and transgene sequence. In an even more preferred embodiment, only the most optimal probeset for each template is included. The suitability of the probes for hybridization can be evaluated using various computer programs. Suitable programs for this purpose include, but are not limited to, LaserGene (DNAStar), Oligo (National Biosciences, Inc.), MacVector (Kodak/IBI), and the standard programs provided by the GCG. Any method or software program known in the art may be used to prepare probes for the template sequences of the present invention. For example, oligonucleotide probes may be generated by using Array Designer, a software package provided by TeleChem International, Inc (Sunnyvale, Calif. 94089). Another exemplary algorithm for choosing optimal probesets is described in U.S. Pat. No. 6,040,138.

[0050] As disclosed in U.S. Pat. No. 6,040,138, probeset optimization can involve two rounds of selection. In the first round, only perfect match probes that have high stringency requirements (e.g., perfect match probes that will hybridize only with target nucleic acids that are exactly complementary) are selected. These perfect match probes are selected by hybridizing the oligonucleotide array to a sample containing target nucleic acids having subsequences complementary to the oligonucleotide probes, determining the hybridization intensity between each perfect match probe and its corresponding mismatch probe, and selecting perfect match probes that demonstrate a threshold difference in hybridization intensity compared to their corresponding mismatch probe. One of skill in the art will appreciate that this round of selection will ensure that a target nucleic acid sequence will bind only to a complementary perfect match probe and not the corresponding mismatch probe.

[0051] In the second round, perfect match oligonucleotide probes and corresponding mismatch probes that demonstrate minimal nonspecific binding are selected. Perfect match probes and corresponding mismatch probes are selected for their specificity by hybridizing the oligonucleotide array with a pool of target nucleic acids that does not contain sequences complementary to the probes, and selecting only those probes in which both the probe and its mismatch control show hybridization intensities below a threshold value. One of skill in the art will appreciate that this second round of selection will ensure that each perfect match probe selected (and corresponding mismatch probe) is unique within the array. Thus, for example, even if the transgene sequences were not included in the initial clustering and alignment analysis, the second round of selection will ensure that oligonucleotide probes to the transgene sequences are complementary only to the transgene sequences.

[0052] One of skill in the art will recognize that although the algorithm for oligonucleotide probe selection described in U.S. Pat. No. 6,040,138 will yield a model array of oligonucleotides, it may prove to be extremely costly and time-consuming, especially when a set of perfect match probes must be chosen for a large number of consensus, transgene, and/or control sequences, or tiling regions thereof. Other suitable means to optimize probesets, which will result in a comparable oligonucleotide array, are well known in the art and may be found in, e.g., Lockhart et al. (1996) Nat. Biotechnol. 14:1675-80 and Mei et al. (2003) Proc. Natl. Acad. Sci. USA 100:11237-42.

[0053] The oligonucleotide probes of the present invention can be synthesized using a variety of methods. Examples of these methods include, but are not limited to, the use of automated or high throughput DNA synthesizers, such as those provided by Millipore, GeneMachines, and BioAutomation. In many embodiments, the synthesized probes are substantially free of impurities. In many other embodiments, the probes are substantially free of other contaminants that may hinder the desired functions of the probes. The probes can be purified or concentrated using numerous methods, such as reverse phase chromatography, ethanol precipitation, gel filtration, electrophoresis, or any combination thereof.

[0054] Oligonucleotide probes of the present invention may be used in methods of 1) verifying expression of genes, including previously undiscovered genes and/or transgenes, by a cell or cell line and/or 2) determining genes and related pathways involved with conferring a particular cell phenotype, e.g., increased transgene expression, in a sample of interest. Suitable methods for this purpose include, but are not limited to, oligonucleotide arrays (including bead arrays), Southern blot, Northern blot, PCR, and RT-PCR. A sample of interest can be, without limitation, a food sample, an environmental sample, a pharmaceutical sample, a bacterial culture, a clinical sample, a chemical sample, or a biological sample. Examples of biological samples include, but are not limited to, any body fluid, including blood or any of its components (plasma, serum, etc.), menses, mucous, sweat, tears, urine, feces, saliva, sputum, semen, urogenital secretions, gastric washes, pericardial or peritoneal fluids or washes, a throat swab, pleural washes, ear wax, hair, skin cells, nails, mucous membranes, amniotic fluid, vaginal secretions or any other secretions from the body, spinal fluid, human breath, gas samples containing body odors, flatulence or other gases, any biological tissue or matter, or an extractive or suspension of any of these.

### III) Forming an Oligonucleotide Array

[0055] The methods described above enable an investigator to identify consensus sequences for undiscovered genes in a cell derived from an unsequenced organism, and select probes for that consensus sequence. Thus it is part of the invention that oligonucleotide probes of the present invention can be used to make oligonucleotide arrays that may be used to 1) verify expression of sequences or subsequences of previously undiscovered genes expressed by the cell line and/or 2) determine the involvement in conferring a particular cell phenotype of previously undiscovered genes and/or previously known genes that were not expected to be involved in conferring the particular cell phenotype.

[0056] Generally, an array of the invention directed toward an unsequenced organism comprises a first plurality of oligonucleotide probes, each of which is specific to one of a plurality of template sequences, wherein the plurality of template sequences comprises at least one consensus sequence for a gene expressed by a cell derived from the unsequenced organism. As described above, the at least one consensus sequence may be derived from nucleic acid sequences obtained from two different genera and/or species of the organism. In a preferred embodiment, the unsequenced organism is a hamster. In another embodiment, the at least one consensus sequence is selected from the group consisting of the polynucleotide sequences of SEQ ID NOs:19-3572, SEQ ID NOs:3661-7214, complements thereof, and subsequences thereof.

[0057] In still another embodiment, an oligonucleotide array of the present invention includes at least 2, 3, 4, 5, 10, 20, 50, 100, 200 or more different probes or probesets, each of which is capable of hybridizing to a template sequence selected from the same Table, e.g., a table in this disclosure, e.g., Table 2. These probes or probesets can be positioned in the same or different discrete regions on the oligonucleotide array. As used herein, two polynucleotides, probes, probesets, etc. are “different” if they have different nucleic acid sequences.

[0058] In yet another embodiment, an oligonucleotide array of the present invention includes polynucleotide includes at least 1, 2, 5, 10, 20, 30, 40, 50, 100, 200, 500, 1,000, 2,000, 3,000, or more different probes or probesets, each of which can hybridize under stringent or oligonucleotide array hybridization conditions to a different respective consensus sequence selected from the group consisting of the polynucleotide sequences of SEQ ID NOs:19-3572, SEQ ID NOs:3661-7214, complements thereof, and subsequences thereof.

[0059] The length of each probe employed in the present invention can be selected to achieve the desired hybridization effect. For instance, a probe can include or consist of about 15, 20, 25, 30, 35, 40, 45, 50, 60, 70, 80, 90, 100, 200, 300, 400 or more consecutive nucleotides.

[0060] Multiple probes for the same template sequence can be included in an oligonucleotide array of the present invention. For instance, at least 2, 5, 10, 15, 20, 25, 30 or more different probes can be used for detecting the same sequence. Each of these different probes can be attached to a different respective region on the oligonucleotide array. Alternatively, two or more different probes can be attached to the same discrete region. The concentration of one probe with respect to the other probe or probes in the same discrete region may vary according to the objectives and requirements of the particular experiment. In one embodiment, different probes in the same region are present in approximately equimolar ratio.

[0061] The oligonucleotide arrays of the present invention can also include control probes that can hybridize under stringent or oligonucleotide array hybridization conditions to respective control sequences, or the complements thereof.

[0062] The oligonucleotide arrays of the present invention can further include mismatch probes as controls. In many instances, the mismatch residue in each mismatch probe is located near the center of the probe such that the mismatch is more likely to destabilize the duplex with the target sequence under the hybridization conditions. In one embodiment, each mismatch probe on an oligonucleotide array of the present invention is a perfect mismatch probe, and is stably attached to a discrete region different from that of the corresponding perfect match probe.

[0063] In many embodiments, the oligonucleotide arrays of the present invention include at least one substrate support that has a plurality of discrete regions. The location of each of these discrete regions is either known or determinable. The discrete regions can be organized in various forms or patterns. For instance, the discrete regions can be arranged as an array of regularly spaced areas on a surface of the substrate. Other regular or irregular patterns, such as linear, concentric or spiral patterns, may also be used.

[0064] Oligonucleotide probes may be stably attached to respective discrete regions through covalent or noncovalent interactions. As used herein, an oligonucleotide probe is “stably” attached to a discrete region if the oligonucleotide probe retains its position relative to the discrete region during oligonucleotide array hybridization.

[0065] The oligonucleotide array may be immobilized on a solid-phase support, where each oligonucleotide probe is immobilized to a predefined location on the solid-phase support with methods well known in the art such as, but not limited to, very large-scale immobilized polymer synthesis (VLSIP™) technology. VLSIP™ technology immobilizes each oligonucleotide probe in an array of oligonucleotide probes to a predefined location on a solid-phase support using methods including, but not limited to, light-directed coupling, mechanically directed flow paths, spotting on predefined regions, or any combination thereof. These methods are disclosed in U.S. Pat. Nos. 5,143,854; 5,677,195; 5,384,261; 6,040,138; and Fodor et al. (1991) Science 251: 767-77, all of which are incorporated herein in their entirety by reference. Any method may be used to attach oligonucleotide probes to an oligonucleotide array of the present invention. In one embodiment, oligonucleotide probes are covalently attached to a substrate support by first depositing the oligonucleotide probes to respective discrete regions on a surface of the substrate support and then exposing the surface to a solution of a cross-linking agent, such as glutaraldehyde, borohydride, or other bifunctional agents. In another embodiment, oligonucleotide probes are covalently bound to a substrate via an alkylamino-linker group or by coating a substrate (e.g., a glass slide) with polyethylenimine followed by activation with cyanuric chloride for coupling the polynucleotides. In yet another embodiment, oligonucleotide probes are covalently attached to an oligonucleotide array through polymer linkers. The polymer linkers may improve the accessibility of the probes to their purported targets. In many cases, the polymer linkers do not significantly interfere with the interactions between the probes and their purported targets.

[0066] Oligonucleotide probes may also be stably attached to an oligonucleotide array through noncovalent interactions. In one embodiment, oligonucleotide probes are attached to a substrate support through electrostatic interactions between positively charged surface groups and the negatively charged probes. In another embodiment, a substrate employed in the present invention is a glass slide having a coating of a polycationic polymer on its surface, such as a cationic polypeptide. The oligonucleotide probes are bound to these polycationic polymers. In yet another embodiment, the methods described in U.S. Pat. No. 6,440,723, which is incorporated herein by reference, are used to stably attach oligonucleotide probes to an oligonucleotide array of the present invention.

[0067] Numerous materials may be used to make the substrate support(s) of an oligonucleotide array. Suitable materials include, but are not limited to, glass, silica, ceramics, nylon, quartz wafers, gels, metals, and paper. The substrate supports can be flexible or rigid. In one embodiment, they are in the form of a tape that is wound up on a reel or cassette. An oligonucleotide array can include two or more substrate supports. In many embodiments, the substrate supports are nonreactive with reagents that are used in oligonucleotide array hybridization.

[0068] The surface(s) of a substrate support may be smooth and substantially planar. The surface(s) of a substrate support can also have a variety of configurations, such as raised or depressed regions, trenches, v-grooves, mesa structures, or other regular or irregular configurations. The surface(s) of the substrate may be coated with one or more modification layers. Suitable modification layers include inorganic or organic layers, such as metals, metal oxides, polymers, or small organic molecules. In one embodiment, the surface(s) of the substrate is chemically treated to include groups such as hydroxyl, carboxyl, amine, aldehyde, or sulfhydryl groups.

[0069] The discrete regions on an oligonucleotide array of the present invention may be of any size, shape and density. For instance, they can be squares, ellipsoids, rectangles, triangles, circles, or other regular or irregular geometric shapes, or any portion or combination thereof. In one embodiment, each of the discrete regions has a surface area of less than 10⁻¹ cm², such as less than 10⁻², 10⁻³, 10⁻⁴, 10⁻⁵, 10⁻⁶, or 10⁻⁷ cm². In another embodiment, the spacing between each discrete region and its closest neighbor, measured from center-to-center, is in the range of from about 10 to about 400 μm. The density of the discrete regions may range, for example, between 50 and 50,000 regions/cm².

[0070] A variety of methods may be used to make the oligonucleotide arrays of the present invention. For instance, the probes can be synthesized in a step-by-step manner on a substrate, or can be attached to a substrate in presynthesized forms. Algorithms for reducing the number of synthesis cycles can be used. In one embodiment, an oligonucleotide array of the present invention is synthesized in a combinational fashion by delivering monomers to the discrete regions through mechanically constrained flowpaths. In another embodiment, an oligonucleotide array of the present invention is synthesized by spotting monomer reagents onto a substrate support using an ink jet printer (such as the DeskWriter C manufactured by Hewlett-Packard). In yet another embodiment, oligonucleotide probes are immobilized on an oligonucleotide array by using photolithography techniques.

[0071] Bead arrays and any other type of biochips are also contemplated by the present invention. A bead array comprises a plurality of beads, with each bead stably associated with one or more oligonucleotide probes of the present invention.

[0072] Probes for different genes are typically attached to different respective regions on an oligonucleotide array. In certain applications, probes for different genes are attached to the same discrete region.

### Methods of Using an Array of the Invention

[0073] The nucleic acids arrays of the present invention may be used to 1) verify expression of genes, including previously undiscovered genes and/or transgenes, by a cell or cell line and/or 2) determine genes and related pathways involved with conferring a particular cell phenotype, e.g., increased transgene expression, in a sample of interest. Numerous protocols are available for performing oligonucleotide array analysis. Exemplary protocols include, but are not limited to, those described in GENECHIP® EXPRESSION ANALYSIS TECHNICAL MANUAL (701021 rev. 3, Affymetrix, Inc. 2002). Briefly, such methods comprises the steps of preparing target nucleic acids (which may be RNA or DNA (e.g., genomic DNA, cDNA, etc.)) from a sample of interest, forming a hybridization profile by incubating target nucleic acids with an array, and detecting the hybridization profile (which may or may not include evaluating the hybridization profile). Each of these steps is discussed below. A skilled artisan will recognize that target nucleic acids may not need to be prepared before being used to form a hybridization profile, e.g., already prepared target nucleic acids may be received by an investigator.

### I) Preparation of Pool of Target Nucleic Acids

[0074] One of skill in the art will recognize that because the above-identified consensus and transgene sequences are derived from known and predicted gene coding sequences, the pool of target nucleic acids (i.e., mRNA or nucleic acids derived therefrom) should reflect the transcription of these regions. Consequently, any biological sample may be used as a source of target nucleic acids. The pool of target nucleic acids can be total RNA, or any nucleic acid derived therefrom, including each of the single strands of cDNA made by reverse transcription of the mRNA, or RNA transcribed from the double-stranded cDNA intermediate. Methods of isolating target nucleic acids for analysis with an oligonucleotide array, such as phenol-chloroform extraction, ethanol precipitation, magnetic bead separation, or silica-gel affinity purification, are well known to one of skill in the art.

[0075] For example, various methods are available for isolating or enriching RNA. These methods include, but are not limited to, RNeasy kits (provided by Qiagen), MasterPure kits (provided by Epicentre Technologies), charge-switch technology (see, e.g., U.S. Published Patent Application Nos. 2003/0054395 and 2003/0130499), and TRIZOL (provided by Gibco BRL). The RNA isolation protocols provided by Affymetrix can also be employed in the present invention. See, e.g., GENECHIP® EXPRESSION ANALYSIS TECHNICAL MANUAL (701021 rev. 3, Affymetrix, Inc. 2002).

[0076] In one example, mRNA is enriched by removing rRNA. Different methods are available for eliminating or reducing the amount of rRNA in a sample. For instance, rRNA can be removed by enzyme digestions. According to the latter method, rRNAs are first amplified using reverse transcriptase and specific primers to produce cDNA. The rRNA is allowed to anneal with the cDNA. The sample is then treated with RNAase H, which specifically digests RNA within an RNA:DNA hybrid.

[0077] Target nucleic acids may be amplified before incubation with an oligonucleotide array. Suitable amplification methods, including, but not limited to, reverse transcription-polymerase chain reaction, ligase chain reaction, self-sustained sequence replication, and in vitro transcription, are well known in the art. It should be noted that oligonucleotide probes are chosen to be complementary to target nucleic acids. Therefore, if an antisense pool of target nucleic acids is provided (as is often the case when target nucleic acids are amplified by in vitro transcription), the oligonucleotide probes should correspond with subsequences of the sense complement. Conversely, if the pool of target nucleic acids is sense, the oligonucleotide array should be complementary (i.e., antisense) to them. Finally, if target nucleic acids are double-stranded, oligonucleotide probes can be sense or antisense.

[0078] The present invention involves detecting the hybridization intensity between target nucleic acids and complementary oligonucleotide probes. To accomplish this, target nucleic acids may be attached directly or indirectly with appropriate and detectable labels. Direct labels are detectable labels that are directly attached to or incorporated into target nucleic acids. Indirect labels are attached to polynucleotides after hybridization, often by attaching to a binding moiety that was attached to the target nucleic acids prior to hybridization. Such direct and indirect labels are well known in the art. In a preferred embodiment of the invention, target nucleic acids are detected using the biotin-streptavidin-PE coupling system, where biotin is incorporated into target nucleic acids and hybridization is detected by the binding of streptavidin-PE to biotin.

[0079] Target nucleic acids may be labeled before, during or after incubation with an oligonucleotide array. Preferably, the target nucleic acids are labeled before incubation. Labels may be incorporated during the amplification step by using nucleotides that are already labeled (e.g., biotin-coupled dUTP or dCTP) in the reaction. Alternatively, a label may be added directly to the original nucleic acid sample (e.g., mRNA, cDNA) or to the amplification product after the amplification is completed. Means of attaching labels to nucleic acids are well known to those of skill in the art and include, but are not limited to, nick translation, end-labeling, and ligation of target nucleic acids to a nucleic acid linker to join it to a label. Alternatively, several kits specifically designed for isolating and preparing target nucleic acids for microarray analysis are commercially available, including, but not limited to, the GeneChip® IVT Labeling Kit (Affymetrix, Santa Clara, Calif.) and the Bioarray™ High Yield™ RNA Transcript Labeling Kit with Fluorescein-UTP for Nucleic Acid Arrays (Enzo Life Sciences, Inc., Farmingdale, N.Y.).

[0080] Polynucleotides can be fragmented before being labeled with detectable moieties. Exemplary methods for fragmentation include, but are not limited to, heat or ion-mediated hydrolysis.

II) Incubation of Target Nucleic Acids with an Array to Form a Hybridization Profile

[0081] Incubation reactions can be performed in absolute or differential hybridization formats. In the absolute hybridization format, polynucleotides derived from one sample are hybridized to the probes in an oligonucleotide array. Signals detected after the formation of hybridization complexes correlate to the polynucleotide levels in the sample. In the differential hybridization format, polynucleotides derived from two samples are labeled with different labeling moieties. A mixture of these differently labeled polynucleotides is added to an oligonucleotide array. The oligonucleotide array is then examined under conditions in which the emissions from the two different labels are individually detectable. In one embodiment, the fluorophores Cy3 and Cy5 (Amersham Pharmacia Biotech, Piscataway, N.J.) are used as the labeling moieties for the differential hybridization format.

[0082] In the present invention, the incubation conditions should be such that target nucleic acids hybridize only to oligonucleotide probes that have a high degree of complementarity. In a preferred embodiment, this is accomplished by incubating the pool of target nucleic acids with an oligonucleotide array under a low stringency condition to ensure hybridization, and then performing washes at successively higher stringencies until the desired level of hybridization specificity is reached. In other embodiments, target nucleic acids are incubated with an array of the invention under stringent or well-known oligonucleotide array hybridization conditions. In many examples, these oligonucleotide array hybridization conditions include 16-hour hybridization at 45° C., followed by at least three 10-minute washes at room temperature. The hybridization buffer comprises 100 mM MES, 1 M [Na⁺], 20 mM EDTA, and 0.01% Tween 20. The pH of the hybridization buffer can range between 6.5 and 6.7. The wash buffer is 6× SSPET, which contains 0.9 M NaCl, 60 mM NaH₂PO₄, 6 mM EDTA, and 0.005% Triton X-100. Under more stringent oligonucleotide array hybridization conditions, the wash buffer can contain 100 mM MES, 0.1 M [Na⁺], and 0.01% Tween 20. See also GENECHIP® EXPRESSION ANALYSIS TECHNICAL MANUAL (701021 rev. 3, Affymetrix, Inc. 2002), which is incorporated herein by reference in its entirety.

### III) Detecting Methods

[0083] Methods used to detect the hybridization profile of target nucleic acids with oligonucleotide probes are well known in the art. In particular, means of detecting and recording fluorescence of each individual target nucleic acid-oligonucleotide probe hybrid have been well established and are well known in the art, described in, e.g., U.S. Pat. No. 5,631,734, incorporated herein in its entirety by reference. For example, a confocal microscope can be controlled by a computer to automatically detect the hybridization profile of the entire array. Additionally, as a further nonlimiting example, the microscope can be equipped with a phototransducer attached to a data acquisition system to automatically record the fluorescence signal produced by each individual hybrid.

[0084] It will be appreciated by one of skill in the art that evaluation of the hybridization profile is dependent on the composition of the array, i.e., which oligonucleotide probes were included for analysis. For example, where the array includes oligonucleotide probes to consensus sequences only, or consensus sequences and transgene sequences only, (i.e., the array does not include control probes to normalize for variation between experiments, samples, stringency requirements, and preparations of target nucleic acids), the hybridization profile is evaluated by measuring the absolute signal intensity of each location on the array. Alternatively, the mean, trimmed mean (i.e., the mean signal intensity of all probes after 2-5% of the probesets with the lowest and highest signal intensities are removed), or median signal intensity of the array may be scaled to a preset target value to generate a scaling factor, which will subsequently be applied to each probeset on the array to generate a normalized expression value for each gene (see, e.g., Affymetrix (2000) Expression Analysis Technical Manual, pp. A5-14). Conversely, where the array further comprises control oligonucleotide probes, the resulting hybridization profile is evaluated by normalizing the absolute signal intensity of each location occupied by a test oligonucleotide probe by means of mathematical manipulations with the absolute signal intensity of each location occupied by a control oligonucleotide probe. Typical normalization strategies are well known in the art, and are included, for example, in U.S. Pat. No. 6,040,138 and Hill et al. (2001) Genome Biol. 2(12): research0055.1-0055.13.

[0085] Signals gathered from oligonucleotide arrays can be analyzed using commercially available software, such as those provide by Affymetrix or Agilent Technologies. Controls, such as for scan sensitivity, probe labeling and cDNA or cRNA quantitation, may be included in the hybridization experiments. The array hybridization signals can be scaled or normalized before being subjected to further analysis. For instance, the hybridization signal for each probe can be normalized to take into account variations in hybridization intensities when more than one array is used under similar test conditions. Signals for individual target nucleic acids hybridized with complementary probes can also be normalized using the intensities derived from internal normalization controls contained on each array. In addition, genes with relatively consistent expression levels across the samples can be used to normalize the expression levels of other genes.

### Applications

[0086] The invention also involves using the above-described oligonucleotide array and related methods to optimize culture conditions for a particular cell line, identify genes (including previously undiscovered genes) and/or gene pathways that confer a particular cell-line phenotype, and determine overall cellular productivity for either intrinsic proteins or extrinsic proteins (e.g., those encoded by transgenes). The oligonucleotide array described above can be used to optimize culture conditions by first establishing a database of hybridization profiles, each of which correlates to a different set of culture conditions. For example, a first sample obtained from cells grown in normal culture conditions can be analyzed using the oligonucleotide array and methods described herein. The resulting hybridization profile will reflect the baseline expression of genes when the particular cell line is grown in normal conditions. A second sample obtained from cells grown under conditions that induce, e.g., a stress response, such as cells grown at a high temperature, can be analyzed using the oligonucleotide array and methods described herein. The resulting hybridization profile from the second sample likely will be different than that obtained from the first sample. A third sample obtained from cells cultured in yet another condition that induces a stress response, such as cells grown in the absence of serum, will result in yet another hybridization profile distinct from those obtained from the first and second samples. The process of obtaining the hybridization profiles of samples from cells grown in different culture conditions can be continued such that a particular hybridization profile will reflect that the cells were grown in a particular culture condition. With such a database, one of skill in the art can readily determine in what culture conditions (e.g., stress-inducing conditions) the cells used in an experiment were grown. Other factors, in addition to temperature, that contribute to stress-inducing culture conditions include, but are not limited to, serum concentration, nutrient concentration, metabolite concentration, pH, lactate concentration, ammonia concentration, oxidation level, sodium butyrate concentration, valeric acid concentration, hexamethylene bisacetamide concentration, cell concentration, cell viability, and recombinant protein concentration in actively growing or stationary cultures.

[0087] In establishing this database, the different genes and genetic pathways that are regulated during different conditions will be elucidated. The array described herein will be particularly useful in identifying previously undiscovered genes or genetic pathways. For example, whereas it is established that changes in the temperature of the culture will generally result in the overexpression of certain known genes (e.g., an increased temperature results in overexpression of certain heat-shock proteins), it is likely that temperature-related stresses will induce/reduce the expression of other genes, including previously undiscovered genes and even perhaps previously known genes not obviously related to stress responses. Analysis of a cell line grown in varying temperatures using the array of oligonucleotides and related methods of this invention will identify these previously known and unknown genes because the oligonucleotide array is designed to include known and previously undiscovered gene coding sequences.

[0088] Similarly, the above methods can be used to identify genes that confer or correlate with a desired phenotype or characteristic. As nonlimiting examples, desired phenotypes or characteristics may be conferred to cells by growing the cells in different temperatures, to a high cell density, to produce a high titer of transgene products with the use of agents such as sodium butyrate, to be in different kinetic phases of growth (e.g., lag phase, exponential growth phase, stationary phase or death phase), and/or to become serum-independent, etc. During the period in which these phenotypes are induced, and/or after these phenotypes are achieved, a pool of target nucleic acid samples can be prepared from the cells and analyzed with the oligonucleotide array to determine and identify which genes demonstrate altered expression in response to a particular stimulus (e.g., temperature, sodium butyrate), and therefore are potentially involved in conferring the desired phenotype or characteristic.

[0089] One of skill in the art will appreciate that the methods and associated oligonucleotide arrays described above can be used not only to measure the success or failure of modifying cell lines with a transgene, but also to increase expression of the transgene. For example, to determine whether a cell line has been successfully engineered to express a transgene, target nucleic acids can be prepared from nontransfected and transfected cells. The target nucleic acids can then be hybridized to (e.g., incubated with) an oligonucleotide array that includes probes to transgene sequences. If the resulting hybridization profile demonstrates high signal intensities at the locations of the probes to transgene sequences, the cells have been successfully engineered. If the signal intensities at these locations are low, the cells were either unsuccessfully engineered, or they were successfully engineered but were grown in culture conditions unfavorable to transgene expression. By comparing the resulting hybridization profile with established hybridization profiles that reflect the nature of the culture conditions, it can be determined whether the cells were successfully engineered but grown in suboptimal culture conditions, and the culture conditions can be subsequently changed to increase the expression of the transgene. In another embodiment of the invention, target nucleic acid samples are prepared from transfected cells expressing different levels of the transgene, or grown in different conditions that increase gene expression, and analyzed with the oligonucleotide array to identify specific genes and related genetic pathways that correlate to or confer high transgene expression. The identified genes and related pathways can then be manipulated to induce cell lines to express higher levels of the transgene.

[0090] The oligonucleotide arrays of the present invention may also be used to identify or evaluate agents capable of conferring a particular cell phenotype. Any compound-screening method may be used in the present invention. These methods typically include the steps of (1) contacting a molecule of interest with a culture comprising the cell of interest, or administrating the molecule of interest to an animal comprising the cell of interest; and (2) hybridizing nucleic acid molecules prepared from the culture or animal model to an oligonucleotide array of the present invention. Changes in the hybridization signals in the presence of the molecule of interest compared to that in the absence of the molecule can be used to determine the effect of the molecule on the cell of interest. Any type of agent can be evaluated according to the present invention, such as, but not limited to, small molecules, antibodies, peptides, or peptide mimetics.

[0091] The methods disclosed herein of making and using oligonucleotide arrays in the optimization of cell line culture conditions and transgene expression may be used for cells from a variety of organisms, including, but not limited to, bacteria, plants, fungi, and animals (the latter including, but not limited to, insects and mammals). As such, embodiments of the invention include methods of making oligonucleotide arrays comprising identifying consensus sequences for known and previously undiscovered genes of, for example, Escherichia coli, Spodoptera frugiperda, Nicotiana sp., Zea maize, Lemna sp., Saccharomyces sp., Pichia sp., Schizosaccharomyces sp., Chinese Hamster Ovary (CHO) cells, and baby hamster kidney (BHK) cells. Other embodiments of the invention include oligonucleotide arrays comprising oligonucleotide probes complementary to consensus sequences for known and previously undiscovered genes of, for example, Escherichia coli, Spodoptera frugiperda, Nicotiana sp., Zea maize, Lemna sp., Saccharomyces sp., Pichia sp., Schizosaccharomyces sp., CHO cells, and BHK cells. Embodiments of the invention also include methods of using oligonucleotide arrays complementary to consensus sequences for known and previously undiscovered genes of, for example, Escherichia coli, Spodoptera frugiperda, Nicotiana sp., Zea maize, Lemna sp., Saccharomyces sp., Pichia sp., Schizosaccharomyces sp., CHO cells, and BHK cells. The above list of organisms and cell lines are meant only to provide nonlimiting examples. As such, oligonucleotide arrays comprising oligonucleotide probes to consensus sequences for known and previously undiscovered genes of any organism, and methods of making and using these arrays, are within the scope of the invention.

### Isolated Polynucleotides

[0092] In one embodiment of the invention, the inventors aligned gene coding sequences and EST sequences obtained from hamsters, e.g., Cricetulus griseus, Cricetulus migratorius, Mesocricetus auratus, etc., and hamster cell lines, e.g., the CHO cell line, to identify consensus sequences for known and previously undiscovered genes of the CHO cell line (see Example 1.2 and Table 2). Also, the inventors generated perfect match and mismatch probesets for each consensus sequence and, in addition to control probesets, generated an array of all oligonucleotide probes (See Example 1.3). Use of the oligonucleotide array then verified expression of a subset of previously undiscovered gene sequences by CHO cells and identified a second subset of gene sequences that may be used as novel targets to confer a particular cell phenotype, both of which are subsets of the consensus sequences (Table 2). Additionally, use of the oligonucleotide array confirmed the expression of another hamster gene, caspase 8, which was previously undiscovered. Accordingly, the present invention provides polynucleotide sequences (or subsequences) of genes that are newly discovered to be expressed by CHO cells. The invention also provides sequences (or subsequences) of genes that may be used as targets to effect a cell phenotype, particularly a phenotype characterized by increased and efficient production of a recombinant transgene.

[0093] Accordingly, the present invention provides novel isolated and purified polynucleotides that are either or both 1) previously undiscovered gene sequences verifiably expressed by CHO cells and 2) sequences involved in regulating a cell phenotype, e.g., transgene expression (and thus may be used as novel targets to increase transgene productivity). It is part of the invention to provide inhibitory polynucleotides to the novel isolated and purified polynucleotides of the invention, particularly to polynucleotides involved in regulating a cell phenotype (e.g., may be used as targets to increase transgene productivity); such inhibitory polynucleotides may be used as antagonists to such previously undiscovered genes.

[0094] Thus, the invention provides each purified and isolated polynucleotide sequence selected from Table 2 that is, or is part of, a previously undiscovered gene (i.e., a gene that had not been sequenced and/or shown to be expressed by CHO cells) and is verifiably expressed by CHO cells, herein designated a “novel CHO sequence.” Exemplary, but nonlimiting, novel CHO sequences are listed in Table 3. Preferred DNA sequences of the invention include genomic and cDNA sequences and chemically synthesized DNA sequences. The polynucleotide sequences of cDNAs encoding novel CHO sequences may have and/or consist essentially of a sequence selected from the gene sequences listed in Table 3 and set forth as SEQ ID NOs:3439-3573, and the gene sequences set forth as SEQ ID NOs:7081-7215, SEQ ID NO:3574, and SEQ ID NO:7216.

[0095] The invention also provides each purified and isolated polynucleotide sequence selected from Table 2 that is shown to be a suitable target for regulating a CHO cell phenotype, i.e., is differentially expressed by a first population of CHO cells cultured under a first set of conditions compared to a second population of CHO cells cultured under a second set of conditions, herein designated as “differential CHO sequences.” Differential CHO sequences are preferably suitable targets for regulating cell survival under stressful culture conditions, transgene expression by transgene-modified CHO cells, and/or production of potential antigens, e.g., N-glycolylneuraminic acid (NGNA). For example, in a nonlimiting preferred embodiment, a differential CHO sequence may have and/or consist essentially of a sequence selected from the gene sequences listed in Table 4 and set forth as SEQ ID NOs:3421-3572 and the gene sequences set forth as SEQ ID NOs:7063-7214. A skilled artisan will recognize that the differential CHO sequences of the invention may include novel CHO sequences, known gene sequences that are attributed with a function that is, or was, not obviously involved in transgene expression, and known sequences that previously had no known function but may now be known to function as targets in regulating a CHO cell phenotype.

[0096] Polynucleotides of the present invention also include polynucleotides that hybridize under stringent conditions to novel and/or differential CHO sequences, or complements thereof, and/or encode polypeptides that retain substantial biological activity of polypeptides encoded by novel and/or differential CHO sequences of the invention. Polynucleotides of the present invention also include continuous portions of novel and/or differential CHO sequences comprising at least 21 consecutive nucleotides.

[0097] Polynucleotides of the present invention also include polynucleotides that encode any of the amino acid sequences encoded by the polynucleotides as described above, or continuous portions thereof, and that differ from the polynucleotides described above only due to the well-known degeneracy of the genetic code.

[0098] The isolated polynucleotides of the present invention may be used as hybridization probes (e.g., as an oligonucleotide array, as described above) and primers to identify and isolate nucleic acids having sequences identical to, or similar to, those encoding the disclosed polynucleotides. Hybridization methods for identifying and isolating nucleic acids include polymerase chain reaction (PCR), Southern hybridization, and Northern hybridization, and are well known to those skilled in the art.

[0099] Hybridization reactions can be performed under conditions of different stringencies. The stringency of a hybridization reaction includes the difficulty with which any two nucleic acid molecules will hybridize to one another. Preferably, each hybridizing polynucleotide hybridizes to its corresponding polynucleotide under reduced stringency conditions, more preferably stringent conditions, and most preferably highly stringent conditions. Examples of stringency conditions are shown in Table A below: highly stringent conditions are those that are at least as stringent as, for example, conditions A-F; stringent conditions are at least as stringent as, for example, conditions G-L; and reduced stringency conditions are at least as stringent as, for example, conditions M-R.

TABLE A

| | Poly- | | Hybridization | |
|---|---|---|---|---|
| Stringency | nucleotide | Hybrid | Temperature and | Wash Temperature |
| Condition | Hybrid | Length (bp)¹ | Buffer² | and Buffer² |
| A | DNA:DNA | >50 | 65° C.; 1X SSC -or- | 65° C.; 0.3X SSC |
| | | | 42° C.; 1X SSC, 50% | |
| | | | formamide | |
| B | DNA:DNA | <50 | T_{B}*; 1X SSC | T_{B}*; 1X SSC |
| C | DNA:RNA | >50 | 67° C.; 1X SSC -or- | 67° C.; 0.3X SSC |
| | | | 45° C.; 1X SSC, 50% | |
| | | | formamide | |
| D | DNA:RNA | <50 | T_{D}*; 1 × SSC | T_{D}*; 1X SSC |
| E | RNA:RNA | >50 | 70° C.; 1X SSC | 70° C.; O.3xSSC |
| | | | -or- | |
| | | | 50° C.; 1X SSC, 50% | |
| | | | formamide | |
| F | RNA:RNA | <50 | T_{F}*; 1X SSC | T_{f}*; X SSC |
| G | DNA:DNA | >50 | 65° C.; 4X SSC | 65° C.; 1X SSC |
| | | | -or- | |
| | | | 42° C.; 4X SSC, 50% | |
| | | | formamide | |
| H | DNA:DNA | <50 | T_{H}*; 4X SSC | T_{H}*; 4X SSC |
| I | DNA:RNA | >50 | 67° C.; 4X SSC | 67° C.; 1X SSC |
| | | | -or- | |
| | | | 45° C.; 4X SSC, 50% | |
| | | | formamide | |
| J | DNA:RNA | <50 | T_{J}*; 4X SSC | T_{J}*; 4X SSC |
| K | RNA:RNA | >50 | 70° C.; 4X SSC | 67° C.; 1X SSC |
| | | | -or- | |
| | | | 50° C.; 4X SSC, 50% | |
| | | | formamide | |
| L | RNA:RNA | <50 | T_{L}*; 2X SSC | T_{L}*; 2X SSC |
| M | DNA:DNA | >50 | 50° C.; 4X SSC | 50° C.; 2X SSC |
| | | | -or- | |
| | | | 40° C.; 6X SSC, 50% | |
| | | | formamide | |
| N | DNA:DNA | <50 | T_{N}*; 6X SSC | T_{N}*; 6X SSC |
| O | DNA:RNA | >50 | 55° C.; 4X SSC | 55° C.; 2X SSC |
| | | | -or- | |
| | | | 42° C.; 6X SSC, 50% | |
| | | | formamide | |
| P | DNA:RNA | <50 | T_{P}*; 6X SSC | T_{P}*; 6X SSC |
| Q | RNA:RNA | >50 | 60° C.; 4X SSC -or- | 60° C.; 2X SSC |
| | | | 45° C.; 6X SSC, 50% | |
| | | | formamide | |
| R | RNA:RNA | <50 | T_{R}*; 4X SSC | T_{R}*; 4X SSC |

¹The hybrid length is that anticipated for the hybridized region(s) of the hybridizing polynucleotides. When hybridizing a polynucleotide to a target polynucleotide of unknown sequence, the hybrid length is assumed to be that of the hybridizing polynucleotide. When polynucleotides of known sequence are hybridized, the hybrid length can be determined by aligning the sequences of the polynucleotides and identifying the region or regions of optimal sequence complementarity.
²SSPE (1xSSPE is 0.15 M NaCl, 10 mM NaH₂PO₄, and 1.25 mM EDTA, pH 7.4) can be substituted for SSC (1xSSC is 0.15 M NaCl and 15 mM sodium citrate) in the hybridization and wash buffers; washes are performed for 15 minutes after hybridization is complete.
T_{B}*-T_{R}*: The hybridization temperature for hybrids anticipated to be less than 50 base pairs in length should be 5-10° C. less than the melting temperature (Tₘ) of the hybrid, where Tₘ is determined according to the following equations. For hybrids less than 18 base pairs in length, Tₘ(° C.) = 2(# of A + T bases) + 4(# of G + C bases). For hybrids between 18 and 49 base pairs in length, Tₘ(° C.) = 81.5 + 16.6(log₁₀Na⁺) + 0.41(% G + C) − (600/N), where N is the number of bases in the hybrid, and Na⁺ is the concentration of sodium ions in the hybridization buffer (Na⁺ for 1xSSC = 0.165 M).
Additional examples of stringency conditions for polynucleotide hybridization are provided in Sambrook et al. (1989) Molecular Cloning: A Laboratory Manual, Chs. 9 & 11, Cold Spring Harbor Laboratory Press, Cold Spring Harbor, NY, and Ausubel et al., eds. (1995) Current Protocols in Molecular Biology, Sects. 2.10 & 6.3-6.4, John Wiley & Sons, Inc., herein incorporated by reference.

[0100] Generally, and as stated above, the isolated polynucleotides of the present invention may also be used as hybridization probes and primers to identify and isolate DNAs homologous to the disclosed polynucleotides. These homologs are polynucleotides isolated from different species than those of the disclosed polynucleotides, or within the same species, but with significant sequence similarity to the disclosed polynucleotides. Preferably, polynucleotide homologs have at least 60% sequence identity (more preferably, at least 75% identity; most preferably, at least 90% identity) with the disclosed polynucleotides. Preferably, homologs of the disclosed polynucleotides are those isolated from mammalian species.

[0101] The isolated polynucleotides of the present invention may also be used as hybridization probes and primers to identify cells and tissues that express the polynucleotides of the present invention and the conditions under which they are expressed.

[0102] Additionally, the polynucleotides of the present invention may be used to alter (i.e., regulate (e.g., enhance, reduce, or modify)) the expression of the genes corresponding to the novel and/or differential CHO sequences of the present invention in a cell or organism. These corresponding genes are the genomic DNA sequences of the present invention that are transcribed to produce the mRNAs from which the novel and/or differential CHO polynucleotide sequences of the present invention are derived.

[0103] Altered expression of the novel and/or differential CHO sequences encompassed by the present invention in a cell or organism may be achieved through the use of various inhibitory polynucleotides, such as antisense polynucleotides, ribozymes that bind and/or cleave the mRNA transcribed from the genes of the invention, triplex-forming oligonucleotides that target regulatory regions of the genes, and short interfering RNA that causes sequence-specific degradation of target mRNA (e.g., Galderisi et al. (1999) J. Cell. Physiol. 181:251-57; Sioud (2001) Curr. Mol. Med. 1:575-88; Knauert and Glazer (2001) Hum. Mol. Genet. 10:2243-51; Bass (2001) Nature 411:428-29).

[0104] The inhibitory antisense or ribozyme polynucleotides of the invention can be complementary to an entire coding strand of a gene of the invention, or to only a portion thereof. Alternatively, inhibitory polynucleotides can be complementary to a noncoding region of the coding strand of a gene of the invention. The inhibitory polynucleotides of the invention can be constructed using chemical synthesis and/or enzymatic ligation reactions using procedures well known in the art. The nucleoside linkages of chemically synthesized polynucleotides can be modified to enhance their ability to resist nuclease-mediated degradation, as well as to increase their sequence specificity. Such linkage modifications include, but are not limited to, phosphorothioate, methylphosphonate, phosphoroamidate, boranophosphate, morpholino, and peptide nucleic acid (PNA) linkages (Galderisi et al., supra; Heasman (2002) Dev. Biol. 243:209-14; Mickelfield (2001) Curr. Med. Chem. 8:1157-79). Alternatively, antisense molecules can be produced biologically using an expression vector into which a polynucleotide of the present invention has been subcloned in an antisense (i.e., reverse) orientation.

[0105] In yet another embodiment, the antisense polynucleotide molecule of the invention is an α-anomeric polynucleotide molecule. An a-anomeric polynucleotide molecule forms specific double-stranded hybrids with complementary RNA in which, contrary to the usual 3-units, the strands run parallel to each other. The antisense polynucleotide molecule can also comprise a 2′-o-methylribonucleotide or a chimeric RNA-DNA analogue, according to techniques that are known in the art.

[0106] The inhibitory triplex-forming oligonucleotides (TFOs) encompassed by the present invention bind in the major groove of duplex DNA with high specificity and affinity (Knauert and Glazer, supra). Expression of the genes of the present invention can be inhibited by targeting TFOs complementary to the regulatory regions of the genes (i.e., the promoter and/or enhancer sequences) to form triple helical structures that prevent transcription of the genes.

[0107] In one embodiment of the invention, the inhibitory polynucleotides of the present invention are short interfering RNA (siRNA) molecules. These siRNA molecules are short (preferably 19-25 nucleotides; most preferably 19 or 21 nucleotides), double-stranded RNA molecules that cause sequence-specific degradation of target mRNA. This degradation is known as RNA interference (RNAi) (e.g., Bass (2001) Nature 411:428-29). Originally identified in lower organisms, RNAi has been effectively applied to mammalian cells and has recently been shown to prevent fulminant hepatitis in mice treated with siRNA molecules targeted to Fas mRNA (Song et al. (2003) Nat. Med. 9:347-51). In addition, intrathecally delivered siRNA has recently been reported to block pain responses in two models (agonist-induced pain model and neuropathic pain model) in the rat (Dorn et al. (2004) Nucleic Acids Res. 32(5):e49).

[0108] The siRNA molecules of the present invention can be generated by annealing two complementary single-stranded RNA molecules together (one of which matches a portion of the target mRNA) (Fire et al., U.S. Pat. No. 6,506,559) or through the use of a single hairpin RNA molecule that folds back on itself to produce the requisite double-stranded portion (Yu et al. (2002) Proc. Natl. Acad. Sci. USA 99:6047-52). The siRNA molecules can be chemically synthesized (Elbashir et al. (2001) Nature 411:494-98) or produced by in vitro transcription using single-stranded DNA templates (Yu et al., supra). Alternatively, the siRNA molecules can be produced biologically, either transiently (Yu et al., supra; Sui et al. (2002) Proc. Natl. Acad. Sci. USA 99:5515-20) or stably (Paddison et al. (2002) Proc. Natl. Acad. Sci. USA 99:1443-48), using an expression vector(s) containing the sense and antisense siRNA sequences. Recently, reduction of levels of target mRNA in primary human cells, in an efficient and sequence-specific manner, was demonstrated using adenoviral vectors that express hairpin RNAs, which are further processed into siRNAs (Arts et al. (2003) Genome Res. 13:2325-32).

[0109] The siRNA molecules targeted to the polynucleotides of the present invention can be designed based on criteria well known in the art (e.g., Elbashir et al. (2001) EMBO J. 20:6877-88). For example, the target segment of the target mRNA should begin with AA (preferred), TA, GA, or CA; the GC ratio of the siRNA molecule should be 45-55%; the siRNA molecule should not contain three of the same nucleotides in a row; the siRNA molecule should not contain seven mixed G/Cs in a row; and the target segment should be in the ORF region of the target mRNA and should be at least 75 bp after the initiation ATG and at least 75 bp before the stop codon. siRNA molecules targeted to the polynucleotides of the present invention can be designed by one of ordinary skill in the art using the aforementioned criteria or other known criteria.

[0110] Altered expression of the novel and/or differential CHO genes sequences of the present invention in a cell or organism may also be achieved through the creation of nonhuman transgenic animals into whose genomes polynucleotides of the present invention have been introduced. Such transgenic animals include animals that have multiple copies of a gene (i.e., the transgene) of the present invention. A tissue-specific regulatory sequence(s) may be operably linked to a polynucleotide of present invention to direct its expression to particular cells or a particular developmental stage. In another embodiment, transgenic nonhuman animals can be produced that contain selected systems that allow for regulated expression of the transgene. One example of such a system known in the art is the cre/loxP recombinase system of bacteriophage P1. Methods for generating transgenic animals via embryo manipulation and microinjection, particularly animals such as mice, have become conventional and are well known in the art (e.g., Bockamp et al. (2002) Physiol. Genomics 11:115-32). In preferred embodiments of the invention, the nonhuman transgenic animal comprises at least one novel and/or differential CHO sequence.

[0111] Altered expression of the genes of the present invention in a cell or organism may also be achieved through the creation of animals whose endogenous genes corresponding to the polynucleotides of the present invention have been disrupted through insertion of extraneous polynucleotides sequences (i.e., a knockout animal). The coding region of the endogenous gene may be disrupted, thereby generating a nonfunctional protein. Alternatively, the upstream regulatory region of the endogenous gene may be disrupted or replaced with different regulatory elements, resulting in the altered expression of the still-functional protein. Methods for generating knockout animals include homologous recombination and are well known in the art (e.g., Wolfer et al. (2002) Trends Neurosci. 25:336-40).

[0112] The isolated polynucleotides of the present invention may be operably linked to an expression control sequence such as the pMT2 and pED expression vectors for recombinant production of the polypeptides encoded by the polynucleotides of the invention. General methods of expressing recombinant proteins are well known in the art.

[0113] A number of cell types may act as suitable host cells for recombinant expression of the polypeptides encoded by the polynucleotides of the invention. Mammalian host cells include, but are not limited to, e.g., COS cells, CHO cells, 293 cells, A431 cells, 3T3 cells, CV-1 cells, HeLa cells, L cells, BHK21 cells, HL-60 cells, U937 cells, HaK cells, Jurkat cells, normal diploid cells, cell strains derived from in vitro culture of primary tissue, and primary explants.

[0114] Alternatively, it may be possible to recombinantly produce the polypeptides encoded by polynucleotides of the present invention in lower eukaryotes such as yeast or in prokaryotes. Potentially suitable yeast strains include Saccharomyces cerevisiae, Schizosaccharomyces pombe, Kluyveromyces strains, and Candida strains. Potentially suitable bacterial strains include Escherichia coli, Bacillus subtilis, and Salmonella typhimurium. If the polypeptides are made in yeast or bacteria, it may be necessary to modify them by, e.g., phosphorylation or glycosylation of appropriate sites, in order to obtain functionality. Such covalent attachments may be accomplished using well-known chemical or enzymatic methods.

[0115] The polypeptides encoded by polynucleotides of the present invention may also be recombinantly produced by operably linking the isolated polynucleotides of the present invention to suitable control sequences in one or more insect expression vectors, such as baculovirus vectors, and employing an insect cell expression system. Materials and methods for baculovirus/Sf9 expression systems are commercially available in kit form (e.g., the MaxBac® kit, Invitrogen, Carlsbad, Calif.).

[0116] Following recombinant expression in the appropriate host cells, the polypeptides encoded by polynucleotides of the present invention may then be purified from culture medium or cell extracts using known purification processes, such as gel filtration and ion exchange chromatography. Purification may also include affinity chromatography with agents known to bind the polypeptides encoded by the polynucleotides of the present invention. These purification processes may also be used to purify the polypeptides from natural sources.

[0117] Alternatively, the polypeptides encoded by polynucleotides of the present invention may also be recombinantly expressed in a form that facilitates purification. For example, the polypeptides may be expressed as fusions with proteins such as maltose-binding protein (MBP), glutathione-S-transferase (GST), or thioredoxin (TRX). Kits for expression and purification of such fusion proteins are commercially available from New England BioLabs (Beverly, Mass.), Pharmacia (Piscataway, N.J.), and Invitrogen (Carlsbad, Calif.), respectively. The polypeptides encoded by polynucleotides of the present invention can also be tagged with a small epitope and subsequently identified or purified using a specific antibody to the epitope. A preferred epitope is the FLAG epitope, which is commercially available from Eastman Kodak (New Haven, Conn.).

[0118] The polypeptides encoded by polynucleotides of the present invention may also be produced by known conventional chemical synthesis. Methods for chemically synthesizing the polypeptides encoded by polynucleotides of the present invention are well known to those skilled in the art. Such chemically synthetic polypeptides may possess biological properties in common with the natural, purified polypeptides, and thus may be employed as biologically active or immunological substitutes for the natural polypeptides.

### Screening Assays and Sources of Test Compounds

[0119] The polynucleotides of the present invention, particularly those of differential CHO sequences, may also be used in screening assays to identify pharmacological agents or lead compounds that may be used to regulate the phenotype of CHO cells, e.g., which may be used to increase transgene expression by a transgene-modified CHO cell. For example, different populations of CHO cells can be contacted with one of a plurality of test compounds (e.g., small organic molecules or biological agents), and the expression of at least one differential CHO gene sequence may be compared in untreated samples or in samples contacted with different test compounds to determine whether any of the test compounds provides a substantially modulated (e.g., increased or decreased) level of expression. In a preferred embodiment, the identification of test compounds capable of modulating the activity of at least one differential CHO gene sequence is performed using high-throughput screening assays, such as provided by BIACORE® (Biacore International AB, Uppsala, Sweden), BRET (bioluminescence resonance energy transfer), and FRET (fluorescence resonance energy transfer) assays, as well as ELISA. One of skill in the art will recognize that test compounds capable of decreasing levels of a differential CHO gene sequence(s), particularly a differential CHO gene sequence listed in Table 2, may be an exemplary candidate for increasing transgene expression by CHO cells.

[0120] The test compounds of the present invention may be obtained from a number of sources. For example, combinatorial libraries of molecules are available for screening. Using such libraries, thousands of molecules can be performed for inhibitory activity. Preparation and screening of compounds can be performed as described above or by other methods well known to those of skill in the art. The compounds thus identified can serve as conventional “lead compounds” or can be used as the actual therapeutics.

### EXAMPLES

[0121] The Examples which follow are set forth to aid in the understanding of the invention but are not intended to, and should not be construed to, limit its scope in any way. The Examples do not include detailed descriptions of conventional methods, such as probe selection, real-time polymerase chain reaction (PCR), photolithography, cell culture, RNA quantification or those methods employed in the construction of vectors, the insertion of genes encoding the polypeptides into such vectors and plasmids, the introduction of such vectors and plasmids into host cells, and the expression of polypeptides from such vectors and plasmids in host cells. Such methods are well known to those of ordinary skill in the art.

### Example 1

### Generation of an Oligonucleotide Array Useful for Monitoring Gene Expression by Chinese Hamster Ovary Cells

[0122] Chinese Hamster Ovary (CHO) cells are commonly used for the recombinant production of proteins. Despite the widespread use of CHO cells in the art, only limited sequence analysis of the cell line has been performed, and methods to monitor CHO cell gene expression are not readily available. Consequently, publicly available gene coding sequences from all hamsters, in addition to gene coding sequences from the Chinese hamster, were clustered and aligned to generate consensus sequences. Chinese hamster gene coding sequences and EST sequences were obtained either from publicly available sources or through use of CHO cDNA libraries made by well-known methods in the art.

### Example 1.1

### Generation of CHO cDNA Library

[0123] Generation of a cDNA library is a well-known method in the art. Briefly, a cDNA library is constructed from a source of a pool of mRNA, which is subsequently reverse transcribed into cDNA. The resulting pool of cDNA is then ligated into a population of an appropriate expression vector to form the cDNA library. Well-known methods for efficient cDNA—expression vector ligation, such as tailing, linker/adaptor insertion, and vector priming, are described in the art, e.g., Kriegler, M. P. (1990) Gene Transfer and Expression: A Laboratory Manual, W.H. Freeman and Company, NY, pp. 117-31. Additionally, methods for cDNA library amplification, isolation, and sequencing are also well known in the art.

[0124] One of skill in the art will recognize that the source of mRNA depends on the cell line to be monitored, as described above. It is preferred that the mRNA is isolated from either the cells or cell line(s) to be monitored, or the animal from which the cell line was derived. Additionally, if the mRNA is to be isolated from the cell line to be monitored, it is preferable that that mRNA be isolated from the cell line grown in various culture conditions to increase the possibility of including EST sequences that are involved in cell growth, cell maintenance, and/or transgene production.

[0125] To generate CHO cDNA libraries, mRNA was isolated from cultured CHO cells in both log phase and stationary phase. The libraries containing cDNA inserts within the pBluescriptII vector were normalized to reduce the amount of redundant transcripts (see, e.g., Soares et al. (1994) Proc. Natl. Acad. Sci. USA 91:9228-32; Tanaka et al. (1996) Genomics 35:231-35; Bondaldo et al. (1996) Genome Res. 6:791-806). Aliquots of the libraries were plated to obtain individual cDNA clones. Plasmid DNA from each clone was isolated and sequenced.

### Example 1.2

### Identification of Consensus Sequences

[0126] All hamster sequences, either gene coding sequences publicly available from GenBank or generated with prediction algorithms (1,358 sequences) or EST sequences derived from a CHO cDNA library (4,120 sequences) as generated in Example 1.1, were included in a sequence set to be analyzed by clustering and alignment. In a first step, each sequence (i.e., gene coding or EST sequence) of the sequence set was screened for vector and low-complexity sequences. The vector and low-complexity sequences were masked from each gene coding sequence or EST sequence with a poly-X sequence of the same length, and the remaining sequence was either included for clustering and alignment analysis, or excluded because it did not meet the base pair requirement inherent in the preset definition of homologous sequences, e.g., the remaining sequence was 50 base pairs in length whereas the definition of homologous sequences required at least 100 base pairs. The base pair requirement may be preset by one of skill in the art to remove sequences containing, for example, less than 1-150 bases (after screening).

[0127] The sequence set was analyzed with the clustering and alignment tool CAT (DoubleTwist, Oakland, Calif.), which first masked low-complexity regions and then reduced the redundancy of the sequence set based on user-defined parameters that required the sequences to be 100 or more base pairs in length. The resulting sequence set derived from CAT contained two distinct groups of consensus sequences. The first group was a set of consensus sequences for CAT subclusters containing more than one sequence. Hypothetically, the multi-sequence subclusters represented single transcripts included in the input sequence set numerous times. The second group was a set of exemplar (i.e., singleton) sequences that did not cluster with other CAT subclusters.

[0128] Of an original 5,478 input sequences, 601 sequences were removed as a result of screening. The remaining 4,877 sequences were processed through CAT. Initial clustering was performed at a minimum threshold of ninety percent sequence identity over a 100 base pair region. Sequence alignment was performed with Phrap (University of Washington, Seattle, Wash.) using default alignment criteria. The above cluster and alignment analysis produced 3,553 consensus sequences (601 of the consensus sequences were derived from multi-sequence clusters and 2,952 of the consensus sequences were derived from singleton clusters). The consensus sequences are set forth as SEQ ID NOs:19-3572.

[0129] An example of a multi-sequence subcluster and its corresponding consensus sequence is provided in FIG. 1. Nucleotides 1-300 (SEQ ID NO:7286) of the sequence of ribosomal protein L13 from Chinese Hamster Ovary cells (available from GenBank; Accession no. AB014876) clustered with two expressed sequence tags (SEQ ID NOs:7287 and 7288) obtained from the CHO cDNA library. As shown in FIG. 1, alignment analysis of the three sequences revealed two areas of low complexity and one area of low homology. The two areas of low complexity, as well as an area containing contaminating vector sequence, were masked with a series of X's. The area of low homology is spanned by what is designated in the consensus sequence (SEQ ID NO:499) by a K (position 137) and an R (position 158) (letter designation following traditional IUPAC notation). The resulting consensus sequence was oriented 5′ to 3′ as determined from the original GenBank records of the known genes and/or through the presence of an internal 3′ read generated with the CHO library for the previously undiscovered genes, and used as a template for the selection of oligonucleotide probes (SEQ ID NOs:7289-7300).

### Example 1.3

### Probe Selection

[0130] Tiling regions of (1) consensus sequences identified in Example 1.2 and set forth as SEQ ID NOs:19-3572, (2) transgene sequences including those listed in Table 1 and set forth as SEQ ID NOs:1-18, (3) other hamster sequences set forth as SEQ ID NOs: 3573-3575, and (4) control sequences (set forth as SEQ ID NOs:3576-3642) as described above, were subject to a first stage of probe selection analysis during which every potential 25-mer perfect match oligonucleotide probe was identified for each consensus, transgene and control sequence. The sequences for the tiling regions of the sequences are set forth as SEQ ID NOs:3643-7284, wherein the sequence of SEQ ID NO:3642+n corresponds to the tiling sequence for the sequence set forth in SEQ ID NO:n. In addition, a 25-mer oligonucleotide probe with a single mutation in the 13^{th} position (mismatch) was generated for each perfect match oligonucleotide probe.

[0131] The perfect match and mismatch probes were analyzed for, and scored based on, their stringency requirements and inherent structures. In a second stage of probe selection, probe sequences were determined to be either unique or multiply represented with respect to all other probe sequences identified in the first stage. Finally, probesets for each consensus, transgene and control sequence were created such that each probe in a probeset had a similar characteristic with regard to its score (derived in the first stage of probe selection) and uniqueness (determined in the second stage of probe selection). Four distinct classes of probesets of at least 25-55 perfect match 25-mer oligonucleotide probes were designed for each consensus, transgene and control sequence. Following is a description of the four classes of probesets in the order of suitability for inclusion in the array: 1) probesets consisting of high-scoring, unique probes; 2) probesets consisting of lower-scoring, unique probes; 3) probesets consisting of high-scoring, nonunique probes where every probe can be used for detection of a small set of highly homologous sequences; and 4) probesets consisting of high-scoring, unique and nonunique probes where at least one probe is specific for the identified sequence and the remaining probes in the probeset are common to a small set of highly homologous sequences. If a probeset fell within the first class of probesets, i.e., the probes within the probeset were high-scoring and unique, no probeset within the other three classes of probesets were incorporated into the array design. Finally, if none of the four classes of probesets could be designed for a particular sequence, the array would not contain a probeset for that sequence, and thus, the sequence would not be detectable with the array. As demonstrated in FIG. 1, probes were not generated for areas of low homology, low complexity, or areas containing contaminating vector sequences. All oligonucleotide probes were then arrayed onto a solid phase substrate in a random but known location by photolithography.

### Example 2

### Hybridization of a Pool of Target Nucleic Acids to the Oligonucleotide Array and Detection of the Hybridization Profile

[0132] The following example is applicable to any sample obtained from any cell line cultured in a particular condition. In other words, the protocols described in this example can be used to obtain a hybridization profile for nontransfected cells, cells transfected with a transgene, and nontransfected or transfected cells grown in differing culture conditions.

### Example 2.1

### Preparing a Pool of Target Nucleic Acids

[0133] Using well-known methods in the art, total RNA was isolated from the sample and converted to biotinylated cRNA for hybridization to the oligonucleotide array made in Example 1. Briefly, total RNA was isolated using the RNeasy Kit (Qiagen, Valencia, Calif.) according to the manufacturer's protocol. The isolated total RNA (5 μg) was then annealed to an oligo-dT primer (50 pMoles) in a reaction containing the BAC pool control reagent by incubation at 70° C. for 10 min. The primed RNA was subsequently reverse transcribed into complementary DNA (cDNA) by incubation with 200 units of Superscript RT II™ (Invitrogen, Carlsbad, Calif.) and 0.5 mM each dNTP (Invitrogen) in 1× first-strand buffer at 50° C. for 1 hr. Second-strand synthesis was performed by the addition of 40 units DNA Pol I, 10 units E. coli DNA ligase, 2 units RNase H, 30 μl second-strand buffer (Invitrogen), 3 μl of 10 mM dNTP (2.5 mM each) and dH₂O to a 150 μl final volume and incubation at 15° C. for 2 hours. T4 DNA polymerase (10 units) was then added for an additional 5 min. The reaction was stopped by the addition of 10 μl of 500 mM EDTA. The resulting double-stranded cDNA was purified using a cDNA Sample Cleanup Module (Affymetrix). The cDNA (3 μl) was transcribed in vitro into cRNA by incubation with 1750 units of T7 RNA polymerase and biotinylated rNTPs at 37° C. for 16-20 hrs. Biotinylated rNTPs were used to incorporate biotin into the resulting cRNA. The biotinylated cRNA was then purified using the cRNA Sample Cleanup Module (Affymetrix) according to the manufacturer's protocol, and quantified using a spectrophotometer.

### Example 2.2

### Hybridization of a Pool of Target Nucleic Acids to Oligonucleotide Array

[0134] Biotin-labeled cRNA (2.5 μg) was fragmented for 35 min at 95° C. in 40 μl of 1× Fragmentation Buffer (Affymetrix). The fragmented cRNA was diluted in hybridization fluid [260 μl 1× MES buffer containing 300 ng herring sperm DNA, 300 ng BSA, 6.25 μl of a control oligonucleotide used to align the oligonucleotide array (e.g., Oligo B2, commercially available from Affymetrix, used to align Affymetrix arrays of oligonucleotide probes), and 2.5 μl standard curve reagent (as described in Hill et al. (2000) Science 290:809-12)] and denatured for 5 min at 95° C., followed immediately by incubation for 5 min at 45° C. Insoluble material was removed by a brief centrifugation, and the hybridization mix was added to the oligonucleotide array described in Example 1. Target nucleic acids were allowed to hybridize to complementary oligonucleotide probes by incubation at 45° C. for 16 hrs under continuous rotation at 60 rpm. After incubation, the hybridization fluid was removed and the oligonucleotide array was extensively washed with 6× SSPET and 1× SSPET using protocols known in the art.

### Example 2.3

### Detection and Analysis of the Hybridization Profile Resulting from Hybridizing the Pool of Target Nucleic Acids to the Oligonucleotide Array

[0135] The raw fluorescent intensity value of each gene was measured at a resolution of 3 μm with an Agilent GeneArray Scanner. Microarray Suite (Affymetrix, Santa Clara, Calif.), which uses an algorithm to determine whether a gene is “present” or “absent,” as well as the specific hybridization intensity values of each gene on the array, was used to evaluate the fluorescent data. The expression value for each gene was normalized to frequency values by referral to the expression value of 11 control transcripts of known abundance that were spiked into each hybridization mix according to the procedure of Hill et al. (2001) Genome Biol. 2(12):research0055.1-0055.13 and Hill et al. (2000), Science 290:809-12, both of which are incorporated herein in their entirety by reference. The frequency of each gene was calculated and represents a value equal to the total number of individual gene transcripts per 10⁶ total transcripts.

[0136] Each condition and time point was represented by at least three biological replicates. Programs known in the art, e.g., GeneExpress 2000 (Gene Logic, Gaithersburg, Md.), were used to analyze the presence or absence of a target sequence and to determine its relative expression level in one cohort of samples (e.g., condition or time point) compared to another sample cohort. A probeset called present in all replicate samples was considered for further analysis. Generally, fold-change values of 2-fold or greater were considered statistically significant if the p-values were less than or equal to 0.05.

### Example 3

### Use of the Oligonucleotide Array to Identify Genes and Related Pathways Involved with a Particular Cell Phenotype

[0137] The identification of genes and related pathways that are involved with one or more particular cell phenotypes (e.g., during a stress response, transgene expression, etc.) can lead to the discovery of genes that were previously undiscovered, e.g., as indicators of a stress-inducing culture condition, involvement with expression of a transgene, etc., respectively. One of skill in the art may identify the genes and related pathways involved in particular cell phenotypes by performing the following:
[0138] 1) creating a plurality of identical oligonucleotide arrays for the cells (as described in Example 1);
[0139] 2) growing a first sample of cells in a first condition that mimics the physiological condition and growing a second sample of cells in a second condition that induces a particular cell phenotype;
[0140] 3) isolating, processing, and hybridizing total RNA from the first sample to a first oligonucleotide array created in step 1 (as described in Example 2);
[0141] 4) isolating, processing, and hybridizing total RNA from the second sample to a second oligonucleotide array created in step 1 (as described in Example 2); and
[0142] 5) comparing the resulting hybridization profiles to identify the sequences that are differentially expressed between the first and second samples.
   The subsequently identified genes and related pathways may then be further manipulated in different ways, including, but not limited to, the following: 1) they may be used as markers for the particular phenotype induced by the second condition; and 2) they may be manipulated to induce the particular phenotype by the cells in the absence of the correlating second condition. In addition, the regulatory elements of the identified genes and related pathways may be used to generate an expression system, e.g., a ‘stress-inducible’ expression system.

[0143] To determine the genes and related pathways involved when CHO cells are grown at a temperature other than the physiological temperature and/or under conditions that promote transgene expression, identical ‘stress’—oligonucleotide arrays were created using the tiling sequences set forth as SEQ ID NOs:3643-7284, i.e., the tiling regions of 1) consensus sequences set forth as SEQ ID NOs:19-3572 generated (see above) from all publicly available hamster sequences and EST sequences isolated from a cDNA library generated with mRNA isolated from CHO cells grown at 37° C. and CHO cells grown at 31° C., 2) transgene sequences set forth as SEQ ID NOs: 1-18, 3) other hamster sequences set forth as SEQ ID NOs:3573-3575, and 4) control sequences set forth as SEQ ID NOs:3576-3642 as template sequences for the selection of oligonucleotide probes. The expression of known and previously undiscovered genes by a CHO cell line modified with soluble IL-13 receptor (cell line A), BDD-FVIII-transfected CHO cells (cell line B) and nontransfected control CHO cells (control cell line), each cell line having a first sample of cells grown at 37° C., and a second sample of cells grown at 31° C., was determined. Each culture was run in triplicate or quadruplicate and, as described in Example 2, the total RNA from the first and second samples of each cell line were separately isolated, processed, and hybridized to a created oligonucleotide array. The resulting hybridization profiles were compared, and 31° C.-inducible genes, i.e., the genes present in each second sample that demonstrate at least a two-fold increase in expression level compared to genes in the first sample (for each of the cell lines) were analyzed further and compared for similarities.

[0144] Most of the differentially expressed sequences were unique for each cell line (cell line A=59 sequences; cell line B=149 sequences, control cell line=60 sequences), although several expressed sequences (10 sequences) were shared among all three cell lines. Of interest were the sequences that were expressed differentially in both sIL-13r-transfected CHO cells and BDD-FVII-transfected CHO cells cultured at 31° C., when respectively compared to sIL-13r-transfected and BDD-FVII-transfected CHO cells cultured at 37° C. (49 sequences). The 10 genes identified as differentially expressed in all three cell lines when cultured at 31° C. compared to when cultured at 37° C. and the 49 genes identified as differentially expressed in both transfected cell lines when cultured at 31° C. compared to when cultured at 37° C. may be involved in and/or contribute to the increased cellular productivity observed at 31° C., and therefore, could be targets for cell line engineering or as a tool to screen and predict cell lines that will respond favorably to lower temperature culture conditions.

[0145] Using the above-described methods and culturing cells under a variety of different culture conditions, the downregulation of expression of 152 individual sequences listed in Table 2 was determined to correlate with growth of the cells in at least one culture condition that promotes cell survival under stressful conditions and/or transgene expression (e.g., culture at a low temperature, culture in the presence of ammonia, culture in highly enriched media, culture with decreased frequency of passaging the cells, etc.). The downregulation of one or more of these genes also correlated with decreased expression of the sialic acid N-glycolylneuraminic acid (NGNA), a potential human antigen. Listed in Table 4 and set forth as SEQ ID NOs:3421-3572 are the genes that are downregulated by transgene-modified cells (and the fold difference of such downregulation) when they are grown at 31° C. compared to when they are grown at 37° C. (Low Temp Data Set), when they are grown in the presence of an additional 40 mM ammonia (NH₄) compared to when they are grown in no additional ammonia (Ammonia Adapted Data Set), when they are grown in highly enriched media for fed batch culture compared to when the cells are grown in media for maintenance cell culture (Fed Batch Adapted Data Set), when they are passaged every 7 days rather than every 3 to 4 days (Extended Culture Adapted Data Set), or when the cells produce less N-glycolylneuraminic acid (NGNA) compared to similar cells that produce more NGNA (NGNA Data Levels Set). Of these sequences, 134 were determined to be previously undiscovered, i.e., novel, in that they have no homology to any known sequences (i.e., have not been sequenced) and/or in that they have not, until now, been shown to be expressed in CHO cells. These sequences are set forth as SEQ ID NOs:3439-3572. In addition, the expression by CHO cells of other novel genes (e.g., Caspase 8 set forth as SEQ ID NO:3573) was also verified.

[0146] The above examples demonstrate the use of an oligonucleotide array created according to the methods set forth in Example 1 to verify expression of transgenes by CHO cells to and identify genes potentially involved in transgene expression. The identified genes represent previously undiscovered genes and/or known genes, predicted genes, or novel ESTs, that were previously unknown to be involved in the induction of transgene expression. Thus they provide novel targets that may be manipulated to increase the production of a transgene.

[0147] Whereas the above examples demonstrate the present invention utilizing the CHO cell line, it should be apparent to one of skill in the art that the present invention is not limited to use with the CHO cell line. One of skill in the art will know that the examples mentioned above will need only slight modifications to make and use an oligonucleotide array to monitor the expression of genes by bacterial, plant, fungal, and animal cell lines. For example, if it is desired to monitor the known and previously undiscovered genes of a bacterial cell line derived from Staphylococcus aureus, one of skill in the art will know that all publicly available coding sequences from all Staphylococcus aureus strains may be clustered and aligned to identify consensus sequences and, subsequently, to make an oligonucleotide array to known and previously undiscovered genes of Staphylococcus aureus, (in a manner similar to Example 1). Furthermore, without undue experimentation, one of skill in the art will be able to modify the protocols described in Example 2 to make them more appropriate for the cell line that is being analyzed. For example, different protocols are required to isolate RNA from bacterial, plant, fungal, and animal cell lines, and the differences in these protocols are well known in the art. It should also be apparent to one of skill in the art that transgene sequences are not limited to those listed in Table 1. Finally, one of skill in the art will also be able, without undue experimentation, to use an oligonucleotide array created as described herein not only to detect and improve the expression of a transgene, but also to quantify, and enhance the quality of, transgene expression. Consequently, the present invention is not limited to the Examples described above, and can be used to make an oligonucleotide array that can be used to optimize the culture conditions of, and/or transgene expression by, any cell line.

The application's sequence listing, which the Patent Office published only in electronic form, follows.

SEQUENCE LISTING (7300 sequences)

SEQ ID NO: 1 - DNA, 856 bp, Unknown
  neomycin phosphotransferase II
gattgccgcgtgtggcctcgaacaccgagcgaccctgcagccaatatgggatcggccattgaacaagatggattgcacgcaggttctccggccgcttgggtggagaggctattcggctatgactgggcacaacagacaatcggctgctctgatgccgccgtgttccggctgtcagcgcaggggcgcccggttctttttgtcaagaccgacctgtccggtgccctgaatgaactgcaggacgaggcagcgcggctatcgtggctggccacgacgggcgttccttgcgcagctgtgctcgacgttgtcactgaagcgggaagggactggctgctattgggcgaagtgccggggcaggatctcctgtcatctcaccttgctcctgccgagaaagtatccatcatggctgatgcaatgcggcggctgcatacgcttgatccggctacctgcccattcgaccaccaagcgaaacatcgcatcgagcgagcacgtactcggatggaagccggtcttgtcgatcaggatgatctggacgaagagcatcaggggctcgcgccagccgaactgttcgccaggctcaaggcgcgcatgcccgacggcgaggatctcgtcgtgacccatggcgatgcctgcttgccgaatatcatggtggaaaatggccgcttttctggattcatcgactgtggccggctgggtgtggcggaccgctatcaggacatagcgttggctacccgtgatattgctgaagagcttggcggcgaatgggctgaccgcttcctcgtgctttacggtatcgccgctcccgattcgcagcgcatcgccttctatcgccttcttgacgagttcttctgaggggatc

SEQ ID NO: 2 - DNA, 554 bp, Unknown
  internal ribosomal entry site (IRES)
gaattctaacgttactggccgaagccgcttggaataaggccggtgtgcgtttgtctatatgttattttccaccatattgccgtcttttggcaatgtgagggcccggaaacctggccctgtcttcttgacgagcattcctaggggtctttcccctctcgccaaaggaatgcaaggtctgttgaatgtcgtgaaggaagcagttcctctggaagcttcttgaagacaaacaacgtctgtagcgaccctttgcaggcagcggaaccccccacctggcgacaggtgcctctgcggccaaaagccacgtgtataagatacacctgcaaaggcggcacaaccccagtgccacgttgtgagttggatagttgtggaaagagtcaaatggctctcctcaagcgtattcaacaaggggctgaaggatgcccagaaggtaccccattgtatgggatctgatctggggcctcggtgcacatgctttacatgtgtttagtcgaggttaaaaaacgtctaggccccccgaaccacggggacgtggttttcctttgaaaaacacgatt

SEQ ID NO: 3 - DNA, 1216 bp, Homo sapiens
aattccgtcgaccatggtggccgggacccgctgtcttctagcgttgctgcttccccaggtcctcctgggcggcgcggctggcctcgttccggagctgggccgcaggaagttcgcggcggcgtcgtcgggccgcccctcatcccagccctctgacgaggtcctgagcgagttcgagttgcggctgctcagcatgttcggcctgaaacagagacccacccccagcagggacgccgtggtgcccccctacatgctagacctgtatcgcaggcactcaggtcagccgggctcacccgccccagaccaccggttggagagggcagccagccgagccaacactgtgcgcagcttccaccatgaagaatctttggaagaactaccagaaacgagtgggaaaacaacccggagattcttctttaatttaagttctatccccacggaggagtttatcacctcagcagagcttcaggttttccgagaacagatgcaagatgctttaggaaacaatagcagtttccatcaccgaattaatatttatgaaatcataaaacctgcaacagccaactcgaaattccccgtgaccagacttttggacaccaggttggtgaatcagaatgcaagcaggtgggaaagttttgatgtcacccccgctgtgatgcggtggactgcacagggacacgccaaccatggattcgtggtggaagtggcccacttggaggagaaacaaggtgtctccaagagacatgttaggataagcaggtctttgcaccaagatgaacacagctggtcacagataaggccattgctagtaacttttggccatgatggaaaagggcatcctctccacaaaagagaaaaacgtcaagccaaacacaaacagcggaaacgccttaagtccagctgtaagagacaccctttgtacgtggacttcagtgacgtggggtggaatgactggattgtggctcccccggggtatcacgccttttactgccacggagaatgcccttttcctctggctgatcatctgaactccactaatcatgccattgttcagacgttggtcaactctgttaactctaagattcctaaggcatgctgtgtcccgacagaactcagtgctatctcgatgctgtaccttgacgagaatgaaaaggttgtattaaagaactatcaggacatggttgtggagggttgtgggtgtcgctagtgagtcgacgga

SEQ ID NO: 4 - DNA, 564 bp, Cricetulus griseus
atggttcgaccgctgaactgcatcgtcgccgtgtcccagaatatgggcatcggcaagaacggagaccttccctggccaatgctcaggaacgaattcaagtacttccaaagaatgaccaccacctcctcagtggaaggtaaacagaacctggtgattatgggccggaaaacctggttctccattcctgagaagaatcgacctttaaaggacagaattaatatagttctcagtagagagctcaaggaaccaccacaaggagctcattttcttgccaaaagtctggacgatgccttaaaacttattgaacaaccagagttggcagataaagtggacatggtttggatagttggaggcagttccgtttacaaggaagccatgaatcagccaggccatctcagactctttgtgagaaggatcatgcaggaatttgaaagtgacacgttcttcccagaaattgatttggagaaatataaacttctcccagagtacccaggggtcctttctgaagtccaggaggaaaaaggcatcaagtataaatttgaagtctatgagaagaaaggctaa

SEQ ID NO: 5 - DNA, 1287 bp, Homo sapiens
atgctgaggacgttgctgcgaaggagacttttttcttatcccaccaaatactactttatggttcttgttttatccctaatcaccttctccgttttaaggattcatcaaaagcctgaatttgtaagtgtcagacacttggagcttgctggggagaatcctagtagtgatattaattgcaccaaagttttacagggtgatgtaaatgaaatccaaaaggtaaagcttgagatcctaacagtgaaatttaaaaagcgccctcggtggacacctgacgactatataaacatgaccagtgactgttcttctttcatcaagagacgcaaatatattgtagaaccccttagtaaagaagaggcggagtttccaatagcatattctatagtggttcatcacaagattgaaatgcttgacaggctgctgagggccatctatatgcctcagaatttctattgcgttcatgtggacacaaaatccgaggattcctatttagctgcagtgatgggcatcgcttcctgttttagtaatgtctttgtggccagccgattggagagtgtggtttatgcatcgtggagccgggttcaggctgacctcaactgcatgaaggatctctatgcaatgagtgcaaactggaagtacttgataaatctttgtggtatggattttcccattaaaaccaacctagaaattgtcaggaagctcaagttgttaatgggagaaaacaacctggaaacggagaggatgccatcccataaagaagaaaggtggaagaagcggtatgaggtcgttaatggaaagctgacaaacacagggactgtcaaaatgcttcctccactcgaaacacctctcttttctggcagtgcctacttcgtggtcagtagggagtatgtggggtatgtactacagaatgaaaaaatccaaaagttgatggagtgggcacaagacacatacagccctgatgagtatctctgggccaccatccaaaggattcctgaagtcccgggctcactccctgccagccataagtatgatctatctgacatgcaagcagttgccaggtttgtcaagtggcagtactttgagggtgatgtttccaagggtgctccctacccgccctgcgatggagtccatgtgcgctcagtgtgcattttcggagctggtgacttgaactggatgctgcgcaaacaccacttgtttgccaataagtttgacgtggatgttgacctctttgccatccagtgtttggatgagcatttgagacacaaagctttggagacattaaaacactga

SEQ ID NO: 6 - DNA, 1029 bp, Homo sapiens
atgaataatgctgggcacggccccacccggaggctgcgaggcttgggggtcctggccggggtggctctgctcgctgccctctggctcctgtggctgctggggtcagcccctcggggtaccccggcaccccagcccacgatcaccatccttgtctggcactggcccttcactgaccagcccccagagctgcccagcgacacctgcacccgctacggcatcgcccgctgccacctgagtgccaaccgaagcctgctggccagcgccgacgccgtggtcttccaccaccgcgagctgcagacccggcggtcccacctgcccctggcccagcggccgcgagggcagccctgggtgtgggcctccatggagtctcctagccacacccacggcctcagccacctccgaggcatcttcaactgggtgctgagctaccggcgcgactcggacatctttgtgccctatggccgcctggagccccactgggggccctcgccaccgctgccagccaagagcagggtggccgcctgggtggtcagcaacttccaggagcggcagctgcgtgccaggctgtaccggcagctggcgcctcatctgcgggtggatgtctttggccgtgccaatggacggccactgtgcgccagctgcctggtgcccaccgtggcccagtaccgcttctacctgtcctttgagaactctcagcaccgcgactacattacggagaaattctggcgcaacgcactggtggctggcactgtgccagtggtgctggggcccccacgggccacctatgaggccttcgtgccggctgacgccttcgtgcatgtggatgactttggctcagcccgagagctggcggctttcctcactggcatgaatgagagccgataccaacgcttctttgcctggcgtgacaggctccgcgtgcgactgttcaccgactggcgggaacgtttctgtgccatctgtgaccgctacccacacctaccccgcagccaagtctatgaggaccttgagggttggtttcaggcctga

SEQ ID NO: 7 - DNA, 746 bp, Homo sapiens
atggacatgcgcgtgcccgcccagctgctgggcctgctgatgctgtgggtgtccggctcctccggcgacgtggtgatgacccagtcccccctgtccctgcccgtgacccccggcgagcccgcctccatctcctgcaagtcctcccagtccctgctggactccgacggcaagacctacctgaactggctgctgcagaagcccggccagtccccccagcgcctgatctacctggtgtccaagctggactccggcgtgcccgaccgcttctccggctccggctccggcaccgacttcaccctgaagatctcccgcgtggaggccgaggacgtgggcgtgtactactgctggcagggcacccatttcccccgcaccttcggccagggcaccaaggtggagatcaagcgtactgtggctgcaccatctgtcttcatcttcccgccatctgatgagcagttgaaatctggaactgcctctgttgtgtgcctgctgaataacttctatcccagagaggccaaagtacagtggaaggtggataacgccctccaatcgggtaactcccaggagagtgtcacagagcaggacagcaaggacagcacctacagcctcagcagcaccctgacgctgagcaaagcagactacgagaaacacaaagtctacgcctgcgaagtcacccatcagggcctgagttcaccggtgacaaagagcttcaacaggggagagtgttagagggactagacccggggaat

SEQ ID NO: 8 - DNA, 1407 bp, Homo sapiens
atggagtttgggctgagctggctttttcttgtggctattttaaaaggtgtccagtgtgaggtgcagctgctggagtccggcggcggcctggtgcagcccggcggctccctgcgcctgtcctgcgccgcctccggcttcaccttctccaactacggcatgtcctgggtgcgccaggcccccggcaagggcctggagtgggtggcctccatccgctccggcggcggccgcacctactactccgacaacgtgaagggccgcttcaccatctcccgcgacaactccaagaacaccctgtacctgcagatgaactccctgcgcgccgaggacaccgccgtgtactactgcgtgcgctacgaccactactccggctcctccgactactggggccagggcaccctggtgaccgtgtcctccgcctccaccaagggcccatcggtcttccccctggcaccctcctccaagagcacctctgggggcacagcggccctgggctgcctggtcaaggactacttccccgaaccggtgacggtgtcgtggaactcaggcgccctgaccagcggcgtccacaccttcccggctgtcctacagtcctcaggactctactccctcagcagcgtagtgaccgtgccctccagcagcttgggcacccagacctacatctgcaacgtgaatcacaagcccagcaacaccaaggtggacaagaaagttgagcccaaatcttgtgacaaaactcacacatgcccaccgtgcccagcacctgaactcctggggggaccgtcagtcttcctcttccccccaaaacccaaggacaccctcatgatctcccggacccctgaggtcacatgcgtggtggtggacgtgagccacgaagaccctgaggtcaagttcaactggtacgtggacggcgtggaggtgcataatgccaagacaaagccgcgggaggagcagtacaacagcacgtaccgtgtggtcagcgtcctcaccgtcctgcaccaggactggctgaatggcaaggagtacaagtgcaaggtctccaacaaagccctcccagcccccatcgagaaaaccatctccaaagccaaagggcagccccgagaaccacaggtgtacaccctgcccccatcccgggaggagatgaccaagaaccaggtcagcctgacctgcctggtcaaaggcttctatcccagcgacatcgccgtggagtgggagagcaatgggcagccggagaacaactacaagaccacgcctcccgtgctggactccgacggctccttcttcctctatagcaagctcaccgtggacaagagcaggtggcagcaggggaacgtcttctcatgctccgtgatgcatgaggctctgcacaaccactacacgcagaagagcctctccctgtccccgggtaaatga

SEQ ID NO: 9 - DNA, 564 bp, Mus musculus
atggttcgaccattgaactgcatcgtcgccgtgtcccaaaatatggggattggcaagaacggagacctaccctggcctccgctcaggaacgagttcaagtacttccaaagaatgaccacaacctcttcagtggaaggtaaacagaatctggtgattatgggtaggaaaacctggttctccattcctgagaagaatcgacctttaaaggacagaattaatatagttctcagtagagaactcaaagaaccaccacgaggagctcattttcttgccaaaagtttggatgatgccttaagacttattgaacaaccggaattggcaagtaaagtagacatggtttggatagtcggaggcagttctgtttaccaggaagccatgaatcaaccaggccacctcagactctttgtgacaaggatcatgcaggaatttgaaagtgacacgtttttcccagaaattgatttggggaaatataaacttctcccagaatacccaggcgtcctctctgaggtccaggaggaaaaaggcatcaagtataagtttgaagtctacgagaagaaagactaa

SEQ ID NO: 10 - DNA, 2251 bp, Homo sapiens
gaattcaccatggagctgaggccctggttgctatgggtggtagcagcaacaggaaccttggtcctgctagcagctgatgctcagggccagaaggtcttcaccaacacgtgggctgtgcgcatccctggaggcccagcggtggccaacagtgtggcacggaagcatgggttcctcaacctgggccagatcttcggggactattaccacttctggcatcgaggagtgacgaagcggtccctgtcgcctcaccgcccgcggcacagccggctgcagagggagcctcaagtacagtggctggaacagcaggtggcaaagcgacggactaaacgggacgtgtaccaggagcccacagaccccaagtttcctcagcagtggtacctgtctggtgtcactcagcgggacctgaatgtgaaggcggcctgggcgcagggctacacagggcacggcattgtggtctccattctggacgatggcatcgagaagaaccacccggacttggcaggcaattatgatcctggggccagttttgatgtcaatgaccaggaccctgacccccagcctcggtacacacagatgaatgacaacaggcacggcacacggtgtgcgggggaagtggctgcggtggccaacaacggtgtctgtggtgtaggtgtggcctacaacgcccgcattggaggggtgcgcatgctggatggcgaggtgacagatgcagtggaggcacgctcgctgggcctgaaccccaaccacatccacatctacagtgccagctggggccccgaggatgacggcaagacagtggatgggccagcccgcctcgccgaggaggccttcttccgtggggttagccagggccgaggggggctgggctccatctttgtctgggcctcggggaacgggggccgggaacatgacagctgcaactgcgacggctacaccaacagtatctacacgctgtccatcagcagcgccacgcagtttggcaacgtgccgtggtacagcgaggcctgctcgtccacactggccacgacctacagcagtggcaaccagaatgagaagcagatcgtgacgactgacttgcggcagaagtgcacggagtctcacacgggcacctcagcctctgcccccttagcagccggcatcattgctctcaccctggaggccaataagaacctcacatggcgggacatgcaacacctggtggtacagacctcgaagccagcccacctcaatgccaacgactgggccaccaatggtgtgggccggaaagtgagccactcatatggctacgggcttttggacgcaggcgccatggtggccctggcccagaattggaccacagtggccccccagcggaagtgcatcatcgacatcctcaccgagcccaaagacatcgggaaacggctcgaggtgcggaagaccgtgaccgcgtgcctgggcgagcccaaccacatcactcggctggagcacgctcaggcgcggctcaccctgtcctataatcgccgtggcgacctggccatccacctggtcagccccatgggcacccgctccaccctgctggcagccaggccacatgactactccgcagatgggtttaatgactgggccttcatgacaactcattcctgggatgaggatccctctggcgagtgggtcctagagattgaaaacaccagcgaagccaacaactatgggacgctgaccaagttcaccctcgtactctatggcaccgcccctgaggggctgcccgtacctccagaaagcagtggctgcaagaccctcacgtccagtcaggcctgtgtggtgtgcgaggaaggcttctccctgcaccagaagagctgtgtccagcactgccctccaggcttcgccccccaagtcctcgatacgcactatagcaccgagaatgacgtggagaccatccgggccagcgtctgcgccccctgccacgcctcatgtgccacatgccaggggccggccctgacagactgcctcagctgccccagccacgcctccttggaccctgtggagcagacttgctcccggcaaagccagagcagccgagagtccccgccacagcagcagccacctcggctgcccccggaggtggaggcggggcaacggctgcgggcagggctgctgccctcacacctgcctgagtgatgagcccactgcccaccccctcaagccaatcccctccttgggcactttttaattcaccaaagtatttttttatctgtcgactctagacccgggg

SEQ ID NO: 11 - DNA, 942 bp, Homo sapiens
atgcctctgcaactcctcctgttgctgatcctactgggccctggcaacagcttgcagctgtgggacacctgggcagatgaagccgagaaagccttgggtcccctgcttgcccgggaccggagacaggccaccgaatatgagtacctagattatgatttcctgccagaaacggagcctccagaaatgctgaggaacagcactgacaccactcctctgactgggcctggaacccctgagtctaccactgtggagcctgctgcgcggccgcacacatgcccaccgtgcccagcacctgaagccctgggggcaccgtcagtcttcctcttccccccaaaacccaaggacaccctcatgatctcccggacccctgaggtcacatgcgtggtggtggacgtgagccacgaagaccctgaggtcaagttcaactggtacgtggacggcgtggaggtgcataatgccaagacaaagccgcgggaggagcagtacaacagcacgtaccgtgtggtcagcgtcctcaccgtcctgcaccaggactggctgaatggcaaggagtacaagtgcaaggtctccaacaaagccctcccagtccccatcgagaaaaccatctccaaagccaaagggcagccccgagaaccacaggtgtacaccctgcccccatcccgggaggagatgaccaagaaccaggtcagcctgacctgcctggtcaaaggcttctatcccagcgacatcgccgtggagtgggagagcaatgggcagccggagaacaactacaagaccacgcctcccgtgctggactccgacggctccttcttcctctatagcaagctcaccgtggacaagagcaggtggcagcaggggaacgtcttctcatgctccgtgatgcatgaggctctgcacaaccactacacgcagaagagcctctccctgtccccgggtaaatga

SEQ ID NO: 12 - DNA, 2458 bp, Homo sapiens
ctgcagaggcctctagaatctgctagcaaaggttatgcagcgcgtgaacatgatcatggcagaatcaccaggcctcatcaccatctgccttttaggatatctactcagtgctgaatgtacagtttttcttgatcatgaaaacgccaacaaaattctgaatcggccaaagaggtataattcaggtaaattggaagagtttgttcaagggaaccttgagagagaatgtatggaagaaaagtgtagttttgaagaagcacgagaagtttttgaaaacactgaaagaacaactgaattttggaagcagtatgttgatggagatcagtgtgagtccaatccatgtttaaatggcggcagttgcaaggatgacattaattcctatgaatgttggtgtccctttggatttgaaggaaagaactgtgaattagatgtaacatgtaacattaagaatggcagatgcgagcagttttgtaaaaatagtgctgataacaaggtggtttgctcctgtactgagggatatcgacttgcagaaaaccagaagtcctgtgaaccagcagtgccatttccatgtggaagagtttctgtttcacaaacttctaagctcacccgtgctgaggctgtttttcctgatgtggactatgtaaattctactgaagctgaaaccattttggataacatcactcaaagcacccaatcatttaatgacttcactcgggttgttggtggagaagatgccaaaccaggtcaattcccttggcaggttgttttgaatggtaaagttgatgcattctgtggaggctctatcgttaatgaaaaatggattgtaactgctgcccactgtgttgaaactggtgttaaaattacagttgtcgcaggtgaacataatattgaggagacagaacatacagagcaaaagcgaaatgtgattcgaattattcctcaccacaactacaatgcagctattaataagtacaaccatgacattgcccttctggaactggacgaacccttagtgctaaacagctacgttacacctatttgcattgctgacaaggaatacacgaacatcttcctcaaatttggatctggctatgtaagtggctggggaagagtcttccacaaagggagatcagctttagttcttcagtaccttagagttccacttgttgaccgagccacatgtcttcgatctacaaagttcaccatctataacaacatgttctgtgctggcttccatgaaggaggtagagattcatgtcaaggagatagtgggggaccccatgttactgaagtggaagggaccagtttcttaactggaattattagctggggtgaagagtgtgcaatgaaaggcaaatatggaatatataccaaggtatcccggtatgtcaactggattaaggaaaaaacaaagctcacttaatgaaagatggatttccaaggttaattcattggaattgaaaattaacagggcctctcactaactaatcactttcccatcttttgttagatttgaatatatacattctatgatcattgctttttctctttacaggggagaatttcatattttacctgagcaaattgattagaaaatggaaccactagaggaatataatgtgttaggaaattacagtcatttctaagggcccagcccttgacaaaattgtgaagttaaattctccactctgtccatcagatactatggttctccactatggcaactaactcactcaattttccctccttagcagcattccatcttcccgatcttctttgcttctccaaccaaaacatcaatgtttattagttctgtatacagtacaggatctttggtctactctatcacaaggccagtaccacactcatgaagaaagaacacaggagtagctgagaggctaaaactcatcaaaaacactactccttttcctctaccctattcctcaatcttttaccttttccaaatcccaatccccaaatcagtttttctctttcttactccctctctcccttttaccctccatggtcgttaaaggagagatggggagcatcattctgttatacttctgtacacagttatacatgtctatcaaacccagacttgcttccatagtggagacttgcttttcagaacatagggatgaagtaaggtgcctgaaaagtttgggggaaaagtttctttcagagagttaagttattttatatatataatatatatataaaatatataatatacaatataaatatatagtgtgtgtgtgtatgcgtgtgtgtagacacacacgcatacacacatataatggaagcaataagccattctaagagcttgtatggttatggaggtctgactaggcatgatttcacgaaggcaagattggcatatcattgtaactaaaaaagctgacattgacccagacatattgtactctttctaaaaataataataatctagaggcctctg

SEQ ID NO: 13 - DNA, 4374 bp, Homo sapiens
atgcaaatagagctctccacctgcttctttctgtgccttttgcgattctgctttagtgccaccagaagatactacctgggtgcagtggaactgtcatgggactatatgcaaagtgatctcggtgagctgcctgtggacgcaagatttcctcctagagtgccaaaatcttttccattcaacacctcagtcgtgtacaaaaagactctgtttgtagaattcacggatcaccttttcaacatcgctaagccaaggccaccctggatgggtctgctaggtcctaccatccaggctgaggtttatgatacagtggtcattacacttaagaacatggcttcccatcctgtcagtcttcatgctgttggtgtatcctactggaaagcttctgagggagctgaatatgatgatcagaccagtcaaagggagaaagaagatgataaagtcttccctggtggaagccatacatatgtctggcaggtcctgaaagagaatggtccaatggcctctgacccactgtgccttacctactcatatctttctcatgtggacctggtaaaagacttgaattcaggcctcattggagccctactagtatgtagagaagggagtctggccaaggaaaagacacagaccttgcacaaatttatactactttttgctgtatttgatgaagggaaaagttggcactcagaaacaaagaactccttgatgcaggatagggatgctgcatctgctcgggcctggcctaaaatgcacacagtcaatggttatgtaaacaggtctctaccaggtctgattggatgccacaggaaatcagtctattggcatgtgattggaatgggcaccactcctgaagtgcactcaatattcctcgaaggtcacacatttcttgtgaggaaccatcgccaggcgtccttggaaatctcgccaataactttccttactgctcaaacactcttgatggaccttggacagtttctactgttttgtcatatctcttcccaccaacatgatggcatggaagcttatgtcaaagtagacagctgtccagaggaaccccaactacgaatgaaaaataatgaagaagcggaagactatgatgatgatcttactgattctgaaatggatgtggtcaggtttgatgatgacaactctccttcctttatccaaattcgctcagttgccaagaagcatcctaaaacttgggtacattacattgctgctgaagaggaggactgggactatgctcccttagtcctcgcccccgatgacagaagttataaaagtcaatatttgaacaatggccctcagcggattggtaggaagtacaaaaaagtccgatttatggcatacacagatgaaacctttaagactcgtgaagctattcagcatgaatcaggaatcttgggacctttactttatggggaagttggagacacactgttgattatatttaagaatcaagcaagcagaccatataacatctaccctcacggaatcactgatgtccgtcctttgtattcaaggagattaccaaaaggtgtaaaacatttgaaggattttccaattctgccaggagaaatattcaaatataaatggacagtgactgtagaagatgggccaactaaatcagatcctcggtgcctgacccgctattactctagtttcgttaatatggagagagatctagcttcaggactcattggccctctcctcatctgctacaaagaatctgtagatcaaagaggaaaccagataatgtcagacaagaggaatgtcatcctgttttctgtatttgatgagaaccgaagctggtacctcacagagaatatacaacgctttctccccaatccagctggagtgcagcttgaggatccagagttccaagcctccaacatcatgcacagcatcaatggctatgtttttgatagtttgcagttgtcagtttgtttgcatgaggtggcatactggtacattctaagcattggagcacagactgacttcctttctgtcttcttctctggatataccttcaaacacaaaatggtctatgaagacacactcaccctattcccattctcaggagaaactgtcttcatgtcgatggaaaacccaggtctatggattctggggtgccacaactcagactttcggaacagaggcatgaccgccttactgaaggtttctagttgtgacaagaacactggtgattattacgaggacagttatgaagatatttcagcatacttgctgagtaaaaacaatgccattgaaccaagaagcttctctcagaatccaccagtcttgaaacgccatcaacgggaaataactcgtactactcttcagtcagatcaagaggaaattgactatgatgataccatatcagttgaaatgaagaaggaagattttgacatttatgatgaggatgaaaatcagagcccccgcagctttcaaaagaaaacacgacactattttattgctgcagtggagaggctctgggattatgggatgagtagctccccacatgttctaagaaacagggctcagagtggcagtgtccctcagttcaagaaagttgttttccaggaatttactgatggctcctttactcagcccttataccgtggagaactaaatgaacatttgggactcctggggccatatataagagcagaagttgaagataatatcatggtaactttcagaaatcaggcctctcgtccctattccttctattctagccttatttcttatgaggaagatcagaggcaaggagcagaacctagaaaaaactttgtcaagcctaatgaaaccaaaacttacttttggaaagtgcaacatcatatggcacccactaaagatgagtttgactgcaaagcctgggcttatttctctgatgttgacctggaaaaagatgtgcactcaggcctgattggaccccttctggtctgccacactaacacactgaaccctgctcatgggagacaagtgacagtacaggaatttgctctgtttctcaccatctttgatgagaccaaaagctggtacttcactgaaaatatggaaagaaactgcagggctccctgcaatatccagatggaagatcccacttttaaagagaattatcgcttccatgcaatcaatggctacataatggatacactacctggcttagtaatggctcaggatcaaaggattcgatggtatctgctcagcatgggcagcaatgaaaacatccattctattcatttcagtggacatgtgttcactgtacgaaaaaaagaggagtataaaatggcactgtacaatctctatccaggtgtttttgagacagtggaaatgttaccatccaaagctggaatttggcgggtggaatgccttattggcgagcatctacatgctgggatgagcacactttttctggtgtacagcaataagtgtcagactcccctgggaatggcttctggacacattagagattttcagattacagcttcaggacaatatggacagtgggccccaaagctggccagacttcattattccggatcaatcaatgcctggagcaccaaggagcccttttcttggatcaaggtggatctgttggcaccaatgattattcacggcatcaagacccagggtgcccgtcagaagttctccagcctctacatctctcagtttatcatcatgtatagtcttgatgggaagaagtggcagacttatcgaggaaattccactggaaccttaatggtcttctttggcaatgtggattcatctgggataaaacacaatatttttaaccctccaattattgctcgatacatccgtttgcacccaactcattatagcattcgcagcactcttcgcatggagttgatgggctgtgatttaaatagttgcagcatgccattgggaatggagagtaaagcaatatcagatgcacagattactgcttcatcctactttaccaatatgtttgccacctggtctccttcaaaagctcgacttcacctccaagggaggagtaatgcctggagacctcaggtgaataatccaaaagagtggctgcaagtggacttccagaagacaatgaaagtcacaggagtaactactcagggagtaaaatctctgcttaccagcatgtatgtgaaggagttcctcatctccagcagtcaagatggccatcagtggactctcttttttcagaatggcaaagtaaaggtttttcagggaaatcaagactccttcacacctgtggtgaactctctagacccaccgttactgactcgctaccttcgaattcacccccagagttgggtgcaccagattgccctgaggatggaggttctgggctgcgaggcacaggacctctactga

SEQ ID NO: 14 - DNA, 1698 bp, Homo sapiens
atgaaattcttagtcaacgttgcccttgtttttatggtcgtgtacatttcttacatctatgcgaccgagataaaagttaaccctcctcaggattttgagatagtggatcccggatacttaggttatctctatttgcaatggcaacccccactgtctctggatcattttaaggaatgcacagtggaatatgaactaaaataccgaaacattggtagtgaaacatggaagaccatcattactaagaatctacattacaaagatgggtttgatcttaacaagggcattgaagcgaagatacacacgcttttaccatggcaatgcacaaatggatcagaagttcaaagttcctgggcagaaactacttattggatatcaccacaaggaattccagaaactaaagttcaggatatggattgcgtatattacaattggcaatatttactctgttcttggaaacctggcataggtgtacttcttgataccaattacaacttgttttactggtatgagggcttggatcatgcattacagtgtgttgattacatcaaggctgatggacaaaatataggatgcagatttccctatttggaggcatcagactataaagatttctatatttgtgttaatggatcatcagagaacaagcctatcagatccagttatttcacttttcagcttcaaaatatagttaaacctttgccgccagtctatcttacttttactcgggagagttcatgtgaaattaagctgaaatggagcatacctttgggacctattccagcaaggtgttttgattatgaaattgagatcagagaagatgatactaccttggtgactgctacagttgaaaatgaaacatacaccttgaaaacaacaaatgaaacccgacaattatgctttgtagtaagaagcaaagtgaatatttattgctcagatgacggaatttggagtgagtggagtgataaacaatgctgggaaggtgaagacctatcgaagaaaactcccaaatcttgtgacaaaactcacacatgcccaccgtgcccagcacctgaactcctggggggaccgtcagtcttcctcttccccccaaaacccaaggacaccctcatgatctcccggacccctgaggtcacatgcgtggtggtggacgtgagccacgaagaccctgaggtcaagttcaactggtacgtggacggcgtggaggtgcataatgccaagacaaagccgcgggaggagcagtacaacagcacgtaccgtgtggtcagcgtcctcaccgtcctgcaccaggactggctgaatggcaaggagtacaagtgcaaggtctccaacaaagccctcccagtccccatcgagaaaaccatctccaaagccaaagggcagccccgagaaccacaggtgtacaccctgcccccatcccgggaggagatgaccaagaaccaggtcagcctgacctgcctggtcaaaggcttctatcccagcgacatcgccgtggagtgggagagcaatgggcagccggagaacaactacaagaccacgcctcccgtgctggactccgacggctccttcttcctctatagcaagctcaccgtggacaagagcaggtggcagcaggggaacgtcttctcatgctccgtgatgcatgaggctctgcacaaccactacacgcagaagagcctctccctgtccccgggtaaatga

SEQ ID NO: 15 - DNA, 1593 bp, Homo sapiens
atgcctctcctcctcttgctgctcctgctgccaagccccttacacccccaccccatctgtgaggtctccaaagtggccagccacctagaagtgaactgtgacaagaggaatctgacagcgctgcctccagacctgccgaaagacacaaccatcctccacctgagtgagaacctcctgtacaccttctccctggcaaccctgatgccttacactcgcctcactcagctgaacctagataggtgcgagctcaccaagctccaggtcgatgggacgctgccagtgctggggaccctggatctatcccacaatcagctgcaaagcctgcccttgctagggcagacactgcctgctctcaccgtcctggacgtctccttcaaccggctgacctcgctgcctcttggtgccctgcgtggtcttggcgaactccaagagctctacctgaaaggcaatgagctgaagaccctgcccccagggctcctgacgcccacacccaagctggagaagctcagtctggctaacaacaacttgactgagctccccgctgggctcctgaatgggctggagaatctcgacacccttctcctccaagagaactcgctgtatacaataccaaagggcttttttgggtcccacctcctgccttttgcttttctccacgggaacccctggttatgcaactgtgagatcctctattttcgtcgctggctgcaggacaatgctgaaaatgtctacgtatggaagcaagtggtggacgtcaaggccgtgacctctaacgtggccagtgtgcagtgtgacaattcagacaagtttcccgtctacaaatacccaggaaaggggtgccccacccttggtgatgaaggtgacacagacctatatgattactacccagaagaggacactgagggcgataaggtgcggccgcacacatgcccaccgtgcccagcacctgaagccctgggggcaccgtcagtcttcctcttccccccaaaacccaaggacaccctcatgatctcccggacccctgaggtcacatgcgtggtggtggacgtgagccacgaagaccctgaggtcaagttcaactggtacgtggacggcgtggaggtgcataatgccaagacaaagccgcgggaggagcagtacaacagcacgtaccgtgtggtcagcgtcctcaccgtcctgcaccaggactggctgaatggcaaggagtacaagtgcaaggtctccaacaaagccctcccagtccccatcgagaaaaccatctccaaagccaaagggcagccccgagaaccacaggtgtacaccctgcccccatcccgggaggagatgaccaagaaccaggtcagcctgacctgcctggtcaaaggcttctatcccagcgacatcgccgtggagtgggagagcaatgggcagccggagaacaactacaagaccacgcctcccgtgctggactccgacggccccttcttcctctacagcaagctcaccgtggacaagagcaggtggcagcaggggaacgtcttctcatgctccgtgatgcatgaggctctgcacaaccactacacgcagaagagcctctccctgtctccgggtaaa

SEQ ID NO: 16 - DNA, 1470 bp, Homo sapiens
atggcgcccgtcgccgtctgggccgcgctggccgtcggactggagctctgggctgcggcgcacgccttgcccgcccaggtggcatttacaccctacgccccggagcccgggagcacatgccggctcagagaatactatgaccagacagctcagatgtgctgcagcaaatgctcgccgggccaacatgcaaaagtcttctgtaccaagacctcggacaccgtgtgtgactcctgtgaggacagcacatacacccagctctggaactgggttcccgagtgcttgagctgtggctcccgctgtagctctgaccaggtggaaactcaagcctgcactcgggaacagaaccgcatctgcacctgcaggcccggctggtactgcgcgctgagcaagcaggaggggtgccggctgtgcgcgccgctgcgcaagtgccgcccgggcttcggcgtggccagaccaggaactgaaacatcagacgtggtgtgcaagccctgtgccccggggacgttctccaacacgacttcatccacggatatttgcaggccccaccagatctgtaacgtggtggccatccctgggaatgcaagcatggatgcagtctgcacgtccacgtcccccacccggagtatggccccaggggcagtacacttaccccagccagtgtccacacgatcccaacacacgcagccaactccagaacccagcactgctccaagcacctccttcctgctcccaatgggccccagccccccagctgaagggagcactggcgacgagcccaaatcttgtgacaaaactcacacatgcccaccgtgcccagcacctgaactcctggggggaccgtcagtcttcctcttccccccaaaacccaaggacaccctcatgatctcccggacccctgaggtcacatgcgtggtggtggacgtgagccacgaagaccctgaggtcaagttcaactggtacgtggacggcgtggaggtgcataatgccaagacaaagccgcgggaggagcagtacaacagcacgtaccgtgtggtcagcgtcctcaccgtcctgcaccaggactggctgaatggcaaggagtacaagtgcaaggtctccaacaaagccctcccagcccccatcgagaaaaccatctccaaagccaaagggcagccccgagaaccacaggtgtacaccctgcccccatcccgggaggagatgaccaagaaccaggtcagcctgacctgcctggtcaaaggcttctatcccagcgacatcgccgtggagtgggagagcaatgggcagccggagaacaactacaagaccacgcctcccgtgctggactccgacggctccttcttcctctatagcaagctcaccgtggacaagagcaggtggcagcaggggaacgtcttctcatgctccgtgatgcatgaggctctgcacaaccactacacgcagaagagcctctccctgtctccgggtaaatga

SEQ ID NO: 17 - DNA, 396 bp, Homo sapiens
atggatgaggctgactattactgtcaggcgtgggacagcagcttcgtattcggcggagggaccaaggtcaccgtcctaggtcagcccaaggctgccccctcggtcactctgttcccgccctcctctgaggagcttcaagccaacaaggccacactggtgtgtctcataagtgacttctacccgggagccgtgacagtggcctggaaggcagatagcagccccgtcaaggcgggagtggagaccaccacaccctccaaacaaagcaacaacaagtacgcggccagcagctatctgagcctgacgcctgagcagtggaagtcccacagaagctacagctgccaggtcacgcatgaagggagcaccgtggagaagacagtggcccctacagaatgttca

SEQ ID NO: 18 - DNA, 1312 bp, Homo sapiens
caggtgcagctggtgcaatctggggctgaggtgaagaagcctggggcctcagtgaaggtttcctgcaaggcatctggatacaccttcaccagctactatatgcactgggtgcgacaggcccctggacaagggcttgagtggatgggaataatcaaccctagtggtggtagcacaagctacgcacagaagttccagggcagagtcaccatgaccagggacacgtccacgagcacagtctacatggagctgagcagcctgagatctgaggacacggccgtgtattactgtgcgagagacgagaactgggggttcgacccctggggccagggaaccctggtcaccgtctcctcagcctccaccaagggcccatcggtcttccccctggcaccctcctccaagagcacctctgggggcacagcggccctgggctgcctggtcaaggactacttccccgaaccggtgacggtgtcgtggaactcaggcgccctgaccagcggcgtgcacaccttcccggctgtcctacagtcctcaggactctactccctcagcagcgtggtgaccgtgccctccagcagcttgggcacccagacctacatctgcaacgtgaatcacaagcccagcaacaccaaggtggacaagaaagttgagcccaaatcttgtgacaaaactcacacatgcccaccgtgcccacacctgaactcctggggggaccgtcagtcttcctcttccccccaaaacccaaggacaccctcatgatctcccggacccctgaggtcacatgcgtggtggtggacgtgagccacgaagaccctgaggtcaagttcaactggtacgtggacggcgtggaggtgcataatgccaagacaaagccgcgggaggagcagtacaacagcacgtaccgtgtggtcagcgtcctcaccgtcctgcaccaggactggctgaatggcaaggagtacaagtgcaaggtctccaacaaagccctcccagcccccatcgagaaaaccatctccaaagccaaagggcagccccgagaaccacaggtgtacaccctgcccccatcccgggaggagatgaccaagaaccaggtcagcctgacctgcctggtcaaaggcttctatcccagcgacatcgccgtggagtgggagagcaatgggcagccggagaacaactacaagaccacgcctcccgtgctggactccgacggctccttcttcctctatagcaagctcaccgtggacaagagcaggtggcagcaggggaacgtcttctcatgctccgtgatgcatgaggctctgcacaaccactacacgca

SEQ ID NO: 19 - DNA, 579 bp, Cricetulus griseus
atgggcatagtgcttttagagccaacatgtaacagatggatgcaactccaagctgattgcttcttcatgccaacactcttttgactgtataggatctttgtctcttcatctttgatctggattgctggcaaataaaaggagttcatgtagtgttttgtttaagcttgagtcaccatgagtagtagtttaagcaaagaaaaagactctaaagagaaagatcccaaagggccatctgccaaggagagasaaaaagaggcaaaagcctccgrtaggttttgggaaagaaagcaaagaaaaagaccctaaacccaaagggaaagatgccaaagatggaaagaaggattccagtgctgcccaaccargggtggctttttcagttgacaatacgatcaaacggccaaacccagcacctgggactagaaaaaaktctagcaatgcggaggtgatgaaagagcttaacagatgccgggaggagaactcagcacgcttggacttatccaagakgtccatccatgcgctgccgccatcagtcaaagakctgactcaactcacakagctttacttatacagcaacaaact

SEQ ID NO: 20 - DNA, 578 bp, Cricetulus griseus
ttatagttcatcattcttyraaaaccgcttctgtcctgctgtctgctctttcggttcaaattctgctccargacctcctaattccaaargctcaaartctgwtggttccgtagtagtctcttctttgtcargktctaaaatgggctttgcctcttcargctgacctgcaggtggaatgaccttctcctcttggtcaccascagtagcattgaggggaggttctgtccgggtgccattcttgtccttgggtcgtggccggggcttggtaaacttggccttattgagcaratactgtacctcacggtccarggccatcatcttggcctcaatgtcttttgaaagcagcacargcttctctgtggcaggaagcttatcctgctcagccagagttgcattcttccatgcccaggtgtcattgatgactttctctaacgttgtcatctccacctcakygaagatctggtccatctctgggatgagccgggcacccttgaggaaaatgctggagtggttgaggagattatccagagctgaaagccgttcaggccattttctgcgctcttccacccgaaaaaaca

SEQ ID NO: 21 - DNA, 520 bp, Cricetulus griseus
tatggttggctatgcacaagaaactcagcatgagaagattctgcgcggtctarcagttggcatcgcattagtaatgtacgggaggatggaagaggctgatgctctcattgaatctctctgtcgtgataaggacccaattcttcgaagatctggaatgtatactgtakccatggcttattgtggctctggtaacaacaaagctatccgacgcctgctacatgttgctgtaagtgatgttaatgatgatgtcaggagagcagcagtagaatcacttggcttcattttattcakgacccctgaacagtgtccaagtgttgtttctttgttgtcagagagttacaaccctcatgttckatatggggctgcaatggccctggggatctgctgtgctggtacaggaaacaaggaagcaattaatttactagagccaatgacaaatgaccctgtgaactacgtgaggcaaggggccctgatagcctcagctctcatcatgatccakcagaccgaaatcacttgtcca

SEQ ID NO: 22 - DNA, 581 bp, Cricetulus griseus
ctaagagagcatctgacttttctattgccaggaaaacagaattagacctaagcctcccagggagatgaaagactatgggacatggcactcatctgtgtctctttcggtcaccattgggaatagcttgagctctgttcacttgtcccssatkkccttcggcttaaggaggtagtgactataagaaagtcatctgtaattaaaaatacaaataaccatgtatctgcatacttcttagaacatctcctagcattaacattcactttaaccgcaaaagctttctaagcctggctttattccctctgtaagtccaaatgaagccttccttgtgtacttgaaaacagttttaaatactacagcrtaaagccactgyttaaactttgctttcactcawataatccaatactgcctcatccatcagtacagataggcaaaaaacaggcgagattkcccaaggagcttatttgtattgkttgtaacgtttggtgaactccctagagatttgcaagctttataccatttgttcccttggcawagttttttccagctccttagatatgagcaggttcagcaatctactgcct

SEQ ID NO: 23 - DNA, 828 bp, Cricetulus griseus
  misc_feature (122)..(136): n is a, c, g, or t
tssgkraaagaacccgagctaacatggggttagctcgtaaaactacaataaagcctcatgcagtttgcatmaagctttcgcctccattctgtgtttggggkggccgccgtcctgggctaagnnnnnnnnnnnnnnngctttctgagggtctaacattttgggggctcgtcctggatttgcgaccacccctcacctgagtggagtcgatcttggaggtaagtgggtaccctgtattgtctgtgtctttgtgtttttgtgccggctgaaatctggttctgtgctttgcagtcgctcgtgtctcgggaagagacaagakctctggtctcgggaggagacagaatgtgatcagtagacgtgcttgggagatcaccgactgccaccctggaagacgttccakgaagtctgtgggaacctcakggacgcttgggagattcccgtctgggagccggtgagggyacrgtagtyctcctggattggggaagttatccgtcctcycggccgtstgtatttctggaatggttttgtctgtctargtggagacagacatctgatagtttttgtctgtgtcttgggtgttgttttgtcttatctgtgactttgatgatgggactgactgtaaccaacccccctcagtctgacttttgaccattggatggacgttaargaccatagttagtcagttaaagttacagcaccctctttcgttgagtcatgtggcgccacactaggtaactttatcttccagtctttgtttctgtatggyttctgtacaagaattgtttarggcagaggttcggatgacagcttctgcagtctgtatgagcggga

SEQ ID NO: 24 - DNA, 580 bp, Cricetulus griseus
aaatgtcctagtgagccaggcatagtggcacatgcctgtaaccccagcactcaggaagaggaagcaggaggattgcaagttcgaatccagccgggctacatagtgagaccctgactcaaaaacaaaaaacgagaaagtcctacttttgaggaacttgaaaaagccttgagtacagcccaaaaaactgaagaagcacagagaaggatgaaggcagagatggacgaacagataaaggctgttgagagagcaagcgaggaggagcgtctccgtcttcagcaggaactgagtcgggtgagacaggaggccgtcaacatgatgaaaaagacctcagaagaacaacttgctgaacttcagaggctgcatgcagaggagctggccagcagagagcaggaactggccagaaagctccagacccgagagagggagctgcatgagcagatgaaaatagctcttgaaaaaagtcaatcagaatatttgaagctcatccaagataaagagcagcaagattccttggctctagaagagttagagctgcagayaaaagcaatcctttcagagagtgaaaataaactccaggaac

SEQ ID NO: 25 - DNA, 552 bp, Cricetulus griseus
catggcggcggtggagacgcgggtgtgcgagacggagggctgcagcagcgaggccaagctccagtgccccacctgcatcaagctgggcatccagggctcgtacttctgctcgcaggaatgctttaaaggaagctgggctactcacaagttactgcataagaaagcaaaagatgaaaaggcaaaacgagaagtatgttcctggactgtagaaggtgatgtgaacactgacccgtgggcagggtaccggtacacgggtaaactgagaccacactatccactgatgcccacacggccagtgcccakttacattcagaggccagactacgctgaccaccccctatgaatgtctgaatcggaacaggctcttaaaggtacttcccaaattaaactactctcaactgaagatatagaarggatgcgacttgtgtgtaggcttgctaragaagtcttggatattgctgctgggatgattaaagcaggtgtaactactgaagaaattgatcacgctgtacacttagcatgcattgcaagaaattgctatccttctgccct

SEQ ID NO: 26 - DNA, 584 bp, Cricetulus griseus
  misc_feature (193)..(243): n is a, c, g, or t
  misc_feature (503)..(523): n is a, c, g, or t
awgccttgaaagagttacttgtatttgktacatctaatgcttccctatctggttattacaggtcttcaaatacatgccaacgtaggcaagacattgtaatcgaactcctgagttgcccatcatgggcttcgacaatcacactcttgaykgawcctgtttttcctctgcatttcccaactcttgttttattttnnnnnnnnnnnnnnnnnnnnnnnnnnnnnnnnnnnnnnnnnnnnnnnnnnnatgcatttagtcccagcccctgtgaggcagagacaggcaaatctctgtgagtttgagatcagtctcatctacatagtgagttctagggcagccaaggctacaaattgagaccctgtctttaatcatcatcatcatcatcttattcataaatatttcagtattcactctaaaatgtaaagactcattttaaagtatgacaaggtccacatttccctgcctccatcatgatgttcagattttcaattgattcttttttttcnnnnnnnnnnnnnnnnnnnnnaaaacaaaacctttttggggggttttggaacctttgtgtccaaaaggcggggattaaaggc

SEQ ID NO: 27 - DNA, 669 bp, Cricetulus griseus
gctcttggacagaagtggccaagggaaagtgtatcctctgatcaaccgaagacggttccagcaaatggatgttctcgagggcttaaatgtcctggtgacaatatctgagaaaaaaggataagttacgtgtctactatttatcctggttaagaaataaaattctacatmatgatccasaagttgagaagaagcaagggtggaccactgtgggcgatttggaargatgtgtacactataaagytgtaaaatatgaaagaataaaatttctggtaattgctttgaagagttctgtggaagtctatgcgtgggcaccgaakccatatcacaaatttatggcctttaagtcctttggagaactggtacataagccattactggtggatctcactgwtgaggaaggccakargttgaaagtgatctatkgatcctgtgctggatwccatgctgttgatgtggattcaggctcagtctatgacatttatctaccaacacacattcagtgtagcatcaaaccccatgcaatcattattctccccaacacggatggaatggagcttctggtgtgctatgaagatgagggggtttatgttaacacctctggaaggatcaccaaggatgtggttctgcactggggagagatgccgacatctgtagcatatatccgatcga

SEQ ID NO: 28 - DNA, 580 bp, Cricetulus griseus
ctgcgtacggaawgataaakggcwagawttcaaraarctggggactgggcggcgggggggtcttctcacctgccaccgtgtcttggctgtctsctgtgggcccccastagatgctctcactcctgcggaagttccggtgcaatcgcgtgcagagcgtggccagggtgagcaagaccagcaggaaggtcaaggccatggcagcccaagcggcctcttctgtgcgtggagttgggcctcgggccacccggggaggcgctgctgctcgaggagctggggaagcctggcccakgcaggcacaaccctctggattgtcttgcccactgggcatctgakcctctgtcctggacctatcattgcctccaggtcccccagtcatcaaggagtcaggggccacagatgawgttcccaaaatgggctgctgggccttckggctctgtgaagaggccawrgaaaccctcakgcctgagggagtakactggagaccaakggcakctykgakccctyttctyctgacaacactgagagagcctctatatgycayctctacaccatgwrgccgccagcttcscasagcawakgt

SEQ ID NO: 29 - DNA, 584 bp, Cricetulus griseus
  misc_feature (416)..(467): n is a, c, g, or t
cgtttcctgcgctgcgttctgtgtgtctcctcgttttcctcgccgtcctccggttcccgaggccgccgcgcgtctcctcgcgaagcatggcgacgaaggccgtgtgcgtgctgaagggcgacggcccggtgcagggcaccatccacttcgagcagaagggaagtggtgaaccagttgtggtctcaggacagataacaggactgactgaaggccagcatgggttccatgtgcatcagtttggggataatacacaaggctgtaccagtgcaggtcctcattttaatcctcactccaagaaacatggcggaccctcggatcaagagaggcatgttggagacctgggcaatgtgactgccgggaaggatggtgtggccaatgtgtccattgaagatcatgtgatctcactctcgggagannnnnnnnnnnnnnnnnnnnnnnnnnnnnnnnnnnnnnnnnnnnnnnnnnnnggcaaaggcggaaatgatgaaagtacaaagactggaaatgctggaagccgcttggcttgtggtgtgatcgggattgcccagtaaacattccctgtgtgactgagtctcaaactcatc

SEQ ID NO: 30 - DNA, 651 bp, Cricetulus griseus
  misc_feature (28)..(43): n is a, c, g, or t
gaggatgaatggtgcctgaggaacaatnnnnnnnnnnnnnnnntggccttcttagacgtgtgcattgaatataactcatgcacttgcacatacagatagttttgaagtcttgcaatgaccgtgttaagagttcagcagtcttctgtatagggatttagatttataaaacttgctgtatttgttaccacttttgatctgtatgacagtcctgaaaatagatgatagccatctgctcatactctcctgtggttgtaaaaaggctgtttaatttgttgtctcctctcagagaactgaggtttttatagcttagccttttagggggacaatcctaaaagactgtactaaagaattcataaaagtgtgtgtattggggaagataacagtgaaaagaataagatagtggtttacatgaaactagaaagtcttttggggttttagagtaatcctgcaacactagcaacttcactgwggktatgaacacttaaaactagcggcaggcatacaactgcaagaagccattcrattgtcaagatttttatactactactgctgkatatttatactatataccasctatatagtgccccaaatattttctgccattcggacgttagaatcacaatttctaatgcctttattttggatcatgaa

SEQ ID NO: 31 - DNA, 578 bp, Cricetulus griseus
gagcttggctatcagaacttcctctatcccagtgagcctgacctccgagacctgcttctcttcctggctgagcggctacccaccgatgcctctgaggatgcagaccagcctgcaggtgactcggctattttccttcgggccattgggagccaaatccgggaccagctggccgtgccctgggtcccacctctccttcgaactcccaagctgcagtacctccagggctcagccctccagcagtcattccactccaccaggtwggttctgccagaactcagttycaaaggagagccatgggagttccaggcaagtcccctgctgctaccagcccctacacakgtgccccakcttgtgcggagagcagcctcactcctcgaacatcatgccatccagctctgccagcatgtgagcakggattgcccgggagatgaasaccgggtgtgcygggcacaccgtctcccatsccaggargattcccgggctgcacagyaacgactgcacaagcatytggctgaacatcttcgtcaaagctggggcccacttggagcctckacgcaagtccsagasctacgagakaw

SEQ ID NO: 32 - DNA, 579 bp, Cricetulus griseus
  misc_feature (176)..(220): n is a, c, g, or t
atcaaacccggggcttcatgcccagggattataggtgttagttaccatacctgacttttaaatggctttacacacacagtctaccacctgctgcatccctagccctggtcatgtctcttagtctctcattttattgtgagattcatsacaataacacccacccctcttttcccttnnnnnnnnnnnnnnnnnnnnnnnnnnnnnnnnnnnnnnnnnnnnntttagaacattgctttcacctttactcattattatactcatcatttatagtaatgttttargtcagccttaggtaccattaataagtttctcacagatctgaggcttgctgattaattaggctakyctggctggcctgtgagaactggggatttgtatttctctgtctcctcttggatgaattataagtgtttaccatttcgtctggttttttacatgatgctggggattgaaatcaggtcctcaaattccacagcagtcgctttgctgtgtgtaggcagaggttctttcctgcctggtgccacaactgccttgccccaaataaatgcacggatgctatattataaaattgttggccaa

SEQ ID NO: 33 - DNA, 539 bp, Cricetulus griseus
  misc_feature (303)..(319): n is a, c, g, or t
tactctagattaaccatcccagtccttctgtcagcctccgatgccatcatgcagcctgattaggagcaaaggaaagggggaaaggagaagcaactaatcgtcttttcccgatcgtcaggaccctaaagaatggccgagccttgggggaacgagttggcgtccgcagctgccaggggggacctagagcaacttactagtttgttgcaaaataatgtaaacgtcaacgctcaaaatggatttgggagaactgcgctgcaggttatgaaacttggaaatccagagattgccaggagacttctactnnnnnnnnnnnnnnnnnatttgaaagaccgaactggtttcgctgtcattcatgatgcagccagagcaggtttcctggacacggtacargctttgctggaktttcaagctgatgttaacatcgaagataatgaagggaacctgcccttgcacttggctgccaaagaargccacctccctgtggwggagttccttgtgaagcacacaaccagcaatgttggggcatcggaatcataagg

SEQ ID NO: 34 - DNA, 948 bp, Cricetulus griseus
gggactgtcttaaatatctccaaacatggttcttgcagtactgtgcgtattggtcacactggaatggagactcagcacattgttgaaaacatcctggctgtctcaaaagtgctttcataaaaattgccagagaaatggccaagtgtgaaactcttgttcctgaaaactgagaagtctgtttcccttcccatcttttcctcatttgtcacatgtcaggatgaaaacaccttatccttccgtagcatgaaaagaaaggaactaaagaaaaaaatgaagcatgaaaaagaaaagttgaaaaagaaaagcaaagtgttaaggaaaatgtccaagaaggatgacttagcaagtgaaaccagcagtactccakggacggccacaagatcccaggaggaaaagcccagcaaagtaaaagcacaacctgaaagaacagacgagtgtgaagaaacaattccacaactggtaccaatagaagaaataccaaataaagaaaacatgaagatgcaagaaaatggcacagggaaaaaacctccaaaaaagagacctgatccagatacccttaagggcaagawaaggaakgccctgccagctacagagatcccaggagctttggggcctgtcacctcggggaagaaacaaaaaaaagatgttcgggaaatcagaaagccaggagccaagttctttactcccaggaaagcttccaacacacccaaagacaaaaaaccccaagtggcccactcaaactaaaatcaggttcctctgcctgaaggaactatcaagaatacataggcagggtgtggttgcacacactgtgggacatagataggcagatttgtatgggtttgagtccagcctggttgcctacctggtagtttaggccagccagactagtgagacagacaaacttggccaagattggttgtgcacacctacattcctaacactcaagaa

SEQ ID NO: 35 - DNA, 599 bp, Cricetulus griseus
ccattttggtggccgggcgcggaggtgattctacactgagggggaacgcggcggcaagggtggcagtggcagcgttcgtgtgctcgggtccgaatcactgagggaggaggcggtggaggaagaggtggcggcggtggcggtggtcgtagcggtggcggaggaggcgggtacgaatcakctgcgggcagagacatggccaacatcgcggtgcagcgaatcaagcgggagttcaaggaggtgctgaagagcgaggagacgagcaaaaatcaaattaaagtagatcttgtagatgagaattttacagaattaagaggagaaatagcaggacctccagacacaccatatgaaggtggacgctatcaactagagataaaaataccagaaacatatccatttaatccccctaaggtccggtttatcactaaaatatggcatcctaatattagttccgtyacaggcgctatttgtttggatatcctgaaagatcaatgggcagcagcaatgactctgcgcacggtattattgtcattgcaagcactgttggcagctgcagaaccagatgacccccaagatgcagtagtagcaaatcagtacaaaca

SEQ ID NO: 36 - DNA, 608 bp, Cricetulus griseus
caagcagataattaaggggagagatgtcattgcacagtctcagtctggcacaggcaagacggccaccttcagcatttcagtcctccagtgcttggatatccaggttcgagaaacccaagctttgatcttggctccaacaagagagttagctgtacagattcagaagggtctgcttgctctgggggactacatgaatgtccagtgccatgcctgcatcgggggcaccaatgttggagaggacattcggaagctggactatgggcagcatgttgtggcaggcacacyagggcgtgtctttgatatgattcgccgtagaagtttaaggacccgggctatcaagatgttggttttggatgaggctgatgaaatgttgaacaaaggtttcaaggagcagatctacgatgtgtacaggtacctgccacctgccacccaggtggttctcatcagtgccacattgcctcatgagatcctggagatgaccaacaaattcatgactgaccccatccgcatcttggtgaagcgtgatgagttgactctggaaggcatcaagcagttctttgtggcagtggagagagaggagtggaagtttgacactctgtgtgatctct

SEQ ID NO: 37 - DNA, 580 bp, Cricetulus griseus
  misc_feature (473)..(489): n is a, c, g, or t
ctttcatggwgtgtgtatgttttgcagtgaggaattccgtggaaacagatccgktctgtygaaccacatggccatgagaacatgctttcaatattggtttgccagacaacattgtraactgcrctgaattcctatgcacattacagaagaaactggacaatwtacagkgtttgwrctgkgagaagaccttcagagacaaaaacacacttaaagatcacatgaggaaaaaacagcatcgtaggatcaacccaaagaacagagactatgaccgattttatgtcatcaattacttggaactcgggaaatcatgggaagaggtgcaattggaagatgatcgcgagttgctgggccttccagaagatgactggtctgactggcaagaataccctgtctgtgctgtctgtctgttttgtgaaaagcaagaagaaacaatagataaattgtatgtgcacatgaaggacacacatgagttnnnnnnnnnnnnnnnnnagtcagagctcaggttaaatttctatcagcaagtgaagctggtcaattttattcggagacaagttcaccagtgcaggtgctacggttgcca

SEQ ID NO: 38 - DNA, 579 bp, Cricetulus griseus
  misc_feature (216)..(248): n is a, c, g, or t
tatgatgacattccagtcgaagcaacaggcaacaactgkcctccacatattgaaagtttcagtgatgttgaaatgggagaaattattatgggaaacattgagcttactcgttatactcsccaacttcagtacaaaagcatgctattcctatgtatcaaagataaaatagacttgatggcttgtgcccaaacaggctctggaaaaactgcagaattnnnnnnnnnnnnnnnnnnnnnnnnnnnnnnnnntggtccgggagaggctctgagggccatgaaggaaaatggaagatatgggcgtcgcaaacaatacccaatctccttggtactggcaccaacgagagaattggcagtgcagatttatgaggaagcaagaaaattctcataccgatctagagttcgtccttgtgtggtttatggcggtgctgaaattggtcaacagattcgagacttataacgtggrtgccacttgttagttgctactccgggacgcctartggatatgatggagawgggaaagattgsattagacttytgcaaatacttggtgttagatgaagctgaccggatgtkagatttg

SEQ ID NO: 39 - DNA, 664 bp, Cricetulus griseus
ggaagagatgaacatgcccacacagatggtgcagggcggtgcctttgacggcaccacagaagggcccttcaaccagggctatggggagggggccaaggagggtgctgatgaggaagagtgggtcgtggctaaagataagcctgtgtrcgatgaactcttttatacgctatcacccatcaatggcaagatatcaggtgtcaatgccaagaaggaaatggtgacctccaagctgcccaacagtgtcctgggcaagatctggaagctggccgactgtgactgcgacggcatgctggatgaggaggagtttgccctggccaagcacctcatcaagatcaagttggatggctacgagctaccgaacagcctgcccccacaccttgtgcccccctctcacaggaagtccctgccaaaggctgactgawgagggcgcaccgctggggtgggaaaggakggggtccctgggcctgaagtatgctatgccactgacttgctgaatgtccttagccaaggytctgtcctctccatatctcagttccctcatacgtagggtagggaakggcagatactggactctagatgaggtcctcttacctctaaaatccctaagtttctatcaaaatatttctatctaaatattgagaagagcactatatatggagattaa

SEQ ID NO: 40 - DNA, 581 bp, Cricetulus griseus
  misc_feature (445)..(462): n is a, c, g, or t
ggccaggmrccggtgggactgctggggcgccgagcgttgaasacttcaagaaatcacaatgtcgaccgacacagacctttctctttcttcatatgatgaaggycaggggtctaagtttattrcgaaaaactaaggaracaccatttgtccccattggcatggcagggttwgcggcaatcgttgcgtacgggctatacaaactgaamaacaggggaaatacgaagatgtccattcacctgatccatatrcgtgtggccgcccakggctttgtggtcggagccctgactcttggtatgggctattccatgtataargaattctgggccaagcctawgccttakaagacgabctgctgccttgrtctgggaagwgctwgcttagytagacgtctcatattgaggtyacatgtttgtgtctacaataaataacatggatttagacaacnnnnnnnnnnnnnnnnnncgsccsccmcacgggggggrcctccayttttstgtcccttttakggrgggtwtattgccccctgkgggmaatcrgggmmatagskgytcsskggagaattgttgcccctgtctccggtt

SEQ ID NO: 41 - DNA, 618 bp, Cricetulus griseus
cagcgctcgccgctgcagctgccactgcgaccatggtctccggcagcagcggcctcgtagccgcccgcctgctgtcgcgcaccttcctcctgcagcataatgggatacggcatgcatcttatgacgcttcccggaaacatatctacattgatraaaataccaaggttatttgccakggtttcactggcaagcagggcacctttcacagccagcaggccttggaatatggcacaaaactcgtgggaggaacctcgccagggaagggcggcaagacacacctgggcttgcctgtttttaatactgygaaggaagccaaagagaagacaggagcgacagcttctgtcatttatgtacctcctccttttgctgctgccgccatcactgaagcagttgacgcadagattcccttggttgtgtgcattactgaaggtatcccacagcargatatggttcgggtcaggcacacactttcacaccaargaaakacgaggctaattgggccaaactgccctggaatcatcaatcctggagaatgtaaaattggcatcatgcctggccatattcacaagaaaggaaaaataggtattgtgtccagatctggcacgttgacttatgaag

SEQ ID NO: 42 - DNA, 362 bp, Cricetulus griseus
  misc_feature (69)..(91): n is a, c, g, or t
gggggtacgtagggtgctggcacaggacctatgttgatggggaagttgttgaacacgggccgcacaggnnnnnnnnnnnnnnnnnnnnnnncaaaggcatagggtggcatgtgggggtgcaggttctgtgggacaggccgtgggagagcttccacacgctgtactttctcggctggcttctccaatggggggccgatgcgtttgaatgtgttctctgaaacaacatgggattcagtggaaacaaacacacagaactaactccaatacacttctgcctgtgactagatcactgcatgctactatgactgtcatggaatgcaatcctataaggacagcccaacacacgatggttacttctgacc

SEQ ID NO: 43 - DNA, 214 bp, Cricetulus griseus
  misc_feature (30)..(30): n is a, c, g, or t
  misc_feature (205)..(205): n is a, c, g, or t
tcgacccacgccgtccgctgctgacctggnaatatcaacaatgtcatcagaatccagcaaaaaacggaaacccaaagtgatccgaagtgatggaaccccaagcgaagggaaacgaaatcgatctgacactgagcaggaaggcaaatactacagtgaggaggctgaggttgacctgcgggaccctggcagagactatgaattgtgncaagtatac

SEQ ID NO: 44 - DNA, 567 bp, Cricetulus griseus
atttgaaaatgccgacctttgaatcagaggaaaccaaagactcggaggctcctacagcacctcagaatagccagctaacgtggaagcaaggcagacagctgttgagacagtatcttcaggaagtaggatacacagatacaatactagatgtacgatctcaacgggtaaggtcattacttggactgtctaattcagaaccaaatggatccatagaagcaaagaatttagaacagatcctgaatggtggtgaatctcctaaacaaaaaggacaagaaatcaaaaggccctctggtgatgttcttgagacattcaatttcttagaaaatgctgatgacagcgatgaagaagaaaatgacatgattgagggcatcccagaaggaaaagacaagcttcggatcaataagcacaaaataggtaatgaaggtttagctgctgacttaactgatgatcctgatactgaggaagcactaaaagaattcgactttttagtgactgcagaagatggcgaaggagccggtgaagcacggagttcatgggatggtacagaatgggctgaaccaataacgt

SEQ ID NO: 45 - DNA, 576 bp, Cricetulus griseus
  misc_feature (5)..(25): n is a, c, g, or t
ctctnnnnnnnnnnnnnnnnnnnnngtttgtcctatcccagtgtggtttctttcctttgttttatcttactttattttattattatctttagaagtctgtctgttttctaatgagatgggtgggaaggaccaggagaagtgggagtagtagaagggaaaccttaatcaggatatattgtatgaaaaaaatgcattttcaattcaataacaaaaaagtacagcgaaagaggagtttagaaaaatgcactctacagcctaaatgccttgctttgtaaacaagttgattttggaacataattgtgtccacttgctttaagtgttttatgttgtctgtttctcacctcagtagtagaaggaggtggttatgaaagacaagctataatctacaacataaaataccacctgcattttgagaagtggttacacacgactctcttaaaacgttcatgcctacacttaggtgtgtcttatcctttccctggacacttctcccatggtgcttaaatctatgtaaaatttattccttataaagtctaactctgcttgtgataggaagaggggggatgtttggcatga

SEQ ID NO: 46 - DNA, 578 bp, Cricetulus griseus
  misc_feature (308)..(340): n is a, c, g, or t
cttaaaggacagacggggctgccttaaaattagcggcagctgtaggctgctcctggccatgtgagtcagtgcacaccgactaagcgaaggcaccattctatttctggctgcacaggctttgcttgccgtcttttgaagatttctaccgtggtgttcaccttcctttgctgattcttctctaggcacctacagtccttgctgcggaagaagtgagcattgtagaacactagggcagaccagcaggggctggcgctgatggcgggaacgacttccgtaaggtctaaggagtggtgtgaattgtattcagnnnnnnnnnnnnnnnnnnnnnnnnnnnnnnnnnagagctcccctcccagctttctggacagcttgtcccaaggccagggaatgctgttggccttctttcttttctgtcttctgactgacagcacatttcccattcccacagacagtttcttattgctgagatgggcaggaggagggcttcagccatgttctcggctgtccatcggttttagcatctcagttttgaaggcaagggatattgaggtgatcagctgggatgggtatggcaaaag

SEQ ID NO: 47 - DNA, 554 bp, Cricetulus griseus
  misc_feature (191)..(191): n is a, c, g, or t
  misc_feature (439)..(456): n is a, c, g, or t
  misc_feature (519)..(538): n is a, c, g, or t
  misc_feature (541)..(553): n is a, c, g, or t
taaacaaatcaaatcaaattcaagctgggggttcagtttttaagactcaagtgtggagaatgagactaagccaagctctaggtttcttgtaggggtgctatccaggtagggcaagcctaatgattgtcatttggcttgagatagttttcagttgtgtgggtttgtttggtttttgttgttgttcattttanttttactaaataataatatctcagaactttccaagtttctttatggtggtttcttttatcaaatgacttgcaaactacacatgcataagccgaaggatagagattcgaagatgtgctctccgggaagtgtttagatacatctaggataaggggggcgggattatgagctgtgggaaagagtaggcttaaaggttagtgtgacccctttatgtgtgtcagtaaagaagtcagtctgccaccaatggagnnnnnnnnnnnnnnnnnnggtttttttttggtttttcgagacagggtctctctgtttggagcctatcctggcacttgctcnnnnnnnnnnnnnnnnnnnngannnnnnnnnnnnnt

SEQ ID NO: 48 - DNA, 875 bp, Cricetulus griseus
taagtgtttagaatctccagtggggaagaggaaaagaagcatgactgttagtccttctcaggacccatctttctcaggattaaaccagttattccttattgattttggtttggccaaaaagtacagagacaacaggacaaggcaacacataccatacagagaagataaaaacctcactggcactgcccggtatgctagcatcaatgcacatcttggtattgagcagagtcgccgagacgacatggaatctttaggatatgttttgatgtattttaatagaaccagtctgccatggcaagggctaaaggctgcaacaaagaaacaaaaatatgaaaagattagtgaaaagaagatgtccactcctgttgaagttttgtgtaaggggtttcctgcagaatttgccatgtacttaaattactgtcgtgggctgcgctttgaggaagctccggattacatgtatctgaggcagctattccgcatccttttcaggaccctgaaccaccaatatgactacacattttgattggacaatgttaaagcagawagcggcacagcaggcagcctcttccagtgggcagggtcagcaggcccaaacccccacaggcaagcaaactgacaaaaccaagagtaacatgaaaggtttctaggcatgaattgaggaagagaagcagcagagcagatgattggagcagcatttgtttctcccaaaactagacattttagttcatatgtacactatccagtggttgtggacaaccatttacttggagtaaagaacttactttaagtataaactggccccggacagcattgctgatgctgatcctgcgctatagccgctgaaattgtgaatattaactgatgtagcgaaacat

SEQ ID NO: 49 - DNA, 579 bp, Cricetulus griseus
gaccgaattggcatttccaagtcagagttagttgcaatgttggaggaagaagagctgagaaaggccattttagtggtgtttgcaaataagcaggacatggagcaggccatgacaccctcagaaatggcaaatgcacttgggttacctgctctgaaggaccgaaagtggcaaatatttaaaacatcagcaaccaaaggcactggtcttgatgaagccatggaatggttagttgaaacgctgaaaagcagacagtaagcccattcacatcaggtcctgtgaagcaaatgctacgccacacactcactgcaaccagccagatgtgcttctgtgactgttagaactgtgtgattgctggcatgtacagaactgactccaatgtttgtaataaatataaaaaacaagtatttggtgagagggttagcttgattgaattacccaaatggtttatgtaatgtaaaatattcttccttgctttcttgtgttaaggcatatgttctatttgtatggaattcttactcaaatacaattctattaaagaatgtacacttttggggggaaccctcctatttttaaattagt

SEQ ID NO: 50 - DNA, 566 bp, Cricetulus griseus
atagaggtagggaggaggtttcaaaaaaccaggcccttamrcttcrgcyagwymrccagtatgctgtgcttgaaaatcagaagtacagscacwcacagtacagttaaacaatggtctttgctaagccttccaagataattagaccacagctraccwccwagaacagycattcagsgtsttgrttsctggatcaacagtgctgactgatgakaggaakacttcraktccagwaactgtccctgttgcactatggaagttcaagagkcacaactgrtckctatatgtgtyggatttamgggtgwkttcattgycttaaakacttgwkaattasattcaryaktgttyccatasttgctctgcatataaaaycaaacctgsagmcagtggkcatttcaaacatctttatgttcagatactgagccttcgcaagggtgactacctcagatttgctgcacttaattgtggatttcatgtggatcacaacttctgcataagattacagctattagtgtcggcgtgaaccttgaaaccaactcgactggattcctgtcaaagccttcaaaatc

SEQ ID NO: 51 - DNA, 462 bp, Cricetulus griseus
  misc_feature (154)..(170): n is a, c, g, or t
  misc_feature (355)..(372): n is a, c, g, or t
cttgtgtatatatgctgtatctgctatcaccaaggatgctgaagtcaccattgcatttgattatgaatatagtaactgtaattacaaagtggactgtgcatgtcacaagggaaaccggaactgccctatacagaaaagaaatcccaatgctgcnnnnnnnnnnnnnnnnncccctcctagctttcccaccattggagcagagaccagacgtagaaaagcacggcggaaagagctggaaatggagcaacaaaatgaggctccagaagataatcacaacccgcaaccacaagaagtttcagaaaaagtaactgtttccagtgagcgtgaggaagttgacaatccagaagaaaaaccnnnnnnnnnnnnnnnnnnggctacagatgaccaggagaacccagctcatagcaggaggactcgggaagataggaaggttgaagccatcatgcatgcttttgaaaattt

SEQ ID NO: 52 - DNA, 580 bp, Cricetulus griseus
acggtgtgtgttgggtcaggcaggaagcagtgtagatctgggactccaaagtcctcaagagccagaagcaaagttagggagcccagcacccctgtggtcctgggtggccgccaggtaagtggggtagtccctttcctccaagtgckrtgkgtacttcctgtcccaatgactttgcgcttgttcatgtgacttgggtaggccagtggaacataagcagacaagatgagcacagaggcctgaaatacatttattggctcatatactcctttakttcccastgagaaggacacactctgggtcaccattgtcagtccttggatattgactttggactagtctgtgttgcctcttggagatctaagcaaagatgtacataatttggaattcaaaagtggcctattctgaaaacacacagaggggttgttatacatgtggggtagctaaagtcttatggttgccacgcttgtcaagatgataaagacggagaaggagtccgatgatggaatcatgatttacagactagagacacaagaaggaattagagaggtgccagatacagagcataatgaaaggagacaga

SEQ ID NO: 53 - DNA, 738 bp, Cricetulus griseus
  misc_feature (25)..(81): n is a, c, g, or t
  misc_feature (85)..(104): n is a, c, g, or t
attgacccccatcatgtgtggactnnnnnnnnnnnnnnnnnnnnnnnnnnnnnnnnnnnnnnnnnnnnnnnnnnnnnnnnngatnnnnnnnnnnnnnnnnnnnntccctgcrgksrtatyarcamggccaacttgagaagctgcccacaatgaatggctctgaaggtcgscccgagttctatgacttcgacctcatcatcattggtggaggctcaggaggactggcggcagctaaggaggcagcaaamtttgataagaaggtgctggtcttggattttgtcacaccaactcctctcggaactagatggggtctgggaggaacgtgtgtgaacgtggggtgcatacctaaaaagctgatgcaccargcggctttgttaggacaagccttgaaagactctcgaaactatggatggaaagttgaggacacagttaagcmctgactggkagawgatsacasagkctgtgcasaatcacmtcggctcsctgaattggggctaccgagtwgctcttcgggaaamgaaggtctactatsagaactgcctatgggaaattcatyggttctcacamgattamgtgcwaaaratarcmmmkgawmmgcaaaaaatttwttcagcaragcggkttctyatygccmcykgggaaaggscmcgctacctgggcatccctggagacaaagagtactgcatcagcagggatgatctttttctcctgccttactgccccggtaaaaccctagtg

SEQ ID NO: 54 - DNA, 629 bp, Cricetulus griseus
gctttgcgcttcctctttccagccagcgccgagcgatgggcatctctcgggacaactggcacaagcgccgcaagaccgggggtaagagaaagccctaccacaagaagcggaagtatgagctgggacggcctgctgccaacacgaagattggtcctcgtcgtatacacacagtccgagttcgaggaggcaataagaagtaccgtgccctaaggttggacgtgggaaacttttcctggggctctgagtgctgtactcgaaaaacaaggatcattgacgttgtctacaatgcatccaataacgagttggtccgcaccaagaccctggtgaagaactgcattgtgctcatcgacagcacaccgtaccggcagtggtacgagtcccactatgcactgcccctgggccgcaagaagggggccaagctgacccccgaggaggaagaaatattaaacaaaaagcgatcaaagaaaattcaaaagaaatatgatgagaggaaaaagaatgccaaaatcagcagccttctggaggagcagttccagcagggcaagcttcttgcctgtattgcctcaagaccaggccagtgcggcagagcagatggctatgtgctagaargcaaggagctggagttctac

SEQ ID NO: 55 - DNA, 629 bp, Cricetulus griseus
agcaggaggcgccatcatgggtgttgacattcgacacaacaaggaccgaaaggttcggcgcaaggagcctaagagccaggacatctacctgcggctgctagtcaagctgtacaggtttctggccagaagaaccaactccaccttcaatcaggttgtgctgaaaaggttgtttatgagtcgcactaaccggccacctctgtccctgtcccggatgatccgaaaaatgaagcttcctggccgagagaacaagacagctgtggttgtggggactgtcacagatgatgtgcggattctcgaagtgcccaagctgaargtgtgtgcacttcgggtgagcagccgggcccgaagtcgaatcctgaadgctggaggcaagatcctcacgtttgaccagttagctctggagtctcccaagggccgtggcactgtgctcttgtctggtcctcggaagggccgagaggtataccggcattttggcaaggccccmrgaacaccacacagccataccaaaccctatgtccgctccaagggcsggaagttcgaamstgccarargcagaarggccagccscggctataaaaactaaccctggatcttactgttattaaaaaaaataaactttggaaaaaaaa

SEQ ID NO: 56 - DNA, 608 bp, Cricetulus griseus
cgaggtgcctttcctggatccctcctcactggacccgagtgtggtggcagctcgggctggggcccctggtttccagagggtctgggctgtttcggctgctgtaactagatttagttcagtggtgctctggaggagaccgggagaagggttgaagtgtgaggctgggtggatgggaaaattagttttggtcttcacatctctggtttcatttttgctgtcgtagcgcttgttgctgtctctatgttaaaatgccaaaaatgatctagttgtcgctttcctcctgctccagcactccacagcagcttctggctttgtgaggtgtttgtctcagccagtgccatgacctggcaggaacagatctgggttcccactgtctcccatcatgtgtccgactatagtccgtcgggacaagcttctgcaaaactaacctgctttgtccggtttcccccagacaccacctctcgcttccacttgccgcctgagccttcctggtctctctctggctagtgctgcacagwgtctgcttctgctgtcctggaggtctcctgaagttgtgtggkcaccmararggccaaggacgcamtagccctgagctgagctgggctcat

SEQ ID NO: 57 - DNA, 628 bp, Cricetulus griseus
gcaccaaggaggagcccgtggcagctgatgtcatcaaccccatggccttgcgacagcgtgaagaactacgggagaagctggcagctgccaaggaaaagcgtttgctgaatcaaaaattggggaaaataaagactctgggggaggatgacccctggctagatgacaccgcagcctggattgagaggagccggcagctgcagaaggagaaggacctggcagagaagcgggccaagctactagaggagatggaccaagaatttggtgtgagcactctagtggaggaggagtttgagcagcggcgacaggacctgtatagtgcacgggacttgcagggcctcactgtggaacatgccattgattcttttcgagaaggggagactgtggtccttaccctcaaggacaaaggagtgttgcaggagggggaggatgtgctggtgaatgtgaacatggtagacaaggagcgggcagacaagaatgtggagcttcggaagaagaagcccgactacctgccgtatgcagaagacgagagtgtggatgatttggcacagcaaaaaccccgctctatcctggccaaatatgatgaggagctggagggcgagckgccacattccttccgtttggagcaagg

SEQ ID NO: 58 - DNA, 761 bp, Cricetulus griseus
atgacttttggccaccccagcccaagctktacmagktskgcctgkgcctggkmtrcktsgagcttccccagatcaactacaagctgtcagtggaacataaaaaackgcccaaggtggaactaatgccaggaatgagastgctgcakagcctgctggacacacgatgtgtgtacatcctggactgctggtctgatgtattsatctggcttggccgcaagtccccaagactagtgcgtgctgctgcactcaaactaggtcargagctgtgtgggatgctgcaccggccacrccatgcagyggtcagccgcagyctggaaggcaccgaggctcaggtgttcraggctaagttcaaaaattgggacgatgtgttgacagtaractacaactcraaatgcasaggctgtgctgcagggccaggggctctctsggaaagtaaagcgtgacactgakaagaaagaccasatgaaggcwkacctcactgcactcttsctgmcacggywgccaccaatggcmctggctgakgcmsabyamctgawggwrgaatggaatgavgacctkgatggcwtrgaakgcttsgywttggasggmasgaarwkcactcgaactgccrkaggamrartktggccacttmtacmcacaggactgctwkgtstwcytctgcargtwctgggtgcctgtgkagtatgacgaggaagagaagacggaagtcaaggaagggaagggcctcggtcatggcacagaaggggaggaagccaaaactt

SEQ ID NO: 59 - DNA, 630 bp, Cricetulus griseus
ctgaatcacsytwctttwmcttwtasamakgwysyywcatkrgatstacttgmaactgttytyttmccatcaraawaatcagwgratgtttgctgagyatatatattatgctgcttccttaaactacttgytgctttakgatcaattkatatctttkttttcttcccttwccttgtcacctcaggtgcaaatctgaactcamgtgtctgcttttccattttctctktgccccatctttcccccattatccattwgactttattttaaataattgcatcagtctttaaaaaaaatatcaraaccaasgmratwtcaaasaaagctcaaagtttctwyymctggtgactttggaaagcaaccasaattgtcatatagatatatatggtcccttaaaatgcttttgtgtatgyggtgtttaaaaacagttaacttcacagtatctaggtctgartgtcataagtmctcttmacaccctgtccttgcaacaagtttccaaaagagtgtatgcrccttatagtctcagkscacacccatggagagatagtgcagttggkgacactttctagtcccagagctyacatggracctgagggtattaatgtggatcagggtgaawtgscctttctgyac

SEQ ID NO: 60 - DNA, 1187 bp, Cricetulus griseus
  misc_feature (325)..(343): n is a, c, g, or t
tctgccatggcgggtgggtraaagacccgagctaacatggggttagytcgttaaattacaataaagcctcgtgcagtttgcagcaagctctcgaatccgcctggtgattggggtgaccgcgaacctggcctgaraccccggatactkgagtktysgggggtctaacattttgggggctcgtscksgatttgcgaccayccttcacctgagtggattcgatcttggaggtragatgattmgagctcgvaahytdtrtatgttcaatgttctatgtttcttgtkttgtctcttgctgtgttkgtttggtgccatgatttgtatttgnnnnnnnnnnnnnnnnnnntttgtaattcggacttctggggaagaccctgaagtcctgccctggatgaaagtccgagggttgcttgatttgatctgcgaagaatttgtaatttgtatytgatctgcgcagaatttgtaattgaaccatagggtaagcagacttgygagamccttggttccaccctggatgaaagtccaaggkttggttgtaattttggtttggggcaccatttctttgccgcggwktgtcctgtctaatgtywgkgctgtctaatgtgctgwcatttgtgttatgtgtttcttaagcatctctttctgtcccacattgcccatgcacgtggcatgcatgggtcargggtcttttcttgttgccctaakcacatggcacgggaraggagttctgccatgtgtcacgggttakaatgtgtkatgktggagtcccccgatgctgcttttctgaactcgamccactgctgcagcccttacagctgakcctggcccatgtargtgagtctttccctatccccacttgccggkcccrtgggtccctgccatttgcctakctgcccggcattctttgtgctctacacacatggtatgcakgggggccgcargastytttcssacccctgkattggyytarggtctggagttaccagcagcacccctaccccargkctctctgccttgagccacatggagctagagcgtatgaacttatctggcctgatccggacatctaaatggccctaaaggtattaagaactataaaagggactttgacaaaaattttatgttaacctaaaaatatcaaaaagggcggccgccaccgccggggagcttcaacttttggtccctctatt

SEQ ID NO: 61 - DNA, 1002 bp, Cricetulus griseus
  misc_feature (492)..(512): n is a, c, g, or t
tggatccaagcgttacaatcgcaagcgtgaaccttcctaccccaaaaatgaaaattttagcaaccagtcccgtcgctccaattcacagaaaagcaaaacttttaacaagatgccccctcagaggggcggtggcagcagcaaaccctttagctcttcttctaatggtggaagacgagatgaggtagcagaggctcagcgggcagasktymgccctgcccagttctctggccctaagaagatcaacctgaaccacttgttgaatttcacctttgaaccccgtggccaggcaggtcactttgaaggcagtggacatggcmgctggggaaaaagaaacaagtgggggcatragscktktaacaaggaacttkkkkkrcrggccaactgtcagtttgkggkgtctgaagaccaggactatgcagctcattttgctgatcctgacaccttaktcaactgggactttgtggaacaagtgcgcatctgtagccatgaagnnnnnnnnnnnnnnnnnnnnntctatccaccgactgcagccaagataacccgctgtggacacattttctgctgggcgtgcatcctgcactacctttcactcagtgagaaagcctggagtaaatgtcccatctgctacagttctgtgcataagaaagacctcaagagtgttgttgccacagaatcacgccagtacgttgtgggtgataccattacaatgcagctgatgaagagagagaaaggagtgttggtggccttgcctaaatccaagtggatgaatgtagaccatcccattcatctaggagatgaacagcacagccagtactccaagttgctgctggcctctaaagagcaagtgctgcaccgagtagttctagaagagaaagtagcactggagcagcagctcgcagaggagaagcacactcctgagtcctgctttattgaggccgctatccaggagggtaagattcgggaagaggctctgtctggagtacctggaggcaaaagggaagg

SEQ ID NO: 62 - DNA, 906 bp, Cricetulus griseus
  misc_feature (358)..(372): n is a, c, g, or t
  misc_feature (392)..(410): n is a, c, g, or t
ggcaagatgtctcaccggaaattctctgccccgaggcatgggtcattgggcttcttgcctcggaagcgcakcakccggcatcgtgggaaggtgaagagcttccccaaggacgatccttccaagcctgttcatctcacagcctttctaggckacrrsgctggcatgacccacatcgtccgggaagttgacaggccaggatccaaggtgaacaagaaagaagttgtggaggctgtaaccattgtggaaacaccacccatggtagttgtgggcattgtgggatatgttgaaaccccacgaggtctccgcaccttcaakacagtatttgctgagcacatcaktgacgagtgtaagaggcgtnnnnnnnnnnnnnnncacaaatctaagaagaaggnnnnnnnnnnnnnnnnnnngaaatggcaggatgacatgggcaagaaacagctggagaasgacttcaacagcatgaagaagtactgccaagtcatccgcataattgctcacactcagatgcggctgcttcctttgcgccagaagaaggcacatttgatggagatccakgtgaacgggggcaccgkggctgaraagctagactgggcccgagagaggttggagcagcaggttcctgtgaaccaggtgtttggacaggatgagatgattgatgtcatcggggtgacaaaaggcaaaggctacaaaggggtgactagtcgttggcatacaaagaaactgccccgcaagacccatcgagggctgcgcaaagttgcctgtattggagcctggcaccctgcccgtgtggctttctctgtggctcgagctgggcagaaaggctaccatcaccgaacggagattaacaaaaagatttacaagattggtcaaggctacctcatcaaggatggtaagctgattaag

SEQ ID NO: 63 - DNA, 579 bp, Cricetulus griseus
aagtcaagcatttctgtcccaatgtgcccatcatcctggttgggaacaagaaggatcttcggaatgatgagcacacaagacgggagttagccaaaatgaagcaggagccggtaaaacctgaagaaggcagagatatggcaaacaggattggcgcttttgggtacatggagtgttcagcaaagaccaaagatggagtgagagaggtttttgaaatggccacgagagctgctctgcaagccagacgtgggaagaaaaaatctgggtgcctcattttgtgaagccttgtgcaagcacagccctcatgcggttaattttgaagtgctgtttattaatcttagtgtatgattactggccttttcatttatctataatttacctaagattacaaatcagaagtcatcttgctaccagtatttagaagccaaccatgattattaatgatgtccaacctgtctgaccagccagggtctttctgacactgctctaacagctctctctgcactccacctgacaccaggcgctaagtcaaagaatttcttaacttcttgcttctttctagaaagagaaacagttggtaac

SEQ ID NO: 64 - DNA, 961 bp, Cricetulus griseus
  misc_feature (226)..(268): n is a, c, g, or t
atctccgagaatatgaggagccgctggatttggcggctccttcgccctgacggcggtgggtcccgctggacttcagctcctcacgggtgtctgtcacccgtcctgcggagaggtttcttgaccaccacaacaaagacgagttatgatagaaggccagtggacgtaactcctttagaacaaagaaaattaacttttgatacccatgcactggtgaaggacttggaannnnnnnnnnnnnnnnnnnnnnnnnnnnnnnnnnnnnnnnnnntactaagtaaattatcaaatgtcagcctggatactatctataaggaaatggtgactaaagctcaacaggaaataacagtccaacagctaatggctcatttggattccatcaggaaagacatggtcatcctagagaaaagtgaatttgcaaatctgagagcagagaatgagaaaatgaaaattgaattagatcaagttaaacagcagctgactcatgaaagcagtcgaatcagagcagataataagttggacatcaacctggraaggagcagagtaacagacatgttcacagatcaagaaawgcaacttatggaagcaaccaatgaatttaccaaaaaggatacccaaaccaaaagtattatttcagagaccagtaataaaattgacactgaaattgcttccttaaaaacactgatggagtcgaacaaacttgagacaattcgatatcttgcagcctcggtgttcacttgcttggcaatagcattggggttttatcggttttggaaggaatattgacactcctcttgctgctgatcactccataaactgtactttctacatattcttcaaagtactcatcgactaaatagaagtgtttggatattttatttttaggttatatgactttattatgttgaaaagctgtctcccaaagcctggtttgagataaaaggacattttgtccttatccttt

SEQ ID NO: 65 - DNA, 654 bp, Cricetulus griseus
  misc_feature (2)..(16): n is a, c, g, or t
cnnnnnnnnnnnnnnnttttttaacaracttaattcaytttattycccttatataaaacccttatgkggkggccacagytgcascctgggtcctytraacararactytggkgkgggctttcacaaratggkcagkgaattcctgataaggaracttggkgaacacagtytytttccaaaggtcgggggttaggtasctgtaggtyttgraratggcatmaaaggkggccttggcaaakttgcccasggkggcagkgcascccctggctgacgtgtagcaktcatmaataccavccatcatcaktakcttyttaggcmcaggabcararacratsccaktgcctytgggggcarggatradacscmccaacacadasccacagbggcctgtcaytttacatggaacakkgkggggcttgccaatyttgttcccccaktascctyttckyacagggacaatggaaagcttggccasgatgatggcccctcggatggcagkggctacctccttggagcacttaacaccaaraccaacwtgaccrkkgtagbccccaatagcracraaagccttgaacctggtccgctggccagcccaagtctgcttctgcactggcatgatctttaaaacctcatcctttagggatgcgcccagga

SEQ ID NO: 66 - DNA, 771 bp, Cricetulus griseus
ctgggagatgctgtggagcagggtgtgattaacaactcagtattaggctatttcattggccgcatctacctctacctcatgaaggttggaatatctcctgataaacttcgcttccgacagcacatggagaatgagatggcccattatgcctgcgactgctgggatgcagagtccaaaacgtcctatggctggattgagattgttggatgtgcggatcgttcctgctacgacctgtcctgtcatgctcgagtcaccaaagtcccactagtagctgagaaacctctgaaagaacccaaaatagttaatgttgtacagtttgagcccaataagggagcagtgggcaaagcgtacaagaaggatgcaaagctggtgatggagtacctcagctcctgtgacgaatgctacatcacagagatggaacagctgctgaacgagaaaggggaattcactattgaaaccgaagggaagacatttcagttaacgaaagacatggtcagtgtgaagagattccagaaaacactacacgtggaagaagttgttccgagtgtaattgagccctcctttggcctgggcaggatcatgtataccatattggagcacacattccatgtccgagagggagatgagcagagaacgttcttcagtttcccagctgtggttgctccattcaaatgttctgtccttccactgagccaaaaccaagagttcatgccatttgtcaaggaattatctgaagctctgaccaggaatggcgtgtctcataaagtagat

SEQ ID NO: 67 - DNA, 974 bp, Cricetulus griseus
gatggcgctcaccagctttttacctgcgcccacacaactatctcaggaccaacttgaagctgaagaaagagcaagatctcagagatctcggcagacctcactggtctcctcaagaagggagcctcccccatacgggtatcggaaaggctggattcctcgattgttagaggattttggagatggaggtgctttcccagaaatccacgtggcccagtatccactggatatggggcgaaagaagaaaatgtcaaatgcactggccattcaggtggaccctgaagggaaaattaaatacgatgcaattgctcgacaggggcagtccaaagacaaggtcatttacagcaagtacactgacctggttccaaaggaggttatgaatgcagatgatccagacctgcaaaggcctgatgaagaggctattaaagagataacagagaagacaagagtagccttggagaagtctgtgtcgcaraargttgctgcagccmtgcctgttcgtgcagctgacaagctggstcctgctcagtatatycgctacacaccatytcagcaaggagtagcattcmactctggagctaaacagagggttattcggatggtagaaatgcagaaagatccaatggagccgccaagattcaagattaataagaaaattccccggggaccaccatctcctcctgcacctgtaatgcattcctctagtcggaagatgactgtaaaggagcaacaagagtggaagatccccccttgtatttccaacatgaaaaacgcaaagggttacacaattcctctggataaacggctggctgctgatggaagaggacttcagactgtacacataaacgaaaattttgccaaactggctgaagcgctatacattgctgatcggaaggctcgtgaagctgtggaaatgatagcccaagtggagaggaagatggctcataaagaaaaggagaaacatgaagagaaactta

SEQ ID NO: 68 - DNA, 584 bp, Cricetulus griseus
ccttcatttgcatatttagaaaatgggcagacctttactactatggccatcaaaaccagtcccaagcatctggagctgtctgkgcagatgtatgcccaagcagccctggatggagactcccagggatttttcaacctggctctactgatagaggaaggtgctgccgtctcacaccacattctggagtkcctggaaattgacccatcactccatcccagtaacgcctccattctccgggagctgtatgaaaggtgctggagcctsagtaacgaggagtcgcttawcccctgcgccctggcctggctttaccttcacctgcggcttctctggagtgctgttctgcactctgccctgatctacttccttggaaccttcttgctgtccgtakkgatcgcctggatggtgctctatttccagwgtgtctcasccagtggctcctstccascaccatgmctgggtcgtggcagaccccacctcatccgccccaagtccakctgtgcctccarctgsagatgcctccgaccatgacccacccatgatggctaacaaccctgagcctcgagggtgaacttgcacgtccattc

SEQ ID NO: 69 - DNA, 619 bp, Cricetulus griseus
tgcttgggcgtcgcagggccggaggcgcggggatagaaggagcaccatgtccgcggaagttcccgaggcagcgtcggcggaggagcaaaaggaaatggaagataaagtgactagtccagagaaagctgaagaagcaaagttaaaagcaaggtatccacacttgggacaaaagcctggaggttccgattttttaaggaaacgattgcagaaagggcaaaagtattttgattctggggattacaacatggcaaaagcaaagatgaagaacaagcagcttcctgcagcagccccagataagacagaggtcactggtgaccacattcccactccacaggaccttcctcagcggaaaccatccctggttgctagcaagctggctggctgattaaaagagctgaactgcatgagtcttctaatgtcctttatttctccttactacgttacttacccactttctgtttcctttcactcactatgtcatttgagactgacagctttgcaggtagtggtagtatgtgctgctgttgtaagggagcatacatgtgtagaggtttcggttagtttaacagtgcactgatgcaaaggacatgtaacagcaacttaagttacgataattgta

SEQ ID NO: 70 - DNA, 548 bp, Cricetulus griseus
  misc_feature (544)..(544): n is a, c, g, or t
gagagcggtgtgtggagccttcggcttgggagkaaggcgctgtccgaacgaacargacccgagcggcagctgtgctcccgccttggaagtggttcaatcatggttgaaattaaraagatctgttgcattggtgcaggctatgttggtgggcccacatgcagkgtsrttgctcatatgtgccctgaaatcagggtaacagttgttgatgtcaatgagtcaagaatcaatgcatggaattctccaacccttcctatttatgagcctggattaaargaagtggtakaatcctgtcgagggaaaaatctgtttttttctaccaatattgatgatgccatcagagaagctgacctagtatttatttctgtaaacacaccaacaaaaacctatgggatggrgaaaggccgggcarmawatctgaaatatattgaagcttgtgctcgacgcatwgtgcaaaactcawatggggtcaaaatcgtgactgagaaaagcacagtccctgtgcgggcagcatagagcatccgccgtttatttgatgccaacacanagcc

SEQ ID NO: 71 - DNA, 580 bp, Cricetulus griseus
cagtgatgttttatgcacctgtaatgattagattaattcaacataaagttgaatttgatgaagtgagtcattatccaggtatacagttctgcttctatgttgatggccatcatcgtcctttcctcaagacctttaaactcttcttcaaaacttgagtctttatctggctgctaatttattgaagtgtttatttgcccataccacttagttaatataaatggcagccaagctatgtctatagctgatgacattctcccttgctgttgktttcattgtatggatttttttgtcacgtcaatatactgtttatttaggaaagaagaaaataggktgctgagagaaataatttarggactgcctgccttccatttgccttgtctttccagattgttttakccttgggaggattctaggaaactgttcccaatagattttgatctctgatttcatatctttggtttcataaagttacatatgatagaaatttgagtgaaaagcagcgaagagtgaaactgtgggcaaacagtaattttgtaagatacaaagcaagcaggcagacctttatgatgagtgaagagga

SEQ ID NO: 72 - DNA, 802 bp, Cricetulus griseus
acttgctccagccagacatggagaaatgtgggctgtctccccaaatgaccggctggttccaacagtaactcggactccagttcagcgacagagtagtgtgtcttcaacagcttctataactctcggtgatcctggtctcacgaggcgtactcagatttctgaaggagattatttatcatacagagaattacattcagtgggaagaacaccagtgatgtcaggatcgcmgagacctctttctgcacgggcatacagcattgatggcccaaatacttcaaggcctcagagtgcccgcccctctattagtgaaataccagagagaactatgtcagttagtgatttcaattactcacggactagtccttcaaaaagaccaaatgcaagggttggttctgaacattctttattagatcctccaggaaaaagcaaagttcctcatgactggcgagaacaagtacttcgacatattgaggccaaaaagttagaaaagcatccccagacatccagtccaggagattcttgccaagatgatagattgatttcaggagagcagaactactcaccaggtgcacttagtcacaaagatcttccagacagcttgatgaaaatgcctttgagtaatggacagatgggccagcctctcaggcctcaggcaaattatagtcaaatacatcatccccctcaggcatctgtggcaaggcatccctctagagaacaactcattgattatttgatgctgaaagtggcccaccagcctccatatacacatccccattgttctcctagacaggctatgagctgg

SEQ ID NO: 73 - DNA, 1184 bp, Cricetulus griseus
  misc_feature (1029)..(1050): n is a, c, g, or t
tcgacccagcgtccgaaatggttcaatgtaaggaacggatacggtttcatcaacaggaatgacaccaaggtaagacgtatttgtacaccagactgccmtataagaagaataaccccaggaagtaccttcgcagygtakgagatggagagactgtggagtttgrtgttgttgaaggagaaaaggtgcggaggcagcaaatgttacaggccctggtggagttccagttcaaggcagtaaatacgcagcagaccgtaaccattatagacgctatccacgtcgtaagggtcctccacgcaattaccagcaaaattaccagaatagtgagagtggggaaaagaacgagggatcggaaagcgctcctgaagggcaagcccaacaacgccggccctatcgtaggcgaaggttcccaccttactacatgcggagaccctatgggcgtcgaccacagtattccaaccctcctgtgcaaggagaagtgatggagggtgctgacaaccagggtgcaggagagcaaggtagaccagtgagacagaatatgtatcggggttacagaccgcgattccgcakgggccctcctcgccaaagacagcctakagaggacggcaatgaagaagacaaggaaaatcaaggagatgagacccagggtcagcaaccacctcaacgtcggtatcgccgcaacttcaattaccgacgcagacgcccagagaaccctaaaccacaagatggcaaagagacaaaagcagccgatccaccagctgagaattcgtccgctcccgaggctgakcagggcggggctgagtaaatgccggcttaccatctstaccatmatccggkttgggtcwtccmacaagaagaaatgratwtgaaattccascmwtwagaaawkaacaaaratkggagcysaaraccttaagtgcttgctttttgcccgttgaccagatacactagaactatctgcattatctatgcagcatggggtttttattatttttacctaaagatgtctctttttggtaatgacaaacgtgnnnnnnnnnnnnnnnnnnnnnntggtttttctcaatacacctttaagggtttttaaatggtttcatatcggggcaagtggagatttttaaaaacttcatttttaatttggaataaaagtttacaacttgattttttcaaaaaaaaattaacaaact

SEQ ID NO: 74 - DNA, 411 bp, Cricetulus griseus
tctctcactgaatgctttgcagatggccttgtttacggcttatggctccaattctgcaatcctaacagggtcccctacactttcttagtatggtcttcctgcctgacatcactgaggtcacatargcagtgtagaatactggttctgtgtgtcaccagcatatagattgctgtcagctatcacttagtgttttacatttttatagagtatattgttaatgtgtgtgtgggggggggtgaatgtcttttcctcctttttagagataaatgccctctaaagggatwgtgckcttcatccccarggtgttcyttttctaktgcccgctttctgcwkarccagcctggctcgggcattataaacaactgtaccttgcgtcctctatcamtccttyatagttccatgccacttttg

SEQ ID NO: 75 - DNA, 690 bp, Cricetulus griseus
  misc_feature (6)..(30): n is a, c, g, or t
  misc_feature (652)..(652): n is a, c, g, or t
gttggnnnnnnnnnnnnnnnnnnnnnnnnngattgcggctgttgttcgagcgctaacagcggcgcggcggtcccagcaagggcctcagacttcggctttgggtgaaaaaaaatggcccgaaccaagcagaccgctaggaagtccacgggtgggaaagccccccgcaaacagctggccaccaaggcagccaggaaaagcgcgccctctaccggcggggtgaagaaacctcaccgctacaggcccgggaccgtggctstragagagatccgtcgctaccagaagtcgactgagctgctcatccggaagctgcctttccagaggttggtgagggagatcgcccaggatttcaaaacggacttgaggtttcagagtgcagccattggtgcccttcawgaggccagtgaagcgtacctggtggggttgtttgaagacaccaatctgtgtgccatccatgccaagagagtcaccatcatgcccaaagacatccakttggctcgccggatacggggggagagagcttaagtcaaggcggtttttatggcattttgtagtaaattctgtaaaatacttwrgtttaatttgtgactttttttgtaagaaattgtttataatatgttgcatttgtacttaagtcattccatctttcactcangatgaatgggaagagtgactgtgcagacctcagtgacg

SEQ ID NO: 76 - DNA, 580 bp, Cricetulus griseus
atggygttsgaaagcactatggtttgtgtggacaacagtgaatacatgcggaatggagacttccttcccacccggctgcaggcccagcaggatgccgtcaatattgtatgtcactcaaagacccgaagcaaccctgagaataacgtgggcctcatcacactggccaatgactgtgaagtgctgaccacactcacccctgacactggccgcatcctctccaagctccatactgtccaacccaagggcaagatcaccttctgcaccggcattcgagtggcccatctggctctgaagcaccggcagggcaagaatcacaagatgagaatcatcgccttcgtgggtagccctgtggaggacaacgagaaggatctggtgaaactagccaaacscctcaagawagaaaaagtgaatgttgacatcatcaattttggggaggaggaggtgaacacagagaagctgactgcctttgtgaacacactgaatggcaaggacggaaccggatcacatctggtgacagtgcctcccgggcctagcttggctgatgccctcatcagttctcctattctggctggtgaaggtg

SEQ ID NO: 77 - DNA, 1623 bp, Cricetulus griseus
atcaccatggcggctggggtaagttcgccggctctggtgatccaggtcacttcatccaccgccatcctttgactgagtcgggtcagtcggcgccaggagagttccagacccaaacggagagccgatctggggttcgcaggccgtaccgccggagagcagggttcctagggcctggaggggaactgaggctggggctcggaggccagaggtggaatgttctggggttgaggagaagagatgctgggtcttcagtgtctggatgtttaaaaagtggctcrrcygcactgcsmtyykawsmyrtggygkctggaccctgtacacayatcctgaaaactggagagccttcaaggccctcatcgctgctcaktacagcggggctcargtccgcgtgctctccgcaccaccccacttccactttggccaaaccaaccgcacccctgaattksbbaraaagkttcctgctggcaaggtcccagcatttgarggggacgacggattctgtgtgtttgagagcaatgccattgcyyattacgtaagcaatgaggaccttcgtggaagtactccakargcagcggctcadgtggtgcagtgggtgagctttgctgacagtgacatcgttcctccagccagtacctgggtgtkccccaccttgggcatcatgcaccacaacaaacaggccactgaaaatgcaaaarargaggtgaagcgaatcctggggctgctggacactcatttgaagacaakgacttttttggtgggtgagcgagtgaccctggctgatatcacagktgkctgcacccttctgkggstctacaagcargtcttagagccttcttttcgtcaggccttycccaataccaaccgatggttccttacctgcattaaccagccccagttcakggcggtcttgggggaggtgaagctgtgtgagaagatggcccaktttgatgctaaaaagtttgcagagagccagcctaaaaaagaaactccaaggaaagaaaagggttcwckakaagagaaacagaagccccaggctgagcggaaagaagaaaaaaargcagctgccccagctcctgaggaggagatggacgagtgtgagcaggcacttgctgctgagcccaaggccaaggacccctttgctcacctgcccaagagtaccttcgtgttggatgagtttaagcggaagtactccaatgaggacacagtgtctgtggcgctgccatatttttgggagcactttgataaggatggctggtccctgtggtatgctgagtaccgcttccctgaagagctcacccagactttcatgagttgcaacctcatcactgggatgttccagcgattggacaaactgaggaagaatgcctttgctagtgtcatcctctttggaaccaacaatagcagctccatttctggcgtttgggtcttccgaggccaagaacttgcctttccgctgagtccagattggcaggtggactacgagtcgtatacatggcggaaactggatcctggtagcgaggagacccagaccttggttcgagagtacttttcctgggagggggcctttcatcatgtgggcaaaaacttcaatcaaagcaagatctttaagtgaacatgttttgc

SEQ ID NO: 78 - DNA, 579 bp, Cricetulus griseus
  misc_feature (20)..(38): n is a, c, g, or t
  misc_feature (129)..(152): n is a, c, g, or t
cggccgcgggcttctggcgnnnnnnnnnnnnnnnnnnntctctccctctccctccctgctgctgccggcctccgggatccaaccgacgccatgggtttcggagacctgaaaacccccgcgggcctccannnnnnnnnnnnnnnnnnnnnnnncaagagctacatcgaggggtacgtgccatcgcaagcagatgtggccgtctttgaagccgtctctggtcctccgcccgctgacctgtgtcatgctctgcgctggtataaccacatcaagtcttacgagaaagagaaagccagcctgccaggagtgaagaaatctctgggcaagtatggccctgccagtgtggaagacaccacaggaagtggaactgcggatgctaaagatgatgatgacattgatctcttcggatcagatgatgaggaggaaagcgaagaagcaaagaggctccgagaagagcgccttgcacagtatgaatcaaagaaagctaaaaagcctgcggttgtcgccaagtcttccatctttctatatgtgaagcctcgggatgatgacacagacatgacataattagaggagcgtgtcaga

SEQ ID NO: 79 - DNA, 579 bp, Cricetulus griseus
aagaggcggagggacaggttctagtgttggatggcagaggccatcttctgggccgcctggcggccattgtggcaaagcaagtgctactgggccggaaggtagtcgttgtgcgctgtgaargcatcaacatttctggaaacttttacagaaacaagttaaagtacctggctttcctccgaaagcggatgaacaccaacccctctcgaggcccctaccacttccgagccccgagccgcattttttggcgcactgtacgaggcatgctgccccacaagactaakcgaggccaggctgccttggaacgcctcaaggtgttggatgggatccctcctccctatgacaagaaaaaacggwtggtggtccctgccgccctcaaggttgtgcggctgawgcctactakaaagtytkcctacctggggcgcctggctcatgakgtcgggtggaaataccaggcagtgacagccacgctggaggataaacgctacgaaaatgcccctgtccactatccgtacaataaccaatttttttagcttcgcttacccggaagataacatcttgtataataatattatttaactt

SEQ ID NO: 80 - DNA, 591 bp, Cricetulus griseus
ggtttggctggcccggaggggagcctcgtggtagaggtgaccggagctgagcatttcagatctgcttagtgaaccggtgtatcacccaccatgctggctgcaaggctcctgtgtctccggacactgccttccagggttttccagcccactttcaccaaggcctccccacttgtgaagaattccatcacgaagaatcaatggctcttaacacccagcagggaatatactaccaagacaagagttaggattcaccgtgggaaaactggccaaggactgaaagaggcagcttttgaaccatcagtggaaaaaatctttaaaattgatcasatgggaaggtggtttgttgctggaggagcagctgttggtcttggagctctgtgctattatggcttgggaatgtctaatgagatcggagctatcgaaaaggctgtaatttggcctcagtatgtgagggatagaattcattctacttacatgtacttatcagggagtattggtttaacagctttgtctgcmttggcattagccagaacacctgctgtaatgaacttcatgatgaaaggctcttggatgaccaattggtgcaacctt

SEQ ID NO: 81 - DNA, 1577 bp, Cricetulus griseus
  misc_feature (44)..(80): n is a, c, g, or t
gcatcttgcttggtttcttctttctcccgggcaaacagctggcnnnnnnnnnnnnnnnnnnnnnnnnnnnnnnnnnnnnngacttttccagtagctgaaatattactccttcctcctaggtacttctttccttgttctgaggtcccagagtgctgctgcctcaaactagaaatataacaaatataacacatataacacttcctggaagtgttccctacctgccaacaacttcattacaggctttgcttgatgggatggggaaatttccttgatttgatacatakcaagcaratcgtctggagacaasagttggcatacvtrgtatggctggcaagtaagactgggagacaaataggaaaaggtggccttcagtggcctmcttarcaaasacactgggcccctttctacagcgtgcctcctttctgtccatactctgacccacagagcttaktgagacgggagtaatggaatcacatgtctgasggggaaggggattgagcatggtctggtctgtgctgagaargcagactggcttttakcaacatgaagatttcttcatagaagtcatcttystgtgaactgatggctaaacagcctgtggcgttttgaggatatggcacaaaactgtgtagctataaataaattcttcacttggaacttgaaagtatttcattttgaaaaattgawrgacaagaggagttatctargttgccgatttctttcgtggcargacaggaagtggawagcttgagggtcagcytctgtaggtagctgctawrargtagatttctaaatgaarcccttggggagcacactgccaggaatccggaagtgttagctccatccgttactctaatttcgtccttcgattgagtagagaccgatttctcgtggtgttgaaccttccctgcattcttcgctttgtggccacccagcctacatcatgctgcccgggaggctactacctaccctgcttttgatttcttctgcyagttctctgttctttggcattttcttctctccctggacaggcatcgagttgcctgagtgtattcagagcactctggacttgctgtctargcatgttcctgtctcacagatgcagcgctcatgggctcggaactgctgtgtcactttatcgagcagagccaggtgcctctcttctgtgccctctagatcctctctctctacctctaccccaagtgcctctgccaccgtgacttcagaaaagcttggcagtccctctagcaacatcctaagttcagagattgtctggttggtgagttaatagctcagccgaatgctcacattgtctcagtgaggcaactactgaccaagatggttcattgttgcctctgtgagtcagagtagacagcacatttgtttttccttgcacgcttggcaagtggctctggctgattaatatatgcaggtggtggtacaaatgcttgtgaggttccccattttatccctgtacaaacaccagaagcgtgggcaattgcccaagaagaggccctgcttcctgaagccaggtgtgatgcaaagtttgaactgaaatgtggtagctcaggtgacac

SEQ ID NO: 82 - DNA, 777 bp, Cricetulus griseus
  misc_feature (257)..(276): n is a, c, g, or t
gaagatggcggaggagcggcaggactcgctgagagagttcgtggcggtgacgggcgctgaggaggaccgggcccgtttcttcctggagtcagccggctgggacctgcagattgcactagcaagcttttatgaggatggaggggatgaagacattgtgaccatttcacaggcaaccccaagttcagtgtctagaggcacagctcccagtgataatagggtgacgtccttcagagaccttattcatgaccaagatgagnnnnnnnnnnnnnnnnnnnngacagaggagcaggttttatgctgggggctcaragagaagtggacagcagattgttggtsctccccggaagagaagtcccaacgagctggtggatgatctgtttaarggtgccaaagagcatggggctgtasytgtggagcgagtgaccaagagccctggagagaccagkmaaccgakaccatttgcaggakggggctaccgccttggagcagcaccagaggaagagtctgcctacgtggcaggagaawrgasgcgacattcgggccawkatgtycatgyagtgctgaagctctgsagawctggattcagccttgacaatggtgaactcagaagctaccaagacccatccaatgcccagtttctggagtctatccgtagaggrkwktgtgmmgcscaagggagcttysrawgccttmrctsrcgwgggcsrtraactggryagcacggccccccatgtattgaacaccagctctccagcccagcaagcagataatgaagcc

SEQ ID NO: 83 - DNA, 605 bp, Cricetulus griseus
ctcccctagcgccgccgggcccgcaggtctgtgtggagccgcggttgcgggtgtctgttccgcakgatggggttcgtgaaagttgtcaagaataaggcctacttcaagaggtaccaagtgagatttakaaggcggcgagagggtaaaactgactactatgcksggraacgattggkgatccaggacaaaaataagtmcaacacacccaaatacaggatgatagttcgtgtaactaacagagatatcatctgtcagattgcctatgcccgtatagaaggggacatgatagtctgcgcagcatatgcacacgaactgccaaaatacggggtcaaagttggcctgacaaattatgctgcagcctattgcaccggcctgctgctggcccgcakgctyctcaatakgtttggtatggacaagatctatgaaggccaagtggaggtgactggakacgaatacawtgttgagagcatygatggccagcctggtgccttcacctgctatttggatgcaggtcttgcccgaactacaactggcaataaagtttttggggccctgaagggagctgtggatggaggcttgtctattcctcatagtaccaaacgatt

SEQ ID NO: 84 - DNA, 876 bp, Cricetulus griseus
ctcccttttccggtcggcgtggttctcgagcggagtgtcttccgcagccgcgccttcaccatgagcgtcccggctttcatcgacatcagcgaggaagaccaggcagctgaacttcgtgcttatttgaaatcaaaaggagckgagakctcagaagagaactcggaaggtggacttcatgtagatttagctcagattattgaagcctgtgatgtgtgtctgaaggaagatgataaagatgttgaaagtgtgatgaacagtgtggtatccctcctcttgatcctggaaccagacaagcaagaagcattgattgaaagtctgtgtgaaaagttagycaagtttcgggaaggtgaacgcccgtctctgagactacaattgctcakcaaccttttccacgggatggataagaacactcctgyaagatacacagtgtactgcagcctcatcaargyggcagcatcgtgyggggccatycagtacatcccaactgagctggatcaagtgagaaaatggatttccgactggaagctcaccactgaaaagaaacacacccttttaagactactttatgaggcactcgtggattgtaagaaaagtgatgctgcatcaaaggtcatggtggagttgctggggagttacacagaagacaatgcttcccaagctcgagttgatgcccacaggtgtattgtgcgggcactgaaggatccaaatgcctttctttttgaccatcttcttactctaaagccagtcaaatttttggaaggcgagcttatccatgatttattaaccatttttgtgagtgctaaattggcatcatatgtcaagttctatcagaataataaagatttcattgattcacttggcctgttacatgaacaa

SEQ ID NO: 85 - DNA, 595 bp, Cricetulus griseus
  misc_feature (93)..(139): n is a, c, g, or t
  misc_feature (167)..(213): n is a, c, g, or t
  misc_feature (246)..(298): n is a, c, g, or t
  misc_feature (328)..(374): n is a, c, g, or t
  misc_feature (452)..(543): n is a, c, g, or t
tagttccaatcctaattgcaatagctttccttacattagtagaacgaaaaatcctaggctacatacaactacgaaaaggcccaaacatcgtcnnnnnnnnnnnnnnnnnnnnnnnnnnnnnnnnnnnnnnnnnnnnnnntattaaagaacctttacgccccctagcnnnnnnnnnnnnnnnnnnnnnnnnnnnnnnnnnnnnnnnnnnnnnnntarcgttcagcctatgagttcctattccaatannnnnnnnnnnnnnnnnnnnnnnnnnnnnnnnnnnnnnnnnnnnnnnnnnnnncaagcctttctgtatattcaatcttatgannnnnnnnnnnnnnnnnnnnnnnnnnnnnnnnnnnnnnnnnnnnnnnagctgkagcacaaactatttcatatgaagtaactatagcaatcattttactatcacgcctacttataaggggctcttnnnnnnnnnnnnnnnnnnnnnnnnnnnnnnnnnnnnnnnnnnnnnnnnnnnnnnnnnnnnnnnnnnnnnnnnnnnnnnnnnnnnnnnnnnnngcagaaacaaatcgagctcctttcgacctcactgaaggagaatctgaactag

SEQ ID NO: 86 - DNA, 604 bp, Cricetulus griseus
ctggtttgacaagttcaaatatgatgacgcagaaaggaaattctacgagcagatgaatgggcctgtgactgctggctcccgccaggagaatggtgccagcgtgatcctccgtgacattgcaagagccagagagaacatccagaaatccctggccggaagctcaggccctggggcctccagtggacctggtggagatcatagtgagctcattgtaaggattgccagtctggaagtggagaaccagaatcttcgaggcgtggtacatgatctgcagcagtccatttccaagttggaggtcaggctgaacactctggagaagagttcacctactcacagagccacagcccctcagacgcaacatgtgtctcctatgcgtcaagtggagcscccaaccaagaargcggccacaccggcagaggatgatgaggacgatgacattgacctgttcggcagtgatgaggaggaagaagataaggaggcagcccgactacsaraggagaggcttcgtcagtatgcagagaagawagccaagaaaccctcactggtggccaaatcctccatcctcttggatgtcaaaccttgggatgatgagacaaatatggcc

SEQ ID NO: 87 - DNA, 585 bp, Cricetulus griseus
ccctagagataaggcgcttcaagactaccgcaagaagctgctagagcacaaggagattgacggccgtcttaaggagctaagggaacagttaaaagaacttaccaagcagtatgaaaagtctgaaaatgatctgaaggcactacaaagtgkkgggcagattgtgggtgaagtgcttaaacagttaaccgaagagaaattcattgttaaagcaacaaatggaccaagatatgtagtaggttgtcgtcgtcagcttgataaaagtaagctgaagccaggaacaagagttgctttggatatgactacactaactataatgaggtatttgccaagagaggtggatcctttggtttacaacatgtctcatgaggaccctggaaatgtttcttattctgagattggagggttgtcagakcagattcgggagttacgagaggtaatagaattacctcttacaaacccagaattattccagcgtgtargaataatacctccaaaargctgtttgctgtatggaccaccaggcactgdgaaaacactyttggcacgagctgttgctagtcagctggactgcaacttcctaaaggt

SEQ ID NO: 88 - DNA, 578 bp, Cricetulus griseus
ctaagatggaggcgttgtgggagtcacgggctggccactgggccggggggccggctccggggcagttttaccgcgtcccgtccactccctgcgccctcatggacccggcgtccgcgctctgcgagggtccaatcacccggacccagaaccccatggtgactgggacgtcggtactcggggtgaagttcgactgcggagtggttattgctgcagacatgctgggctcctacggctccctggctcgtttccgcaatatctctcgtattatgcgagtcaacgacagcactatgctgggcgcttcgggagactacgccgacttccagtatttgaagcaagttctcggccagatggtgattgatgaagagctgttgggtgatggacacagctatagccctagagctattcattcatggttgacaagggccatgtacagccgacgctccaagatgaatcctctgtggaacaccatggtcattggaggctatgctgatggagaaagcttccttggttatgtggacatgcttggtgtagcttatgaagccccttcactagccactggctatggcgcatacttggct

SEQ ID NO: 89 - DNA, 780 bp, Cricetulus griseus
gactccagactgcctcacttcaccaagagtctgactgggagcaggtatgagccctggacttcaaacagcacagctaggcaacagcagagctcatgggaaagaaattcagcttgaaaatgcaaaggctgctggggaaatgtccatcactgtggatctggaaacagactatgctgagctggttctatatttaggagccatcacacttggggagaagaatagaaagaaaatgcagaaccctctcctcagaaaacgggagagtgaaaatatttctcgagctgtgtgtgctctcctcaactctggaggtggagcgatcaaggttaaaattgaaaatgaaaattatagcttcaacagggatggcctgggactggatttggaagcctctctttgtaaatgtctgccatttgtggggaggcacctagacttcatggagcagggaggatacttttacatctttgtgaaatcttggagtgcagacatctttgggctgccgattggcaccctgagaaccaatttgtacgtaagaacctggtcgtcctcagttgaagtggttgcctctgatgctcttgagttcctccaagaactggaggaaaatggagggagatcctgtgtcagaccagagcctcctgtatgtagagcctgccctggagtagaagaagaaagtctcctagaggacctggctgctgcagttttcaacaagacccaatttcagtaccaggaagacttccccttcaccaggtcaacctatgctgaagtgacattgctttcaaggaaacagctgca

SEQ ID NO: 90 - DNA, 499 bp, Cricetulus griseus
ctccgcagccatgagcagcaaagtgtcccgcgacaccctgtacgaggcagtgcgggaggtcctgcacggcaaccagcgcaagcgccgyaagtttctggaaacggtggagttgcakatcakcctgaagaactatgrcccccakaaggacaaacgtttctcgggcwccgtcaggctcaagtccacccctcgccccaagytytcggtgtgcgtcctgggggaccagcagcactgcgacgaatccaaggccgtagacatcccccacatggacatcgaggcgctgaagaagctcaacaagaacaagaagctggtcaagaagctggccaagaaatatgatgcctttttggcctccgagtccctgatcaagcagatcccacgtatcctgggcccaggcctaaacaaggcaggcaagttcccttccctgctgacacacaatgaaaacatggtggccaaagttgatgaggtgaagtctactatcaagttccagatgaagaaagtgctg

SEQ ID NO: 91 - DNA, 610 bp, Cricetulus griseus
  misc_feature (185)..(204): n is a, c, g, or t
  misc_feature (581)..(581): n is a, c, g, or t
ccgcctgasccgcykcygscymygkgtctckrcmctaggagtcttcgtcctckcccgaccgcgcaatggaaggktaccacaagccggatcakcakaakctgcakgccctgaaggacacakccaatcgcctgcgcatsakstccatccakgccaccaccsccsctggctccggccrccccacatcnnnnnnnnnnnnnnnnnnnntcatggctgtcttgtttttccataccatgcgctacaasgccctggatccccgaaaccctcacaatgatcgctttgtgctctccaagggccatgcagctcccatcctgtatgcagtctgggctgaagctggcttcctacccgagacagagctgctgaacctgaggaagatcagctctgacctggatgggcaccctgtcccaaaacaagccttcaccgatgkggccactggctccctgggccarggcctgggagctgcttgygggatggcctacacaggcaaatacttcgacaaagccagctatcgtgtctattgcatgctgggagatggagaagtgtctgagggctctgkctgggaggccatggsctttgccggaatntacaagctagacaacctccttgccatttt

SEQ ID NO: 92 - DNA, 620 bp, Cricetulus griseus
  misc_feature (333)..(377): n is a, c, g, or t
  misc_feature (513)..(528): n is a, c, g, or t
caaaagggaggaatttgcgtccatcttcttcactagaaatggctcatgtgctctgtaacagggccaggctggtttcctatctcccaggattctgttctttagtgaaaagagttatcagtccaaaagccttttcaactgcagggtcttcaggttctgatgagtctcatgtggccactgcacccccagatatatgttcccgaacagtgtggcctgatgaaactatgggaccatttggccctcaggatcagaggttccagcttcctgggaatatgggcttcgattgtcacctcaatgggactgcttcacagaagaaaagcctgacccataaaactnnnnnnnnnnnnnnnnnnnnnnnnnnnnnnnnnnnnnnnnnnnnntttgtgatggctcaktatgtgaacgagtttcagagtagtgatgcacctgtcgaacaagawattaacagtgcagaaacttactttgaaagtgccagagttgagtgtgtaatccagacatgtccagaactgctgcaannnnnnnnnnnnnnnntttttccagaagtggctaataacaaactaatgattctgactgtracacaggaaactgaaaatgacatgactgcttggagtgaagaggtatat

SEQ ID NO: 93 - DNA, 697 bp, Cricetulus griseus
  misc_feature (654)..(654): n is a, c, g, or t
tgctctagattagagactcccgaatcccttcatcaaccacagatggctgtggaatccaccctgtgcagctccgaggatggaactgaaggaacagaagtctgcagtggcctttcgtgcacagtacttccagcagccaacatgcgtttcttttctgttgctttgttttgttttaggaaaacacttttctccctgacagtttatagatgttgataaatgtcctgtcattctggtcaggagacggtcatgatgaccattggcccagggctccaactctgtggcttagacctcttttctaaaataatggtttttctgcatggcagtcctgtcagaaggtgtcaaaagcattctcaagygctgcctatgacattcttagaattttctggtattacacagttccacacaaatgttcctgctgtgtgaacagagacttctcctccatcctggtagttaaatgatgtcacagggaggcctgcrttggtcawgctggccttctcagtgactcagggatcattctgcatccgtgcatacatgcaccagatatgatgttctctgggcaaacaggccctttcctgtctgtcctgggcacttgtttatctacagcttctcctttctttgccttcgacacatcttatggactatgtatgtattatccangcttgatggaaactggtgcttgtagtcaggtctgtaaagcctt

SEQ ID NO: 94 - DNA, 567 bp, Cricetulus griseus
gctttggccataaagcccgaggcggcggcgttgattacggtgtttggggctgggcagctccggggagcctgctggagccggagtcggacctctctgtcgcggcctgcgttgtgtctccttgtcggcggaccccgcgcttaaaggatgacctctaggaagaaagtgttgctgaaggtcatcatcctgggagattctggtgttggaaagacatccctcatgaaccagtatgtgaatmagaagtttagtaaccaatacaaagccacaataggagcagactttctgaccaaggaggtgatggttgacgacagacttgycaccatgcagatctgggacacagctggtcaagaacggttccagtctcttggtgtggccttctacagaggtgcagattgctgtgttctggtgtttgatgtgactgcccctaacacattcaaaacccttgacagctggagagacgagtttcttatccaagccagcccccgggatcctgagaactttcctyttgttgtattgggaaacaagattgaccttgaaaacagacaagtggscacaaagagggcacaggct

SEQ ID NO: 95 - DNA, 896 bp, Cricetulus griseus
cctgggagtgagacgtctctgggatcggggtctctccacagcagacatgacgaarggtcttgttttaggaatttattccaaagataaagatgatgacacaccacagtttacaagtgcaggakagaattttaataagttggtggctggaaagctgasagaaatgttgaacatatctggacctcctctgaaggcaggcaaaacccgaaccttctatggtctgcatgargacttccccaktgtggwggtggtcggccttggyaagagatcagccggagttgatgaccaggagaactggaatgaakgcaaakaaaacatcagakctgctgttgcakcgggatgcaygcaggttcaagacctggagctgccttcaktggaggtggatccctgyggagatgctcakgctgctgcagaakgagccgtgcttggtctctatgagtyygatgacctaaakcagaaaaagaaggtggctgtatcagcgaagctctatggaagtggcgatcaakakgcctgggagagaggggtcctctttgskkctgggcagaacttggcccgccagctgatggagtctccatccaatgagatgacaccaaccagattcgctgaaattattgaaagaaatctcaaacatgccagtagtaaaacagaggtccatatcagacccaagtcttggatagaggaacaagaaatgggctcgttccttagtgtggccaaggggtctgaagaaccaccagtcttcttggaaatccactacacaggcagccccaatgcaagtgaagcacccctggtgtttgtgggaaagggaattacctttgacagtggaggtgtctccatcaaggcttctgcaaatatggacctcatgcgggctgacatgggaggagctgcaacaatatgctcgg

SEQ ID NO: 96 - DNA, 835 bp, Cricetulus griseus
  misc_feature (412)..(460): n is a, c, g, or t
  misc_feature (517)..(563): n is a, c, g, or t
gcagctgcagatgaggaagatgaggatgaggaggaaggggaagtggtggaagaccgtgattactactatgactcttttaaaggagatgactacaatgaggagaacccaactgaacccagcagtgatggcgctatttcagacaaggaaattgctcacgatgttaaagctgtctgctcccaggaggcgatgacggggccctgccgggctgtgatgcctcgttggtacttcgacctctccaagggaaagtgcgtacgctttatatatggcggctgcggcggcaacaggaacaattttgagtctgaggattattgtatggctgtgtgtaaaacgatgattcctcccactcctctgccaaccaatgatgttgatgtgtattttgagacctcagcggatgataatgagcacgcccgcnnnnnnnnnnnnnnnnnnnnnnnnnnnnnnnnnnnnnnnnnnnnnnnnnacagggtaaagaaggagtgggaagaggcagakcttcaagccaagaaccttcccaaannnnnnnnnnnnnnnnnnnnnnnnnnnnnnnnnnnnnnnnnnnnnnntttagagaaggaagcagccagtgagaagcagcagcttgtggaaacccacttggcccgagtggaagccatgctgaatgaacgccggcggatagctctggaaaattacctagctgccctgcagtctgacccaccacggccgcatcgcattctgcaggctctgcgccgttacgtgcgtgctgagaataaagaccgcctgcacaccattcgtcattaccagcatgtgttggctgttgacccagaaaaggctgcccagatgaaatcccaggtgatga

SEQ ID NO: 97 - DNA, 788 bp, Cricetulus griseus
tgcggcggctcagctcttctgtcgctctccctgtctccctttcgcttccggaaacatggcctctggtgtggctgtctctgatggtgtcatcaaagtgttcaatgatatgaargtgcgcaagtcttcaacgccagaagaagtgaakaakcgcaagaaggcagtgctcttctgcctgaktgaggacaakaagaacatcatcctggmrgagggcaasgakatcctggtgggagatgtggggcagactgtggacgacccctacaccacttttgtcaakatgctgcccgacaaggactgccgctatgctctctacgacgcaacctatgagaccaakgakagcaagaaggakgacctggtgttcatcttctgggcccctgakagtgcaccccttaagagcaaaatgatctatgccakctccaakgatgccatcwagaagaagctgacaggaatcaagcacgaattacaagcaaactgctacsakgaggtcaasgaccgctgcaccctggcakawwaactadgtggcagcgccgtcatctctctggwrggcaagcctttgtgakccgcctccadccccctgcctggagcatctakcakccccagacctgctcatgggtgttgcaggctgccccttttcctgccagaccggaggggctggggggatcccagcagggggagggtaatcccttcaccccagttgccaaatgtcctccccaccccctggaccgtgctcttccctccaccctgacggttctggccatcccaaactgcttctgatcctctgattcctcttg

SEQ ID NO: 98 - DNA, 419 bp, Cricetulus griseus
ggacaacattttagcagttcttaaatatctagctacatctgayatgctggcctcttcgtctgagtatcgacatgggaacgtggtcttctttgatgtgttcggcctrytygctcatmgcatatccttctcgtgttggcacaataataaactacatggctgttacsgctgctgttttgtacctggggaaaaaactgctgcagcccaaacacaggaatgctgactacacsagagacttcttgtgtggacttgccatcactttcattagctggtycactagccttgytacagttcttattatagcagtgttcgtstctctsattggacagtctctctcatggtacaaccacttttatgtygctgtttgcctgymtggaactgcaacagtggctaaaataatactcatacataccctcgcaaaa

SEQ ID NO: 99 - DNA, 580 bp, Cricetulus griseus
  misc_feature (417)..(470): n is a, c, g, or t
agttcgggattcacacctacaccgcaraatgccaggtctaagctgtagattttatcaacacaaattccctgaggtggaagatgtagtgatggtgaatgtaagatccatagctgagatgggagcctatgttagcttgttggaatacaataacattgaaggcatgattcttcttagtgaattatccagaagacgtatccgttctataaacaaactgatccgcattggcagaaatgaatgtgtagttgtcattagagtggacaaagaaaaaggatatattgatttgtcaaawagaagagtgtctccrgaggaagcgattaaatgtgaagacaaattcacaaaatccaaaactgtttatagcattcttcgacatgttgctgaggtattagaatataccaaggatgaacaactggaaagccnnnnnnnnnnnnnnnnnnnnnnnnnnnnnnnnnnnnnnnnnnnnnnnnnnnnnngtgcttatgatgcctttaagcatgcagtctcagacccatctatcttggatagtttagatttgaatgaaaatgaacgagaagtactcattaacaatatcaatagacgtttg

SEQ ID NO: 100 - DNA, 466 bp, Cricetulus griseus
ggaagtgcagggctcacggcctggaaaaaatgtgcaactaacagagaacgagatccgtggtttgtgcctcaaatcccgggagatattcctgagccagcctattcttctggagcttgaggcacctctyaagatctgtggtgacatccatggccagtactatgaccttctacggctgtttgaatatggtggcttccctccagagagcaactacctcttcttgggggactatgtggatcgtggcaagcagtctttggagaccatctgcctgctgctggcctataagatcaaataccctgagaatttctttctgcttcgtgggaaccacgagtgtgccagcatcaaccgcatctatggcttctatgatgaatgcaagagacgatacawtatcaaactgtggaagactttcactgactgcttcaactgcctgcccatcgcagccattgkagatgataagatcttctgctgc

SEQ ID NO: 101 - DNA, 561 bp, Cricetulus griseus
  misc_feature (2)..(16): n is a, c, g, or t
  misc_feature (90)..(120): n is a, c, g, or t
annnnnnnnnnnnnnnactagcccggtctataagagctagttccaggacagcctccaaagccacgggaaaaaccctgtcttggaaggaannnnnnnnnnnnnnnnnnnnnnnnnnnnnnnaaggaaggagggaaggaagggagaaagagagaaagagagaaagagagaaagagagagaagaaaagaacttcaagttaattatattaaaatgtttaatctctataaatatgaaatgaattaaagataaaattttctcctgaaatttaagtgcacttttaaagataagcacttttgatgtctgattgagcaaacataaaacagacaaaaaccacccccaaccacttcgcccttcaaagctaacggatcaaatgtacaaagtgcataaattrgattctcttgagtacttcaagcatcttgaagkgaggactgggaagatyaccagggaaaatagacrgatcaaatgtagtcaataagagccctctcttttccatgggtaacagtaaaaagatttgtcaatgcgggagacaaaggccagcaagatagaccatagacttagacccc

SEQ ID NO: 102 - DNA, 909 bp, Cricetulus griseus
gagagaagcctcggcacaagagtgatgtggaaatcccagcaactgtgactgccttctcctttgaggacgacactgtgccgctctctcccctcaagtacatggcacagaggcaacagcgtgaaaaaacacgatggctgaactcaccaaatacttacatgaaagtgaatgtgccggaggagtctcggaatggggagacgagtcccaggaccaaaatcacgtggatgaaagcagaagactcctctaaagttagtagtggaacacctatcaaaattgaagatcccaatcagtttgttcctttaaacacgaacccaactgaggtgctggaaaagagaaataagattcgggaacagaaccgatacgacctgaagacagcaggaccacagtctcagctgctcgcaggaattgttgtggacaagcctccttctaccatgcaatttgaagatgatgatcagggcccaccagctcctcctaacccattcagtcatctcacagaaggggaccttgaagaatacacgaagacaatcgaaagawagcaacgaggcctggacgamrctgagcwgkwktcmctctcagatgatgcagcatctgtttcacaaattcagtctcagactcaatcaccgcaaaatgtccctgaaaaattggaagaaaaccatgagctgttttccaagagcttcacttccatggacgtgcctgtcatgattgtgaacggcaaggatgagatgcacgatgctgaagatgagcttgctcagcgggtcagtaggttaaccacaagctcgaccatagagagcatcgagatcaccattaagtctccagagagaacccaagaggtcatgtcacctgatggctcgccttcaaagtcaccatccaagaaaaagaagaaattccgcacaccttcttttctcaaaaaga

SEQ ID NO: 103 - DNA, 579 bp, Cricetulus griseus
catggccgctgccgtcgctgcagccggcgctggggagcccctgtccccggacgaattgctcccgaaagccgaggtggagaaggccgaagaggagctggaagaggacgaggacgacgagctagatgagaccctgtcggagagactgtggggtctgacggagatgtttccggagagggtccggtctgccgccggagccacctttgatctctcgctcttcgtggctcagaagatgtacagattttccagggcagctttgtggattgggaccacttcctttatgatcctggtacttccagttgtctttgagacggaaaagttgcaaatggagcaacaacagcaactgcagcagcggcagatactgttggggcctaacacagggctgtcaggaggaatgccaggggctctacctccacttcctggaaagatctagattgtttcttgggtatttgtcctggtaggagaacttcgaaattcagttgaactgctgattgtttggacttttattctttktattttaaactttggcacatccatctatttaaatctggtgggaactttctctgtttctcatggagagac

SEQ ID NO: 104 - DNA, 581 bp, Cricetulus griseus
cggccgggggagtctggcctakacgtccgtgtcgcccggtgcgggcgggatggctgcggaagaagaggacgaggtggaatgggtggtggagagcatcgctgggttcctgcggggcccggattggtccatccccatcttggactttgkggagcagaaatgcgaagtttttgatgatgaagaagaaagcaagttgacctatacagaaattcatcaagagtacaaagagctggttgaaaagctgttagaaagttacctcaaagaaattggaattaatgaagatcagtttcaagaagcatgcacctctcctctggcaaagacacgaacatcacaggccattttgcagcccgtactggcagcagaggactttactatctttaaagcaatgatggtccagaagaacattgagatgcagcttcaagctatccggataatccaggagaggaatggtgtgttaccagactgcttaactgatggtgccgatgtagtcagtgaccttgaacaggaagagatgaaaatcctgagggaggtcctcagaaaatcaaaagaagaatatgaccaggaggaagaaaggaaacgaaaaa

SEQ ID NO: 105 - DNA, 1036 bp, Cricetulus griseus
  misc_feature (175)..(193): n is a, c, g, or t
tttgacagagtggcttgtcaaggagaagtagttcgaaaacttaaagctgaaaacgcctctaaggatcaagtggatccagctgtgcawsaactccttcagctgaaggcacagtacaagtccctctcaggaatcgagtataagcctgtgtctgctactgggtctgaagacaaagatnnnnnnnnnnnnnnnnnnnagaataagtctgaaaagcagaataagcctcagaaacaaaatgatggcccagggaaagactcttctaaaagccagggcggtrsgctgtcatcgagtggagcaggggaagggcaggggcctaagaagcagaccagattgggtcttgaagcaaaaaaggaagaaaatctggccgaatggtactcccaagtcatcacaaagtcagagatgattgaatactacgatgtgagtggctgctatatcctccggccctggtcgtactccatttgggaatccattaargacttctttgatactgagatcaagaaactcggtgttgagaactgctacttccccatatttgtgtctcargctgctytagagaaagaaaagagtcacaytgaggactttgcccccgaggttgcttgggttacaagatctggtaagacagagctggcagagccaattgccatccgacctactagtgaaacagtaatgtatcctgcatatgcaaaatgggtgcagtcccacagagacctgcccatcaggctcaaccagtggtgcaatgtggtgcgctgggagtttaagcacccacagcctttcctccgcactcgggagttcctgtggcaggagggacacagtgcctttgctaccttcgaggaggcagctgacgaggtcatgcaaatccttgagttatatgctcgagtgtatgaagagctcttggcaatccctgttgtgagaggaagaaagactgaaaaggagaagtttgcaggaggagactatacaaccacagtagaagccttcatatctgccagtgggcgtgctatccagggagcaacatcacaccacttaggccagaatttttcca

SEQ ID NO: 106 - DNA, 576 bp, Cricetulus griseus
ccccgcggtatcggtaaaggctttttttctctttaccagggttcacattgagcactcgcggacaggggtaccggrrcmawraaaaagsmacccccggacaagccaggcctytcwwwcccacctccgggcgaacggcggtgagccaaattaacgggcttaakatacacttaagcacaaaaaaggccggccgygaacgctcgacaccaaccgacgcacgakcctacgggagaaggcccaagtacgtggcgggcgctcacccaaagcgggaagagatgccacacacacatgcggacgtcccggggaaacgccgcaagagaactcttacccgcctgaaaccactttctcgaccccccacaaacgacacctcgyaaaaccagagcggcacggacccccgtcgacaaagagccgggaacgacaacacacgccaccgaggccagaccgagcacgcakrakgcagcacgccagggagcgggaagcgacgccrccgctcakaaacgggcaccttcgaggtcaagcctggagcgctccargagcaccgcgaggatagcgagcgagacacgtgcacacgccagtcgg

SEQ ID NO: 107 - DNA, 269 bp, Cricetulus griseus
ccgcgcggctggaggtgtgaggacctgakgctcggggtgggggcggaggcggctcctgcgaccgaagaggacttgcgactcgccgtccgcgcaccatgagggtcctgtgggtgttgggcctctgctgcgtcctgctgaccttcgggtttgttagasctgacyacyaastcgatgtggatggyacagtasaakatgacctggstaaaagcacagaaygctcaaggacagatgatgaagttgctgcatagagaggaagaagctattgagct

SEQ ID NO: 108 - DNA, 508 bp, Cricetulus griseus
  misc_feature (203)..(223): n is a, c, g, or t
  misc_feature (501)..(501): n is a, c, g, or t
caacttagtgttttgttgagtaactaactgttttgcaagaaatatttccatttagaaacataaaagattaatgttccaattatgcatagcttccccattatcaatcaggagagattatggggcacttgggaactattttgtctttataacaggcgtttgcaaggctgagcataatagataaatcagttccctctgaaagtgtnnnnnnnnnnnnnnnnnnnnngaaaaaaagagccaggtggkcaaacttaaattaacatcatcttgttaaagcatattttatttcactgagagaaattcaatatcaaagacttttatatactcaattaccaagaaatctttttttaagtacaatttaaaaatcattgaaaatgtgatccacatcatagccattcttttcctcaaacttaggtggacaagcttctcawagtggcagtgggaactggcatgtcacaaawwacgtartartgcttwcargcagtttgcccctgtaagaaccanctgtgct

SEQ ID NO: 109 - DNA, 1044 bp, Cricetulus griseus
  misc_feature (533)..(555): n is a, c, g, or t
  misc_feature (714)..(758): n is a, c, g, or t
ccccatagtccgggagtcaaagccggttgtcaagccagtcctgtcccgcactcatctgccttttctttttctctcaacatgacagatgccgctgtgtccttcgccaaggacttcttggcaggtggagtggctgcagccatctccaaaacggsggkrgcgcccatcgagcgggtcaagctgctgstgcaggtgcagcatgccagcaagcaaatcacggcagataagcaatacaagggcattatagactgcgtggttcgtatccccaaggaacagggggksctgtccttctggcgtggtaacctggccaatgtcatcagatacttccccacccaggctctcaactttgccttcaaagataaatacaagcagatctttttkggtggtgtggacaagaggacccagttttggcgctactttgcagggaacctggcatcaggtggtgccgcgggggccacatccttgtgctttgtgtaccctcttgattttgcccgtacccgtctagcagctgatgtgggtaaagctggagctgaaannnnnnnnnnnnnnnnnnnnnnntgcctggktaaratctacaaatctgatgggattakgggccygtaccaaggctttaatgtgtcagtacagggcattatcatctaccgagctgcctactttggtatctatgacactgcaaagggaatgcttccagatcccaagaatacccatatcttcatnnnnnnnnnnnnnnnnnnnnnnnnnnnnnnnnnnnnnnnnnnnnnttcctatccttttgacacggttcgtcgacgtatgatgatgcagtctggacgcaaaggaactgatatcatgtatactggcacaattgactgctggaggaagattgctcgtgatgaaagaagcaaggcttttttcaagggtgcatggtccaacgttctcaggggcatgggtggtgcctttgtgcttgtcttgtatgatgagatcaagaagtacacataattatgtcttaagtttctccccaagagcaggcatgttgtacaatacaccatatcttgaacattctggaca

SEQ ID NO: 110 - DNA, 1006 bp, Cricetulus griseus
agtctgtcagagcgcggaggttcagcaagtctgtcagaccgcaatggcgccttccaggaagttcttcgttgggggcaattggawgatgaacgggacgaagaagtgcctgggagagctcatttgcacgctgaacgcggccaaggtgccggcagacaccgaggtggtttgtgcgccccccgccgcctacatcgattttgtcaggcagaagctasatcccaagattgctgtggctgcacagaactgctacaaagtgaacagtggggccttcactggggagatcagccctggcatgatcaaagacttakgagccgaatgggtagtgctagggcactcggagagaaggcacatctttggggagtccgatgagttgattggacagaaagtggcccatgccctatccgagggccttggagtgatcgcctgcattggggagaagctagatgaaagggaggccggcaccaccgacaaggttgttttcgagcaaaccaaggccatcgcagataatgtgaaggactggaacaaagttgtcctggcctatgaacctgtatgggccattggtactggcaagactgcaacacctymacakgcccaggaagtacacgagaagcttcggggatggctgaaatccaatgtctctgatgcagtggctcaaagcacccgaatcatttatggaggttctgtgactggagcaacctgcaaagagctggcaagccagcctgatgtggacggcttccttgtgggtggtgcttccctcaagcctgagtttgtggacatcatcaatgccaaatgttaaacaccagcatcttccctaccctccgctaggccaggattaggttgcccaggagcttaagaactgctcccacaagtcacatgcttctgatgtcatcgccccatcttgtttgctaatccacactgtaccttcctacacctttgacacctcccttataaggttgggaccaggccaatccctttaccacttacaatgaatgaaataatgtcacctatt

SEQ ID NO: 111 - DNA, 598 bp, Cricetulus griseus
  misc_feature (32)..(46): n is a, c, g, or t
agctgtgctgtgacgggtagacctggactgannnnnnnnnnnnnnnttgagtcagagaaaaaagcaagacagaatcttcagagtttcccggaaccactaattattccagttttatacttgaccaaccttacccatcgttcacgcttacatgaaatttgtgatgatatctttgcctatgtcaaggaccgatattttgttgaagaaactgtggaagtcattaggaacaacggtacaaggctgcagtgcagaatcttggaagtcctccctccattacatcaaaatggttttgctaatgggcatgtgggcagtgttgatggagagactattgtcatcagtgacagkgatgattcagaaacmcaaagcasctcttttymacatggaaagaaaaarratgcggtkratcccttgktattyaggkaccagggkgcarcccmckwaaaaggrgatwtatgagtykgskgkcgkaaaagcaacmcaawtcagcrggrraaaacmccttwttttcycgkgataaaaaaaaggtttttttggaaaaccactgkgamccmcaagrkggaatywttaawattarggsrtywtytytttyaacatacaacat

SEQ ID NO: 112 - DNA, 1945 bp, Cricetulus griseus
  misc_feature (14)..(94): n is a, c, g, or t
  misc_feature (1559)..(1601): n is a, c, g, or t
catcgtgtggaaannnnnnnnnnnnnnnnnnnnnnnnnnnnnnnnnnnnnnnnnnnnnnnnnnnnnnnnnnnnnnnnnnnnnnnnnnnnnnnnnctgcagcgagatccactatgaccggattggtggtagggatgcagcacacctcgtcaaccaggatgaccccaatgtgctagagatctggaaccttgtgtttatccagtataacagggaaactgatggccttctgaaacctcttcccaagaaaagcattgatacagggatgggcctagagagactggtatctgtgctgcagaacaagatgtccaactatgacactgacctttttgttccttacttcgaagccattcagaagggtacaggtgcccggccatacactgggaaagtcggtgctgaggatgcggatggaattgacatggcctacagggttctggctgaccatgctcggaccatcaccgtggcactggccgatggtggccggcctgataacacaggacgggggtacgtgctgaggcggattcttcgaagggctgttcgatattcccatgakaaactgaatgccagcaggggtttctttgctacattagttgatgttgtcgtacagtccctgggagacgcattccctgractaaagaaggacccagacatggtgaaggatattattaatgaagaagaggtacagtttctcaagacactcakcagagggcggcgcatcctggaccgaaaaattcagagcttargagactgcaagaccattcctggagatactgckkggckcctctatgacacttacggattcccagtggatctcactggattgattgctgaagagaagggcctggtggtagatatggatggctttgaagaagagaggaaactagctcagctgaagtcacagggcaagggagccsgkggggaagacctcatcatgctggacatttatgctattgaggagctccgggcaaagggtttggaggcgacagatkattctccaaaatacaactaccattctgactccaatggtagctatgtgtttgagtgcacagtggctactgtgctwgctctgcgaagagaaaagatgtttgtggaagakgtggycactggccadgagtgtggagtagtgctggacaagacctgtttctatgccgaacaaggagggcagatctacgatgaaggctacttggtgaaggttgatgacagcagtgaggataaaactgagtttacggtgaagaatactcaggtccgaggcgggtatgtgctgcatataggaacaatatatggaaacctgaaagtgggggatcaagttcggcttttcattgatgagccccggcggagacctgtcatgagcaaccatacagccacgcacattctgaacttcgccctgcgctccgtactgggggaagcggaccagaaaggctcactggttgctcctgatcgccttcggtttgacttcactgccaagggagccatgtccacccagcaaatcaaggtakgctgaggagattgtcaatgccatgattgaggcagctaagcctgtctatacccaggactgtcccctggnnnnnnnnnnnnnnnnnnnnnnnnnnnnnnnnnnnnnnnnnnngacctatactgaccctgtgcgagtcgtttccattggggtccccgtgtcagagctgttggatgacccctctgggcctgccggctccctcacttctgttgagttctgtggaggaacgcatctacggaattccagtcacgcaggagctttcgtgatagtgactgaagaagctattgccaagggtatccggaggattgttgcatgtcacaggtgctgaagcccagaaagccctcaggaaggcagagagcttgaagagatctctgtctgtcatggagaccaaagtgaatgcccagactgcacccaacaaggatgtgcagcgggagattgccgaccttggtgaggccctg

SEQ ID NO: 113 - DNA, 824 bp, Cricetulus griseus
cgtgccagcgatggaggggcagcgggtggaggtggacggcgggatcatggaagggggcggccagatcctcagggtctccaccgccctgagctgcctcctgggcctccccttgcgcgtgcagaagatccgcgctggccgcatcacgccgggcctcaggcctcatcatttatctggactggaaatggttcgagatttgtgtgatgggcacctggagggggcagaaatcggctcaacagagataaccttcataccagagaagatcagaggtggaatcctcactgcakatacgaakacagcagggagtgtgtgcctcttgatgcaggtttcaatgccttgtgttctgtttgctgcttctccatcggagcttcgcttgaaaggtggaactaatgctgaaatggcacygcagattgatyacaccatgatggttttcaagccaatcgtygagaaatyyggtkycaaatttgattgtgacwtyamaatgaggkgctattactccawawgggggcggygaggtkattgycckwatgtcaccarttaaacaktyskacccaataaatctgactgatcgtggctctgtgaccaagatttatgggagagcttttgttgctggagttttgccattaaaagtagcaaaagatatggcagcagcagccgtacgatgcatcagaaaggagatcagggatctgtacgtcaacatccagcctctgcaggagtccagggaccaagccttcggcaacgggagtggaatcatcattgttgctgagacatctactggctgcttgtttgctggctcatcacttggcaaaagaagtgtgaatgcagac

SEQ ID NO: 114 - DNA, 564 bp, Cricetulus griseus
cggagagkckcggagmcgctctttcysgmaggatcgccgcgatggccgcccagggagagccgcaggtccaattcaagctcgtcctggtgggcgacggtggcaccgggaagacgacgtttgtgaagcgccacttgacgggcgagttcgagaagaagtatgtagccaccctgggcgtggaggtgcacccgctcgtcttccataccaacagaggacccattaaattcaacgtgtgggacacagccggccaggagaagtttgggggcctgcgcgatggctactacatccaagcccaatgtgccattataatgtttgatgtaacatcaagagtcacctacaagaatgtacctaactggcatagagatctggtacgggtgtgtgaaaacatccccattgtattgtgtggcaataaagtggatattaaggacagaaaagtgaaggcaaaatctattgtcttccaccgaaagaagaatcttcagtactatgacatttctgccaaaagtaactacaactttgaaaagcctttcctctggcttgccagaaagctcattggagaccctaacttgg

SEQ ID NO: 115 - DNA, 937 bp, Cricetulus griseus
  misc_feature (104)..(146): n is a, c, g, or t
ccgagagaagcaagatggcggacgtgctggatcttcacgaggccgggggcgaggatttcgccatggatgaggatggggacgagagcatccataaactaaaagannnnnnnnnnnnnnnnnnnnnnnnnnnnnnnnnnnnnnnnnnngggtcccgagcgcgcatgcgagaggattatgacagcgtggagcaggatggcgatgaacctggaccacaacgctctgttgaaggctggattctctttgtcactggagtccacgaagaagccactgaagaagatatccatgacaaatttgctgaatatggggaaataaaaaacatccaccttaacttggacaggcgtacaggatacttgaaggggtatactctagttgagtatgaaacatacaaagaggctcaggctgccatggagggactcaatggtcaagatttgatgggtcagccaatcagcgtcgactggtgttttgttcggggtccaccaaagggcaagaggagaggtggccgaagacgaagcaggagtccagaccggagacgtcsttgatagatcctctgttgcccargtggtctctacacgagtccatttggttatgctgccttgcataaatagggctagggtagaacttgtgtttatatttaatttcttaccctatctacttagtattgctttgagttaaaacctaataataaatgttccattttgttttctacatttaagattattttactgttctggagactgtttatagtaaggccttctgagtcactgggaagacatgtctgtctggagtgtaattctgagtttctagaggctcgggcagagattgttcatcatttctttttcttagaagaccagagagcaggggtagtgaggttcttaaggcattaaggagtgattcttacatactcttgtgagcaaatactatattagtgcttctcctc

SEQ ID NO: 116 - DNA, 1155 bp, Cricetulus griseus
  misc_feature (616)..(633): n is a, c, g, or t
  misc_feature (1135)..(1135): n is a, c, g, or t
gaaagcctctgaataatcccatctccatgagcaacgattggataacacaatgacgtggaaaatgggaccccatttcaccatgctgctggccatgtggctagtgtgtggatccgaatctcattccactgtcttggacagagacagccacacagggcggaaagtacctttggcctctccaatcagcgctaggtcagctcgctatctgaggcacaccgggaggtctggtggaactgagaaatccactcaggaagaatcaaatcttcagcctccccaaaggaggaagagtgtaccagtgttgagattagctcacccgacagtgaggcccgcccccttargtatcaatggagtcccarttagacctgagttaagaccaataactaggagctctccgcatgagatggtccgagatgaggggtcctctgcacggccgagaatgttgcggttcccttctgggtccagctctyccaatatcctggccakstttgcaggaaagaacagggkgtgggkyatctcarycccscatgcgctmaragggctactaccgsctaatgatgagcctyctgaargacratgtgtattgcgagctggcagakwrgcacatccatcakatcgtgcnnnnnnnnnnnnnnnnnnaggaagggggcaaggtacggaggatcaccagtgaaggacagatcctggagcagccgctggaccccagtctcatcccaaagctgatgagcttcctaaaactggagaagggcaagtttagcatggtgctactaaagaagactctgcaggtggaggagcgttacccttatccggtcaggttggaggccatgtatgaggtcattgaccaaggccccatccgcaggatcgaaaagatcagacagaagggttttgtccaaaagtgtaaggcctcaggcttagagggccatgtgctccaggaagggaacaatggcggcgggggagcaggaagcacaggcctgggcagtgagaagaagaaagaggagccaaggagagcacaagtccaccccaccagagagcctcagagaaagctggccaccaccaaggcagccattacccaacctcccccaaccccaagggccactacccttcctcctgctccagtcacaacagctactcgggccacgtnccggatggtgacagtagctg

SEQ ID NO: 117 - DNA, 960 bp, Cricetulus griseus
  misc_feature (225)..(248): n is a, c, g, or t
  misc_feature (317)..(334): n is a, c, g, or t
gccggaagcgaggaaggtgctgtgtaatcagtgagaycgwsmsrcgckkgcggccctcacaatgcccgactacttaggtgcggaccagcggaaaaccaargaggacgagaaggacgacaagcccatccgagctctggatgagggggacrtcgccttattgaaaacttatggtcagagtacttactctagrcagatcaagcrggttgaggatgacattcaacaacnnnnnnnnnnnnnnnnnnnnnnnnctggtattaaagagtctgacactggcctggccccaccagccctctgggacctggctgcagataaacagnnnnnnnnnnnnnnnnnngccgctacaggttgcaaggtgtacgaagataatcaatgctgattcagaggaccccaaatacattatcaatgtgaagcagtttgccaagtttgtggkggatctcakcgatcaggtggcacctactgacattgaagaarggatgagagttggtgtggaccgaaataaataccaaattcacattccactacctccaaagattgacccaacagttaccatgatgcakgtggaagawaaacctgatgtcacmtacagtgatgktggtggctgtaargagcabattgagaaattgagagaagtagytgaaacccctctactccatccagagagatttgttaaccttgggattgagcctccgaagggtgttctgctgtttggtccccctggcacaggcaagacactctgtgctagggcagttgctaacaggactgacgcttgcttcatccgagttattgggtctgagctcgtacagaaatacgtcggtgagggggctcgaatggttcgtgagctttttgaaatggccagaacaaaaaaagcctgccttattttctttgatgaaattgatgccattggaggggctcggtttgatgatggtgctgggggtgacaatgaggtgcagagaaccatgt

SEQ ID NO: 118 - DNA, 582 bp, Cricetulus griseus
  misc_feature (412)..(412): n is a, c, g, or t
agctaatgaaattcagcaaaatgaacttaaaaatatgtttacacaatgccagacacgaataattcakatttagatttttagtcacaagcctatggtttttaaaaattcaaaatgaagttctcacccagcaggtttttcgtttgactttstgaacaggttttgtcccaattgctgggattaaagatgtgctccaccacagaccakccttatgaggctattttaacctgtactgagtttagggattgcaaattctaattrtgtktatcattgattgtttcccaaggagtttgaacctgaggaaattttcagatatatagactctaagtaccatcctggactgtaggccagagtagcaaatacaccacagagtggtttgttggtctcactcgggaaggtgcaggaaagaaccaanctggtgtttggagggggaaggggagtattctgtgaagcatatgcagtgtggatacacccatttaaagaattagcattttcctgctctatcaagttcattcctgtacactgcctttatgagggaaattatacatttagattgtagtaacttttactagtgtgggggaagga

SEQ ID NO: 119 - DNA, 610 bp, Cricetulus griseus
cacgtccgaagccgtgagtcgccgcagcaacagctatggtgtcagtaatcaacaccgtggacacctctcatgaggacatgattcatgatgcccagatggactattatggcacccgcctadmaacctgctcstssgrcaggtccstcaaaatctttgatgtgcgaaatggagggcagatcctcattgcakaccttasaggacatgaggggccagtatggcaagtakcctgggcccaccccatgtrcsgcaatakcctgrcctcctgtksctatgaccggaaagttattatctggaargaggaaaatggcacttgggagaagactcatgagcactcaggacatgactsctsagtgaactctgtatgctgggcccctcatgattatggcctgattttggcctstgggakctcggatggggccatctccctgctgacctatacaggggaaggccaatgggaagtgaasaagattaacaacgctcacacgattggctgtaacgccstcagttgggcccctgctgttgtgcctggaagcctcatakaccaaccatcagggcagaagcccaattacatcaagaagtttgcatcaggtggctgtgacaacctcatcaa

SEQ ID NO: 120 - DNA, 2676 bp, Cricetulus griseus
gtcgacccacgcgctccgggggaaataaaataaaaggttaaagagagttaaagcaaatrrtaaaagttatagagggttaaaataagttgtagaaggtcagasaaaagttgtcgaaggtcagakaaaaggttgttacaaattaaaaaaaatgtaaactgtgctatggtttctcatgtctacaaataaattttaaaaatrrtaatataagttaaaattttaaccatattaagctrattytgttttwaataagtcctstttatttctcaagtaaattatrtatacttgttttaaaaatgttctatttcctggtataaacttaagcatgttaagcaaagcaagttacggccattttgtaactggtcacatgacttgactggycgccattttgctaaagttaaaaaaagaatacttaarccgccmtcttgactaaaggkgaccmcwtggaaattwgaggtaccatyttakaaacaagttttcadttaakatttwaamtgtyaatgcttctatvtrttacagwaagaccttaagkgratttmaatttcyttttamamccwkyybycwwaygtyygttyywattaawsykkgywcttamagmssttcaatttaraattattyytaagcaaagcctgacartgtaaagttcttgttttatraaagatrctratctatwtaagaygktacagttyrtgttttyaraagttaagtttaagaatgttgrgtgtgatggcacacacctttaagctcakggtgtwgatggcacacgmctttaagttkagggcgttggtggcatacgcctttaatcccaccaytcgggagkaagaggcagatggatctttatgagttcaaggcctgcctggtccggcakatcgawttccagrwcagrctccarmgtsmsrgaaaaaccctgcctcarawagaagttaagctactgtttaagraatataaggtasctctatrcagtttttaagttcagctgtgctgtttcraacattttactaagttraaaccagkkacagactaaatcatttrcagaratawgaccttacctagccacctgtrtgcttmwtgtgtgcttaagrmaagyaactaaaacagacaaacagacctctaatgcttcagagatcttcagaatatgrcatttawattgkyatctttaaagtttataatgtcagacagactgccagatccggacagtgacccaragtctccaaagaagattacgaggcacctcagttcctgcacctggaccagtgagcgagatgctcagatgtgawacctgccgcctrccakracctggccgakamtgtggacaaagctgctggacactggaaaattgattgyacccctwtgcctagacaaaacaaggkcagtcttttccatgtycctcttccacagagaggaaaaaaaaactctcacwgtatakgcctggcgaaratygctgktctttgagacasctgcctccarcggtaatggagaaacttgggtrtggctaactgkmtwctagactggcttctgtcacttttyagtagattcgrataaartatacccttctcagatctctgaaatattactggttgtcagcttgacagcatcrgkcagtcagrtccactatagactagtcagtatgttagctrataaaatagtaactatctactgttcakgcacragytcaaagtttttaagtttattttggttgtcatctaagtacaaacttaaagggcttttcatcaggccaaaggcacctctgtccaatccatacctggctctctggacagaagaaaaatgtacatgcttatatcccaaatctgcagtttttgctaggactcaaagttataaatatgttcttgctgtttaaacagatatctgctttttctacactgtgggcttcagaaaataagttttaacctctgttcctagtttaaacatgtcttaaacaggtttctgcttctggctgacatctgagtatcagttgctgactacaggctgttctaagtagactgcgaaccctagacttgctgtggatgtgaaccagtcagctgatgtggacaccccctgtctctgcaacagtgtctgctaaccagaagcccctgatggattccccrykkcckaaattcctttttgcttttgactagcatttcaaccttctggggtccctaacttcgtcccaaagtcagcaggaagcagtttggaaaagaatttcgccgtccattttccckggttraaatgctaagtcaaaaggaactcccttrcatggggatgmcartatctatcactccctgatggggatgctagagagacagcaattccatgattggaatttacamaraaaagawaatgggggaatgaaggaaccrgcttccttttggcagccataayrgyygaacatgtgcttgcyatramcytgycytrgwmacgtagaggtcagatgcctgtctcgtgacaaggaaccttaktcacttaraggtcagatgcctgtcttgtgacaaggaaccaatcggaagttagctggtggcgctatgctttatggctctgggtgtgctttacggacaagcgcacagcaatgacgtagagagcatagcaaccaccctgggagggcctatgagccataacaaccagttgaccaatcaacacagggcaagccctccaagcctggaggcacaccaatcatgagcctat

SEQ ID NO: 121 - DNA, 462 bp, Cricetulus griseus
  misc_feature (321)..(341): n is a, c, g, or t
ttagcacagtggttctcagccttcctaatgctgcagtcctttgacacagtggttcgtaaccttcctaatgctgcagtcctttagtacagttcctcagttgttgtgacccttgaccataaatcttcgctactgttatgtaaatatctgtgttttccaatgcattgtcttgactcctgtgcaagggtcattcacccccccagagcttgaacactgctgccttaggctgctcatgattcatggtaagtgttacatccagcaaaatatcttgacaggtaggtagaccatgataagtgctcaaagaagtgacaaaagatctacttnnnnnnnnnnnnnnnnnnnnncagagctkgactttttttaacaagggaaaagttgacagcaatgctggaatgaaaatgggaggcttacccaagggggggagatgtttcatggaaccccaccccctggaagtcggaggcaaaa

SEQ ID NO: 122 - DNA, 612 bp, Cricetulus griseus
agttccgtctgccccggagctgtctctcaccgagrwccactgccctttggtgcagacagaaagaacaagtagcaactaaacaggagaagaatggctttgaagcagatttccagcaataggtgcttcggggggctccagaaagtttttgaacatgacagtgttgagctgaaatgtaaaatgagatttgctgtctacctaccaccacaagcagagagtggaaagtgtcctgcactctactggctgtctggtttaacttgcacagaacagaatttcatatccaagtctgrctttcagcaagctgcctcagaacatggccttgtcgtcattgctccagataccagcccccgtggctgcaatattaaaggagaagatgacagctgggactttggcactggtsctgggttttacgtgamtgccactgaagatccctggaaaactaattacagaatgtattcttacgtaactgaggagcttccacaacttataaatgccaatttcccagtggacccacasaggatgtctatttttggtcactccatgggaggccacggagctctgatttgtgctttgaaaaatcctggraaatacaaatccgtgtcagcatttgctcca

SEQ ID NO: 123 - DNA, 582 bp, Cricetulus griseus
aagtccccgaggtgtgccagctgggtcccacagcttgcggtggtgcttctccagggactcaggtgtgtgcacagcaggggtactcggcggtccggtgctgctcgcaggcaagaagagatcatttaaagattgagaccaagactgaaagaatggctgacctccatcagctcaaggacaatgaggtattgatggcctttgcctcctatgcaactattgttcttaccaagatgatgttcatgagctcggcgactgcattccagaggctaaccaacaagatttttgccaacccakaagactgcgctggatttggcaagggagagaatgccaagaaatttcttcggactgatgagaaggtggaacgggtgcgaagagcccacctaaacgatattgaaaacatcgttcccttccttggtatcggcctcctctactccttgagtggtccakacctctcaacggccctcatgcacttcaggatctttgttggtgctcggatctaccacacaatcgcctacttgactccccttcctcarccaaacagggcctttgcattttttgctggctatggagttactttgtcaatgg

SEQ ID NO: 124 - DNA, 1045 bp, Cricetulus griseus
  misc_feature (839)..(856): n is a, c, g, or t
acttgaatgtcagctgaagacagaaagggatgagaaggagctttataaggtgcatttgaagaatacagaaatagaaaatactaagcttatgtcagaggtacagactttaaagaatttagatggaaacaaggaaagcatgattgtacaggtgaaagaagagattgacaaactgcagtcaagtttggttgaaaaggaaaatttgtacagggctctcctgcttacagcctcaaataaagaagatacaatatttttaaaggagaaacttcgtaaagcagaggagcaagttcaagcaacacggcaagaagctatctttctagctaaagaactcagtgatgctgtgaatgttcgtgataaaacaatggcagacctacatactgcacgcttagaaaacgagagagtgaaaaagcagctagctgatgctgtgagaaaagaccaggaaaagactgatacaatggagcatgaactgagaagagaagttgaagatctgaaactccggctccagatggctgcagatcattacaaagaaaagtttaaggaatgccagaggctycaaaaacaaatcaacawactttytgaccagtcagccagtactaacagtgtcttcacaaagagaaatgggagtcagcagaaagtgaatgatgcttcaataaacacagacccagccacttctgcttctgccatggatgtaaagccagcagtgtcttctgcagagataaattttgacatgttaacaaaggatcatgtctgtgaaatgaccaaagaaattgctgagaaaacagaaaagtataacaaatgtaaacaactgttgcaggatgagaaaaccaaatgtaataaatatnnnnnnnnnnnnnnnnnnatggagctgaagtggaaagaacaagtaaaaattgccgaaaatgtaaaacttgaactagctgaagtagaggacagttacaaactacaattggcagagaaagataaagaaataaatgggctggcctccaatttggaaaatctctcaagggagaaggaacttataaggagattagaagatcagaaaggaaga

SEQ ID NO: 125 - DNA, 807 bp, Cricetulus griseus
cctcatcctggccccacatagttctgaagatgaaaccgtagtattgctcatgcaagcagctctagcgagttttcttttggaacacacctgaacacatttcctgtgtctgacttgttcacctaatgcttcgttcattctgaacatgtagattcaatcgtgagctttcttcacctgttaagagtgcaaaagtatgttgggaaagggatgtggcagagaagaggagatgggtttgagaagggattagaaggagaatagatgagataccagagtccaaggtcccagcaggactggtraaaggaacctgccgactcagcagggagaatgaagattgatcagctattaaatccttaktagaggtaggcttatgaagaaggrcagggaaatgggattgaggtrtakaaagcaggcrcaagactagktgcttgctatagaatctgtkgattccaacagcctgtstgaattcacttacgagctcaagaaggartgtstagcatcacgctattgtagcttttgacttggagctggtccargctgaaagccagctgcagcctctctcgtgtkcacatctccagaccatctcacctctgccctgctgtggggagcaggcatggcagtaaaagtggcctgggctctctctttcagttcattgtttgcttttctgggaattagaargtrggcaccaagatccatggcagcgttacttcttctgcatggkatgcggtgaacccctctgctggcttacacagtgattcaagataacaagtcaatagaaactgccgaggtgggacagagtggagccagggagcc

SEQ ID NO: 126 - DNA, 579 bp, Cricetulus griseus
tgtggcgcaggcaagggacccgtsraaataaacagccactgctttgcgagtcgctttcctgggcctgcgtccgagtatccaccgctgtgggcagctcakacgccgaagctcttaactgcagctatgagcagcaacgagtgtttcaagkgkggacgatctggccattgggccagggaatgccctactggcggaggccggggtcgtggaatgagaagccgaggcagaggattccaatttgtttcctcatctcttcctgacatctgttaccgctgtggtgagtctggtcatcttgctaaggattgtgatcttcaggaggatgcctgctataattgcggtagaggtggccacattgccaaggactgcaaggagcccaagagagagcgagagcaatgctgctacaactgtggcaagccagggcatctggctcgtgactgtgaccacgcggatgagcagaagtgctattcttgtggtgaatttggacatattcaaaaagactgcaccaaggtgaagtgctataggtgtggtgaaactggtcatgtagccatcaattgcagcaagacgagtgaagtcaactgttac

SEQ ID NO: 127 - DNA, 611 bp, Cricetulus griseus
  misc_feature (27)..(45): n is a, c, g, or t
  misc_feature (63)..(82): n is a, c, g, or t
  misc_feature (92)..(131): n is a, c, g, or t
  misc_feature (175)..(211): n is a, c, g, or t
  misc_feature (305)..(323): n is a, c, g, or t
  misc_feature (348)..(370): n is a, c, g, or t
  misc_feature (424)..(436): n is a, c, g, or t
  misc_feature (438)..(450): n is a, c, g, or t
tsgctgtggctgccgctgtggtgcttnnnnnnnnnnnnnnnnnnnkgccatccttgtcgctgnnnnnnnnnnnnnnnnnnnntgcagccatnnnnnnnnnnnnnnnnnnnnnnnnnnnnnnnnnnnnnnnnaacggctgggtaacacrgaksgssaccaccccgcagttcccaannnnnnnnnnnnnnnnnnnnnnnnnnnnnnnnnnnnncatgtggaagctaaccagggacgagaccaactatggcataccacagcgtgcgcttcgaggkcactcccattttgtcagwgatgtcgktatctcnnnnnnnnnnnnnnnnnnnctctcakgctcctgggatggaacannnnnnnnnnnnnnnnnnnnnnngggcaccaccacgagacgatttgtaggccatactaaggatgtactgagtgtagnnnnnnnnnnnnncnnnnnnnnnnnnntgtctggatctcgagacaagaccataaagttatggaatactctcggtgtctgcaaatacactgtccaggatgagagtcattcagaatgggtgtcttgtgtccgcttctccccgaacagtagcaaccctatcatcgtctcctgtggatgggacaagctggtc

SEQ ID NO: 128 - DNA, 906 bp, Cricetulus griseus
  misc_feature (641)..(668): n is a, c, g, or t
aggcgggctggctcagtgcagcggcggcagcgggggaagatggcggcggctgttccccagcgtgcatggaccgtggagcagttgcgcagcgagcagctgcccaagaaggacattatcaagtttctgcaggatcacggttcagattcgtttcttgcagagcataagctattgggaaacattaaaaatgtagctaagactgctaataaggaccatttggttacagcctacaaccatctttttgaaactaagcgtttcaagggtactgaaactgtaagtaaagtgtctgaacaagtgaaaaatgtgaaacttaatgacgataaacccaaagaaaccaaatctgaagagactcttgatgagggtccacctaaatatacaaaatctattctaaaaaagggagataaaacaaactttcccaaaaagggagacattgttcactgctggtatacagggacactcccggatggaactgyttttgatactaatattcaaacaagttcaaagaagaagaaaaatgccaagcctttaagcttcaaagtcggagtaggcaaggttatcagaggatgggatgaagcgctcctgactatgagtaaaggagaaaaggctcgactggagattgaaccagaatgggcctatggaaagannnnnnnnnnnnnnnnnnnnnnnnnnnnaaataccaaactcatttttgaagtggaattagtagatattgactgaaaccagtgcatcagctctgaagacatcaacaacaataaaaacttggccttgaaacttaatgtgactaattagagcttgttactattttaagggaagagtggactggaaaattcaaggagttaaagcttgtttacttgatctcaatttttgagaaatgtaatcccctgggagcccctttaagtttcatatttt

SEQ ID NO: 129 - DNA, 649 bp, Cricetulus griseus
cggcggtctctgccgaaagagggaagatggcgcttgatgggccggagcagatggaactggaagaggggaaggcaggcagtggactccgccaatattatctgtctaagattgaagaactccagctgattgtaaatgataagagccagaatctccgaaggctgcaggcacagaggaacgagctaaatgcaaaagttcgcctactgcgggaagagctgsrgctgctacaggaacagggctcctatgttggagaagtagttcgggccatggataagaaaaaggtgttggtcaaggtccatcctgagggcaaatttgttgttgatgtggacaagaacatcgacatcaatgatgtgacgcccaattgccgagttgctctaaggaatgacagctacactctgcataagatcctacctaataaggtggaccctctggtgtcactaatgatggtggaaaaggtgccagactcaacttatgagatgattggtgggctggacaagcagattaaagagattaaagaagtaatcgagctgccggtgaagcaccctgaactctttgaagcactgggcattgcacagccaaagggagtgcttctgtatggacctccacgcactgggaagacattgttggcccgcgctgtagctcatcatacgga

SEQ ID NO: 130 - DNA, 579 bp, Cricetulus griseus
  misc_feature (184)..(203): n is a, c, g, or t
  misc_feature (477)..(495): n is a, c, g, or t
  misc_feature (529)..(529): n is a, c, g, or t
catggtacagcacacatggaggccaaagatcagctctgttggaactggtcctctccttctacctttccagggttgtttagggatcatactcaagttgcttccgtagtaagcactgttacctgttgagccatcttgctagtccctatktrtttaccttttgagttgataggttgtttggagacannnnnnnnnnnnnnnnnnnnctgatcctcctacttctgcctccagagggctgggatcacaggcatgtaccactatgcctgctgcctatcttccctttgttttggaaagcatatttgatattattgtagaagcattttcaaatttagaaagccagaagatcacttaaagtcattttgagaactgaaaaattatctgaatataacctgtattacttttgaaaaaatataagaaaagtaaaatcattcaaggkaatcactactattttttgatacacatctttatacattagtctgnnnnnnnnnnnnnnnnnnnttctctctctctgattgggtcttatgtatcctangttggccttgaactcctgatcctcctgcttctatctgagcactggaatta

SEQ ID NO: 131 - DNA, 1432 bp, Cricetulus griseus
  misc_feature (485)..(504): n is a, c, g, or t
  misc_feature (507)..(508): n is a, c, g, or t
  misc_feature (606)..(617): n is a, c, g, or t
  misc_feature (791)..(833): n is a, c, g, or t
  misc_feature (1425)..(1425): n is a, c, g, or t
gaacagacgagtgtcggggccctgaagccgcttccaagatgatgcccacaccagttatcctgttraaagaggggactgatagctcccaaggcatccctcagcttgtgagtaacatcagtgcttgccaggtgattgctgaggskgkaagaaccacactgggtccccgtggcatggacaagcttattgtggatggtcgaggcaaagcaacaatttctaatgatggggccacaattctgaaactccttgatgttgtccatcctgcagccaagactttastakacattgccaaatcccaagacgctgakgttggygacggyaccacctcakkgaccctgctggctgccgaktttctgaagcasgtgaagccctatgwggaggaaggtttgcaccctcagatcatcatccgatctttccgcatagtcacccaattggctgttgacaaaatcaaagagattgctgtgactgtgaagaaacaagataaagtnnnnnnnnnnnnnnnnnnnnawnnatgtgcgatgacagccctgagctscaagttgatctctcascwgaagaccttcttcgccaaratggtggttgatgctgtgatgatgcttgatgagttgnnnnnnnnnnnnatgattggcatcaagaaagttcagggtggakctttaraggaktctcakttggtggctggtgtcgcattcaakaagactttttcttatgccsggtttgaaatgcagcccawgawatataagaaccccaagattgccctcttaaatgttgagcttgagctgaaagcagagaaagannnnnnnnnnnnnnnnnnnnnnnnnnnnnnnnnnnnnnnnnnnattgttgatgctgagtggaacattctctatgacaagctagagaagatccatcagtctggagccaaagtcatcttgtccaaactccccattggggatgtggctacccagtactttgctgatagggacatgttctgtgctggccgagtgcctgaggaggatctgaagaggacaatgatggcctgtggaggctcaatccagaccagtgtgaatgctctgattccagatgtgctgggccactgccaattgtttgaagagacccaaattggaggcgagaggtacaatttcttcactggctgccctaaggccaagacgtgtaccatcatcctccgtggaggcgctgaacagtttatggaggaaacagaacggtccttgcatgatgctatcatgatcgtgaggagggccatcaagaatgactctgtggtggctggtggtggggccattgagatggagctctccaaataccttcgggattactcaaggaccattccagggaaacagcagctgttgattggggcatatgccaaggccctggaaattattccacgacagctgtgtgacaacgctggctttgatgcccaaacatccttaacanacttcgg

SEQ ID NO: 132 - DNA, 581 bp, Cricetulus griseus
  misc_feature (500)..(517): n is a, c, g, or t
gcggcgcgtggtccacgccgagcggycgacgagtcccgtctgcgccgtcagaatgactgaktgggagacagccacacctgcggtggcagagaccccagacatmaagctctttgggaaatggagcaccgacgatgtacagatcaatgatrtktctctgcasgattacattgctgygaargasaagtatgccaagtacctgccccacagtgcggggcggwatgccgccaakcgcttccgcaaagcccagtgccccatcgtggagcgcctcaccawctccatgatgatgcacggccgsaacaacggcaagaagctcatgacggtgcggatcgtcwagcatgcctttgagatcatccatctgctcactggcgagaaccctctgcaggttctggtcaatgccatcatcaacagtggcccccgggaagactcaacgcgcattgggcgagccggcacagtgaggaggcaggctgtggatgtgtccccactgcgccgagtgaatcaannnnnnnnnnnnnnnnnnacaggagctcgtgaggctgctttccggaatatcaagaccattgctgagtgccttgcagatgagc

SEQ ID NO: 133 - DNA, 671 bp, Cricetulus griseus
  misc_feature (12)..(39): n is a, c, g, or t
  misc_feature (41)..(84): n is a, c, g, or t
acgtgtgaaaannnnnnnnnnnnnnnnnnnnnnnnnnnncnnnnnnnnnnnnnnnnnnnnnnnnnnnnnnnnnnnnnnnnnnnnggcgcacccgtacctaactcargagaagctgattgagtactgccaatccaaaggcatcgtggtgaccgcgtacagtccccttggctctcctgacaggccctgggccaagcctgaagacccttctctcttggaggatcccakgattaaggcratkgcrtccaagtacaataaaacaacagctcargtgctgatccggttccccatacaaaggaacttggtggtgatccccaagtccgtgacaccagcaagaattgctgagaacctgaaggtctttgacttcgagctgagcaaggaggatgtgaccactctactcagctacaacaggaactggagggtgtgtgccttgatgagctgtgctaaacacaaggattaccccttccacgcakaagyctgaagcttcggatgcctgctctctcccacgagacttgcacctgctcttcctgtwtcatctgtccttgtgggtgtastgtagactgtgtccctctrcactgtsyggaacctggaagatcagacawcgagggtctgttagtttgatgtagtctccacagagcattatcagtagctgagtgattttcttcagcctttct

SEQ ID NO: 134 - DNA, 582 bp, Cricetulus griseus
cctccattattcttccaatgtcaccaagctgttggaggcacttcttcaaaggacccaggctactgctgagatcaccagcagagagtccctgtcagccaacatcgagtggaagctgacattgtggactacctgtggcctctccaaggacgagctacgggggctggcaggacttggtgtgcctgggaggtggtcaggcccaggagcagaagcccctgcagcagctatggaatgccatcttgcttgtggccatgctcttgtgcacaggccttgtggttcasgcccagcggcaggcatcaagacagaaccagcaggaacctggaggccaggtgggagccagaytgtggaagctcttgtgcccacagcccttgggcctgcaagactgtggccatccttttcccacagggggatttgttcaaacgacgtgtggttcggagactagcatccctcaagacccggcgctgccggctgagcarggcagcacacagscttscagarcctggcatggasacgtgtgctgyytgtctagataacttctgtracaaacagyggctccgggtmttgccctgtaagcatgagttycac

SEQ ID NO: 135 - DNA, 611 bp, Cricetulus griseus
  misc_feature (91)..(115): n is a, c, g, or t
caccatggcggtcggcaagaataagcgcctgacgaaaggcggcaagaagggcgccaagaagaaagtggttgatccattttcgaagaaagannnnnnnnnnnnnnnnnnnnnnnnnatgttcaatattagaaacattgggaaaacactagtcacgaggactcaaggraccaaaattgcatctgmtggcctcaagggtcgtgtgtttgaagtgasccttgctgatctgcagaatgacgaagttgcatttagaaaattcaagctaattactgaggatgttcagggcaaaaactgtctgactaacttccatggcatggatcttacccgggacaagatgtgctccatggtcaaaaaktggcagactatgattgaagcccatgtggatgtcaagacgactgatggttatttgctccgtctgttctgtgttggttttactaaaaaacgcarcaaccagatacgcaagacctcctatgcacagcaccagcakgtccgccagatccgcmagaagatgatggamatcatgacccgagawgkacagacaaatgacttgarrgaagkggttaataagttgattccwgacagcwktggkraagacmtatgaaaggcttgccgcg

SEQ ID NO: 136 - DNA, 763 bp, Cricetulus griseus
ccggcccggacacggacaggattgacagattgatagctctttctcgattccgtgggtggtggtgcatggccgttcttagttggtggagcgatttgtctggttaattccgataacgaacgagactctggcatgctaactagttacgcgacccccgagcgtactatcctgcgctgtgggttcggktgscckrgcwgawrygctttgagcacctgtggcctggccatcaactcatcatgttcctggcscgcctgacttcacagctggtcagggctgttccttgggcaggtttcagtcgttcctggcctgcctctggggtgatcggcagssatgcttttccacccctttacaatttgcagcctgcaagccaaagtcgggctgcctccctccctggtaagggggcccakttggagcttgaggagttcctggtccccaggaagatgtccatcagtccattagagagttggctkactgctcggtatctattgcccakactggatgttggggtcccaatgactgtgattccctcccaaatctamgagtgtccacccagccaggaggaggaagccaagcagggagtcagggaagtctgggatgccactgcagtgcagtgcaaaaatgtgctgaagatccgaagacggaagatgaaccaccacaaataccgcaaactggttaagaggacacgatttcatcggcgtatagtgccggaaggacggctgaaaaagaagcagattaagtttgagaacgatttttaccccatcttgct

SEQ ID NO: 137 - DNA, 584 bp, Cricetulus griseus
tgtgtgacttcaggagtagggcttatggccattggcttatggccctggaagaatatcttgggatgacaggtcctccctccttattctctgtctcctggccaccgtgacatgagtagatttcctctgcccatgtgtctgccatgttataccccttcaccccargctgaaatgtctgagacagtcttttattgatgatgstgctgggaactgaacactggtcawgaagaastgcttttaatggctggaacatcttctccacggctctatcttatagagttcytgaaacagtaatgaaaagctgagtgacaacctatttaraactatttcataactggtaattttgtcagttatcasagtagaataattgcatagaaaaaccctcaasaaaaagtttgytgaataaatatagagtgaatgattatttttataattaaagttacatttgaatttagtatttatcacaacccaatacatgtacttaattagtttcttccattctatctggcttcgtggttaacattcgttgttatgatacttttctcctatttttaataaaatactgtgactgttcatttttatttccg

SEQ ID NO: 138 - DNA, 569 bp, Cricetulus griseus
trcrrgtgctggagcgacggagctggcagggcctggatgaagtggtacggctgctaaactgcagtgagtttgcattcacagacatggstaargaagacaaggcttccagcgagtccctgcgcctcattttggkggkggkcttggggggctgtacattctcagagatatcagccctgcggtttctgggcagagagaaagggtacagattcatctttctgacaacagccattacaaacagygctcgcctsatggaasccatgagtgaggtgwaagcctgaagttttcttggccagtatctgattgtggaccccagtgggatgctggtgtttgacctccacctgctagaagaatccctcagctatacttctcggagctagggactttgaaactaatttgggctttagagaacatgtctgaagagagaattcatgttctgtcccccacgatattattttgtttataaatytagcccatgctgctaagatatgcarggagaggtatcctttgctaaatcctatttgaatattattgtaaataaagcctctgttctcaaatgcaaaaaaaaaaaa

SEQ ID NO: 139 - DNA, 637 bp, Cricetulus griseus
  misc_feature (584)..(598): n is a, c, g, or t
  misc_feature (634)..(634): n is a, c, g, or t
tactttgctgaagttgaacagatggcttttgacccaagcaacatgccccctggcattgagcccagccctgacaaaatgcttcagggtcgcctttttgcttatccggacactcaccgccaccgcctggggcccaactatctccagatacctgtgaactgtccctatcgtgctcgagtggccaactaccagcgggatggccccatgtgcatgcacgacaatcagggtggtgctccaaactactaccccaacagcttcagcgcacctgagcagcagcgctcakccctggagcacaggtcccagtgctccacagatgtgcagcgcttcaacagtgctaatgaagacaacgtcactcargtgcggaatttctatacgaaggtgttaaatgaggaggagaggaaacgcctgtgtgagaacattgctggccacctgaaagatgctcagctgttcattcagaagaaagctgtcaagaatttcactgacgtccaccctgactacggggcccgcatycaggctcttttggammaatataatgccgagaaagcctaagaatgcgattcatacctatacgcaagcgggctctcacnnnnnnnnnnnnnnnaaagctaaccctggaagctcaagggctcaccctggngct

SEQ ID NO: 140 - DNA, 425 bp, Cricetulus griseus
gtcgacccacgcggcggggggktcatacaagacccagggagcagtggccatcatcctcccgccaggagccgcgtcgttcctgcgcacatagactgtacactatgaagaatgcacaggaagacttgatgacttggtacttgttttatttcctctgcgcttcagkaacaagtgttagcaaatgakactttctcctggcctctgcccactggggagcagcatggttgttcttccagtcggaaacgtcctttcttgtgtgccagtgagggtggtgggccaggcccagaactgaagcacatctggggagttggacttcgaggccacacttgtgaaacactcagactgctgttgtaaagcttttttttttttckggggkgykcgttctacagctgtttgaaakgttwaataaasctttataaactttaaaa

SEQ ID NO: 141 - DNA, 593 bp, Cricetulus griseus
atggaagagctacttcaaaatgaggttaatcggcaaggtgttgacatagaagcagctcgaaaagaagaagaaaggataatgcttatagatgcaaggcaatggttaaatagtggtcacatcaatgatgtccggcatgcaaaatctggaggcgccgcgctccacgtggcagctgccaaaggctatacagaagttttaaaacttttaatacaggcaggctatgatgttaatattaaagattatgatggctggacacctcttcatgctgcagctcattggggtaaagaagaagcatgtcgaattttagkggacaatctgtgtgatatggagatggtcaacaaagtgggccaaacagcctttgatgtarcagatgaagacattttargatatctagaagagttgcaaaaaaaacaaaatctgctccatagtgaaaaacgggataagaaatctccactaattgagtcaacagcmaatatggaaaataatcagccacagaagacttttaaaaacaaagagacgctgattattgagccagagaaaaatgcatcccgcatcgagtctctggaacaagaaaaagccgatgaggaggacgaagg

SEQ ID NO: 142 - DNA, 612 bp, Cricetulus griseus
gttgcggacgttttgctcgcgaaccacagcytgcggacatggcgaaccaggtgatcagatgcaaggctgcagtcgcctgggaggccggaaagcctctctccatagaggaagtakaagtggcccctccaaaggctcatgaagttcgaattaagrtyattgccactgccgtctgccacaccgatgcctataccctgagtggagctgatcctgaggggtgtttcccggtgatcttgggacatgaaggtgctggaattgtggaaagtgttggtgaaggggtgactagggtgaaggcaggtgatactgtcatcccgctttacgtcccacaatgtggagaatgcaaattttgtctgaatcctaaaacaaacctttgccagaagataagagtgactcakgggaaagggttaatgcccgatggcacgaccagattcacctgcaaaggaaagcctcttttccatttcatgggaaccascacatytctctgagtacacagttgtggctgacatctctgttgctaaaattgacccttcggcacctttggataaagtatgccttctcggttgtggcgtttcaaccggctatgggtgctgctgtgaacactggcaaggtggagcc

SEQ ID NO: 143 - DNA, 362 bp, Cricetulus griseus
  misc_feature (308)..(308): n is a, c, g, or t
gaaaaaactggctgggcgaatgcaaggcggcgtatggaaccacakcattgtgtgcttccaaacacatsagggsccccttttccakcacakggggcakarggatgttcacgctctgattttstaacaggcatcttcatgcctacatcacaksacacacacaccctacacacacaggggaccakgacacgctgaagarggactasgcragcacaggktagggcaccagggactcctgtgttgagccatggsctggggcacacatgcagaaacataagacactgkgcctccaatagaggggatagatttanggcattgaagcaggggttcaggagaccctgggtgggaggaaaaaggggggtgtg

SEQ ID NO: 144 - DNA, 585 bp, Cricetulus griseus
cataagatgcttcccaaacttttcacattgtctagctagcaattaagaagacatccaaaatagtgagaagcagatagaaagagatggttagctatgcaagcaatgtgtgtgggagcatctccaaagacaaagaaggaataggggaggagkgsagagaagcccccakaacaagctgtgggcctggacagaaggagatttgggtargaagtggctctgtctgcttctcagcctccgaaatgtttcagccaagctggaagggagttttggtcacaattgcccagtggacagacctctgtctgggcctacatgtsccttgctatgtcctgtccctggctgtaatagtccccacgaaacctggcctgygtatggacatggtagaggargtctatcatgtgccctgcactaagacacctgagcaacarttagtgtgatagccacgttggacatgacaacmgaacggtgacatttcaatragctagcatasctyttctgyctggcscagygtaaggwrcmactcaygatcatgcgkyytcmtgtykctagwggsccacaatgggctttgggggstsactgaakatatctgac

SEQ ID NO: 145 - DNA, 569 bp, Cricetulus griseus
  misc_feature (566)..(566): n is a, c, g, or t
accatattgcgggcaactggatttgatggtggaaataaagctgatcaattagattatgaaaattttcgacatgttgtacataagtggcattacaaactaaccaaggcatcggtgcattgccttgagacaggsgmatatactcatatcaggaatatattgattgtgctaacaaaaatacttccttggtacccaaaagttttgaatctgggtcargcyttggaaagaagagtgaataaaatatgccaagaagaaaaaagagaagaggccagatctatatgcattggctatggggtaacacaattatactttaatgtgatttatgagactagattacagaaggattctgaagatgtgaaaatgttttacaatgttgaagtcttatcttctgctttacttcaggagattatgggagattatgcgatcatgttcccacaggctggtgagagttgtcacttctgattatcaacttccggtctatactggatgatagtttcaaaggccacatataatatttcttgaaatggaaaaatgcaattttgtgcgtagttactatatcttgaggagcnaaa

SEQ ID NO: 146 - DNA, 740 bp, Cricetulus griseus
gtgttcctgggtcggctactgtgtctgattgtcgccacgccggagccatgtttcgaaaccagtatgacaatgatgtcactgtttggagtcctcaaggcaggattcatcaaattgaatatgcaatggaagctgttaaacaaggttcagccacagttggcctwaagtcaaaaacacatgcagtgttggttgcattgaagagggcacagtcggaacttgcagctcaccagaagaaaattctccatgttgacaaccatattggtatctcaattgcgggtctgactgctgatgctagactgttatgtaattttatgcgccaggagtgtttggattccagatttgtatttgacagaccacttcctgtgtctcgtcttgtgtctctaattggaagcaagacccakatcccaacacagcggtatggccggagaccctatggtgttgggctgcttattgctggttatgatgatatgggccctcacattttccaaacctgtccatctgctaactactttgactgtagagctatgtctattggagcccgttctcaatcagctcgtacttacctggagagacatatgtctgaatttatggagtgcaatttagatgagctggttaaacatggtctgcgtgccttgagagaaacactccctgcagagcadgacctgaccacaaagaacgtttccattggaattgttggtaaagacttggagtttacaatctatgatgatgatgatgtgtctcca

SEQ ID NO: 147 - DNA, 579 bp, Cricetulus griseus
tcgtttggctttggacagcgtcgcagagtcgtctgggtccaaccgctgggccgccgaaagcttttgtcagggacctgggcgagaacgaggcccgcgaggttcccgatggtgtccatgactttcaagcggagccgcagcgaccggttctacagcacccggtgctgcggctgttgccatgtccgcaccgggacgatcatcctggggacctggtacatggtggtcaacctattgatggcaattttgctgactgtggaggtgactcatccaaactccatgccagctgtsaacattcagtatgaagtcattggtaattactattcatctgagagaatggctgataatgcctgtgttctttttgccgyctctgytcttatgtttatcatcagctcaatgctggtatatggagcaatttcttatcaggtgggctggctgattccgttcttctgctaccggctttttgacttcgttctcagttgtctggaggccatcatctctgtcacatacttgccaagaatcaaagagtctttggatcacttacctgatttcccctacaaagatgaccctcctgggcttgggact

SEQ ID NO: 148 - DNA, 507 bp, Cricetulus griseus
  misc_feature (51)..(63): n is a, c, g, or t
  misc_feature (66)..(88): n is a, c, g, or t
catgtatagtgtctgaagacaagggatccgaagatgcttgagtagccgggnnnnnnnnnnnnnatnnnnnnnnnnnnnnnnnnnnnnnagcagaggccagtgtggtctacagatagagtgccaggataggatccaaagctacacaagagaractcttgtctcaagaaacaaacaaaaagaattgaccaatargtcctttagtcttatgttgagacttggattcatagagtactttaaggtyttcagagactttgaagttagattttcttgcttaatattactcagtacatagagagtccttcacttggatcaccttgttattgtcctggtatagtattgagtgagtgttactttctaggtcttgactaggggatgccaaaatggcagaatatgagcctaggcactcttgccaaatgttaactcacaagcctgctgaaagccccataattatatagctacttttattagatcaattttaatgaggaccaaattactgtaccttactct

SEQ ID NO: 149 - DNA, 621 bp, Cricetulus griseus
  misc_feature (521)..(521): n is a, c, g, or t
aatgctggaatgactggatcaaacaaccttagtgaccctttgctattctattaggagccagcctccagctgaatccccctaccacctctccccctacctccatgatagtctgagcattgtttargccctaaccctgggctttgtctctcagtgaatagaatttatacctattacatatccttcctctctaggccctagccctaaattctgtttgtcagtcagtagaactcattcatattgtaaaggtcacaggtgctttactacttggcaagggaatttcaatgtagctagccctgaaactttgttttgagaattgtcatgcggagactttccccaaagttctactatgtttaaatgtgtggaaatattaaaacacagcatcagattctagaagtcttaatccaagtctgaccaagcccgatgcacagagttttcattctgtctttccttggtccactttcctagcatacctacaggaatgcctcaacagatgtcagcaattttagaagagttttggccgnttgtatttctgtttaatattcaagaactggggacatactgtggatgtagtagagtataaaacttggaaaacacaggtgttgaaagaaaaataagtatctt

SEQ ID NO: 150 - DNA, 320 bp, Cricetulus griseus
  misc_feature (99)..(120): n is a, c, g, or t
aattcaaccagtgtcacatcgtscacagcaaccgtggtgtcctaactaccgtctttttgctaggacttaaactgacttgaatgcagcaaaaagttgacnnnnnnnnnnnnnnnnnnnnnnggcaaggataaaatgaacaatcttttgtggtttcttgggaaaacttttcataccaggtgatcaattcagaaccccattattacctgcaagtgctgatgtgatgtgcagaasccacagtaaaacgaaaaacatccaaatgtacaaaccgtyggaaatcaargktttcagctctmtctctctctctctctctctctctatct

SEQ ID NO: 151 - DNA, 588 bp, Cricetulus griseus
tcgacccacgcgtgccgctggagatatccaraagcttcaagacaaggccactgttctaaccacggagcgtaagaagagaggaaagactgtgcctgaggagctggtcgaaacccgaagagctcakcaagtaccggcaggtggcatcccatgtggggctacacagtgctagcattcctgggatccttgctctggacctctgtscttcggacaccaacaagattctcactggtggggcagataaaaacgttgttgtctttgataagagtactgagcaaatcctggccactcttaaaggccataccaagaaggtcaccagcgtggtgtttcatccttctcaggaactggwgytttctgcatccccasatgcgactatcakgatttggtcggtcccaaacacctcctgtgtacaggttgttcsascccatgagagtgcagtgacaggcctcagcctccatgctactggagactatctcctgagttcctctgatgatcagtactgggccttctctgacatccagacagggcgcgtgctcaccaaggtgacagatgagacttccggctgctctcttacctgtgcacagttccatc

SEQ ID NO: 152 - DNA, 700 bp, Cricetulus griseus
aaggaggccatagtgcatttctctgcccttgacagcctttcgcgtcagcatggctgctctggcggctctgcgcggcggcgtccgccggcctctgcttcgagggctgctgcaggaagtaagatgcctggatcgaagttatgcatccaaacccactttgaatgaagtagttatagtaagtggtgtaagaactcccattggatccttcatgggcagccttgcctctcagccagccactaagcttggatctattgcaattcaaggagccattgaaaaggcagggatcccaaaagaagaagtaaaggaagtctacatggggaatgtcatccaagggggtgaaggacaggcccctacacggcaagcagcattgggtgcaggtttaccaatttccactccgtgtaccacggtaaacaaagtttgtgcttcaggaatgaaagccatcatgatggcttctcaaaatctcatgtgtggacatcasgatgtgatggtggcaggtgggatggagagcatgtcaaacgtcccgtatgtaatgagcagaggagcaacaccgtrtggtgggataaaacttgaagacctgattgtaaaagatgggctgactgatgtctacaataaaattcatatgggtaactgtgctgagaatactgcaaagaagctgagtattgcccgaggtgagcaggacacttatgccatcagctcttacagc

SEQ ID NO: 153 - DNA, 580 bp, Cricetulus griseus
ccgtgtggcagcggttcctcctggtgattctattgctccttcttggctgctcgttgtcgcgttctccatctcaccatgctgtctctagattttctagatgatgtgcggcggatgaacaagaggcagctatactaccaagttttaaactttggaatgattgtctcctcagcactaatgatctggaaggggctgatggtgataaccggaagtgagagtccaattgtagtggtgctcagtggcagcatggagcctgcgtttcacagaggagacctccttttcctcacgaaccgagttgaagatcccatacgagtgggggaaatcgttgttttcaggatagaaggaagagagattcctatagtgcatcgagtcttgaagatccatgaaaagcaaaatgggcatatcaagtttttaaccaaaggagataataatgccsttgatgaccgaggcctctataaacaargacaacmttggctasagaagamagatgttgtarggagagcgaggggatttgytccttatattggaattgtgacaatcctcatgaatgactatccywaatytaagyatgcagtactgkttt

SEQ ID NO: 154 - DNA, 703 bp, Cricetulus griseus
  misc_feature (14)..(34): n is a, c, g, or t
tactcatgaacccnnnnnnnnnnnnnnnnnnnnnaagcatttttgcaggattcatcatctcacacaacattccaatctcctctattcaagtaataaccataccatgatatataaaaaccaccgcaatcctagttactattattggtctttcaattgcactagaactaaacaacctaacttataaccttaaactaaatcttcaatcaccacaaaacctattctcaacctctttaggatattttacacttatcatacaccgtttactaccaataaaatatctaacaataagctttaatacagccatagctacacttgatctgacatgattggaaaaagcaatcccaaaaactatctcactatctaattacaaagcatcacaagctatcacaaaccaaaaaggcctcattaaactatactttatatccttcttaatctccctagtatcaatcccaattttattatttaatttccacgagtaatctcaataataataaacacacccataagtwaagttcacccagaaacaaccattaatcaagctgagcagctatataatgctgctacaccagctccaccctcacctatcaaccccagttcatcaccatcataaatcactcatcctcccatatcattaaaattcaaaattaactctacaccctcataatatttagtaacaaacgtcatacctaactctataaaaaaa

SEQ ID NO: 155 - DNA, 578 bp, Cricetulus griseus
  misc_feature (509)..(509): n is a, c, g, or t
aaagcgaagaaggaagctcctgcccctcccaaagccgaagccaaagcgaaggccttgaaagccaagaaggcagtgctgaaaggcgtccacagccacaaaaagaagaagatccgcacgtcacccaccttccggcggcccaagaccctgcggctccggaggcagcccaaatacccgcgaaagagcgcgcccaggagaaacaagcttgaccactatgccattatcaaattccccctgaccactgagtcagccatgaagaagatagaagacaacaacacacttgtgttcattgtggacgtcaaggccaacaagcaccagatcaaacaggctgtgaagaagctctatgacattgatgtggccaaagtcaacaccctcataaggcctgacggagagaagaaggcatacgttcgcttggctcctgattatgatgctctggatgttgccaacaaaattgggatcatctaaactgaatccagctggctaattccaaatatactctttttcaccmtwtnaaaaaagaaaaaaaaatataataaaagggggggccccccccgggggggacccccactttggtccctttt

SEQ ID NO: 156 - DNA, 580 bp, Cricetulus griseus
  misc_feature (519)..(519): n is a, c, g, or t
  misc_feature (535)..(535): n is a, c, g, or t
ccttgtggactgggagaacagcaatttgcagaggttaggctgggaaggtgtgggaggaaggtctgaagaaagtgtctgagagaaagacccaggtccaggtgatgctcaaaatgttacagagttcattctgagtcacaaacacctggcaaggtgtgcagggaggatcttcatcagtgaggggaaacggatctttccagaaagctcacacttctccaacacatgtctaggtatttgaagagtctcaatagctgtwgactaatggggtctgtgggctttcttaacgtctggggttttttcttggctcacaggtgagctcccaaaakccagcccctcctgaccccarcccctgttgtcttcacatgggcttgcttgggctcatgacctttccarcctcttcarcaktgggttggcwsacsgctggagaggygatactgactcactgaaagagtagactgccagtgctttgggacagtcccacacacactgaatcgaacgttcaaggtagcgagcatgacgcanaatgcaggctcctcantggagagcgtcctgtgcacctgccgtcaccctggaaatgacgtgt

SEQ ID NO: 157 - DNA, 570 bp, Cricetulus griseus
gcgtctgaagggagccttcaaagccgtgatgatggccataaagcagctgagcagtgaggagctagagcagttccagaaaatgggagtattgttgtggaaggccatgaattgcacgaagaagatattcgcctcatgtactcctttgaccaggccacaggagggactgcacagtttgaggcgcactctgatgctcaggctttagttctcttagacgtcacacctgaccagtcaatggtggatgaaggcatggctcgggaagtcatcaatcgtatccagaaacttcgaaagaagtgcaatctggttccaacggatgaaataacagtttawtataatgcaaaatctgaaggaagatacttgaataatgtcattgaaagccacaccgacttcatatttgccactgtcaaagctcccttgaaagcatacccagttcctacatcagataatatccttattcaggagcaaacacagttaaaggggtcggaactggaactcacactcaccaggggatcctgtgtgcctggtcctgcttgtgcttatgtgaaccttaacatctgtgcaaacggcattgag

SEQ ID NO: 158 - DNA, 579 bp, Cricetulus griseus
  misc_feature (237)..(251): n is a, c, g, or t
  misc_feature (464)..(476): n is a, c, g, or t
  misc_feature (478)..(495): n is a, c, g, or t
  misc_feature (522)..(541): n is a, c, g, or t
tgagagccaccagccaaggcggggacttgatgtctgacctctttaacaagcttgtcatgaggcgcaaaggaatctctggaaaaggacccggttctggcactagtgagggacctgcgggagccttcacgcggatgtcagactccatcccacccctgccacccccacagcagcccgcgggcgacgaggatgacgatgactgggagtcctgagtgtgctctgacccctctcccacattcnnnnnnnnnnnnnnngaggggcttctcagccagctgaggcctttcargtcctgctgcccatgcaggtccagggggtgatacaagtgttaggggtctgtgcccaatctcttcatggagtggggactgtgcgagccgcctgctgcttccctgcttcacaccactgcttgactccctcctcccctgaagagcaacagcagcaagaaggaataaagaaagtaactagggccnnnnnnnnnnnnngnnnnnnnnnnnnnnnnnncaacagggcccttttagtaaatgaaannnnnnnnnnnnnnnnnnnncccccaccggggaggacctccattttttgtccccttta

SEQ ID NO: 159 - DNA, 696 bp, Cricetulus griseus
cgatttgaagtctccccagatggatccttcttgctcataagtggcattgctgggttttctcatttgctatcaatgaagaccaaagaactgattggtagcatgaagattaatggaagaatttcagcatccacattctcttccgatagtaagcggatatatacgtcttctgggaatggagaagtttatgtgtgggatgtgaattcaaggaagtgcattaacagattttttgatgaaggcagtttgtatggattaagcattgctacgtcaaagaatgggcagtatgtggcttgtggttctaagagtggagtggtaaacatatacagtcaagattcttgcctccaacaaacaaacccaaagccaataaaagctataatgaacctggtcactggtgttacttccttggcattcaatcccactacagaaatattggcagtggcttcaagaaaaatgaaagaagctgtcagattggttcatcttccttcctgtacagtattttctaactttccagtttttaaaaagagtactgtttctcgtgttcaaaccatggatttttctcccagaagtggatacttcgccttggggaatgagcagggcaaggccctgttgtataggttacaccattactcagacttctaaagatgtttttcttgaaattcaattgaacccatgtcagtacatcttccccagaattttcaa

SEQ ID NO: 160 - DNA, 587 bp, Cricetulus griseus
gcgaaaaaarrgagagaaaacatatcagctaccatactttgcttcctaatcactactatgtttgagtaaaggcagtgtttcttattcattttattttttattgttcatacaatatagaagcatttaagagagtgatttttatttataattcatatggtttatgtcaaatgttacaaagtagaactttatatagctgtcactggttcttgagtatttttacttacaatgtttttttggtaatgaaaatctgtgttaattttcatttggaaactaaagcaattcataatttttgtgggatcttgtaaagtgttcagttatttcttgtgctccttttctggtttcctttcttattaactatggactccttatttgcatttctaggtcctgggggtttgggaggatcaktgcattatgccacaatggctaggtctgctgtgagacctgcaagccttaacttaaatcgttctcgaagccttagcawcagtaatccagatatatctggcactcccacatcaccagatgatgaagttcggtcaatcattggcagtaaggtaaactgaagacatgactatccwtttwtaacagtg

SEQ ID NO: 161 - DNA, 580 bp, Cricetulus griseus
  misc_feature (167)..(184): n is a, c, g, or t
ggctcggaggaggccacggtgcaactctcttcggtcgtcccggatccgggttcatccgacaccagccgcctccaccatgccgcccaagttcgaccccaacgagatcaaagtcgtgtacttgaggtgcaccggaggtgaggtcggcgccacgtccgccttggcccccnnnnnnnnnnnnnnnnnnctgtctccaaagaaagttggtgatgacattgccaaggcaaccggtgactggaaaggtctgaggattacagtgaaactgaccatccagaacagacaggcccagattgaggtggtgccctctgcctccgccctgatcattaaagccctcaaggagccgccaagagacaggaagaagcagaagaacattaagcatagtggaaatatcactttcgatgagattgtcggcattgcccgtcagatgaggcaccggtctttagccagagaactttctggaactattaaagagatcttgggcactgcacagtctgtgggctgtaatgtggatggccgccaccctcatgacatcattgatgacatcaacagtggtgtagtggaatgcccagctagttaagaagca

SEQ ID NO: 162 - DNA, 583 bp, Cricetulus griseus
gaggtggagaagctgggtgtggggtgcacggagccggtggggaagccgagctgcagcgagcgtarggtcggatcggactggggttgcggycgarggccagcccggagcccgcakgagakgatyccgactgtgagacccgccttscsggscccggcccctcccagctcccccagcgacggctgcttcctggtccccgacgcakscatggccgaagaacaacctcaggtcgaactgttmgtgaaggctggcrgtgatggggccaakattgggaactgccccttctcccabaggctgttcatggtgctctggctcaagggagtcaccttmwacgtcaccaccgtggacaccaawagacggacagagacagttcagaaactttgcccgggtggacaactcccattcctgctgtacggcaccgargtrcacacagacaccaacwagatcgaagaattcctggaagctgtgctgtgccctcccaggtacccaaagctggctgctctgaaccctgagtccaatacctcakggctggacatatktgccaagttttcggcctacatcaagaactcaaacccakcactcartg

SEQ ID NO: 163 - DNA, 579 bp, Cricetulus griseus
  misc_feature (183)..(201): n is a, c, g, or t
  misc_feature (342)..(372): n is a, c, g, or t
awggggaatactggagactgctagagatcttttgcagtgtctgtggacctttcgagagtgaattattctcataatcagagccctgctttaatggagtaccttcaagggagggtcttcaacctcttgttaggtcctgtctcatcaagctgtgatgtcttcgttcctagatctctctggactggnnnnnnnnnnnnnnnnnnngggccaggaggacatctgaaagcttggaagcctgggagtgagttagatgcctttgggctattgtttggttgacagtggtaaagtcttccattagccctggcctaatgctttatgaaagagccaacggtggctgaaggtggnnnnnnnnnnnnnnnnnnnnnnnnnnnnnnngattcatacactgagtcatgggcttcacaggaaacagcaagggtaatgaacatgctcccatcacagtcctgtctgaatttatgttatcgtgtctggagggtgttcawggggtatacctggatcttgttgaaaatataagccatctatggtttctaatttggatggktttgttataaaggagctcagagygctcatttgaaagaattc

SEQ ID NO: 164 - DNA, 584 bp, Cricetulus griseus
  misc_feature (343)..(362): n is a, c, g, or t
tgcatttctgtcgcgctggtccggcggctctgagttttgaaggtgacagcgggacgtgacccgcctgggtcccgcgatgctagcggcacggcagcttctcggtggatcgcttcccgtgcgggtatttgtgcgtttcagcagcggcacgacagcacctaagaaaacctcatttggttcgctgaaggatgaagaccggatcttcaccaacctgtatggccgccatgactggaggctgaaaggtgcccagagtcggggtgactggtacaagacaaaggagatactgctgaaagggcctgactggatcttgggtgagatcaargcatctggtttacggggccgtggnnnnnnnnnnnnnnnnnnnngcctcaaatggagcttcatgaataaaccctcagatggcaggcccaagtatctggtggtgaatgctgacgagggggagccaggaacttgtaaggaccgagagatcatgcgccatgaccctcataasctggtggagggctgcctggtaggargccgggccatgggtgcccgggctgcctacatctacatccgaggagaatwytacaatgaagscctccaatctg

SEQ ID NO: 165 - DNA, 578 bp, Cricetulus griseus
gtgtctttgtattttgatactaagaggtaccaggaagcgttacatttgggttctcagctgctgcgggagttaaaaaagatggatgataaagcccttttggtggragtacagcttttagaaagcaaaacataccatgctttgagtratckgccgaaagcccgagctgccttaacctytgctcgaaccacagccaatgccatctactgcccccytaaattgcaggctaccttggacatgcagtcaggtattattcatgcagcagaagagaaggactggaaaactgcttactcatacttctacgaggcatttgaaggctatgactctattgatagccccaaggctatcacatctctgaagtacatgttgttgtgcaaaatcatgctcaacaccccataagatgtccaggctttggtgagtggaaagcttgcacttcgatatgcagggagacagacagaagcattgaaatgtgtggctcaagctagcaaaaacagatcactggcagattttgaaaaggccctgacagactaccgggcagagctccgggatgacccaatcatcaacacacacttggctaagtt

SEQ ID NO: 166 - DNA, 896 bp, Cricetulus griseus
tgattttgtcaatgcaaaaaaactcaacatcaaaaacagaggattgaaagagggcatgaacccaagctatgatgattatgctgactctgatgaagaccagcatgatgcctatttggagaggatgaaggaggagggcaagatccgggaggagaatgccaatgacagcagtgatgactcaggagaagaaactgatgagtccttcaaccctggtgaagaggaagacgatgtggcagaggagtttgacagcaatgcctctgccagctcctccagtaatgagggggacagtgaccgataagagmagaagcggaaacagctcaaaagggccaagatggccaargatcgcaagagccgcawgaagtcttcadaggcgaagaarggtaaagatscaaatgcccctaagakgcctatgtctgcatacatgttgtggcttaatgccmrccragagaagatcaagtsakaccatsctggsrtsarcmtcacagatctttctwagaargcaggcgagatctggaagggaatgtcccaagagaagaaagaggagtgggacccaaaggctgaggatgccaggagggaatatgaaaaagccctgaaagaatatgaaggaggaagaggtgaatcttctaaaagggacaagtctaagaagaaaaagaaagtaaaagcaaagatggaaaaaaaatccactccctctaggagttcatcatccaagtcttcatcaaggcagctaagtgagagcttcaagagcaaagaatttgtgtccagtgatgagagctcttcatgagagaacaagagcaaaaagaagatgaggcggagcgaggactctgaagaagaggaactagccagcactcctccaagctcagaggactctgcctcaggatctgatgagtagaggaagaaaa

SEQ ID NO: 167 - DNA, 580 bp, Cricetulus griseus
ctgcasttctcctgctaccggwccttgaagcaagtctacractgggycatacctccaagatggaaagcaaacagggaacctgaaaaacctgctctgtggatgtgggttctggagtcatcakcwagaccctcacatatcccctggaccksttcaaraarcgtytgcargtgggagggtttgagcgtgcccgatccgcctttggcgargwgcgtarctacargggcctcctggacctcaccaakcaggtgctacaagatgaakgcacccakggcctcttcaagggcctgtcccccarcctgctgaargcggscctctmcaccggcttcatgttcttctggtacgagctcttctgtaacctcttccactgcataaggagtgaakacagatagctgtgakcatgggaggggcctwcagtccacactggaggcgcctstsctgaccasacttgttctgcgcgcatactgrgcgatkgctgctgcctggttgacctargccrgctgtcctgggcatgaakagwtatccacagccgatggcagaakggcaagggccttttctgaraagaacakasawrggasagctt

SEQ ID NO: 168 - DNA, 579 bp, Cricetulus griseus
atggctctcaacttgtgatgtcaagatacgagggcttttgaggaggtgtttttgttgggtttttgcttttcgttttttctttttggttatggtgctatttctgacatttaactttgaatatgtgacacactcctaagtaccagkaaggataagtaataaatgatagttgaaatgtttacactgagcactakgtgtttgggacgcgcakggatttaacgcacagatgtactttaatgcttadgaccagtctgtccttttgagcakttggaaggtgaatgtgagctggtccarcagtccgtgctctggcttctttctgtakcacttgaagtgtgtagyggcatatatgcaaaagtagcccctcccctcakttctgtatgtsakagtcctatgactttattcacttavgaatttttaaagaagtttgaagtatttargyttgatttttttttttttacttcttttgaaagattattatcatcaaacatattaagaaagatttaaaaggatccccccccatatcttattttaaaaaggggtcctggcaatgtctagtaatttttgattacaagaaaaggatca

SEQ ID NO: 169 - DNA, 579 bp, Cricetulus griseus
tgtgctcccagcctccctgagacagagtcccacatgcacacacacactttctggcaagtgccatagtgatgggaaattattttcatggggattttattgtttttcccttttgataggttgcagatatttttttatttaaaaatacaattttaataaaatgtgaggtttacaatgagcttctaacacctttttttaagccgaggtctttctattgcttttcaagtgctgtccatgatattgctggtattgggcatgaatctatagaacgataaaactttaaagaagtatgtactgaatgaattttaattttgaaaaaaatcagtataaatttaaagaattatgctaacatggcataattttaatgaaatataagagggatgtagttaagtccttttatactgtctgaattaatgccagtcatcatcttagatattcatagtacctattgcttattggcttaatggaatacgtcagtgttaacctgtgctttgtagacctttctctgacagtggtgaagagggatagagattataacatcactggcacaaacatgaacccactgtagaargaarggactyt

SEQ ID NO: 170 - DNA, 579 bp, Cricetulus griseus
aatcacttataaatsgcgcccaagcaaskacccgaagcccaaattccargagggtgagagagtgctgtgctttcatgggcctcttctctatgaagcaaagtgtgtaaaggttgccataaaggacaaacaastgaaatactttatscattacagtggctggaataaaaattgggatgaatgggytccasaaagccgagtcctcaaatatgtggacaccaatttgcagaamcakcgagagcttcaaaaggccaatcaggaacagtatgcagagggcaagatgakaggggctgctccgggaaagaagacatctggtctgcaacagaaaaatgttgaagtgaaaacaaawawgaccaakcakaaaacacccggaaatggagatggyggcagtaccagtgagacacctcakcctcctakgaagaaaagagcccgggtagatccaactgttgaaaatgaagaaacattcatgaacagagttgaagttaaagtaaagatcccggaagaattgaaaccatggcttgtggatgactgggacttgatcaccagacaaaaacagcttttttatctwyctgccmasaaraa

SEQ ID NO: 171 - DNA, 579 bp, Cricetulus griseus
  misc_feature (89)..(103): n is a, c, g, or t
agtagaggtacttgccaccaagcccgatgacctgagttccagtccctggacctacttggcagaaggagagagctaggttttccaagttnnnnnnnnnnnnnnncatcaataagcaaataacaagggtaattaaaagaattttaatggcaatgtaaattaaaaagaaaagtattaagctgttttgaccttgggaaacatttttttccactttcctaaggtgtgcttcccttttttgctccattaattatctcagcctcattcgtgatctgtgtagggttattgtgactgtggagaatgtattcacggccattgatgactaagtctacctactcagctctctgtgactgaggtgcctgtcatccagggaagaagctcagtgagactaccctctgcttacttaagatctctcctctgacatacctaatggcagcatccttaggtttatttaaagttcttaatgccaacagttttaaagaaatcacatgagctgtacaatgtagccagaccttgaatgtgcaaataggagactatagtacgttctcaagacgttttgctcctcgaagccctatcagttgtaaa

SEQ ID NO: 172 - DNA, 579 bp, Cricetulus griseus
tggaatgtggggacaaacttgtttgaagtgatgcccagccagtgaacaagcaagacctaaaagaaattcaacaaaatgagatgggagtagactggattctaagttggaaaggatgacagtgccaagtcacagatggaaagggttgctctaaggaaacctacttggttgcccccacatcctatacatgtaccacacatttctcagcttgaagtactgtattgtagaaaacagacccacttctgactttctaggcattgtaggaaaatgcttatttcctttcctacccctttcttctacaatgtccaaatggttgcacagtcagaatctgtgtgccacctgtacttctatattagaactaatactyttaacatttmcatacccatatscccacataattgyaaccaaccagtattatctagtgctgcgtctakttatkaatgggaagttttctgtcaatactgacctaatwggctgtttgggatttgaatactctgagaaagtggagagagasamatakaaktsctcgtttcttgggtgcttcctccttgaccttgtgttgggaactgccacattttcaac

SEQ ID NO: 173 - DNA, 579 bp, Cricetulus griseus
tatgtcacaggagactttaatccttcagattcttgtatacctttgaataaatggttaatgttcacttaaaaagacagattttggagattgtattcatatctatttgcatttgatttctargtcaattgatgtgattatttttgttaaatgttgtcttgtgcccttaactacgagctgaattgtattaaacactacaaagtcatggtgagtattttaaatcagtttgtgtagttaggtttcccaacacctgtggttacctaatgtttaatattataggactgtcctcatacagtttgtcaattttcaaggatataaagaaagacagaaggactctttgaattctgtatttatcatttgctttctgtatatatagtttaataacctgcttgggtgtgatttgccaagcttgaagtctaatgcatttgcataaattctacactgtccggagcttgaagctacagaagcattgttaggaattgcttggacactgacttctaaactytttgacatcgktaatgagcatgttcatcttttcttgtcactagtccaagaaaaataagcttgtgtattactaaaggc

SEQ ID NO: 174 - DNA, 580 bp, Cricetulus griseus
cagtttcctgacaagcagtgtgccaccagttaccgctgatagcaccacgaaagttccttakgccaaagggacagtagtgtttaagggcactaagactggcttgtggaacaaagggacagtagtgtttaagggcactaagactggcttgtggaaatgaacagcaaaagccttctacaacttagcccttgtctaataaatgcatgccagcttccctctgttgtccatcatggcagtaaggtagagaaccatggacagaatttattgaaattggaaggggaggagaggggagttgccagatagtttttaggtttcatgtaatcttcctggattttttttgcctccttctttagtcagccctttaaggctcacggggctctgagcaaaaagtagcagtatttccaactgagggattttagtcatgggtggagcaaccgcttattgtgtgtgagaccctgttagcatattctgagcactagcatctcaaaaaataaaatwggttctactcttaarggagagcacagggaacataatattatcctgctgtttcacacattttattttcttgtscagacttaccacc

SEQ ID NO: 175 - DNA, 533 bp, Cricetulus griseus
catgtcgcaagatcaaggtgaaaaggagaaccccatgcgggaacttcgcatccgcaagctctgcctcaatatctgtgttggggagagcggagataggctgaccagggcggccaargtgttggagcagctcacgggccagacaccggtgttttccaaagccagatacaccgtcaggtcctttggcatcaggagaaatgaaaagattgccgtccactgcactgtccgtggagccaaggcagaagaaattctggagaaaggtctgaaggtgcgggagtatgaattacggaaaaataacttctcagacaccggaaactttggctttgggattcawgaacacattgatctgggcatcaagtatgacccgagcattgggatctatggcctggacttctatgtggtgctgggtargccaagtttcakcatcgcagacaagaagcgcawgacaggctgcattggggccaaacacagaatcagcaaagaggaggccatgcgctggttccagcagaagtatgatgggatcatccttcctggca

SEQ ID NO: 176 - DNA, 579 bp, Cricetulus griseus
gtgggcgtcttcccctcgctgcacgtggtcaaggtgctgctggactgcggggccgaccccgacagccgggacttcgacaacaacactccgctgcacatcgctgcccaaaacaactgcccggccatcatggatgcgctaatcgragcaggggcccacatggatgccaccaatgccttcaagaagacagcctatgagctgctggacacaaagctactggccaagagcaccgtgcagcccttcaactatgtgacgctgcagtgcctggccgcccgcgccctggacaggaacaaggtcccttataagggattcatcccakaggagctggaggccttcatccagctgcactgagcccggcccagacacctgcgtgcactttagcctactccaagcgaaagcaccctgtcctcttgggctgcaggcagtgagggtcattggagtgggccccgctgttggttctagaagccttcaaggtcacgtggtaggaagatggcctttctctgtgacaaagcaaaagagtgccaggacctccccagtggcgtctgtctgggtctggagtcctgtgcccacgacacacgtgga

SEQ ID NO: 177 - DNA, 580 bp, Cricetulus griseus
gccccttcaggagaggtgttttcgaactctgcatcttgtgaactgacaggttctggatcttgcaacagcatgctgaaactgggtaataaatctcctaatggaataagtgattatccaaagatcagagtgacagtaacccgagatcagscacgtagagtcctgccttcatttggaggctataatagaagaccaagtggccgtcgacatagcaaaagcaatccagagagttccttaacatggaaacctcaggagcagggtgtaacagagatgatttctgaagasagtggcaagggtgtgaggcgtccccattgcactgtggaggagggtgtccaaaaggatgaaagagaaaaataccgaaagttattggaacgacttaaagaaggtggkcatggaaacactctccctgctgtatcttcacatcatagttctcagagaagccagatggacacattaaagaccaaaggctgggtggaagagcakastcacggaatcagaacagcccattttgttccaaaacagtacagagtcgttgaaacaargggacctctctgttcagtgagaagtgagaakaggtactcat

SEQ ID NO: 178 - DNA, 633 bp, Cricetulus griseus
agatctggcacgttgacttatgaagcggttcaccaaacaacccaagttggcctggggcaatctttgtgcattggcattggaggtgacccatttaatgggacaaattttattgattgccttgaagtcttcctgaatgatccagccacagaaggcatcgtactgattggtgaaattggtggtaatgctgaagaagacgcctctgagttcctgaaggaacataattctggtccaaatgccaagcccgtagtgtcgwtcattgctkgygtaactgctcctcctggcagaaggatgggccatgcaggggcaattattgctggaggaaaaggtggtgctaaagagaagatctctgcccttcawagtgcgggggttgttgtcagcatgtcccccgcacagctgggatccaccatatataaggagtttgaaaagaggaagatgctgtgaaggacacaacatgaagctcttcaaggctgtggaagaactctcgtggactgagagtcagtccagaktgtcagctcacacatctgacactggtctctcagttcatcggaagcccaggcaaattttagaatgtcctaaattgagctattttcacttactgtgtaacagagacagataataaatctatcatttgat

SEQ ID NO: 179 - DNA, 589 bp, Cricetulus griseus
  misc_feature (109)..(109): n is a, c, g, or t
cctggcacaaggttcatctataccgaatcacctgatgggggctgaggtaggaagatccagggacaggaactgttccttgacacaggcttcacctgtaagaattctccanaaaggctgtgtgggtggtaaagtccagggaaggaggaattccttgaaacatggaagagctaaccagaagggttctaacagtgggagagttggrgaaattagtacttcttcaaaacacgctccctatataaaaattcgcccgaagccctgggaaagagggaaagacagggaaatcaacactccaattaaatacagtccccatgtgaaaggttaccagagggatccccagggggccactgcaaggaaaaccaacaattgcgacagagacaccagccagcaagctcggcagatagtttttataaaaattcacaaggggagccaagtttgccgctgcagtgaatgtggtaaactgttccagaatgctaggtatttctctgtccataaaaagatccacacgggagagaagccttacatgtgtctgacctgtggtaaagcttttgttcagagctcctccctcacccagcactatagaattcacagt

SEQ ID NO: 180 - DNA, 593 bp, Cricetulus griseus
  misc_feature (3)..(11): n is a, c, g, or t
  misc_feature (30)..(51): n is a, c, g, or t
ccnnnnnnnnnggagaaaaaagacccgatnnnnnnnnnnnnnnnnnnnnnnttgacttttttgaagacattgattcagatgaagatgagggagggctgtttggacgtcagaagattaagtcaagcaaaagttccaggaatctgaaatacaaagatttcttcaatccagttgaaagtgatgatgacatcgctagtgtcgtttatgatgacttadgttctaacaaagaggaagaatttgctgargaagcagaagaaagcatttctgaaatggatgaagataacgacctggaakaaagtgagggtggcgagcaacttaaagaargctcgaaaagagtaaccttcgctttgccagaggatgaggctgaagacacgagtcccttagctgtaaagcaagaatctgatgaagttaaatcctcttttgaaaagagacaggagaagatgaatgagaaaattgcatctttggaaaaagaattgttggagaaaaagccttggcagcttcaaggggaagtgacagcacasaagcggccagaaaacagcctgctggaagagacactccactttgaccatgctgtcagaatggcacctgtaatcaca

SEQ ID NO: 181 - DNA, 579 bp, Cricetulus griseus
aggccgtgaacccgggaagtgcttctctctgtagaccccgctgcctcacgcttcccgccgccatggagtacctcatcggcatccarggccccsactatgtcctcgtcgcctccgatcgggtggccsccagcaatattgtccakatraaggacratcakgrsrrgrkgkttaagatgagkgaaaaaatcttactcctatgtgttggagargctgraracactgkacagkkkgcaragtatatccasaagaacgtgcagctttataagatgcggaatggatacsaattgkcccccacagcagcagctaatttcacacgkcgaaacctggctgactgtctacggagtcggaccccatatcatgkgaacctcctcctggctggstatgatgagcatgaagggcsmscactttactatatggactacctggcagccttggccaaggctccttttgcagctcatggctatggtgccttcctgactctcagtatccttgaccgatactacacaccaactatctcacgtgagagggcactggagcttctcaggaagtgtctggatgagctccagaagcgcttcatct

SEQ ID NO: 182 - DNA, 620 bp, Cricetulus griseus
cgctagaggcaccgtgcggtggggtgtgctggcggctggcggagtgagactttggcagacatggctcccagctcgctggctcccgaacccgagagtcggaagggtatccgggcggtgctgctggggccgcccggggctggcaaggggacccaggcacccagattggctgaaaacttctgtgtctgccatttggccactggggacatgctgagagccatggtagcttcaggttctgagctggggaaaaagctgawggccacgatggatgctgggaaactggtgagtgatgaaatggtcgtggagctcattgagaagaatttggagagtccttcatgcagaaacggctttcttctagatggcttccctcggactgtgaggcaggctgaaatgcttgatgacctcatggagaagaggaaagagaagcttgattcggtgattgaattcagcattccagactccctgctgatccggaggatcactggaaggttgattcaccccaatagtggccggtcgtaccatgaggagttcaaccctccaaaggagcccatgaaggatgacatcactggagagcccctgatccgaagatcagatgacattgagaaggccttgaagatccgcct

SEQ ID NO: 183 - DNA, 722 bp, Cricetulus griseus
gctatgcacagatcctgagggatgtgggaggcattgttttggccaatgcctgtggcccttgcattggccagtgggacaggaaagacatcaagaagggggagaagaatacaatcgtcacttcctacaacaggaacttggcaggccgcaatgacgcaaaccctgagacccatgcttttgtsacatccccagagattgtcacagccctggccattgcaggaacccttaagttcaacccadaaaycgacttsttgacaggcaaggatggcaagaagttcaagctggaagctccagatgcagatgagcttccccgatcagactttgacccakggcaggacacctaccadcaaccccccaakgacagcagtgggcarygggtakacgtgagccctaycarccagcgcctgcarctcttggagccttttgacaagygggacggcaaagacctggaggacctgcaaatcctcatcaaggtcaaagggaagtgcaccaccgaccacatttctgctgctggcccctggctcaagttccgtggacatctggacaacatctctaatracctgctcattggtgccatcaacattgaaaacggcaaggccaactccgtgcgtaatgctgtcacccaggagtttggccctgtgcctgacactgctcgatactacaagaaacatggcatcaggtgggtggtgattggagacgagaactatggtgaaggctcaagccgg

SEQ ID NO: 184 - DNA, 518 bp, Cricetulus griseus
  misc_feature (173)..(201): n is a, c, g, or t
ggggaggcttcarcttcccttagagcagagacgcgggcgccgccggcctcgcctgttgccgcgggagccgggcgggaggagcacggaaggagccatggctctggacgggataaggatgccagatggctgctacgcggacgggacgkgggaactgagcgtccatgtcacggacnnnnnnnnnnnnnnnnnnnnnnnnnnnnncggggaggtgcacatcggaggggtgatgttgaagttggtggagaaactcgatgtaaaaaaggattggyctgaccatgctctctggtgggaaaagaagagaacgtggctgcttaagacgcactggaccttggataagtatggcatccakgcagatgccaagcttsagttcaccccccagcacaaactgctccggctgcagcttcccaacatgaagtatgtgaargtgaaagtgaatttctctgaccgagtcttcaaagctgtgtctgacatttgcaagactttcaatataagacaccctgaagaactttctctcttaa

SEQ ID NO: 185 - DNA, 535 bp, Cricetulus griseus
  misc_feature (467)..(481): n is a, c, g, or t
tactcacttccttcttctgcctcatgaaacctgtctgtttttaccacattgttacctgcttggttaggtgccttgtctatcttcttgtactgtatgtatctcatgagtcctgccaagataagcactggctggtagcgaattccacagaaacaaatacttttaaagttacactgatttttggttaccgatgtttacatttttaagttatataaccttgggttaattccttaaaggactggagactactcagcttctcatttgtaaaatgaagctgctacttaacttcattggactcttagccccaaacagacctagaacagagtgcaggagtagaaaacagataaaatatggtttacaaatattggttgtaccagaatatttgcttttaagaagtatttctggccattcgtagtgacagacaattttagtcccakcacttgggagggagagatggacagcagttgtcnnnnnnnnnnnnnnnatttacatggtgaattccakgcaagccaggggtacataaggaaactctgtctca

SEQ ID NO: 186 - DNA, 819 bp, Cricetulus griseus
  misc_feature (554)..(579): n is a, c, g, or t
  misc_feature (654)..(675): n is a, c, g, or t
ctcagggctgcggaagggagcagagctgaacggctgggcgggcctggccaggccagcggagcggagacgtcggccgagtggctgcgaacatgcgcttttgacacgttggcggtatgtgtccacatgtgggtatgttcatgagaatgcagtgcccacagaggcaggaggcatctgattccctggagctggagctacagatggttgtgagccaccttatgctttcttgatcatggatggtgaagatataccagacttttcaagtttaaaggaagaaactgcttattggaaggaactttccttgaagtataagcaaagcttccaggaagctcgggatgagctagttgaattccaggaaggaagcagagaattagaagcagagttggaggcacagttagtacaggctgaacaaagaaatagagacctgcaagctgataaccaaagactgaaatatgaagtggaggcattaaaggagaaactagagcatcagtatgcacagagctacaagcaggtctcagtgttagaagatgacttaagtcagacccgggccattaaknnnnnnnnnnnnnnnnnnnnnnnnnngctggagcaggccaatgatgacctggagagagcaaaaagggcaacaatagtttcactggaagattttgaacaaannnnnnnnnnnnnnnnnnnnnnaaatgcatttttagaaagtgaacttgatgaaaaggaatctttgttggtctcagtacaaaggttaaaggatgaagcaagagatttatagcaagagctagcagttcgggaacgacaacaggaagtgacccgcaaatctgctcctag

SEQ ID NO: 187 - DNA, 581 bp, Cricetulus griseus
accgtccctccgcagccctccggcggtcacagtagccgatcgggtcgggtcgcatcgtctcctgcgcgcatcctcggatctgatttaaaccaccaccatgtcgagcaaaaaggccaagaccaagaccaccaagaagcgccctcagsgkgcracatccaatgtgttcgccatgtttgaccagtcccagatccaggagttcaaagaggccttcaacatgatcgaccagaaccgggatggcttcattgacaaggaggacttgcatgacatgctggcttctctaggcaagaatcccaccgacgcctacctggatgccatgatgaatgaggccccaggccccatcaacttcaccatgttcctcaccatgtttggagagaagttgaatggcacakatcccgaggatgtcatcagaaatgccttcgcttgctttgacgaggaagcaacaggcaccatccaggaggattacctgagggagctgctcacaaccatgggcgaccsgttcacakatgaagaagtggatgagctgtacagggaggcgcccattgacaaaaaggggatacttcactacatcgagttcacacgca

SEQ ID NO: 188 - DNA, 750 bp, Cricetulus griseus
  misc_feature (12)..(84): n is a, c, g, or t
atgtgtggaaannnnnnnnnnnnnnnnnnnnnnnnnnnnnnnnnnnnnnnnnnnnnnnnnnnnnnnnnnnnnnnnnnnnnnnnntgcgtttggtccttccctgttttgaccaaatcctaagggggagaaaaccctagtatgccaaaaaataacatgctaagcattaggagattcctaacagtcccttaattaccagacagcctgtgagaggacaaaggctgaccatccacctgtgckgagtagctagctccttctagaagggatagcgtttagaagttgctttggtttgaactgtccccaggatgccacagaagagcagggcacatcttggaggcggctagggcaagttgtgtgcctaccaagatagactcccctakcagctagacaggctgggagtatatgtagctgtcctggatccccttctgttgctagcaggataagtgaccactcagagggagcttaatagttttcttatagtctagctctttgggggacctaccattctgtgccttgagagctgtaggaccaacagactaagatyggatggctytcacaaagagagcagatgagcttyctctacgygggtgggctgtggggacaggactgggaggatcacactcgtaccttatgtcctgtaaattctgattctctattccaagagggtataccggaggtgcggaaactggaggtagcaatattaattcttaagtatgcacctgactttctatccccatagggttcctctgttgc

SEQ ID NO: 189 - DNA, 538 bp, Cricetulus griseus
atcctgtcctttggtttataatctagttgtagagataagaaacatacaaacaacgacaacaaaaaccaaaaaccaaaccctaagattatttggagcatgcattctgtcagatgtgtgccttcagagcatggaggargcaaaggctttgggggctggctacaggagtcagttaaaaacttcagggaggagagagccattgaaagggagtccttattggagtagggaagtcagtgcattccatgagaccagacttgagggtagatgatgtgagaaaggcattaatttaagaacccttatgatagtcaaaacagccttcttatagtggagagtgtggagagtagggttaaatctgtaaaaccgyatgaagcccattgcagaaagcttgttgaatgtatttttaactakgaaagagttggggtcaatataaaagtcctcccacactgtgtcataaagaatggtgtagcataatggctcctttctaactctggtggtgggcatttgacaatacatatcattaagccttaacatatggaaacct

SEQ ID NO: 190 - DNA, 614 bp, Cricetulus griseus
  misc_feature (4)..(33): n is a, c, g, or t
  misc_feature (428)..(448): n is a, c, g, or t
actnnnnnnnnnnnnnnnnnnnnnnnnnnnnnntgtccattattaatcagagagggaaaattggacccttgatgatacaaagctaccaagtggtgaagctgaaactgattaggcgcagccttctaactaataatggactgtgattgctagtaaaaatctcccgcggcatttattaaatggacaattcctgggcagtaactgtggagattctgagtgggtctargatgtagccacggatttatttttagcagataggtgggttttgtaagggaaattcatgaaatgttactattaacagtcatggtggaccttcgcaactatttatatttggttattttatttgtactggtttgctgtttaaaattctttccaggtgtargtggcaaatgcttttaatcccagcactcatgagacagagtcaggcagcnnnnnnnnnnnnnnnnnnnnncttggactacagagcaagtgccaggattggctccaaagctacacatagaaaccctgtcmcaaaacamacawtaaatcagagcatatttcttatgcttttccctataacctgtaagcgccatacataattaacttattgaagcttctgtaacccttacactgggaca

SEQ ID NO: 191 - DNA, 951 bp, Cricetulus griseus
  misc_feature (328)..(353): n is a, c, g, or t
  misc_feature (462)..(481): n is a, c, g, or t
ggagagctgtcggtaggagcttcgccgagtccggggtctgaagctgaccggtctgacgtcccacccttgccgaacccactakaaccgcagccatgtccggggacgagatgatttttgatcctactatgagcwmmrrgaaaaagaagaggaagaagccttttatgttagatgaagaaggtgatgcccakacagaagaaacccagccctcagaaacaaaagaagtggagccagaaccaactgaagacaaagatgtggaagctgatgaagaagacagtaggaaaaaggatgcatctgatgacttggatgacttgaacttctttaatcaaannnnnnnnnnnnnnnnnnnnnnnnnnatatttgacattgatgaagctgaagaaggtgtaaaggatcttaagattgaaagtgatgctccagagccagctgagccagaggatgacctggatattatgcttggcaatnnnnnnnnnnnnnnnnnnnntgtcaaattcccagatgaagatgaaatactagaaaaagacgaagctttagaagatgaagacagcaaaaaagacgatggcatttcattcagtaaccagactgggcctgcttgggcaggctcagaaagagactatacatatgaggagttgctgaaccgagtgttcaacatcatgagagaaaagaatccggatatggttgctggagagaagaggaaatttgttatgaaacctccacaggttgtccgagtaggaaccaagaaaacttcttttgtcaattttacagatatctgtaaactattacatcgtcaacccaaacatctcctcgcatttttattggcagaattgggtacaagtggttctatagatggtaataaccagcttgtaatcaaaggaagattccaacagaaacaaatagaaaatgtcttgagaagatatatcaaggaatacgtcatttgtcacacatgccgatcac

SEQ ID NO: 192 - DNA, 850 bp, Cricetulus griseus
  misc_feature (697)..(711): n is a, c, g, or t
gaaacatcggggccgagttgggatggatgaagatgaggggcctcgggcgcctcgcgcacttcagcccaagaaacctaagaaagcagggggtggcgggggtggcggtgctgctgcgctaggccaccctggctttgggacttctggaggcagtagcaacaagctgcctaaaaaggcccaaaagacagccccacctgtcctgccagctggttatgattcggaggaggaggaagaaagcaggcccatgagttacgatgaaaagaggcagttaagcctggatatcaataagttacccggggagaagctaggtcgagttgtacatatcatccaagccagggagccctctttacgtgattcaaacccagaagaaattgagattgactttgaaacactcaagccatccacacttagggagcttgagcgatacgttttatcctgccttcgaaagaaaccccggaagccctacaccattaagaaacctgtggggaagacaaaggaggagctagccctggagaagaagcgggaactagaaaagcggttgcaagacgtcagtggacagcttaactccaccaaaaaacctcccaagaaagcgaacgagaaaacagagacgtcgtctacgcagcaagtggcagtgtctcggctcatcgcttccagctccagctcagattccagctcctcgtcctcgtcttcatcttcttcnnnnnnnnnnnnnnnggactcgggctaaggggccaggccagatgggaaaggaaggctcggcaggaccggacccctgtaccacccttccccaccacttccccttgctgtgacacttctgcatctcatccctccataggagagctggctctgcagg

SEQ ID NO: 193 - DNA, 572 bp, Cricetulus griseus
  misc_feature (523)..(564): n is a, c, g, or t
aatgctttccakttacacackaactgaaaactgtgtaagatttcctttgtgcactgtgtgctctgtgagagggcctgtcaagcakagcagaraggaggcaaggctgatccasgctgcttctctgcaagctgastcaaagcatgagatacattattccaactcagatgtatttggacactcatcatacatcakacctaatgagatctastakatggatatgtgtggtatgcaaattagaggccttctcatcctctggaaatattasagtasaggasaatgggtaaaaccaaatatgctctaactcaatcagttagacatattcatgaagggaatggtaagtacggscagcttacttagtgtggggcatctcctawgtctgagaactcaagcccatcaattagtcacccacaaaagtaaccagagcattggaagaactgttaataccagagtccttagtaggtagcataaaacattatgcactacttggagttgttatgtaaaattctatcttcagggtccctcnnnnnnnnnnnnnnnnnnnnnnnnnnnnnnnnnnnnnnnnnntgttgttg

SEQ ID NO: 194 - DNA, 271 bp, Cricetulus griseus
tccaaaacccctctcaccttaaggagcacatccggaaccatmctggggaaaagccttacgagtgtacacagtgtggcaaagctttccggwggaagtccaacttcaatttgcataayaagaaccacatggtgtgataaaacctatgagtgcaaagaatgtggcaagcccttcagtgacctcctgtcaatgaggaaacacatgaagatgcacactgtgaaaaaaccggttgattgctgccactgtgggaaaaccttccgaaacgagtctatcc

SEQ ID NO: 195 - DNA, 520 bp, Cricetulus griseus
  misc_feature (226)..(240): n is a, c, g, or t
ggttttgaatgaagaaaacagctgataaggcctcaaacttgttattaatggactctacggaaaatggaggtagggtggggaaggggcacttaatgggctgtgctgtgcatagggagtgaacctcactgccttggcttgacacagtggtgcctgtcctttcaataaaaaacatataagcatctggtcatttcctgggcaaggtacttgtcagtcagtgaagtcctannnnnnnnnnnnnnnttgaggccagttgttctagccctttccttttaaggattaaaaacggactaagcaaggtgtggtagcttgtgatcccargatcatcaggagtttgaggctaacctgggttatatagactctccctcaaaaaaccaaaaagtgccaagagctgtgagtcaggaagaaggaggcattgtgaagggctggagaatcagaaagatggcagtgataaagcaagggtagagctctgttctcgatagtcacaagctggtttacaaatgggtgagccagcttttgcttc

SEQ ID NO: 196 - DNA, 582 bp, Cricetulus griseus
tatcaagctgccccacttcaacaccatggaaacccaakaagcaatataggagacgtctaagagaagaattctctttcattccttcagcagcacttgatttattagaccacatgctgacwcktgayyccagcaagcgttgcacagctgaacagaccctacagagtgacttccttaaggatgtggaactcagcaaaatggcacctccagacctacctcactggcaggactgccatgaactgtggagtaagaaacgtcgacgccagcgacaaagtggtattgtratagaagagctgcctccgtccaaagcctctcgaaaagaaaccacctcagggacaacagctgagcctgtgaagaacagtagcccascaccccctcagcctgctcctgttaaggcagagcctggtcctggggatgcagkaggtcagtgctgagatggagcctacttctatgaagtgcacttacgtagatttgagggtagaagacatatgttttcataaccccgtgtttttatccagtggaatattaggagagagataattgtcctcatttctcactagaagataaaccttactttctgcacat

SEQ ID NO: 197 - DNA, 519 bp, Cricetulus griseus
ctgacttggtggtgatactaaagatcctgccaacattggaagctgttgctgccctggggaacaaagtcgtggaaagcctgagagcacaggatccctcagaagttytgaccatgctgactaatgaaactggctttgaaattagytcttctgatgctacggtgaaaattctsattacaacggtgccacccaatctccgaaaactggatccggaactgcatttggacatcaaagtgttgcagagtgccttatcggccatccggcatgcgcgttggtttgaagaaaacgcttctcagtccacggttaaagttctcatcagattgctgaaggacttgaggattcgttttcctggctttgagcctctcacaccctggatccttgaccttcttggacactatgctgtgatgaataaccctaccagacagcctttggccctgaatgtggcatacaggcgttgcttacagattctggctgctggactgtttctgccagggtcagtgggcatcactgacccctgtgaga

SEQ ID NO: 198 - DNA, 624 bp, Cricetulus griseus
gtactcacctaaggagctgctagcactactaaagtgtgtagaagctgagattgcaaactatgaggcttgtctcaaggaggaggtggagaaaaggaagaagttcaagattgatgaccagcgaaggactcacaactacgacgagtttrtstgtaccttcatatctatgctggctcaggaaggtatgcttgccaacctagtggaacagaacatctcaktgcggcgccgccaaggggtcagcattggtcggcttcacaagcagcggaagcctgaccgacggaaacgctctcgcccctataaggccaaacgccagtgaggacctctggccctgattctgcagcctctcttgccacaaggctcttaccaagtcccctccctatcccacttttttccccccagtattactgaatagttcagctagatcccakgccctgggagtgggaataagctgtgtgtcctgctttattatgctctggggcctggcaggggtaagtcagccccataatgctcaggaagcagcagttagaattggagggtgctgtggcctccacaaccatctatggaacagcagtacctggccttgttgcctgggcagcagaatatacattttacctactggagatgtct

SEQ ID NO: 199 - DNA, 721 bp, Cricetulus griseus
agtttcctggtaaacccagaatcaggatacaatgtttctttgctatatgaccttgaaaatctgcctgcatccaaggattctattgtgcatcaggctggcatgttgaagcgaaattgctttgcctctgtctttgagaaatactttcagttgcaagaagagggcaaggaaggagagaacagagcggtcatccattaccgggacgatgagaccatgtatgttgaatctaaaaaagacagagtcacagtagtcttcakcacggtgtttaaggatgacgacgatgtggtcatcggaaaggtcttcatgcaggaattcaaagaaggackaakagccagccacacagccccccaggtcctttttagtcacagggaacctcctctagagctgaaagacacagatgctgccgtgggtgacaacattggctacatcacctttgtgctcttccctcgccataccaatgccactgctygakacaacaccatcaacctgatycacacgttccgggactatctgcactaccacattaagtgctctaaggcctatattcatacacgaatgcgagcaaaaacatctgacttccttaaggtgctcaaccgtgcacgcccagatgccgagaaaaaagaaatgaaaacaatcacggggaagacattttcatcccgctaacgcttgggaactgaggaggaagcgctgttgatggaaggctggaccgcttgctactggataa

SEQ ID NO: 200 - DNA, 897 bp, Cricetulus griseus
agtgaaggagcttcatatggctgagaagactaaacttatcactcagttgcgtgatgcaaagaacttaattgaacagcttgaacaagataagggaatggtaataacggagacgaagcggcagatgcatgagaccctggaactgaaagaagaagaaatcactcagcttcgtagtcgcatcaaacaaatgactagccaaggagaggaattgcgggaacagaaagaaaagtctgaaagagctgcttttgaggaacttgaaaaagccttgagtacagcccaaaaaactgaagaagcacagagaaggatgaaggcagagatggacgaacagataaaggctgttgagagagcaagcgaggaggagcgtctccgtcttcagcaggaactgagtcgggtgagacagkmgrccswcrrcrkgrkgaaaaccycasaaraacaacttgctgaacttcasaggctgcmtgccarrggagctggccascagagagcaggaactggccagaaagctccasacccgagagagggagctgcmtgascaratgaaaatagctcttgaaaaaagtcaatcagaatatttgaagctcatccaagaaaaagagcagcaagattccttggctctagaagagwtagagctgcagaaaaaagcaatcctttcagagagtgaaaataaactccaggaacttgggcgagaagcagaggtttaccgaactagaatacttgaattggaaacctccttggaaaaaagcttacaagaaagcaaaactcagtcagagcatttagctgtccatctggaagctgagaagaataagcacagtaaagagctcacagccatgactgagaagcacagggcagagctggagcgtctccagcagcagcaggacagcctgtgggctgagagactcc

SEQ ID NO: 201 - DNA, 593 bp, Cricetulus griseus
ggagggctcggtttccctgcctcgacaacctgaggactctgcacctgctgctgaaaccatgtctagcaatgggacagatgctcctgctgaagcccaggctgctgtggaagatctttttccacagcccagcgtggtggaccgcatggccagcctgcctctcatcagctccacgtgtgagatggtgagcgcagcatacacctccaccaaggaccgatacccccatgtgaggaccgtgtgtgatgtggctgagaaaggcgtcaagaccctcactgcggctgcggtcagtggggsrywkcccwkcytskmcaasctgrrgmcycwgattgcttcggccagcgagtacgcgcaccgagggctggacagattgcaggagagcctgcccatcctccaacagccgactgwkargtgkyctwgcagacactaaggaactggtgtsatstacagtatctggagccaaagaaatagtatccagctcagtgaccagkgcaaaggacacagyggccacccgggtaaccggggcagkggatgtgactcggggggctgtgcagagcaccatggacatgacaaagtcagcagtgaccagcggtgtccac

SEQ ID NO: 202 - DNA, 232 bp, Cricetulus griseus
ttaggtgtccttcaagatgtccttgctctgatcacaaactatccctatctctttgactctccatcacaccagcccaggcatctctttctggcttctgtgctcctacttcctaagccccatcctctcttgctcaatccttactatkctctttattcgttgtgtgtggtatttgtgttcaagccagaagtcagccgtaggtatcattcctcaagagccattgaccctgtgtttt

SEQ ID NO: 203 - DNA, 592 bp, Cricetulus griseus
ggtgcagatcaagaccctggagggcgagttctcggtcaccatgtggtcgtccgatgaaaaaaaagatattgaccatgaaacagtggttgaagagcakatcattggagagaactcacctcctgattattctgaatatatgacaggcaagaaactccctcctggagggattcctggcattgacctctcasaccctaagcaactggcagaatttgctagaatgaagccaaggaaaattaaagaagatgatgctccaagaacaatagcttgccctcataaaggctgcacaaagatgttcagggataactctgctatgagaaagcacctgcacacccacggccccagagtccacgtctgtgcagagtgtggcaaagcgttcgttgagagctcaaagctaaaacgacaccagctggttcatactggagagaagccctttcagtgcacattcgaaggctgtgggaagcgcttttcactggacttcaatctgcgcacgcacgtgcgcatccatacgggagacaggccctatgtgtgccccttcgacggctgtaacaagaagtttgctcactcaactaacctgaaatctcacatcttaaca

SEQ ID NO: 204 - DNA, 486 bp, Cricetulus griseus
gccaggcctcctccgtagagcaggacatcagccaccttcaagagagcatccgggcagagattccttctggggatgagcaggagcaggagcataatggaccactggacaacaaaggaaaattcactgctggaaattttcttattaatccccttgagccaaaaaatgcagaaaaactcaaagtgaagatcgccgatcttgggaatgcctgctgggtgcacaagcatttcactgaagatatccagacaaggcagtatcggtctttggaagttctgataggatctggctacaacacacccgctgacatctggagcactgcgtgcatggcctttgaactagccacaggggactatttgtttgagcctcactcaggggaggattacacacgtgatgaagatcacatcgccttgatcatagaacttctggggaaggtgcctcgcaagctcattgtggcagggaaatattccaaggaatttttcaccaaaaaag

SEQ ID NO: 205 - DNA, 1129 bp, Cricetulus griseus
  misc_feature (426)..(442): n is a, c, g, or t
  misc_feature (445)..(445): n is a, c, g, or t
  misc_feature (1021)..(1058): n is a, c, g, or t
  misc_feature (1064)..(1064): n is a, c, g, or t
tggcgggtgggtgaaagacccgagctaacatggggttagttcgttaaattacaataaagcctcgtgcagtttgcagcaagctctcgaatccgcctggkgattggggtgaccgcgaacctggcctaagaccccggatacttgagtkttcgggggtstaacrttttgggggctcgtscgcgatttgtgaccacccttcacctgagtggattcgatcttggaggtragatgattcgagctcgaaacttatatatgtkcaatgttcaatgtttgcttgtttwgkctcttgctgttttgtttggtgccatgatttgtatttgatctgcgcaaaatttgtatttgtrattcggacttctggggaagaccctaaaktcctgccctggacaaaagtccgagggttgcttgatttgatctgcgcagaattggggnnnnnnnnnnnnnnnnnacngaatttgtaattgaaccatakggtaagcagacttgcgagaaccttggttccaccctggatgaaagtycaaggttdggttgkaatyttggtttggggcaccatttctttgccgcggtttgtcctgtctaatgtctgtcctgtctaatgtctcsrtgtctcatatttgtggcatgcatgggtcargrktcttttcttgttgccctawkcacatggyacgggaaaggagttctgccatgtgtyacgggttakaatgtgktatgttggartcccccgaggctgcttttctgaactcgraccactgytgcagcccttacagctgakcctggcccrtrtwggtgagtctttccctatccccacttgccggtcccgtgggtccctgccatttgcctagctgcccgrcattctttgtgctctacacacatggtatgyaggggggcygyawgagtctttttcccacmcctggattggccwagggtctgggkttaccagcagcacccctaccccaggtctctctgccttgagcacayggrgswcgagcgtatgaacttatctggcytgakggttaawtgsccytannnnnnnnnnnnnnnnnnnnnnnnnnnnnnnnnnnnnnggttcncgcccccacaatttgccacctttttttttccccacttttccctatgttttccattaacacttttt

SEQ ID NO: 206 - DNA, 558 bp, Cricetulus griseus
gtccggggggatatcagatatcatgtatatcagatatttacatcacgattcataacagcagcaacattacagttaggaagtggcaatgaaattttaaggttgggggtcaccacaacatgaggaactgcattaaaagatcacagcattacgaaggtagagaaccactgctgtgatataaacataacctgctagctaacctacttatctacccctatggcccagtcaaccttgctgaattatcttaaagtatttaactctccatgcttattgaacaaattttggccaagggtgggacaaactgaactgctaccttcagcctggcttggggagactgagtagatagtccagggcagatcctttacctggtctccatcccacggtctcaaaactgaatctgggacagctgtgacaaactgggcaaaagtcaaggctttatgaatgaacaatcacccaaaataaattccaaaatcaaacacctacttcattagaaagctccaractgggggctagagagatggttcagaggttaaaaggatgggctgctcttccagaggtcct

SEQ ID NO: 207 - DNA, 561 bp, Cricetulus griseus
  misc_feature (143)..(157): n is a, c, g, or t
  misc_feature (540)..(555): n is a, c, g, or t
ggaagaagctgactaaakaaccagccaaagccttaaattgtgcaaaacatactgttgctatgatgtaactgcatttgacctaaccactgcgaaaattcattccgctgtaacgtttttcacatatttaaagcagaagcacgtcnnnnnnnnnnnnnnntgcataaggtttttgtagtgtgatgtcttaatcatagtctaccatcaaatactttaggagtatccttaatgttkagatagaatattagcagcatgcaataattacatcctaagttctcaagcagaggcagtctattgcaaggaccttctttgctgccagttaccataggctgttttaagttagaaaactgaatagcaacactgaatactgtagagatgcactttgctcagtaatacttgagttgttgcaatatttgattatccatttggttgttacagaaaaattcttaactgtaattgatggttgttgccgtaatagtatattgcctgtatttctacctctagtaatgggctttatgtgctagattttaatatccttgagcnnnnnnnnnnnnnnnngtcttt

SEQ ID NO: 208 - DNA, 612 bp, Cricetulus griseus
  misc_feature (601)..(605): n is a, c, g, or t
tgtcaccatgtgatccaccagcaagagagggcgccagtgaaaggcatcctctataagataagtcttataaaatatatagatttgtgataattaagactgagctaacagatgagaaatcctagtctttggccaagcatatttgtacctaatataagtgtctgtgtattatttggggccctaacttgtcgggcagactcgggtggctggtgtaaagcacccacgtggcagtagggctgcagtggcttttagcagaaagatttatggtaacagaatggtgtcagtgagcgggatgaccccatgccccaaggttcccagaggaagaggaaaacctgctgccacagccggcccttttgggctgctgagaggcatatgctcgcgccatcatggagttcatggaggttggactcggcactcccaagatgataaagacagatccagataaagaaaaacatctaaaggtttacactacatttaaaaatatctgtaggcttgtgagagaaaaaataacaggagaaaatagagtagttgggtgtggtggcagacacctttaatctccagactccaaakggagaggcaatcggatttccacagagaaaccctnnnnnagaaaaa

SEQ ID NO: 209 - DNA, 579 bp, Cricetulus griseus
ggctgggagctgcgtggagctagacttcgcgatgccgacgggcgactttgactcgaagcccagctgggccgaccaggtggaagaggagggcgaggacgacaagtgtgtcaccagcgagctcctgaagggratscctctgcccaccggggacaccagtccagagccggagctactgcccggagagccactgccacctcccaaggaagtcatcaacgggaacgtaaagactgtgaccgagtacaaggtagatgaagatggcaagaagttcaagattgtcaggaccttcaggattgagacccggaaggcatcgaargctgtggccaggaggaagaattggaagaagtttggctactctgagtttgacccaccggggcccaatgtggccaccaccacagtcagcgatgatgtctccatgacattcatcactagcaaagaggacctaaactgscaggaggaggaagacccaatgaacaagctcaagggccagaagattgtgtcctgccgcatttgcaagggcgaccattggaccacccgctgcccttacaaggacacactggggcccatgcagaaggaactggc

SEQ ID NO: 210 - DNA, 634 bp, Cricetulus griseus
  misc_feature (47)..(47): n is a, c, g, or t
acagattttcgatctgacaaatctatgggaaatgtatataaactggngaaaatgaacagggcaatctgagagaagttacagctgtgtatgatcgtattcttggtattccaacgcagctctacagtcatcatttccagagatttaaagaacatgtacagaataacttgcctagagatcttttaactgaggaacagttcattcaactgagaagggaattagcttctgtaaatggacacagtggtgatgatggacctcctggtgatgaccttccatcaggaattgaagacataactgatccagcaaagctaattactgaaatagaaaacatgagacacagaatcattgaaattcatcaagaaatgtttaactataatgagcatgaagktagtaagaggtggacatttgaagaaggtattaaaagaccatattttcatgtgaaaccattggaaaaggcccaactaaagaactggaaagaatacttagaattcgaaattgaaaatggaactcatgaaagagttgtggttctctttgaaagatgtgtcatatcttgtgccctctatgaggagttttggattaagtatgccaagtacatggaaaaccatagcattgaaggagtgaggcatgtcttcagcag

SEQ ID NO: 211 - DNA, 583 bp, Cricetulus griseus
taaaccggcgtctgcggagcgggtattcaggctagaaggaagcttttaggtccggcagcmctgcagaaatggcagagtttgggatctctcctggccagcttgtggcagtgttctgggacaagtcatctcctgakgaggccctaaaaaaactggtagatagtcttcaagggttaactggcagtgagggccaaatattcacggaaaacatcagccaactgttgcagtctgcccataaagaatccagcttcgatgttattctgtcgggtgtagtcccaggaagcgcctctctgcacaatgctgaggttctggctgagatggccagaatccttcggccagggggatgtctttttctgaaggaaccagtggagacagctgtagttaatgatgacaaaatgaagacggcctctaaactgtgttcggccctgactctttctggccttgtggaagtaaaagagttgcagcgggagtccttaagccccgaggaggtgcaatctgtccaggaacacctgggctaccacagtgacagcctgctctcatttcgtatcaccggcaagaagcctaactttgaagtgggctcttccag

SEQ ID NO: 212 - DNA, 621 bp, Cricetulus griseus
  misc_feature (408)..(429): n is a, c, g, or t
gaccttgagccctcgtaagcgwcmkggcggttctcttaaagctgggagtcctctgcagtggccaaggaggccgagctctgttgctccgaagccgggtggtcaaacctgcttatgtctcagcgtttctccaggaccagcctaccccaggatggcatggcacacagcacattcacctgtcaccaagctaccattctggttccaaggctgcatctctccattggactagtgagagggctgtcagtgttttgctcttgggcctgcttccagctgggtacctgaatccctgctctgtggtggactactccctggctgctgccctcaccctgcacggtcactggggccttggacaagtggtgactgactacattcatggggatatatcgaagaargctgtcaaggcaggcctcnnnnnnnnnnnnnnnnnnnnnnttgctgggctttgctatttcaactaccacgatgtgggcatctgcagagcagttgccatgctgtggaagctctgacctctgcagtgcaacaccttggattgtatgccactttgcctctgctctgtctatgccgttcagctcccagtgagcagggcgtggagaagtcccatggtgtcagaatttcttctaatta

SEQ ID NO: 213 - DNA, 603 bp, Cricetulus griseus
  misc_feature (76)..(93): n is a, c, g, or t
agtctcgtgtccgcggtgccgttactcgcagtcgggcggcggctgaggctcagcgcagagcgcaggtagcgggttnnnnnnnnnnnnnnnnnncgcggaggcacctcggcggtcagagcccctgcgctagtgcagccaccttcgcctgctccgcgcttccttccttcgctcgcaccatggctgatcagctgactgaagaacagattgctgaattcaaggaagctttctccctattcgataaagatggtgatggcaccatcaccacaaaggaacttgggactgtcatgcggtcactgggtcagaacccaacagaagctgaattgcaggatatgatcaacgaagtggatgccgatgggaatggcaccattgacttcccagagttcttgaccatgatggctagaaaaatgaaagatacagatagcgaagaggaaatccgcgaggcattccgagtttttgacaaggatgggaatggttacatcagcgcagcagaactgcgccatgtcatgacaaacttaggagaaaaactaacagatgaagaagtagatgaaatgatcagagaagcagatattgatggagacggacaagtcaactatgaagaattcg

SEQ ID NO: 214 - DNA, 600 bp, Cricetulus griseus
  misc_feature (183)..(201): n is a, c, g, or t
agtttgtccctactactgaaggtcccttttatgtttctgctgtgcattcctttccggtcctctccctcgtctgccatctttgctctaattgcaaactggtgaggcttagtgtttgctcatcaaccaggcaatagggtgaacttgcacgctctgggtaagtgtgttgactagtttgatgtcaannnnnnnnnnnnnnnnnnnatctgaaaggagaggacctcaatgaagaaaatgcctccataagattggactgtaggcaagcctgtggggcattttcttaattagtgactgatgttcgagggcccagtccattgtgggtggtgccatccctargctggtggtcctgggttctaccagaaagcaggctgagcaagccatggggagcakctcccctccatggcctctgcatcakctctttgcctccaggtttctgccctgttagagttcctttcttgacttccttcaatgatggactagaataargaagtayaagtcaaatgaactctttcctttccaagttgctttggtcatggtgttccatcacakccatagaaaccycawctaakacagcaaggaagcatttytcacccctcctcctgg

SEQ ID NO: 215 - DNA, 589 bp, Cricetulus griseus
aaagactttaaaaccaaaaaaatctgaagtttaaatgacaggagccagtcaggtcaggtcataccctgtaggctcctgagtccttccttctcacgtgtctctggtgcctgagaatgttgggatagcatccaggggctcaagcgacttcttcatagtttatatctgataaaatcctgacccgtgtgacgtgtttgtcacccttcgttacaaacagcatctactgaggacagatgcctgcgtcatctcagtcgacctttccttcctctctccccctcccccacctctstctctcttcttctcttccctcctcctctccctcttcctcctttccttctcgctctgcccttctctctctcaatttttgtgatcagtgaaatcagatgatgcctcaaggcacttaagatctttaatttgcattttatgcatttcacaaaatkgarrtgksccattcttctaaatatctttccattttccattagctgacatttgagtagcagttttcaaattgytggcttcatgatgtcatcatttgccgggaatcccacctatagctcagctgtctgggcacttgtcttccttgatgtgcatg

SEQ ID NO: 216 - DNA, 605 bp, Cricetulus griseus
cgtcttcccggcgcggcttgtgagggattatccactgcgctgarttcgtcggaaccatggcgtccctttccctggcrcytgygwatatcttcaaggctggagctgatgaagagagagccgaaacagctcgcctgtcatcctttattggtgccatcgccattggagaskkggkgaagagcactttggggcccaagggcatggacaaaattcttctaagcagtggacgakatgcctctctaatggtaaccaatgatggygccaccattctaaaaaacattggtgttgacaacccakcagctaaagttttagttgatatgycaagggttcaagatgatgaagtkggtgatggcactacctctgytactgttttggcagcagaactactccgkgaagcasaatctttaattgcraaaaasatacmtccacagaccatcattkcargttggagagaakccaccmwrgcagcawgagakgcgctgktkacctcygctgttgatyacggttacgmtgamgkcaaattccggsmwkattkaatgawmattgymggaacgacwttatcctcaaaactycttaytcatcatarggaccmctttacsgarttagct

SEQ ID NO: 217 - DNA, 902 bp, Cricetulus griseus
tccgcaggctgcggctgcagaggatctccccgagaagctgcgaggatgctgtccgtgcgcgtcgccgcggccgtggcccgtgccctccctcgacgggcgggactggtctccaaaaatgctttgggttcatccttcattggtgcaagaaatctccatgcctccaacatgcgacttcagaagactggcactgctgaggtgtcctccattcttgaagagcggattcttggagctgatacttctgttgacctcgaagagactgggcgtgtcttgagcattggtgatggtattgcccgagtacatgggctgaggaatgttcaagcagaggaaatggtagagttttcttcaggcttaaagggtatgtccctgaacttggaacctgacaatgttggagttgtcgtgttcggaaatgataaactgattaaagaaggcgacattgtgaagagaacgggtgccattgtggacgttccagttggcgaggagctgttgggccgtgtagttgatgcccttggtaatgccattgatgggaagggtccaattggttccaagacccgtagacgagtgggcctgaaagcccctggaatcattccccgaatctcagtgcgggaaccaatgcagactggcattaaggctgtggatagcctggtgccaattggtcgtggtcagcgtgagctgattattggtgacagacagactgggaaaacatcgattgctattgacacaatcatcaaccagaaacgtttcaatgatgggactgacgaaaagaagaagctgtactgtatctacgttgctattggtcagaaacggtccactgtcgcccagttggtgaagagactgacagatgcagatgccatgaagtacaccattgtggtgtcagctacggcttctgatgctgccccacttca

SEQ ID NO: 218 - DNA, 389 bp, Cricetulus griseus
cccacgcgtccggggacgcctgggttcccgaccgcttgcttcggcgattgtcakggtactgataaccatggcatccctgtggctgctcagagttcccttcctgtgtgccctgctctggacctcttgtactctcakktwcyakggcccatgakcctggggccggcagccatcacagcaktgtgggcctggtacaagatcacagtgcatgaccaasagcatatcatggaacatctasaaggtgycrtcgacaaaccagagacagagatgtcccctcaagaactgcagctccactatttcaaaatgcatgattatgatggcaacgatttgcttgatggcttagaactgtccacggccatcactcatgtccataaggaggaggggagtgatca

SEQ ID NO: 219 - DNA, 700 bp, Cricetulus griseus
gccagaaaccccctcgctgcgcggcggctgcgtccgccccgctccggaagcggaaacgcactcgaggtcaggcgtgctcccaagatggcggccctcagggctctggtgtcaggctgcgggcggcagcttcaggggttcctcgcaggccccgccgcgaccggctggttaaggcttccagctcgtgggttgagagaagtggtggagatccaagaagggaagacaactgtaattgaaggtcgaatcacagaaactcccaaggcaactccrartscccctaacccctcaggccagtgccccatctgccgttggaacctgaagcacaaatataactatgaggatgtgctgctgctcagtcagttcatccggcctcatggaggcgtgctgccccgcaatgtcacaggcttgtgcctggaagaacaccgaaagatcgaggagtgtgtaaagatggctcatcgagcaggtctattcccaaatcacaggccacggcttccagaagggtccttacctakgaataaacccaaactcaaccgctacctgactcgctgggctcccagctctgtcaagcccatctacaaaaaaggtcaccgttggaacaaagtgggtatggccgtggggtcaccactcctcaaggacaatgtctgctactccaggagacctttgaagctctttcattaatgggagccctgcagctgaagactct

SEQ ID NO: 220 - DNA, 586 bp, Cricetulus griseus
gccggcagactcgccgccatgggccgtgtgatccgagggcagaggaaaggcgccggatctgtgttccgcgctcacgtgaaacaccgtaagggcgccgcgcgcctgcgtgctgtggacttcgctgagcggcacggctacattaagggtatcgtaaaggatatcattcatgaccccggccgcggcgcccccctcgcgaaagtggtctttcgggatccctaccgatttaagaagcgcacggagctgttcatcgccgcagagggaatccacacagggcagtttgtgtactgcggcaagaaggcccagctaaatatcggcaatgttttgcccgtgggcaccatgcctgagggtactatcgtgtgctgtctggaggagaagcctggagacaggggcaagctggcccgagcatccgggaactatgccacagtcatctcccacaacccggagaccaagaagactcgagtgaagctgccttcggggtccaagaaggttatttcctccgccaacagakctgttgttggtgttgtggccggtgggggtagaattgacaaacctatcttaaaggctggtcgtgcctaccacaagtaca

SEQ ID NO: 221 - DNA, 591 bp, Cricetulus griseus
aaggaagttggcagtatcatcggaaagaaaggagaatccgttaakaagatgcgcgaggagagtggtgcacggatcaacatctcasaagggaattgtcctgagagaattatcactttggctggcccgactaatgccatcttcaaakcstktgctatgatcattgacaaactggaagaggacataagcagctctatgaccaatagcacagctgccagtagacctcccgtcaccttacggttggtggttcctgctagtcagtgtggctctctcattgggaaaggtggttgcaagatcaaggaaataagasagagtacaggggctcakgtccargtggcargggatatgcttcccaactcaactgagcgggcaatyactattgctggcattccgcaatccatcattgagtgtgtcaaacagatctgcgtggtcatgttggagtcccccccgaagggcgtgaccatcccgtaccggcccaagccctcgagttctccagtcatctttgcaggtggtcaggacaggtacagcacatgcagcgacagtgcgagctttccccacaccaccccgtccatgtgcctcaaccctgacctggag

SEQ ID NO: 222 - DNA, 602 bp, Cricetulus griseus
cacaggactgctgagctacctggtgttcaacatcatccccaccctggctgacatcattattggcatcatctacttcagcatgttcttcaatgcctggtttggcctcattgtgttcctgtgcatgagtctttacctcatcctgactattgtggtcacggasyggagakccaastttcsccgygatatgawcacacagtgaaaatgtcaccaakgcacgagcagtggactcgctgctcaactttgakacggtgaaatactacaatgctgagggttatgaagtagaccgctacagagaggccatcgtcaagtatcagggtttggagtggaagtcaaatgcttcactggttgtattgaatcagacccagaacttggtgattgggcttgggctcctggctggctccttactttgtgcatacttcgtcagtgagcagaagctgcaggttggggactttgtgctttttggcacttacatcactcaactgtacatgcctctcaactggtttggcacctactacaggatgatccagactaatttcattgacatggagaacatgtttgacttgctgaaagaggaaacggaagtaaaggatgttcctggagca

SEQ ID NO: 223 - DNA, 555 bp, Cricetulus griseus
atggcgggtgaaaaagccgagaagcctgacacaaaagagaaaaagccagcagccaagaaggctggtggtgatgccgatggtgcagccaaaaagggtgaccctaaggttaaaaaacccaagaaggggaagccccattgcagccggaaccctgtcctggtgagaggaattggcaggtactcccgatctgctatgtattccagaaaggccctatacaagaraaaatactcagctgcaaaaaccaaggktgaaaagaagaagaaaaaggraaaggkccttgctactgtcactaaaccagttggcggtgacaagaatggtggtactcgggtggktaarcttcgaaaaatgcccaggtattaccctactgaagatgttcctcggaagctgctgagccatggcaagaagcccttcaktcakcatgtaaggaagctgcgtgccagcatcactccagggactgtcctgatcatcctcaccgggcgccacaggggcaagagggtggtcttcctgaagcarctgggcagcggcttgctacttgtgacaggacctcttgccctcaac

SEQ ID NO: 224 - DNA, 567 bp, Cricetulus griseus
tgccttcccctggacagaaggcaaagttggtgtatgaagaagagtcttctgaagaggagtctgatgatgaaattgcagaaaaggattccgatgataattgggatgaagacgaagaagagaaagacagtgaaaaggatgagggagttgatgaagacaatgaagaagatgmggacmcwsrcgwtmmrgaagaraatggggaggacagaratgggtcaagtggaaaaaraattaaatggrrattctgattttaratcctcgaaaatggaaagtggaagaaragtgaagacaagcagccagtcacactgtggaacacctggctcatyttgcccartgctkccgcatcctcccagggaggctcgccctgtgccaggagacaarargccgycatatgcttccaagttcacagaggcsacaccaccttcctgtcctgagtgccccagactttaactgtgtaaataagagwgkktcattcaaatgttaataaactttacacagyaaatagatacactttgccatgtactgacctgagtgtccaatatatggtatatttttataatataatactct

SEQ ID NO: 225 - DNA, 898 bp, Cricetulus griseus
aggcgcagaatggatgaaatcagtgaccatgctaaagttctaacactcagcgatgatttggaaagaactatagaggagcgtgttaacatcctgtttgattttgttaagaaaaagaaagaagagggcattattgattcatctgataaagaaattgttgctgaagcagaaagactggatgtaaaagccatgggtcctcttgttttgactgaagttctctttaatgagaagataagagagcagatcaaaaaatacaggcgccatttcttaagattttgtcataacaacaaaaaggctcagcggtaccttcttcatggtttggaatgtgtggtagcaatgcatcaagctcagctgatctccaagataccacatattttgaaggagatgtatgatgcagatcttttagaagaagaggtcatcatcagctggtcagaaaaggcctctaagaaatatgtctcaaaagaacttgccaaagagattcgcgtcaaagcagaaccatttattaaatggttgaaggaagcagaggaagaatcttctggkggtgaggaagaaatgaagatgaaaatattgaggtggtatattcgaagactgccagtgtaccaaaagttgaaactgtgaagtctgacaacaaggatgacgacattgatattgatgccatttaaaggatggatgcaacttagcttaacagtataatgctgcaaatttttctccattatcagccagaagtgcaacatgtatgtgcaaaagctaaaatggcttaacatcatgctacacttgatactaaaaagctattactgtgagtggtctataattaagcccaatgagacatctagggagtccatacatatcagtgagcagttgtagtttgcttatttatagcatgtttcttttggaaaaacta

SEQ ID NO: 226 - DNA, 1675 bp, Cricetulus griseus
aagatgaaaaaggacggtcatactacgtagaccacaattctagaacaaccacatgggccaagcccaccatgcaggaagacccaagatcgaagatccctgctcatctgagagcaaagacaccagtggacaatgacctgggacctttacctcctggatgggaagaaagaacccacacagatggaagagtcttctatataaatcacaatacaaaaaagacacagtgggaagatcctcgcactcagaacgtggcaacaactggaccagcagtgccctactccagggattacaaaaggaagtacgagttcttccgaagaaagctgaagaaacagcagaacgacattccaaacaaatttgaaatgaagcttcgccgtgcaaatattctggaggactcttaccggagaattatgggtgtcaagaaagccgacttcctcaaggctcgactctggattgagttcgatggtgaaaagggacttgaytatggaggagtygctcgagaatggttcttcctcatttcaaaggaaatgtttaacccttattacgggctcwttgaatattctgctwcggataatyacaccctycagataaatccaaactcgggcctgtgtaatgaagatcacctctcttacttcaagttcattggtcgtgtggctggaatggctgtttatcatggcaagctgctggacggctttttcatccgccccttttacaagatgatgcttcagaagctgataaccctgcatgacatggagtctgtggatagtgaatattacagttcactgcgatggattcttgaaaatgacccgacagagctggacctgagatttatcatagatgaagaactttttggacagacacatcaacatgaactgaaaactggtggatcagagatcgttgtcaccaaywagaacaagaaggagtatatttaccttgtgatacaatggcgttttgtgaaccgaatccagaagcaaatggctgctttcaaagagggattctttgaactgataccacaggacctcatcaagatattcgatgaaaatgaactggagcttctcatgtgtggtctgggagatgtggatgttagtgactggaaggagcatacaaagtataaaaatggctacagcgtaaaccaccaggtcatccattggttctggaaggctgttttaatgatggatgcagaaaaaagaatacgcttgcttcaatttgttaccggcacatcccgtgtgcctatgaatggatttgctgaactctatggctcgaatggaccacagtccttcacagttgaacagtggggcacccctgataagctgccaagagcacatacctgctttaatcgcctggacctgccaccctacgaatcgtttgacgaactctgggataaacttcagatggcgattgaaaacactcagggctttgatggggtcgattagattacaagtaacaagctgtggtgtcttaaacaccatagtttttaagcaaaagcaaaattgcatcttaacattttccagagtacttctataagatagtcactggctcttccccgagagaccagagtacacagttcatccaaggtttcagccaccaccatactgaagtgttcatttgtccagttactttgtcctttcattggggttcacacgacagggcatttaagtcctgtgtgcctggctgtatctca

SEQ ID NO: 227 - DNA, 611 bp, Cricetulus griseus
tcgaagtcgtgataggaaaggggatagaagagacagggatcgggaaagagagaaagagaacgagaggggtcgaagacgagatagagattatgataaagaaagaggcagtgatcgagaaagggacagggagagatcaagagagcggtccaaggagcagcgaagtagaggtgagggagaggaaaaaaagcacaaagaagacaaggaggataggcgacacagagacgacaaaaaagaattcaagaaaaaacacagcagaagtagaagcagagaaaggaaacacagaagtagaagcagaagcaaaaatgcagggaagcggagcaggagcaggagcaaagacaagtcaagcaaacataaaaatgaaagcaaagaaaagtcaaacaaaagaagtagaagtggcagtcaaggaagaactggcagtgttgaaaaattgaggaaacgagaacacagccctagcaaagagaagtctagaaagcgcagcagaagccaagaccgctcccacaagagagatcatggggatggcaaggaccagtcagacagacaggatcatcagagaagccagagtgtagagccagagagccaagaaaaagaacataaaaacaaagatgagacta

SEQ ID NO: 228 - DNA, 623 bp, Cricetulus griseus
  misc_feature (432)..(473): n is a, c, g, or t
gcttctgccgtgctagtgacagtattcaggaggatgtgcttaggcttctgacactgtgtgtcagaacggcactatttcagtttatagccctctcatacatagtacagtagttgattaaaaaacaaaaccagtaaaatggcatttgcctcacagttattaactatcaatctggctagatcttcatgcagtaacctaaatgtgatatattgggtgtgagagaactgtgttggggtttttagattttcgacactagtttgcctctttaattttcacaacccyttattagcaagttccttttatatataggccctaaaattgggatagttaaaatatggttgttaattatgattagcctttggtgaaaataggtttaaagtctgttttgattccaatgtttctcccaaagaattctgtgttaaatatacaccaagnnnnnnnnnnnnnnnnnnnnnnnnnnnnnnnnnnnnnnnnnncctggaaataggagtaagtttgtatgttattgtkgatagagcaactcaggtaatttccatttctggttttctattctctgkgtaractacctgggkgtcactttctarccagcaaggggcttcactgctgtctagatgtctttcataatg

SEQ ID NO: 229 - DNA, 592 bp, Cricetulus griseus
ccgggtcggtgtagctctccgcgcctgctgctgtgtctgtcgctctcgggtggcgtgttccgcgtttcctgtccgcaccggtgcaccggtgcagctccggcctcgggcccgaccgccacaccatggcttccgctttggaggagttgcagaaggacctagaagaggtsaaagtgttgctggaaaagtccactaggaaaagagttcgtgatactcttacaagtgaaaaatccaagattgagatagaaataaagaacaagatgcagcagaaatcacagaagaaatcagaacttgacaatgaaaagccagctgctgtggttgctcctcttacgacaggatacactgtgaaaatcagtaattatggatgggatcaatcagataagtttgtgaaaatctacattaccttaactggagttcatcaggttcccactgaaaatgtgcaggtacacttcactgagaggtcatttgatcttttggtaaaaaatctcaatggcaagaattactccatgattgtgaacaatcttttgaaacccatctctgtggaaagcagttcaaaaaaagtcaagactgatacagttatcatcttatgtagaaa

SEQ ID NO: 230 - DNA, 897 bp, Cricetulus griseus
ccccccaacctgcggtccatcatgaagttccagtataaagaggaccatcccttcgaatatcggaaaaaggaaggtgaaaagattaggaagaaatacccggaccgggtgccggtcatcgtggagaaagctcctaaagccagggtccctgatctggacaagagaaagtaccttgtcccttctgacctcactgttggccagttctacttcttaatccggaagaggatccacctgagacctgaggacgccttattcttcttcgtcaacaacactattcctcccacgagtgctaccatgggccagctgtgtgaggacaaccacgaggaagactattttctgtatgtggcctacagtgacgaaagtgtctatgggaaatgaggcagaagcccagcagatgggagcacctggacttgggggtaggggtggggtgcttgtgggactcggggaaccagatggagggctcccaaccatggaggagacgcaaggtgaagaacatcggaaaacatcacaccgcacacactgtcttctgttttttcacaagctcaatcgttagttttctctgcttcctcagcccasgaagatcttgtgttggcttgactgtgagagcagggtgggtactttgttactcacagctttgctctgaattttcctgcagtttcatcagacggttgggaggagggcaggtggccactcgagaggaatacagttcagcagcaactcctgtctctttgggcagaggtttaatttttggcatttgcacaaaatgccaaaatttgcacatagggaaagggggaaaatgctttaggagctgtaggggaccatacctaagggaccaaaaaattcccactgtcattgaagcattgtgacccctgacctctgtctccaattcctccctctcca

SEQ ID NO: 231 - DNA, 584 bp, Cricetulus griseus
ccggcagcaaggacctgtgttggctgtcctgtttgctcgggaccggtgtccgagccccagtcttggtcgtctgcgctgctgccccgagaccgakacggcgcgagttggcgggcggcgaccctgacgcccggcccgaattctcggstgccccctaggtggggtgaagcttcctgtcttttgcctttgctccggtgctggctgcaggatgaactgtcgatcggaagtgctggaagwgtyggtggagggacggcaggyggaggakgccatgctggctgtgctgcacacmrygctyctacrccgywgyrcgggcargkttsactacaagaaagaggggacttactccatcgkcwccgtgggcmtccakgwtgktgactgygactkcattgrcttmrcatwtgtgcktgtcakcytcygacgagcksgmccgarccttgcgcatwgkttgktggggratysamsgwygcactgyswmattcwgstggygrwggkcyakgccagatgkcyykggaattctaccagaagaaatagtctcgctggcctttttcagacgagtgcatcccttgggaggtgtggacagtcaaggt

SEQ ID NO: 232 - DNA, 1202 bp, Cricetulus griseus
  misc_feature (2)..(23): n is a, c, g, or t
  misc_feature (184)..(221): n is a, c, g, or t
  misc_feature (264)..(301): n is a, c, g, or t
  misc_feature (338)..(379): n is a, c, g, or t
  misc_feature (382)..(383): n is a, c, g, or t
  misc_feature (385)..(396): n is a, c, g, or t
  misc_feature (423)..(460): n is a, c, g, or t
  misc_feature (463)..(477): n is a, c, g, or t
  misc_feature (497)..(503): n is a, c, g, or t
  misc_feature (515)..(540): n is a, c, g, or t
gnnnnnnnnnnnnnnnnnnnnnncccgccgggttgagaggagcgtggccctctcctcgcctctcctttccccgacatggcttgtgcccgtcccctcatatcggtgtactcggaaaagggggagtcatctggcaaaaatgtcactttgccagctgtattcaaagctccaattcgaccggatatknnnnnnnnnnnnnnnnnnnnnnnnnnnnnnnnnnnnnnacagccgtatgccgttagtgaattggcaggtcatcagaccagnnnnnnnnnnnnnnnnnnnnnnnnnnnnnnnnnnnnnnttycaagagtccgaggtggaggaacccacygttctgnnnnnnnnnnnnnnnnnnnnnnnnnnnnnnnnnnnnnnnnnnttnnannnnnnnnnnnntggcgtcgttggcaycgcakagtaaannnnnnnnnnnnnnnnnnnnnnnnnnnnnnnnnnnnnnscnnnnnnnnnnnnnnnagctgtggtgatgytaaagnnnnnnnaatcgaagaaannnnnnnnnnnnnnnnnnnnnnnnnnagatarrgkggaagggkmcaagawgaccaargargctgktcasctgctgaaraarcytawagcatggawtgacatcaaaaaggtctatgcctctcagagaatgagagcgggcaaaggcaaaatgagaaaccgaagacggatccagcgcaggggaccctgcatcatctatmatgaggataatggtatcatcawrgycttcagraacatccctggtattactctgctcaatgtgagcaaactgaacattttgaaacttgctcctggtggacatgtgggacgtttctgcatctggaccgagggtgccttccgaaagttagatgarttgtatgggacttggcgtaaggctgcttccctgaaaagtaattacaaccttcccatgcacaagatgatgaacacmgacctaagcaggatcctaaaaagcccakagatccaaagagccctccgagcaccacgcaagaagattcatcgtagagtcttgaaaaagaacccactgaaaaacctgagaataatgttgaagctcaacccgtatgcaaagactatgaggaggaataccattcttcgccaggccagaaatcacaaactgcgggtgaagaaactagaagcagcagcagcagcgctagcagcaaaatcagagaaaggggcagcagatcagaagtcagtag

SEQ ID NO: 233 - DNA, 579 bp, Cricetulus griseus
tctcgagtgctatgctcactgaagccctgtctcagtttagtacaggcgctagttctggctctggcactggtacaaatggaaccaaagatgtaaatatcactacatttctgatgctgatggaggggctccgaccctcaaattcacgctttagtcaagagaactccactgctcgacaagtcttgccttattgtgcacccaatsgaggctatccacctcattggacgccttgtcagagtccggatcacaaacttaagcawatagctccaggytktgaatttactccccctcttggcaagtaccagtataacctaactcatggaggttcccaaagaacaggcagtaaaaatacctggccatggtttcaatgggtactctccaacgagcgtggagcatttacttctcttgaaccttttgcagttctccagaatctctgcataagacttcttaatgtttctggtacaagggatgagaagggaccttctcttaagaatctatcaatacataaagctttgaataatctcactgttccagctagcccagtatgcttaaaagctccttttttctttctgctctctaatg

SEQ ID NO: 234 - DNA, 580 bp, Cricetulus griseus
  misc_feature (496)..(540): n is a, c, g, or t
cattaagaacaatagcatttttaagtatagatcaaaatcaaattagtgttaatttgagattcacaaacatttcatgttacacaattaaaataattctcctcctctaaaaaataaagaagatgctgaagaaatagctcagttggtaaagctcctcctgtgtaagcataaaaatgtgagtttggattgcaagcacctgtgccaaaagacaggtgtgtggcatacatctgtaacccaagtgctatgaaaagcagagacagccaaatccctaagcacactggcaaaccagtctakccaattggtwagcttggcccasggagagagcctgtctcaaaatakaaagtcagatgtgataaacaaagacacctaaccttgacctctggtctccaaatgtgtgtaagcatgcagttgcaaacatgctcacagtacactacacagcatacaaatgcatacagaaaaaagaaaataaaagttggacatakccggaagttggtggcannnnnnnnnnnnnnnnnnnnnnnnnnnnnnnnnnnnnnnnnnnnnctgtgagtttgagcccagcctggtctccatagtgagtgcc

SEQ ID NO: 235 - DNA, 574 bp, Cricetulus griseus
gcgagaagccgagagtcggagacgctatccgcttccakccgtcgcgcagaccctgccggagccgctgccgctatggatgatcgggaggatctggtgtaccaggcgaagctggcagagcaggccgagcgatacgacgaaatggtggaatcaatgaagaaagtagcagggatggacgtggagctgacagttgaagaacgaaaccttttatctgttgcatataaaaatgtgattggagccagaagagcatcctggagaataatcagcagcattgaacagaaggaagaaaacaagggaggagaggacaaactaaagatgattcgggagtaccggcaaatggttgaaactgaactcaagttaatctgttgtgacattctggatgtactggacaaacacctcattccagcagctaacactggcgagtccaaggtyttctattataaaatgaaaggggactaccacaggtatctggctgagtttgccacaggaaatgacaggaaggaggccgcagagaacagcctcgtggcttacaaagctgctagtgacattgcgatgacagaacttcctccaacgcacc

SEQ ID NO: 236 - DNA, 625 bp, Cricetulus griseus
gactccaaggatgtgatggacagcacaactacacagaattattggattgacatccacttackatggggagactatgatycccatgatatcgagcgctatgcccgggccaagttcctgggattataccacagacaacatgagtrkskacccttctcccacakgtgtgctcattgccattgacctggcctatwatctacacagtgcctatggaaactggtttccasgcagmaagcctcttatacagcaggctatggccaaratcatgaaggcaaatcctgccttgtatgtattacgygaacggatscgcwaaggactgcagttgtattcatctgagcccactgagccttatctgtcctctcagaactatggtgaactcttctctaaccagattatctggtttgtggatgacaccaatgtctatagagtgaccatccacaagacctttgaggggaacttgacaaccaaacccatcaacggagccatcttcatctttaacccacgtacggggcagcttttcctcaagataatccatacatctgtgtgggctggacagaagcgtttgggtcagttggccaagtggaagacagctgaggaagtggctgccctgattcgatctctgcctgta

SEQ ID NO: 237 - DNA, 557 bp, Cricetulus griseus
atatgtcttcastggctctcgcctcaagctctattkgcctaaggagacttgcctcatcaccttcctgctggcaggcattgagtgtcccaraggagcackaaacctaccaggcttggtgcaggaaggagagccattcagtgaggaakccacacttttcaccaaggaactagtgctgcagcgagaggtggaggtagakgtykagagcatggacaasgctggcaacttcwtckgctggctgcacatggatggggctaacctgtccgtcttgctggtggagcaagcgctttctaaggtccacttcactgccgagcgcagcgcctactaatagcccctcctatctgctgaggaagccgccaagcagaggaaggagaaggtctgggcccactatgaggagcatcctgtagaggaggcgttgcctgtgctggaggagaaggagcgttctgccagctacaagcccgtgtttgtgactgagatcacagacgacctgcacttctatgtgcaagacgtggagactggcacccagctggaaaagctgatggagaacatgcgcaatgacg

SEQ ID NO: 238 - DNA, 503 bp, Cricetulus griseus
  misc_feature (69)..(90): n is a, c, g, or t
  misc_feature (381)..(393): n is a, c, g, or t
  misc_feature (395)..(417): n is a, c, g, or t
  misc_feature (429)..(458): n is a, c, g, or t
cacctgcagagttctgcagcctatcgcttctcargtgtgaggcctggggctctgtcaggatcatccaannnnnnnnnnnnnnnnnnnnnnttggactccacacagactgataaacttaaggccttggaagtgtggcagtatccagcaatttcctaagggtgttaatgtccatggaagtatgcagccatactctagttaaactctgagctaggtccaagcctcaagctaacagcctgcggttgtcccaactgcaggagagtatgccaggagggttacgggtccaaggaagttcaaggtgagcttgaagaaccctgtgtcaagttaaaaagtaaaagtasgtctaggatatagctcagtgttaakagtgcctgcctggagccnnnnnnnnnnnnngnnnnnnnnnnnnnnnnnnnnnnntgaggcagagannnnnnnnnnnnnnnnnnnnnnnnnnnnnnctggtctccatagcgagtgccatgataggctccaaggctacacat

SEQ ID NO: 239 - DNA, 536 bp, Cricetulus griseus
  misc_feature (121)..(184): n is a, c, g, or t
  misc_feature (420)..(494): n is a, c, g, or t
ggagaagccaaaatgtttgctaagggtactgagattactcatgctgttgtcatcaagaagctgaatgagattctgcaggccagaggcaagaagggaacagaccgtgccacccagattgaannnnnnnnnnnnnnnnnnnnnnnnnnnnnnnnnnnnnnnnnnnnnnnnnnnnnnnnnnnnnnnntcaagttcaatatcattgcctctctctacgactacaaccctaacctggccacatacatgaagccagagatgtggcagatgtgcctagattgcatcaatgaactgatggatatcttggttgcacattccaacatctttgttggagagaacattttggaagagagtgagaacttacacaattttgatcagccactgcgtgtacgcggctgcatcctaactctggtggaacgaatggannnnnnnnnnnnnnnnnnnnnnnnnnnnnnnnnnnnnnnnnnnnnnnnnnnnnnnnnnnnnnnnnnnnnnnnnnnacaagtatgtgccatcattgaacgtgtgcagcgctacctgga

SEQ ID NO: 240 - DNA, 1094 bp, Cricetulus griseus
acgatcccagcaccagaccccgccagattttagcggtcgtcgtcgggtggcaaggacggactaggaataactgctctgtctrgaggcgtgtcttgcgttgcgccgccctttcctgcaccgctaagcytccctgatcgctcttgttttccggagcgctgcttctctttcccgcgccgtctacacctccttcccaccagrgataatggcgacagctgaggtactgaacattgggagaaaactctatgagggtaagacaaaagaagtctatgaattgttagataatccaggaaaagtcctcctgcagtccaaggaccagattacagcaggaaatgcagctagaaagaaccatatggarggcaaagctgcaatctccaataagattaccagctgtatttttcagttgttacaggatgccggtatcaaaactgctttcaccaagaaatgtggggagactgctttcattgcaccccaatgcgaaatgattccaattgaatgggtgtgccgaagaatagcaactggatcttttctcaaaaggaaccctggtgtaaaggaagggtataaattttacccaccaaaagtagagatgttcttcaaggatgatgccaataatgacccgcagtggtctgaggagcagctcattgctgcaaagttctgctttgctggacttgttataggccagactgaagttgacatcatgagtcatgctacccaagctatatttgaaatcctggagaagtcctggcttccccagaactgtacactggttgatatgaagattgaatttggtgttgatgtaaccaccaaagagattgttctggctgatgttattgataatgattcctggagactctggccatcaggggatcggagccagcagaaagacaaacagtcttaccgtgacctcaaggaagtaactccggaaggactgcagatggtaaagaagaactttgagtgggttgcagatcgagtggagttactcctgaagtcagatagtcagtgcagggttgtagtgctgatgggttccacttctgaccttggtcactgtgagaaaattaaaaaggcttgtggaaacttcgggattccatgtgaacttc

SEQ ID NO: 241 - DNA, 551 bp, Cricetulus griseus
gtgtgtgtgctacggggtgcagtgtgtgcttgaaatagtgggaacgccatgtcccgtggttccagcgccggttttgaccgccacattactattttctctccagagggccgactctaccaagtagaatatgcttttaaggctattaaccaaggaggactcacatctgtggccgtcagaggaaaagattgtgcagtaattgtcacacagaagaaagtacctgacaaattattggattctagcaccgtgactcacttgttcaaaataactgaaaacattggctgtgykatgactgggatgacagctgacagcagatcccakgtacagagggcacgctatgaggcagctaattggaaatacaaatacggctatgagattcctgtggacatgctgtgtaaaagaattgctgatatttctcaagtctacacgcagaatgctgaaatgaggccgcttrsttgttgtatgattttaattggtatagacgaagaacaaggccctcaagtgtacaagtgtgatcctgcaggctactactgtggctttaaagccaccgcagc

SEQ ID NO: 242 - DNA, 584 bp, Cricetulus griseus
  misc_feature (512)..(512): n is a, c, g, or t
gggaagagctgaagcaggcgcttttggctcggcgcggtccgctgcaatccgtggaggaacgcgccgccgagccaccatcatgcccgggcacctacaggaagggktcggctgcgtggtcaccaaccgattcgaccagctatttgacgacgaatcggaccctttckakgtactgaaggcrgcagagaacaagaaaaaakargccggcgggggcggcgttggtggccctggggccaadakcgccgctcadgccgcggcccadaccaactccaacgcggcgggcaaacagttgcgtaaagagtcccakaaagatcgcaagawccckctgccccccagcgtcggcgtggctgacaaaaaggaggagacgcagccgccggtggcgcttaagaaagaaggaataaggcgagttggaagaagacctgatcaacaacttcagggtgaagggaaaataattgataggagaccagaaaggcgaccacctcgggaaagaagatttgaaaagccacttgaagaanagggtgaaggaggtgaattttcagttgatagaccaattattgaacggcctatccgaggccgaggtggtcttg

SEQ ID NO: 243 - DNA, 570 bp, Cricetulus griseus
  misc_feature (51)..(70): n is a, c, g, or t
cccagactgggtttctctgtttaatagtcctggctgtcctggaactccctnnnnnnnnnnnnnnnnnnnncaactcactgagatccatctgcttctgcctcccaagtgctgagattaaaggtgtgtgccaccaccactcagccaaaaagttttaaataaatatctgcaatgttaaaataagttgggggtcttgatccagataacacagcagaggatgtgagagtaagtagagggttgattgtaactagaaagggagactttctcccatggaactccaggggaactgtaaataccaagaccaatttggggaggagactaaagccaggaaacacatctatgaaacagattctagtttgccgacagcattctcatactgtccttctccatgcccagccattgcccttagaaagctaggaagttcctaaagagtcagtgccacatcattcaagcctagtataggaagcccagtgtttggggctgactgtttcttgggatcatttgaattctgaaagggactgctggaacagtccttgtggctggagaatagaaattagaccctgaggctttcta

SEQ ID NO: 244 - DNA, 356 bp, Cricetulus griseus
  misc_feature (298)..(298): n is a, c, g, or t
gaggatggggacgacgtgttcgaggtggagaagatcctggacatgaagtgcgagggaggtaagaacctttataaagttcgatggaaaggatatacgtctgatgatgatacctgggagcctgagattcatctggaggactgtaaagaagtttttcttgaatttaggaagaaagttgccgagaacaaagctaaagcaatcaagaaagatattcagagactgtctttaagcaatgacatatttgaagcagactttgatagtgaccagcaaagtgacacaaaagaagatacttcaccgaggnaagaaaaagaaaaaaataaagtgcaaaggaagagaaaagtccagatgatctgaaaaaa

SEQ ID NO: 245 - DNA, 722 bp, Cricetulus griseus
ataaatcacaagctaaatcaatcagagagcgacggagacctagagaaaaaaggcggtcgactggagtttccttttggacacaagatagtgatgaaaatgaacaagagcggcagtcggatacagaagatggttccaataagaaggagacacagacggattctgtttctaggtatgacagcagttccacgtcatcaagtgatcggtatgattccttgctgggtcgctctggttcatatagttacttagaagaaagaaaaccttatagtagcaggctagaaaaggatgatksaactgacttcaaaaagctttatgaacaaattttagccgaaaatgaaaagctaaaggcacagctacatgatacaaatatggaactaacggatctaaagttgcagttggaaaaggctacccagagacaagaaagatttgctgataggtcactgttagagatggaaaagagggaacgaagagctctagaaagaagaatatctgaaatggaagaagagctcaaaatgttgccagacttaaaagcagacaaccagaggctaaaggatgaaaatggggccttgatcagagtcataagcaaactttccaaataggacggagaagagaaacaagcaaagcagcaggacttgcacatactccgcagtggaccacattggcagccactggacacccgaaagaacctttggagactcatttcccgatatcctgccaaatgccct

SEQ ID NO: 246 - DNA, 580 bp, Cricetulus griseus
caagaaagcagtgacactgggcttcaggacagacttgcagctgtcagcccttgctcctggtgaggttcttgtctgatacaaggacatcagagaggaatcacaccctgactgactgatacaaagtaaagcccctttctctcatctcctctttcttcctcttacatcttggtaagaaaatggcagccatcaaggtgacaggggcggacaggaatgacaccttctccatcttcacagttaaaattggaacctgtgtaagactgttcatgggagcagggtagaactgcctccatgggccagttctaaaatcctgcttctaggctgggcaggtggctcactcagtggataaagcacacgtcatgcacacttgcagaccagagtttggatccccaaaaccttaagctacgtgaccaagatgcttacaagttcctgcagggttctggggagaacctgtctcagtaactagaatagagtgcaactgagaagatgccccgtgtcaacctcaggcctccacacatgcctacaagagtgcgaacatagaaaccctagagtccctgctcccaaaccaagcatggtggcatgt

SEQ ID NO: 247 - DNA, 282 bp, Cricetulus griseus
tgacttakgtctgggaacgagcacctccaaccatgtgacctgaaacttgccatctgcccctgtgtgagcttcacgcccgccccctggatgcactaagatttgctcttgtttggtcctggtctggacgcaaaacaaggagatggtkatttaaagagaaatccctatttatttgacacacaaaaaatccagttaatatattaatgtgaaataaacccagtttgcaccttgatttgtttgctacaactgtgaaacagtaaatgaagtaactggaaaaaaaaaata

SEQ ID NO: 248 - DNA, 777 bp, Cricetulus griseus
cgactccggaagatgctctgtctccggccacaggtccccctccctttgggctggagtggcgacgccagcacaggggcaaaggtcacctgctgctggctgcgactcctgggctggttgaggaaatgccaccagcccaagaaaaggctgtggcatttgcttcttgggatgacaatgagccctggggcccgtggactgggaacgggaccttctggctgccagctgtgaaaccgtttcargagggtgtctacctggctactgtgcacctgccctatctgcaaggacaggtctccctgcagctgactgtgcacaagtcccccaaagtgtctctgacaccagcaccccttgtgtgggctgccccargagaggcacccccggagctgctctgcctcgtgtcccatttctaccctgcggaaggcctggaggtggagtgggagctcagaggtggtccagaaggcggttccagawaggctgagggggggacgtggctctccaccgtccgccaccattctgatggctctgtcagccaggccgggcacctgcggctccccccagtcactgcccagcagcatggagtccgctatgcctgtcgggtccaccaccccagcctgcccgcatcgggtcgcagtgctgaagtcaccctggaagtggcaggcctctctgggccttcagtcgaggacagcataagcctgttcctgtccgctttcctcctcctgggactcatcaaggcactgggctggatggctgcctacgtgaccttccgtgaagactcaaaggtga

SEQ ID NO: 249 - DNA, 536 bp, Cricetulus griseus
  misc_feature (226)..(240): n is a, c, g, or t
agcttggcgagcagctggacaacgaacgagttgggatggccaccagctgggggagcatcttgcaagatgagaaacagcttgaggagttggcacagcaggccatataccgggccttggctgagggcgtggtgctgakgyytkykkwkagtcccagctcctctcaagtggtgacctatgccccgttcacgctcttcccctayaccagtccctagtgctctgctggagnnnnnnnnnnnnnnncagatggatttcaacatgctggtggatgctgtcagccagaactcggccttcctggaacaaacatctgtctagcactatcaaaaaggacgactacactgcccgtctctttgatatctacaagcaagtcctgaaagagggcattgcccagactgtgttcctgggcctgaatcgctcagattacatgttccagtgcagcgcagatggctccaaagccctgaaacagattgaaatcaacactatctctgccagctttgggggcctggcctcccggactcctgctgtgcaccgacatgttc

SEQ ID NO: 250 - DNA, 581 bp, Cricetulus griseus
cgtggagagcgcttcataaaaccggcctggtgatccagcactgcggaggcgaaggcaaaagagcagaagttcaargtcacccktagstasmkagtctasaaaacagcatgtactcacccattcctcaragcggctcttcattcccagcctcagtccaagacccaggcctacacatatggcgtgtggagaagctgaagccggtgttaatagcrcgagagaaccatggcatcttcttctctggggattcctacctaktgctacacaatggcccagaagaggtctcccatttacacctgtggataggccakcaatcatcccgggatgagcakggcgcctgtgctgwgctggctgtgcacctcaacaccctccttggggagcggcctgtgcagcaccgtgaggttcaagggaacgagtccgaccttttcatgagctacttcccacgtggsctcaagtaccaggaaggtggtgtggagtccgcatttcacaagacatccttgggggccaccccagcagccgtcaagaagctctaccaggttaargggaagaagaacatcckagccactgagagggcactgagctgg

SEQ ID NO: 251 - DNA, 580 bp, Cricetulus griseus
aaaggaagcgtgggtcctggggagggtgcatcacagcagccaggaggtgcacagcaggagtctgactctacatcttgacaagctatcctgttgtcaaatgctgtgctaagggawkaagcatccmyagtgttccagaggtcagtaccacaggctcctggacttctagaccagcagggcatcatgtataaagaactaatttggtacctggagcagaaagggaaagctcagggctgcagaaggaggagacccttttctgcccttaatattcaggaccgacctgagccccgatccacagctggctttacttccgttcactctggtgctcctgcatcacataagcttgcccctcctttttcttcctactccctgcttactctaggcatgggaaggggtgagcagcaagctttggttatggttttgattccttggtcaaccctgttaggctatgctaaacatatatgggtttgatccttggataggtatgggcctgcaaggcagggatgttttaggggacattgctgaagtgtaataccttatgtatctttctcccccagagcccttcatttccctgcttttgttc

SEQ ID NO: 252 - DNA, 379 bp, Cricetulus griseus
aggccggaaggatctgcttcctgattgctgggatggaaggcgtgcactgctatgcctggctagatccttttatgatgaatgatgtctgaaaaggactttttacttctttttcaaaggacacactcaaaggacacactcagtagtagtcacasgctcttgtatgtatgtacatacataggcataccatttargaactgaaactagcagaagtctctccatttgggagcttaagtcakaatacctgtgatgatttccaagtaccakccagtwatcatttaaaatgacctgcakgcatctgtagtttcattgtgactattatgtactacacacaccatttcctaggtctccagtttttggtagattaaatttagattaaaaa

SEQ ID NO: 253 - DNA, 524 bp, Cricetulus griseus
  misc_feature (210)..(222): n is a, c, g, or t
  misc_feature (224)..(237): n is a, c, g, or t
gcatccakaagtttaaaacacaaacaaatacaaagtcatacacatggttgtatcacaggaatatggtttccacctagaatgctcagctggggaaggatgaagccatcagctacatggtgcatggtttggtttccatccagaacaggctctcatgactgaacagggaagaaagaacataaagctgtgccaaaaaatagagaaaaggttttnnnnnnnnnnnnncnnnnnnnnnnnnnnaaaatgctgtgataaaccaaaagggaggaaaaatctgccccttatggtatttccctcctatcaatttggatactacagttgctctccaaaagaccggtttgtaccaatgaaacgtgtgactttgtaatcccaacgctgtattttctagaaccttctttggtggtttttctatctgctaaaattctgtggtctggaggcctcccaccacagatggaaactgtttttggcttattctttctgtcctcccttgttgctccccactccttcctctgatgtccttgctttgg

SEQ ID NO: 254 - DNA, 579 bp, Cricetulus griseus
tgtcattactttgaagaagtcttcagacagtgctttggtttgcctccacaaaaaataaagatttagaaccaggcagaaagcattcactaataaaattattgatgtatgatttttttttagtattgcctcccatgtggaaaactctaacttcatgtggaagttttatttatgttcatctgaactctcccaaaatataatttgcaaaaagcatcaggctccaaaaatagaccatttgaaggcmtgtggtggcgatacagtatgccttattggktcactggtggtttgctcttcagaatctgtgacttcagtactaacacattgaatttcttttgtattgagyygaaatcatwgwttctaaatcagcatttgcgttctcagctggtaatttcattgtaaagaattgattctacttaaagacagaatagcctgggctcgggtcatgtgtgtcatcaccccacccaccccattgtgccttcctgaagatcaggatgggacagtgtagagtgagtgtttgccattcaatagggccacattctgccttttgaagaaggaaagactgtccctaagtgtggagggctc

SEQ ID NO: 255 - DNA, 433 bp, Cricetulus griseus
  misc_feature (186)..(208): n is a, c, g, or t
aacagagtaggcaggagggagtgctctgtggttaggtgggtcaggctgtccagcgcctgtcgaaacacccagtgcagctggtaccctaaaacttgctggccagccagtccagcgtacctggggtaatccaggcctagtgaaacactgggaaatggctgatgaagacacctgatggcaacctgtgannnnnnnnnnnnnnnnnnnnnnncacacacacacacacacacrcgttcktttttggacacstgcaaacacmyatcagcayatacaccacawaattyatkcacacagggaagakatgattggytctcatctaacacatgtwyactaatwatmccactcgccwgakgggtgtyyctgtagatatgtytatmtaaaatasacacagagatgaatcccacccgcccttgaagacctaagatcgccatcaccc

SEQ ID NO: 256 - DNA, 795 bp, Cricetulus griseus
  misc_feature (3)..(105): n is a, c, g, or t
  misc_feature (111)..(164): n is a, c, g, or t
  misc_feature (188)..(215): n is a, c, g, or t
ccnnnnnnnnnnnnnnnnnnnnnnnnnnnnnnnnnnnnnnnnnnnnnnnnnnnnnnnnnnnnnnnnnnnnnnnnnnnnnnnnnnnnnnnnnnnnnnnnnnnnnnntgccannnnnnnnnnnnnnnnnnnnnnnnnnnnnnnnnnnnnnnnnnnnnnnnnnnnnnaagacctctttcttccaggctttnnnnnnnnnnnnnnnnnnnnnnnnnnnncaccattgaaattctaagtgatgtgcagctgataaaaactggagacaaagtaggagccagtgaagccacactgctgaacatgctcaacatctcccccttctcctttgggctgatcatccagcaggtgtttgacaatggcagcatttacaacccagaagtgcttgacatcacagagcagactttgcactcacgcttcctagagggtgtccgaaatgttgccagtgtttgtctgcagattggttacccgactgttgcctcagtgccacactctatcatcaatggttacaagcgggtcctggctttgtctgtggagactgattacaccttcccacttgctgaaaaggtcaaggccttcttggctgatccatctgcatttgcggctgctgctcctgtggctgctgccaccactgctgctcctgctgccgctgcagccccagcgaaggctgaagccaaggaagagtcggaggaatcagatgaggatatgggatttggtctgtttgactgatccctcagagcaacctactcagccagtttaatttgagaaatatggaaataaagaataaagtcttacttctgttgt

SEQ ID NO: 257 - DNA, 906 bp, Cricetulus griseus
agccctggacatttctagagaaacctacttggccattctgatggaccggtcccacaatggccctgtgatagtgggcagccctcawggcggcgttgatattgaagaagtggcagcttccaatccagaactcatctttaargagcaggatkgacatttttgaaggaataaatgatagccaggcccagcggatggcagaaaatctgggcttcctcgggcctttaaaaaaccaggcagccgaccagattaaaaagctgtatcatctcttcctgaagattgatgcgactcargtggaagtgaacccctttggkgagactgcwgaaggacaagttgtctgttttgatgccaagataaactttgatgacaatgctgagttccgacaaaaggacatatttgctatggacgacaaatsagagaatgagcccattgaaaatgaagctgycargtaccatcttaagtacatcggactagacrggaacattgyctgcttcgkkaatggcgctggattagccmtggctrcttrtsacataattktsctgaatggagggaagccagctaacttyytkraccytggargtggkgtaaaggaagcccaagtctatcaagcattcaaactgatcacatctgatcccaaggtggaagccatcctcgtcaatatatttggtgggattgtcaactgtgccatcattgccaatgggatcaccaaagcctgccgggagttagaactcaaggtgccactagtagtccggcttgaaggaactaatgtccaagaggctcagaaaatcctcagaaacagtggcctccctatcacatcagctgcggacctggaggatgctgccaagatagctgttgccagtgtggcaaagaagtgatgtgatggcttcccccggctcccgtgaagataggcac

SEQ ID NO: 258 - DNA, 688 bp, Cricetulus griseus
attctcttgccagagataaagggtatgactggtttaccaaacaggaactttccccaagccctcaagggaatggaggcctttatctagatgcctggccttggggaaagraccatggaactaaacaatatactacaacttaagagcaattttcatacgtcaagggcctaagcactgagctgttccctaattgtgcccctttgtgtcttagtcttactatatgtgcctgttcccctcttargctcccaaaagggaaggkcctggtgtctttcccctctcccgttacaccctacattctgatctctgtacttactagcttacttacttactgttgcccttaatggtctcagactttggatctgaactgtaggctctttcatccttggggtcaggggtgtccartgaacctctaacatttctggttytggtgtaattaggarggcacagagagattccyggytycagtgktkgggatytttattttcaaagaatcmttttgtttagaggggctwccattgyacacattttttatcctttaccaaagctygcacaaaatttcccaaasggaaakgcattwayaktgagaatcattaaaaatgaaataaaaaggtgctggagaagtgtgatctgcagtgtcaaaatgctggaactttgtcaagcagcgatggtcacctatacggtccataccaaa

SEQ ID NO: 259 - DNA, 854 bp, Cricetulus griseus
gaaccaggaccttccaattgccagcagagaggtttcaccagcagcaccctcaggttattgatgtggatgaagtagaggaaacaggaattgtattcagctacaacataggttcccagcagacgtgtgccaacaatagacaccattgctccgtgcatgcagagtgcagagactatgctactggcttctgctgcaggtgcgtggccaactacacgggcaacggcaggcagtgtgtagcagaaggttccccacagcgggtcaatggcaaggtgaagggaaggatcttcgtggggaacagccaggtgcccgtggtgtttgagaacactgacctacactcctatgtggtgatgaaccatggacgctcttacacagccatcagcaccattcctgaaactgttgggtattctctgcttcccctggsrcccattggaggcatcattggatggatgtttgcagtggagcakaaygggttcaagaatgggtttagcatcactgggggcgagttyayccgacaagccgaggtgaccttcttggggcacccggkcaakctggycctgaagyarcactycaktggtattgackaacacggacacctgaccatcaacacagaactagacggccgagtgccacagatcccctatggttcttcagtgcacattgagccctacacagagctgtatcactactccagctcagtgatcacttcctcctccaccctggagtacacggtgactgatcctgatccggacggcactgcaccctcacacacccatgtttaccagtggcgtgagaccattacctttcaagagtgtgtccatgatgacttcatgccatccctgcccattacccatcatctc

SEQ ID NO: 260 - DNA, 586 bp, Cricetulus griseus
cctgcctgtcgccatggccgcctacaagctagtgctgatccggcacggcgagagcgcctggaacctggagaaccgcttcagcggctggtacgacgccgatctgagcccggcgggccacgaggaggcgaagcgtggcggacaggcgttgcgagatgctggctatgaattcgacatctgcttcacctccgtgcagaagagagcaatccggaccctctggacagtcttggatgccattgaccagatgtggctgccagtggtcargacctsgcgcctcaatgagcgacactatgggggtctgactggtctcaataaagccgaaactgctgctaagcatggtgaggcgcaggtaaagatctggaggcgatcttacgatgtcccaccacctccaatggagcctgatcatcccttctacagcaacatcagtaaggatcgcaggtatgcagaccttactgaggaccagctaccctcctgcgatagcctcaatgacactattgccagatcactgcctttctggaatgaagaaattgtttcccagatcaaggaggggaagagagtcctgattgcagcccatggcaacagtcttttg

SEQ ID NO: 261 - DNA, 587 bp, Cricetulus griseus
ggtgaccgcggcaaagggcacacgctagagccatgaagttcctcagcaaggccgggtccttctcgagattttactccctcaaagttgccccgaaggttaaaactccagttccccctgcaggagtacctctgcagcctgaggatcttgagtttaccaaattaccaaatggtttggtgattgcttctctggaaaactatgctcccttatcaagaattggcttattcgttaaagcaggcagcagatatgaggactccaacaacttaggaacctctcatttactacgtcttgcatctagtttgactaccaaaggagcgtcgtctttcaagataacccgtggaattgaagcaattggtggtaaattaagtgtggcagcaacaagggaaaatatggcctacactatagaaggcatgcgaaatgatattgaaattctgatggagttcctgctcaatgtcaccacagcaccagaatttcgccgttgggaagtagctgcccttcagtctcagctaaagattgacaaagctgttgcctttcagaattcacagactcgtgtgattgagaacttgcatgatgctgcctacaagaatacc

SEQ ID NO: 262 - DNA, 579 bp, Cricetulus griseus
  misc_feature (455)..(472): n is a, c, g, or t
tttatacccccttctcctgggsyccccacttccttcagggatctcctagtgggtgacttgggaaccgtgatcattcctgtctcaggcatggtcctcatcgtggtacagctgctcaccaccccattaktcacagccacgtctcccastcagggcrgaagatggaggaacctgtaccctctcaagcctgggtgctggagtactcccaagggcaaggggtyccctgaacttcagtttcccttccgtgactatctcaaccttgctagactcaagggcccaaccctttgggcaggatggggacagtggcagggcccatgacagtgccagcttcaccttctgcagtccgccttccccagggctggagatccatcacatggagtaggggcttaccccatctcttggggcttggggctctagaatcccttggtgaccaaggcccagcctaatccaccccagcnnnnnnnnnnnnnnnnnncacataggggacatgaggacagagctgtggccttaaatccagaggccagttttggtcctcaacggtgtctaacccttagtaggaaacagaatgatatgggctggaca

SEQ ID NO: 263 - DNA, 579 bp, Cricetulus griseus
ccgcgaagtgggctcstggaccagtgagacccagaagagggttttagcacccgggaggtcgcggaaggctgctccgcggctgtcatcatgccacaaaatgaatatattgaattacaccgtaaacgctatgggtatcgtttggattatcatgagaaaaagagaaagaaagaaagtcgggaggcccatgaacgttcaaagaaggcaaaaaaaatgattggcctgaaggctaasctctaccataaacagcgccatgctgagaaaatacaaatgaaaaagactattaagatgcatgaaaagagaaacaccaaacaaaagaatgatgacaagaccccacaaggagcagtccctgcctatctgctggacagagagggacagtctasagcaaaagtactttccaacatgattaagcagaaacgaaaagagaaggcggggaaatgggaagtccctctacccaaagttcgtgcccaaggagaaacagaagtattgaaagttattcgaacaggaaaaaraaaaaagaaggcatggaagatgatggttactaaagtctgctttgttggtgatggttttacaagaaaaccc

SEQ ID NO: 264 - DNA, 714 bp, Cricetulus griseus
gtcgacccacgcgtggggggctaccctactggcccctcagctgcaagctgtgaattgagtacctatttccaagctttctcctgactctttggaccgagctaacccttaagtgcctttaaggaggaagaaacagccactgtgcctcatggattctatgctctcccrsrggcattgtggggtgatgctccctgggtgccaagccctattctargtactgtgaacagcmaakagctggctwggggtgggggataccttgctggctgagytgccacagtgycatatrctsccakgccakcatscasgctggkcacatwwcwtaccwvasytkgccttstggggctaggtttctgttcacaggacagtcctcttcattggtgccccakatgccttgtatcttgcactttaaacaaagggagcatctctgtgccaaagaccaaaggcctcactcaccctgtgcctcatgaccacaagtcaggcaagactggaattgtgccacttgcatccaccccttcaggcaggaaaacctgcttgaaggcttggcccaagagtcaagacaaaaggatgagactccaaagaagccaacatccacctcaaggaatgaggggtcaagtcccttcaccctggtggcctctaattggagctccacagttggagaggaaaagaccagatatggatgggcctaatgccatacagaaaatctcaagccctgttatg

SEQ ID NO: 265 - DNA, 623 bp, Cricetulus griseus
gtactacccacgcgtccggcttaagcgtcctacctaaggtacgctgggagacgctgygatggcsagktcrgcagccgcagcctccttccttgctccgactctggagcarctccggcacctgscagcggasctgcggtcacttctgcctctagtgarggwcrgcgaagcccaggakacakccgaggaatttaatcgagagaygttctggagaagacttaatgaggcagcagkgaacctgtcaggggaagccackattctgaccacacttttckcccgacttccactgccgtctccacrggaaacccakaggatctgtgagcaaatkcatgttggcatcaarsaaattattgamstatatyattcacttcctaaaaatcasgggatcaccctgagaaagctggtgcggaatgctactwtggacgttgtggatggcatggctcatctyctggwagtgcttatctctccatctyakagcactgagaactgygaccttattycckgcwatagtgtctcggtagcatgccaaaaggtgtctgagattccaaaagataacaaggctgcagcccttatgatgctgacaaagtgtgtgaatcctgtgaaagatgcacatgaagaaatggagc

SEQ ID NO: 266 - DNA, 579 bp, Cricetulus griseus
  misc_feature (327)..(327): n is a, c, g, or t
cctctggtggcagccatcaggtgagccaagatgggtgcatacaagtacatccaggagctatggaggaagaagcagtccgacgtgatgcgctttttgctgagggtccgttgctggcaataccgccagctttctgcgctgcacagggstscacgccccacccggcctgataaagcgcgaaggctggggtacaaggccaaacaaggttatgtcatatacaggattcgtgtccgccgtggtggccgcaaacgcccagttcctaagggtgcaacttacggcaagcctgtccatcatggtgttaaccagctaaagtttgccagaagccttcantctgttgctgaggagagagctggacgtcattgtggggctttgagagtcctgaattcttactgggttggtgaagattccacatacaagttttttgaggttatcctcattgatccattccataaagctatcagaaggaaccctgacacacagtggatcaccaaaccagtccacaagcacagatagatgcgtgggctgacatctggctggcgaaagagccgtggccttggaaagggccacaagttccaccacact

SEQ ID NO: 267 - DNA, 1453 bp, Cricetulus griseus
  misc_feature (290)..(353): n is a, c, g, or t
  misc_feature (371)..(387): n is a, c, g, or t
  misc_feature (390)..(406): n is a, c, g, or t
cttagaccagctcgggaaccggctcgtgcgcacgtccctgctaaacgctctccagggtgtgtataggaacctctgttcttttcctgctcgcccaccggagtgccagacaatgtctattctcaaggtacttgcccgagagatctttgactcccgtgggaaccccactgttgaagttgatctctacacctcaaaaggtctcttscgagcggctgtgcccagcggtgcctccactggcatctacgaggccctagaactccgagasaatgataagactcgctacatggggaagnnnnnnnnnnnnnnnnnnnnnnnnnnnnnnnnnnnnnnnnnnnnnnnnnnnnnnnnnnnnnnnnctggacgtggtggaccannnnnnnnnnnnnnnnntcnnnnnnnnnnnnnnnnngcaccgvgaataaatctaaatkkgstgcaaatgccatcctgggaktatccctggcagtctgcwaagctggtgccgcagaaaagggggtacccctgtaccgccacatcgctgacttggctggcaaccctgaagttattctgcccgtccccgctttcaacgtgatcaatggtggttcccacgctggcaacaagctggccatgcaggagttcatgatccttcccgtgggcgcgtccaccttccgggaagccatgcgcattggggcagaggtttaccacaacctgaagaatgtcatcaaggagaaatacgggaaggatgccaccaatgtgggtgatgagggcggtttcgcgcccaacatcctggagaacaaagaagctctggagctgctgaagactgcaatcgggaaggctggctacacagagcargttgtcayygggatggacgtggctgcctctgagttcttcargtctggcaaatatgacctagacttcaagtctccggatgaccccagcaggcacatcacacctgaccagctggctgacctgtataagtccttcatccaggagtatccagtggtgtccatcgaggacccctttgaccasgacgactgkgaggcctggaaraatttcacakctagtgcakgcatccasgtggttggggatgatctcacagtaaccaaccctaasakgattgccaaggctgtcagtgagaaktcctgcaactgcctcctgctcaaagtcrrccagattggctctgtgaccgagtctctgcaggcgtgtaakctggctcagtccaatggctggggtgtcatggtgtcccatckctccggggagacagaggacactttcattgccgacctggtggtarggctctgcactgggcagatcaagactggtgccccttgccgatctgagcgtctggccaactacaatcagatccttataatcaaggaagagctgcgcatcaaggccaagtttgctggcataagcttcaggaaccccctggccaactaaagtgtgtggagatcctgaaaacacctgccgcttagcc

SEQ ID NO: 268 - DNA, 829 bp, Cricetulus griseus
  misc_feature (740)..(762): n is a, c, g, or t
cgggagcgcccgccgccgccaggcagactgacagagaccagccatggcagacgagccgaagcccatcagtccgcttaagaacctcctggccggcggctttggcggcatgtgcctggtgtttgtggggcaccccctggacacggtcaaggtgcggctgcagacgcaaccgccaagtttgccaggacagccacctatgtactctgggaccatcgactgtttccggaagactcttattagagagggcatcacagggctgtatcggggcatggctgcacccatcattggagtcacccctatgttcgctgtgtgcttctttgggtttggtttggggaagaaactacagcagaaatctccagaggatacacttaactacccacagctgtttgcagctggaatgtkrkskggtgtgttcaccacgggaatcatgacccctggagaacggattaaatgcttgctgcagattcaggcttctacgggggaaaccaaatacactggtaccttggactgtgcaaagaagctctatcaggagtttgggatccgtggcttctacaaagggactgtgctgaccctcatgcgagatgttccagccagtgggatgtatttcatgacatatgaatggcttaaaaatctcttcactccagagggaaagagtgtcagtgacctcagtgtaccccggatcctcgtggctggaggctttgccgggatcttcaactgggctgtcgcaatccccccagatgtgnnnnnnnnnnnnnnnnnnnnnnnccctcctgggaaatatccccatgggttcagaaacgtgctgagagagctgatccgggatgaaggagtg

SEQ ID NO: 269 - DNA, 1022 bp, Cricetulus griseus
cgcgcataccagctttggcagtgcggcgagggtgaccaatagaaaccggggacctcgcgtttcctcctaagctccaccccttgaccccaagcgccgtggcggaagaatacaatcagaggacctggggcsgswycaatcacggaagcggaagcggckggaggtggcggaactctgcgagcttctggcacacgtgtgcgaattgctatgatggawgtcaaaragaagaaaaaattsacaggaaaaagtccaaagacagcacaaggaaagactagatttcataaaaaccgtgattctggktcttcaaagacattcccacagaaagttgtcaaggaaggtgggccctaaagtgtcatctaagaactcttgagaaaggtgccacaaaacctggcaaaaagggtgtgaagcagttcaagaacaagccacaagggggcaaaggaccgawggacaaattccagaagccaaatacattcaacawgaagaggaagttccagccagatggtaaaagcgacgaatcakcagccmagaaacccawatgggatgacttcgaaaagaataataaagagctgaagcagagcaggcagctcagtgataagaccaactatgacatcgtggttcgagcaaagcacatttgggaragcttgagaagaaaagactgygrtmaagaaaawagaaggaagctgatgagtgatttgcagaaattgattcmasggaaaattaaaactattgctttcgcacatgactcgacacgtgtgatccagtgcttcattcagtatggaaatgaagagcagaggaagcaggcttttgaagaactacaaggtgacttggttgaactaagtaaagccaaatattccaggaatattgtcaagaaatttctcatgtatggaagtaaaccacagatagcagagataatcagaagttttaaaggtcacgtgaggaagatgctgcgacattcagaggcatcagccatcgtggagtatgcgtacaatgacaaagccattttggaacagaggaacatgctgacc

SEQ ID NO: 270 - DNA, 897 bp, Cricetulus griseus
  misc_feature (827)..(861): n is a, c, g, or t
ggaacgcgccgcagaaccgggttctggtgactctagctgcgttcgctcctctgtccttttgcctacccaccgccgtatccggccgactcacccctcctgtgccaggaacgtgctgtcaccggcgccatgccctacccatacccagcactgaccccggagcagaagaaggagctgtctgacatcgctcatcgaattgtggccccgggaaagggcatcctggctgcagatgagtccactggaagcattgccaagcgcctgcaatccattggcactgagaacaccgaagagaacaggcgtttctaccgccagctgctgctgactgctgatgaccgtgtgaatccctgcattgggggggtgatccttttccatgaaacactgtaccakaaggccgatgatggacgtcccttcccccaagttatcaagtccaarggcggkgttgtgggcattaargtagataaaggcgtggtgcctctggcaggaaccaatggtgagaccaccactcaargactggatgggctgtctgaacgatgtgcccagtacaagaaggatggagctgactttgccaagtggcgttgtgtgctaaagattggggaacatactccctcagcccttgccatcatggaaaatgccaatgttctggcccgttatgccagcatctgccagcagaatggcattgtacccattgtggagcccgaaatcctscctgatggggaccatgacttaaagcgctgtcagtatgtaactgagaaggtactggctgctgtctacaaagctctgagtgaccaccatgtctatctggaaggcacactgttgaagcccaacatggnnnnnnnnnnnnnnnnnnnnnnnnnnnnnnnnnnnaatgaggagattgccatggcaactgtcacagcactt

SEQ ID NO: 271 - DNA, 508 bp, Cricetulus griseus
gaaaaatagctatgaagggcaaaaacaaaagttatccaacctagaatattatggaatgctaaactctaccagcaagcccaagttccgtctgttgatwtccagaatttcttaaaaacaaatgatgaactgaagaagtttctgcagaactttctgctatatggaattgcatttgtagaaaatgtccctcccactcgagagcacacagagaagctggcagaaaggatcagtttaatcagagaaaccatctatggaaggatgtggtatttcacttcagatttttctagaggtgacactgcatacaccaagctggctctagatcggcacactgacactacctactttcaagagccctgtggcattcaagtatttcattgtcttaagcatgaaggaacgggtggcaaaacactgttagtggatggattctatgcagcacaacaagtacttcaaaaagcacccgaggaatttgaactcctcagcaaagtaccattaaagcatgaatatattgaaa

SEQ ID NO: 272 - DNA, 1192 bp, Cricetulus griseus
  misc_feature (250)..(267): n is a, c, g, or t
  misc_feature (494)..(519): n is a, c, g, or t
gtctagctatataaaccaggctgatctcaaagttgcaatcctcctgtctcagcttcccaagtgctgggatttcaggcatctaccactctattcactaagacttactgaatgagcttgaaatagtaactcaagtcattaatcccagcactcactccagaggccaaggaaggtggatttctatgagttcaagggcagcctgctccacaaagtgagttccaggacagtctgaacagagtgaaatcctattccnnnnnnnnnnnnnnnnnncacaatacaacctacttactgaatgattgttaagcaaatgagaactcacagctgaatagtggagatgcaacaacctctgtgttcaaaggtggggaggaatgtgtgcttgtcacactgtgttatttgacatctattgaagctttgtctcagatacttttccaattgctgtgaccaaatatccaaaaagaagggactggagtggtttgttttggcttgcagcttgagannnnnnnnnnnnnnnnnnnnnnnnnnacaaaacatttctgaggaggagcaaggccagctttgaggaaagtgggtgggtttgggcttggctcatctggactcattctgaggcgcttgaagaacttttgtacaccatgggtgtaggaggcatcctacagctccaagccagcattgcaactgtaagacccctggaaagctcargcttccaggatcttagcccaggactgaagccaccccaatcaccaggctgagttgaaagcttgatgcaaactgcatgaggctttattgttgtttaacgagctaaccctatgttatctcgggtctttcacccacccgccatggcagatagctagcaaagatagttcgaagcgtctgcatagagatcttgtagggcagagtaaggggagtgtctaggggtacgcacaggctcaggattggtgtgcctccaggcttggagggcttgccctgtgttgattggccaactggttgttatggcccataggccctcgcagggtggttgctatgctctgcacatcattgctgtgcacttgtccgtaaagcacacccagagccgtaaagcataccaccaccagctaacttctgattggttccttgcaggaggcacgcatctgaccttagtgactaaggtcagataatcatgtgttcagctgttatggctgccgaaatggggagctggtcg

SEQ ID NO: 273 - DNA, 580 bp, Cricetulus griseus
tttgttgtttttgtcattttttctttttgtgttgcttgtccctttgtgggccggacgagcctatctgggatccagatgggggagtcggcatcctgtggaaatatacaagcataccctcgtctcgatgttattaggatgttcggtcctttttaaagaccagaaagaagatctttttacataacttttggaagggcggaattaaatttatgtgcccaatgtaccatagtaggkgtgacattcttcttatttgtatttaaatgatttaaaacaaataargtgtgagacaaaatatgatgaggagtaaaatatttattggccttttgtaagwgtkwaatttgtgtttttaagacctgatgagtkctttctataatagcttgtccttgtggattataagggatttttgtagtgtggactatatgtcattgagcacaaaatgatttaaaagctttggaggtatatgtcggaccattgtctgttttaatttgagacggcatacccatcatttgaaaacaatgagttagatgttgtatcatatcctttatagcttcttttgtccgagtagtggctgttattagatgag

SEQ ID NO: 274 - DNA, 574 bp, Cricetulus griseus
ccatggaggctgagcctcctcctctggaggagcggcggcggctgcaggaggagttgagtgagttcgtagagagctgctgccggactctggaggaggtgacggcgtccctgggatggagcctggatcagctggaccctggggaccaggcggaggccgaggatgaagtcacgatatgcccttatgattccaatcatcatatgcctaaatcatcactagcaaagcatatggaatcttgcagattgaggaagctgggttatgccaaagaggaagaggatgaaatgcacaatcctgcttttttctatgagaatttgaagattccttcagttactttgaataaggactcacagttccagataattaagcaagctagaactgcagctgggaaagatggggattgttatagtccaagaatgtattcttcagtgcctgttgaagttcctctgaatcacaaacgatctgtttgtgaccttacccaagcagatcgtcttgccctttatgattttgtcattgaggagacaaagaaaaatcgatctggttctcaagtcattgaaaacgacagcgatctgtttgtaga

SEQ ID NO: 275 - DNA, 534 bp, Cricetulus griseus
  misc_feature (296)..(313): n is a, c, g, or t
agcggctgcaccgccgaccgcacgcacggccatggctggggcgctggtgcgcaaagcggcggactatgtccgcagcaaggacttccgggactatctcatgagcacgcacttctggggcccagttgccaactggggtctccccattgctgccatcaatgacatgaagaagtctccagagattatcagtgggcggatgaccttcgccctctgttgctattccttgacattcatgagatttgcctacaaggtacagcctcgaaactggcttctgtttgcgtgccatgtaacaaacgaannnnnnnnnnnnnnnnnnggaggacggcttatcaactatgagatgagtaagaaggcgtcttcgtagcagttcgaggaccagctcttgaaagggagtgcctcagccactgctgccaagccacagattacattagcataaatggtcttgccgaagggaaaacacggaatgctatccttaattaccatgccaacattatagaaaagccgagagtccctaaaccaactctctgctgccttacc

SEQ ID NO: 276 - DNA, 536 bp, Cricetulus griseus
  misc_feature (363)..(379): n is a, c, g, or t
gccgccatcacgccccgggtctccaggcctccgtcaccgcgaggctcagattacactgtgcacccaccatgagtcttgacatccaktgtgagcagctgagtgatgccaggtggacagagctccttcccctgatccagcaataccaagtggtcaggttggatgactgtggtctcactgaggtgcggtgcaaagacatcagctcakccattcagtccaaccccaccctaacagagctcagcctatgcaccaatgagctgggggaccctggcgtgtgcctggyactccasggcctgcagaatcccacctgtaagatccagaagctaagcctgcagaattgcagcttgaccgaggctggctgtaggnnnnnnnnnnnnnnnnnacgttctttacctaccctgcgggagctacatctcagtgataatcctctgggagatgcaggtctgaagctgctctgtgaaggacttctggacccccaatgccgccttgagaagcttcagttggaatactgtaacctcacagctaccagttgcgagcct

SEQ ID NO: 277 - DNA, 578 bp, Cricetulus griseus
  misc_feature (226)..(283): n is a, c, g, or t
cgggggcggcagaagcggctgaggtggccgtggcagtggtggaggttggctcgacccggcaatttgaggagctactgcgcctcaaagccaagtcgctcctcgtggttcatttctgggcaccatgggctccgsagtgtgtacagatgaacgatgtcatggcagagttagctaaagaacaccctcatgtttcattcgtgaagctggaagccgaagccgttcctgaagnnnnnnnnnnnnnnnnnnnnnnnnnnnnnnnnnnnnnnnnnnnnnnnnnnnnnnnnnngagagtcgaccggttagatggtgcacatgccccagagttgaccaaaaaagtccagcgacacgtgtctagwggatcctttcctcctaktgctactgagcatattawagaagatctcaacgttcgcctgaaaaagttgactcacgctgccccctgcatgctgtttatgaagggaacaccycaagaaccacgctgtggtttcagcaagcagatggtggaaatccttyacaaacacaatattcagttcagcagttttgatatcttctcagatgaggaagttcgacaggggctcaaaaca

SEQ ID NO: 278 - DNA, 638 bp, Cricetulus griseus
gacgctcgtgggtgtttcgcagtttctcgtctttggactctgcttgtctgatcacccagkatgccgcgtggaagccgaagccgctcttcccgggtggcccctccggccagccgggcccctcagatgagggctgctcctagacatgcacctgcagctcagcctccagcagcagctgcaccatctgcagttggctcccctgctgstgcacccaggcagccaggcctgatggcccagatggcaaccactgcarctggtgtggctgtgggctctgcggtgggtcacaccctgggtcatgccatcactgggggcttcaktgggggtggcagtgctgagcctgcaagacctgacatcacttaccaggagccccagggaacccagctgctggaccagcagcgagggccatgctctcttgagatcaaacagtttctggaatgtgcccagaaccagartgacstcargctttgcgarggtttcawtgargwgttgcgacagkgcavaattgcmaatggkttaatctaatcmagaakytcaaactgaasaaakgggctctgcctmattgatagkgaaagtgkggaccctgagkaaacaaatcttatytctwatarctsctttacttcagccatggagagartsctaac

SEQ ID NO: 279 - DNA, 282 bp, Cricetulus griseus
  misc_feature (191)..(192): n is a, c, g, or t
gggctcttctaccccagatggctctgtctttatcaaagcccgatgaagcatacacaatgaaaaggtgtttgaatctagtttttttttgttgttgttgctacttaatgcttacataacatacagatatctgctctggcggaggagggcwacacttctgtttttaaactgagtttttcagatgaagcattatnnaaaatatcaagtagtggaattactctttagtgattggactgtgcttctataagcaatttatatttaaggtgagcatcttaagtgatgtgt

SEQ ID NO: 280 - DNA, 1733 bp, Cricetulus griseus
  misc_feature (84)..(93): n is a, c, g, or t
  misc_feature (97)..(136): n is a, c, g, or t
  misc_feature (140)..(219): n is a, c, g, or t
  misc_feature (222)..(242): n is a, c, g, or t
  misc_feature (255)..(299): n is a, c, g, or t
  misc_feature (303)..(322): n is a, c, g, or t
  misc_feature (334)..(373): n is a, c, g, or t
  misc_feature (380)..(393): n is a, c, g, or t
  misc_feature (395)..(414): n is a, c, g, or t
  misc_feature (421)..(452): n is a, c, g, or t
  misc_feature (464)..(484): n is a, c, g, or t
  misc_feature (771)..(806): n is a, c, g, or t
  misc_feature (845)..(855): n is a, c, g, or t
  misc_feature (858)..(886): n is a, c, g, or t
  misc_feature (891)..(909): n is a, c, g, or t
  misc_feature (946)..(966): n is a, c, g, or t
ccgtcagaacgcaggtgttgtgaaaaccaccgctaattcaaatccaacatgggaaaggaaaagactcatatcaacatcgttgtnnnnnnnnnntagnnnnnnnnnnnnnnnnnnnnnnnnnnnnnnnnnnnnnnnnaatnnnnnnnnnnnnnnnnnnnnnnnnnnnnnnnnnnnnnnnnnnnnnnnnnnnnnnnnnnnnnnnnnnnnnnnnnnnnnnnnctnnnnnnnnnnnnnnnnnnnnngctgagcgtgaannnnnnnnnnnnnnnnnnnnnnnnnnnnnnnnnnnnnnnnnnnnnaaannnnnnnnnnnnnnnnnnnntgccccaggacnnnnnnnnnnnnnnnnnnnnnnnnnnnnnnnnnnnnnnnnrgctgannnnnnnnnnnnnngnnnnnnnnnnnnnnnnnnnngawtttnnnnnnnnnnnnnnnnnnnnnnnnnnnnnnnntgagcatgcccnnnnnnnnnnnnnnnnnnnnngtgaaacagctaattgttggtgtkaacaaaatggattycaccgagccaccttacarccaraagagatacgakgaaattgtgaaggaagtcagcmcctacattargaaaattggstrcrrccctgacacaktwgcatttgtgccaatttytggktggratggkgacwacatgctggagcctaktgctaatatgcctkggkksaagggatggawagtyacccgtaaagatggcagwgccagkggtaccacactgctggragctttggattgtrtsstgccaccaactcnnnnnnnnnnnnnnnnnnnnnnnnnnnnnnnnnnnngatststataaaatyggkggkrttgggactgtkcctgtnnnnnnnnnnngannnnnnnnnnnnnnnnnnnnnnnnnnnnnttacnnnnnnnnnnnnnnnnnnnacmacagaagtaaagtctgttgaaatgcaccatgaannnnnnnnnnnnnnnnnnnnnggagacaatgtgggcttcaatgtaaagaacgtgtctgtcaaagatgtcagacgtggcaacgttgctggtgacagcawaaatgacccaccaatggaagcagccggcttcactgctcargtgattatcctgaaccatccargccaaatwagtgctggctatgctcctgtactggattgtcacacagctcacatagcatgcaagtttgctgagcttaargagaagattgatcgccgttctggtaagaagctggaagatggcsctaaattcttgaaatctggtgatgcagccatcgttgatatggttcctggcaagcccatgtgtgttgagagcttctctgactatcctccactgggtcgttttgctgttcgtgacatgaggcagacagttgctgtgggtgtcatcaaagctgtggacaaraargctgctggagcgggcaaagtcaccaagtckgcccakaaagctcagaargctaaatgaatattacccctaacacctgccaccccagtcttaatcagtggtggaagaacggtctcagaactgtttgtctcaattggccatttaagtttaatagtgaaagactggttaatgataacaatgcatcggaaaaccttcaggaggaaaggagaatgttttgtggaacatttttgtgtgtgtggcagttttaagttattagttttcaaaatcagtactttttaatggaaacaacttgaccaaaaatctgtcaakwwttttgagacccattaaaatacaagtttaatgagaaaaaa

SEQ ID NO: 281 - DNA, 604 bp, Cricetulus griseus
tccacttccagactgaagccgtctgtacagagcctcaattcagttcctgggaagacaagaaaataaaaagayacttctttaaaaatggcgatggtatcakaattcctcaagcaggcctggtttattgacaaccaagaacaggaatrtgtkcaagctgtaaaatcatccaaaggtggtcctgggtctgccgtgagtccctacccatccttcaatccatcctcagatgttgctgccttacacaaagctatcatggttaaaggtgtggatgaagcaaccattattgacattcttaccaagagaaccaatgctcagcgccagcagatcaaggcagcatacttgcaggaaactggaaagcccctggatraaatgctgagaaaagcccttacaggccatctggaagaggttgttttggctctgctaaaaactccagcccagtttgatgcasatgaactccgtgcggccatgaaggggcttggaacagatgaagacactctcattgagattttggtatcaagaaataacagagawatcagagaaatcaacagartctacagagaagagctaaagagagatctggccaaagacatcacttcggatacttctg

SEQ ID NO: 282 - DNA, 608 bp, Cricetulus griseus
  misc_feature (35)..(59): n is a, c, g, or t
  misc_feature (93)..(141): n is a, c, g, or t
  misc_feature (173)..(220): n is a, c, g, or t
  misc_feature (259)..(301): n is a, c, g, or t
  misc_feature (489)..(512): n is a, c, g, or t
attgcctctctgctcgcgtcaccgccgggatgaannnnnnnnnnnnnnnnnnnnnnnnngcggtccatcacgcagatcaagtacaaccgcgannnnnnnnnnnnnnnnnnnnnnnnnnnnnnnnnnnnnnnnnnnnnnnnntactctgtgaatggcgagaggctgggcacctnnnnnnnnnnnnnnnnnnnnnnnnnnnnnnnnnnnnnnnnnnnnnnnnaccaagcatgtccttactggctcagctgataacagctgnnnnnnnnnnnnnnnnnnnnnnnnnnnnnnnnnnnnnnnnnnngaagaccaactcagccgtccgaacctgtggctttgacttcgggggtaacatcatcatgctctccacagacaagcagatggggtaccagtgttctgtgagcttcttcgatctacgggatccaagccagattgacaccaatgagccctacatgaagatcccctgcaatgactccaagatcaccaktgccnnnnnnnnnnnnnnnnnnnnnnnnattattgcaggacatgagagtggtgagctcaaccagtatagcgccaagtctggggaggtgttkgtgagcgttaargaacactcccsgcagatcaat

SEQ ID NO: 283 - DNA, 875 bp, Cricetulus griseus
ttcaaagtttttaagtttattttggttgtcatctaagtacaaacttaaagggcttttcatcaggccaaaggcacctctgtccaatccatacctggcactctggacagaaraaaaatgtacatgcttatascccaaatctgtagtttttgctaagtatgttcctgctgtttaaacagatatccagatatctgctttttctgcactgkgggcttcagtaaataagttttaacctctgttcctagttwaaacatgtcttaaacaggtttctgcttctggctgacatctgagtatcakttgctaactacaggctgkyctaagtrgactgcgakccctggacttgctgtggatgtgaaccaktccagctgatrtggacaccccctgtctctgcaacagtgtstgctaaccadaagcccctgatraattccccattgsctarattcctttttgcttttgactagcatttcaaccttctggggtccctaacttcgtcccaaagtcagcasgaagcagtytggaaaagaatttcrcygtccattttccctggttraaatgctaagtcaaaakgaactcccttgcatggggatgacagtatctatcactccctgatggggatgctagagagacagcamttccatgattggaatttacaaaaaasaaaatgggggaatgaasgaaccggcttcccttttggcagmcataayagccsaacatgtgcttgscatatacctgccttggtcacttakaggtcakatgccygtcttgtgacaaggaaccaatcagaagttagctggtggcgctatgctttacgaccctgggtgtgctttacggacaagcgcacagcaatgacgtagagagcatagcaaccaccctgggag

SEQ ID NO: 284 - DNA, 964 bp, Cricetulus griseus
tactccgctaagtaaaccattattgtgcaacttgcctcctaccttgactttgcctgacctccatccttggacatggacactcagatttcaaagaaaaacccacatgagatggattatttttttctagagtatggccccagagagtccttcccctccatcgtgtctggctgctgacctgggtattgtgccattagtgcagggcctccatggcaacactgagttactctgggtttactgtcatcaccaggcttccctacaggctgttctcagtccacctttcaagtctgtgtgtattctgtgtgtgttagcagcagccttggtgttcagtgccagggtgtgcggttttgataagctacagcccattttgagacggtgaggccacttytctactacctycctctytggtgtggcctctcggccaaagctcccatccacagctgggatgtctgagccacakyctgctgcactgttwycgctctgggatcttctgagttacttttttaggctgtggtttggygamargawccmacacattaacgatyytttttttccccaaaagcchctgwawaattcttggcatgttttsatgkccctgttggctgcctggtttgggagcagttgtggaraadaggacagtmccacacagagtgtggaattttgggagctgcttgkggcctgcctgtttctggcatgtaccctgggcgtgtgctgwacctgctgggccagctgcgcacgtttctaccctgtccctggagcahcascgtgagcascatgagtgkctctggaagyttaaagtggagtgttctakgaagtgtccctgacavaattccctgttctctatgaccccatttgggctctcagcccctytakcaactttatgccccggycctatctttgctcccgtcctctcygtctgctagtccttgaagcctttaaccaaatgggagtgggtgcagaaagcctt

SEQ ID NO: 285 - DNA, 584 bp, Cricetulus griseus
acgtccgtctccgggtcgcagcggctgtggagctgatcacctgggagcgaattaaaaatgggcgatgttgagaaaggcaagaagatttttgttcagaagtgtgcccagtgccacactgtggaaaagggaggcaagcataagactggaccaaatctccwtggtctgttcgggaggaagacaggccaggctgctggattctcgtacacagatgccaacaagaacaaaggcatcacttggggagaggataccctgatggagtatttggagaatcccaaaaagtacatccccggaacaaaaatgatcttcgctggaattaagaagaagggagagagggcagacctaatagcttaccttaaaaaggctactaatgagtaattctgatgccttatttattacaaaacaaatgtctcatgacttttaatgtgtattataatttaattcacaccaaaattcagatcatgaatggctaacaatgtttttgttggacagtcctgattaagtaaaacttgacttgtagtaaagtggatacgatcttttttaaaataacaattccagttgcataaatactatcacttctctccctt

SEQ ID NO: 286 - DNA, 619 bp, Cricetulus griseus
  misc_feature (580)..(612): n is a, c, g, or t
agctacttcctttcctttcggtggcgcgcggcggcaagatggcggtgcagatttccaagaagaggaagtttgtggctgatggcatcttcaaagcagagctgaatgagtttctcactcgggaactggctgaagacggctactcgggagttgaagtccgagttacaccaaccagaacagaaatcattattttagccaccagaacacaaaatgttcttggtgagaagggtcgtcgaatcagagagttgactgcggtagttcaraagaggttcggcttccctgagggcagcgtagagctttatgcagaaaaggtggccacaagaggtctgtgtgccattgctcaggcagagtctctacgttacaaactcctargaggacttgctgtgcgaagggcctgctatggtgtgcttcggttcattatggagagtggggccaagggctgtgaggttgtggtgtctgggaagctccgaggacagagagccaagtccatgaagtttgtggatgggctgatgatccacagtggagaccctgttaactactatgttgatactgcggtacgccatgtactcctcagacagggtgnnnnnnnnnnnnnnnnnnnnnnnnnnnnnnnnngggaccc

SEQ ID NO: 287 - DNA, 1051 bp, Cricetulus griseus
gttccagaaagcaggcttctcaaactcgtggacaacaatctgctgaagaagacaactttaagaagccaactcgaagcaacatgcagagaagtaagatgaggggagctgcctcaggaaagaagtcggctggttcacagccaaagaatcttgaaccagccctcccaggaagatggggcggtcgctctgctgagaaccccccttctggttctgcgcggaagaccaggaagaacaagcagaagattcctggcaacggagatggtggcagtaccagcgaagtgccccagcccccccggaagaaacgggcacgggctgaccccactgtggagagtgaggaagcattcaagaatagaatggaagtgaaagtgaagattcccgaagagctaaaaccatggctggtggaggactgggacttggttaccaggcagaagcagttgttccagctccctgctaaaaagaatgtagatgccattcttgaggagtatgccaattgtaagaaatcacagggaaacgttgataataaggagtatgcggttaatgaagttgtgggagggataaaagagtatttcaatgtgatgctgggcactcagctgctctacaagtttgagcggccccaatatgccgaaatccttctggcacacccagatgcgccratgtcgcakatctatggggcgccacacctactgagattatttgtgagaattggggcaatgttggcctatacgccccttgatgagaaaagcctggcattattgttgggctatttgcatgatttccttaaatatctggcaaagaattctgcctctctgttcactgccagtgattacaaagtggcttctgctgactaccatcgcaaagccctgtgaaggkctactgaccactcactatcgtctggtatctgtaaacacttctgkttagtcctttcattgtataattgatgttctttacmactgkcgatgtaaaacarggcttatgtttcattttgttttctgttctgttgtaaacagaaataaaaagagtgcccaactcctttccttatttaaaagttgcttcc

SEQ ID NO: 288 - DNA, 832 bp, Cricetulus griseus
  misc_feature (259)..(277): n is a, c, g, or t
aaaggtgaaggaggtgaattttcagttgatagaccaattattgaacggcctatccgaggccgaggtggtcttggaaggggtcgaggaggccgtggtcgtggaatgggccgaggcgatggatttgattctcgtggcaaacgtgaatttgataggcatagtggaagtgatagatcttctttttcacattacagtggcctgaagcatgaggacaaacgtggaggtagcggatctcacaactggggaactgtcaaagatgaannnnnnnnnnnnnnnnnnncaaatgtgaccgaggaaacacctgaaggtgaagagcacccagtggcagacactgaaaataaggagaatgaagttgaagaggttaaggaagagggtccaaaagagatgactttggatgagtggaaagctattcaaaataaagaccgagcaaaagtagagtttaatatccgaaaaccaaatgaaggtgctgatggacaatggaaaaagggatttgttctgcataaatcaaaaagcgaagaggctcatgctgaagattcggttatggaccatcatttccggaagccagcaaatgatwtaacgtctcaactagagatcaattttggagacctaggccgcccaggacgtggtggcagaggaggacgtggtggacgtggacgtggtggacgtccaaaccgtggcagcagaactgataagtcaagtgcttctgctcctgatgtagatgacccagaggcattcccagctctggcctaactggatgccataatacaacactggttcctttgtggaccctcctgttcaaagcttttgcatgcttaaggatcccaaacaactaaga

SEQ ID NO: 289 - DNA, 578 bp, Cricetulus griseus
ggctgcggctgcgggagcaggatggggggaagagaagggaattccaacctgtagaactttgggggtcctatggtcgggttctccccggcgactgtgcatggtgaaaggggcgggacctctgggggctcgtgggggcgttgggggttcgcagggtgaggaagggggtgtcaagtgagagagagctcgtgcaggacttccaaacttaraaccttgaggccctcggggctcakgtccagggaccgggcgctcgggccgccatgcgcgacaggacccatgakctgaggcagggggacaacagctcggacgacgaagatgaggctcgagtcgcgctggtggtgcacccargtaccgcccggctgggcagcccadatgacgagttcttccagaaggtccaggcaattcggcaaactatggccaaactggagagtaaagtccgggagttggagaaacagcaggtcaccattctggccacgccccttcccgaggagagcatgaagcakggcctgcagaacctgcgcgaggagatcaaacagctggggagagaggtccgggcacagctaatagccatagagcctcag

SEQ ID NO: 290 - DNA, 669 bp, Cricetulus griseus
cgaggtgagggaagtggatgcgatggccgggtccgcgtgkgtskccraggtctctcggctgctgggtgcattccacaatacaaaacaggtgacaagaggttttgctggtggtgttcaracagtaactttaattccaggagatggaattggcccagaaatctccgcctcagttatgaagatttttgatgctgccaaagcccctattcaatgggaggagcgtaatgtcactgccattcaaggaccaggaggaaagtggatgatccctccagaagccaaagagtccatggataagaacaagatgggcttgaaaggcccactaaagaccccaatagcagctggccatccatctatgaatctgttgctccgtaagacatttgacctttatgccaatgtccggccatgtgtctcaattgaaggttataaaaccccttacacggatgtaaatattgtcaccatccgagagaacacggaaggagaatrcagtggaattgagcatgtgatcgytgatggagttgtgcakakcatcaagctcatcaccsaacaagcgagcaakcgcattgctgaktttgccttcsagtacgctaggaacaaccaccggakcaacgtcacagcggwgcacaaagccaacatcatgcggtatgtcagatgggctttttctgcataaaatgc

SEQ ID NO: 291 - DNA, 680 bp, Cricetulus griseus
  misc_feature (15)..(15): n is a, c, g, or t
  misc_feature (23)..(81): n is a, c, g, or t
  misc_feature (555)..(574): n is a, c, g, or t
cgaactcaactctangggccgannnnnnnnnnnnnnnnnnnnnnnnnnnnnnnnnnnnnnnnnnnnnnnnnnnnnnnnnnngcytctgcgttctggtagtggcgctgcttgggccggtggctgaastgagagctgctggtgtcgcgattgaggagaactgcgagtgtgttcagcctgtccccttcgggatcccakccacgatgagtgctgcccgggagtytcacccayackgggtgaagcgttcagcctcccccgacgacgatcttggatctagcaaytgggaagcagcagacttaggcratgaagagagaaaacaaaagttcttgagacttatgggtgcaggaaagaaagaacacactggtcgtcttgttataggagatcacaaatcaacatctcacttccgaacaggggaagaagacaagaaaattaatgaagaactggagtctcagtaccagcagagcatggacagtaaactatcaggccgataccggcggcactgtggacttggcttcagtgaggtagaagatcatgatggagaaggtgatgtggctggannnnnnnnnnnnnnnnnnnngccggatgccgagagtccagatgactcagacagtgattctgagtctgagaaggaggagtctgcagaagaactccatgctactgagcatcctgatgatgcagaagac

SEQ ID NO: 292 - DNA, 579 bp, Cricetulus griseus
aaagcagccctgctggcccagtatgccgatgtgacagacgaagaggacgaggcagatgagaaagatgatccgggtgcttccacaacaaacatcagttctgataaatctctgtttcgaaacaccaacgtagaagatgttctcaatgctcgaaaattggagcgagactctcttcgggatgagtcccaaaggaagaaggaacaggacaagctgcagagggagaaggacaaactagccaagcaggagcgcaaggagaaggaaaagaaaaggacacagagaggggaacgcaagcgataacctcggccactctgttccttccacccgtgaattgattgtgcgtctatatatttaagagaactgagactaatgcatttcccaaaatttcttaaggcttttccccctctgtttacatgttcaaaaggaaaatcacaatcacttgttactacaaaatgtgccatgtttggtagygtgggcaatcaattctagwtattatctttaccaaagatctggaattagggtaaccttwctattttagtactgaaatcctatgctcttctggctttttaaaaaaggtcttccctc

SEQ ID NO: 293 - DNA, 581 bp, Cricetulus griseus
gtgtgggagagcaggtgctgtgakaaactggggtgtgctctgggacccctgtcctgcttcctcagcccctcctggcctcagccgggcgctctggtcctgcaggaccatcagcacgtgcccatcgacatccagaccagcaagctgctcgattggctagtggacagacgacwctgcaacctaaaatggcaaagtctggtgctgaccatccgggagaaaatcaacactgccatccaggacatgccagagagccaagagattgcccagctgctatctgggtcttacattcattacttccactgcctaagaatagtggaccttcttaaaggtactgaggcctccaccaaaaatattttcggccggtactcttcacagcggatgaaggattggcaggagatcataggcctgtatgagaaggacaacacctacttagtggaactttctagcctcttggttcggaatgtcagctatgagatccccttgctgaagaagcagattgccaagtgccascagctgcagcaagaatacagccgcaaggaggaagarggccmggctggggctgctgagatgcgggagcagtttta

SEQ ID NO: 294 - DNA, 664 bp, Cricetulus griseus
gcccctcgcttcccgacgctccgtcccccctgcccgccttctcccgcagccgccttccgcakgccgtktccaccgaggaaaaggaatcgtatcgtatgtccgctatccagaacctccactctttcgacccctttgctgatgcaagtragggkgrkgrsctgcttcctgctggcactgaggattatatccatataagrrttcaacagagaaacggcrggaagaccctcaccactgtccaagggatcgctgatgattacgataaaaagaaactagtgaaggcgtttaagaagaaatttgcctgcaatggtrctgkaattgagcatccagaatatggagaagtaattcagctacagggtgaccagcgcaagaacatatgccagttcctgatagagattggactggctaakgacgaccagctgaaggytcatgggttttaagtgcttgtgactctctgaagcttaagtgaggatttccttgcaatgagtagaatttccctcctgtsccttgtsacaagtttaaaaacctcacagcttgtataatgtaaccatttggggtccgcttttaacttggactagtgtaactccttcatgcaataaactgaaaagagccatgctgtctagtcttgaagtccctcatttaaacaggtcaagcagtaagccctggc

SEQ ID NO: 295 - DNA, 574 bp, Cricetulus griseus
tgtcttaggatgttttagggttatgattttatgctgggctgtacccatagctatttgaggacatatgcctgattatttcattaatcacaaaataaacttaaatttagtaaaaactggccaacatcaaagcatatttcaagaatgcaatggttcaaacaaattcaacatgtccccttctcaaaagagaaggcaacaatgaaatgtctgtacattctgtagctaaagaagcatattctaacaacatatattattgggcaaacatatcatgaactgatatcaaaaaatcaaattaaatgtcattataaatcattggcgttcattttagaaacacagctatggaccagtattaagagattatatcaatatatttttctttaaaaattcaaaggaggggctggagagatgactcacaggtgaagagcactggctgctcttccaaaggtcctgaattcaattcctatcaaccacatgggggctcacaaccatctataatgggatctggtgccttcctctggcctgcaggcatacatgcatacaggaacacgtttacataataaataaacttaataaaaaa

SEQ ID NO: 296 - DNA, 452 bp, Cricetulus griseus
gaattttgtagtaactggtaattcgattttgtcctacttaactacatattaattcagaacttgtattctgagtttaacagtcttttagagtgacgagcaaccttgatgtttgcactaagattttatttgaaatacaagaggggttaaaggaggtttcagtagtgcacatgtgactaatttatttgaactatatgctaaagacatctaccagtttcttcgaatgccttttaaaaaaactcattacacatatgattggtgaaatgctgagtatcatatttttcttattgcatgtcagctacatatatggttttgtacaatgaaaaactaatttgtttgacattccccatgttaaactaccgtcatgttcagcttcattgcatgtaatgtagacctagtccaagcaatcatgtgctcgggagagtgttctttattcaataaagttttaatttagt

SEQ ID NO: 297 - DNA, 508 bp, Cricetulus griseus
catcctatttgtaaactctttctcctttaaatggttggttaatactttgagactttgtttacgtgtggcagtgttgtaaaaagaaactaaagatcacattttacctgtatggatgaatttcccttttcttcttcaagtgcagtttgtgacgtgttctgttattccagatctgaaagttacaggtgatattgggagttgacagcatttgcttgagtttattcaattccattaggccttcacatgtgttaatctcatttccaacattgaattgcggcggtaacattttcctttctgtgaagtcctaaacttagttatgacctccttagcaatgcctttgaaaggggatattgcgtccatggtaaattaattgtatacctaaacagatatagctcagctttgcctggcaggcttggcattgacatctggtagacttctgcacatgtaaaattgaattcaaataaaatcatgtacactttctagttcttaatttttgactttctgatcaata

SEQ ID NO: 298 - DNA, 485 bp, Cricetulus griseus
gttgagagatgacctggagttgtattacaagctgcttaaaacagccatggtggagctcatcaacaaggactatgcagactttgtcaaacctctcaacaaacctgtgatcatggatacttcgatcgttacacagatcattacactggattaggactgatgattttgagctgtcatgattttgcctctaggtcggcatggacagagccctcaaccagctatctgtgcttttgggacaattacgagaagaggttatgagtcttaagtcctctgtcagtgaaggaattctggcagtagatgaacgaatgtctaaacaagaagacattaggaagaaaaagatgagtgtgttgagacttataacagatattcgatcagttgagaaaattgaaaaaatcttaaactctcaaaattctaaagatgcatcttcactataagcaagcaccccactcttgactggacaggttcttggacagaattgccacagaatt

SEQ ID NO: 299 - DNA, 578 bp, Cricetulus griseus
tgcgtggagctcctggatccgtgctacggatctgactgcgaatatcagtgccagccagtgagtcccacagagtacatttgcatctgtgctgagggcttcgcacccaaacccggggaaccgcacaggtgtgaaatgttctgcaatgaaagttcatgcccggctgactgtgaccctaacactcctgatttttgccattgccctgagggctttattctggacgaaggtcacatatgcgtggacattgacgagtgcagtcaagaggaatgctcccgcaatgagtgtcgaaatcttcccggctcctatgagtgcatctgtgggcctgacacagctcttgctggccaggttagcaaggactgtgatcccacccctgttattgaatacaacgaggaccatggctctggggagcccccagtcagtccaacaccaggctctcccacaggtccgccctcagcaaagccagtgcattctggcgttctcattggcatctccatcgccagcctgtccctggtgggggcgcttttggcgcttctatgtcacctgcgcaagaacaaggagcccgacgtgcacagctatagtac

SEQ ID NO: 300 - DNA, 386 bp, Cricetulus griseus
aaagcactgtctaagtggggtcagactttccatttaaataaccttgttttaattataattagaatttgagacttagccttacatcatggtgccatgtcccaggacttgggaggccaagtcagaaggatcctgtgttcaaggcgtctgagctacacaaacgctttcttttattgtggtttcaggccggtaggttcagtggtagtgtatggttaatcatgttcgagtgtacacacaaacaatatagtcagagtgctttatattgccactttggctggctgtggtggtgaacacctgtggaggtacagacaggaggggcatgagttccaagccaaactaagttaggggataccgcctcataatcctcaacaaaaatagcacccccaact

SEQ ID NO: 301 - DNA, 495 bp, Cricetulus griseus
aagggactgggtagtcagcttaattcctctggcgcttagtttttaactagtaaacagaaatcaccaaattatcagttagtgtgtgaaaaaagcttgatgctaccgggtgattcagttccttcttacagaagcactaacttaaccgactcccatactagaaacagcatcttggtgcactggcctttattaattccatggcagacactagttttaaaagagaaatatttctatatctagtgtgttagtgttctaaaactaataacttccctgactttgattgtcttttggctgtgtctcttgctatgagcatctagtggtttgaaatttttgtttagtttgatatataaagtatttcacataaataattaatcttgccaatataatttcccctaaatgtctattagttacattgcaactttttatataaaaaatttagtctacatgtcatttctaacattttcattcgaaagaaattaagcctcctgtagttgttgc

SEQ ID NO: 302 - DNA, 579 bp, Cricetulus griseus
  misc_feature (548)..(548): n is a, c, g, or t
  misc_feature (556)..(570): n is a, c, g, or t
gccaaactctgctcagcaaactgaccgaagctcacctgttagagccagtagtgaaaagaatgattgccttcgagggaaacgagatggagtcaacagtcttgaaagaaaattgaagagacgcccagaaagagaaggccttcccagtgaacggtgggatcgagttaaaaaaatgcggaccccccaaaagaagaaaatcaaattgagtcaccccaaggacatgaacaatttcaaattagaaagagagcgtagctatgacttagtccgtaatgctgaaacacattcgctaccctcagacacgtcctactcggagcaggaggactctgaggatgaagatgccgtctgtccagctgtgagctgcctgcagccagaaggagatgaggtggactgggtccagtgtgatggcagctgcaatcagtggtttcaccaggtctgtgttggtgtctctccagagatggcagagaaggaagactacatctgtgtgcgctgcatggcaaaggacacaccaagccgaaagtaaaaacaaaacacactcacttaatggaattcangactccannnnnnnnnnnnnnntcaatctca

SEQ ID NO: 303 - DNA, 211 bp, Cricetulus griseus
  misc_feature (70)..(113): n is a, c, g, or t
ttgaaactgatgttctcatttaattatgtatattgattataaagattgggcctgataactttttatcgannnnnnnnnnnnnnnnnnnnnnnnnnnnnnnnnnnnnnnnnnnntagatcatttggctctttttattgaatgctgaatattttgtgtgaaaaaattatttcctatctagagtgtatatagtatttataaatttaaaaccaat

SEQ ID NO: 304 - DNA, 344 bp, Cricetulus griseus
  misc_feature (32)..(48): n is a, c, g, or t
gttgggtgtgtatgtaatatagactgcagtgnnnnnnnnnnnnnnnnngtgtgtgcttctgacgggagttcctacaacaatccctgttttgttcgggaagcatcttgtataaagcaagaacagattgacataagacatcttggccactgcacagacacagatgatacaagtttattgggaaagaaagatgatgggctgcaatatcgaccggatgagaaagatgctggtgatcaaagggaagatgtttatattggaagccacatgccttgtgctgaaaacctcaatgggtactgcatccatgggaagtgtgaattcatctactctactcacaaagcttcttgtag

SEQ ID NO: 305 - DNA, 459 bp, Cricetulus griseus
  misc_feature (94)..(108): n is a, c, g, or t
  misc_feature (405)..(421): n is a, c, g, or t
ggtgattcctcttcccttggccatacgtgaaagagagctctgcagccataatcctaatagcagctggctgccatagctagaagcccatgggaannnnnnnnnnnnnnntgtcaactacagggccatgatctcttgtgcactcaggcaggctctgcatcattcaaggggctgtgctctggttcttgcaggcacagtctccccgctaccccagctctcttagaaatggaccaggaaggaggtcacagtgaccagtaccatggatctcccacccacacatctctgttcacctccatagttcctgagactgtcatcaccatcccctctttatcccatgtagccattgtccagaacaagcacccctccctattctctgccacctgtgtggcaagaccactccatcttccnnnnnnnnnnnnnnnnnggctgcatgctgctatccctcctatgtggaccatcctc

SEQ ID NO: 306 - DNA, 578 bp, Cricetulus griseus
gttagatctttctttagaaagcctctagatgtgcagttcatgcctgggaagtaagtaattgtgcgcattatttcaaatcagcgctggtccaaatggcacccagagattctgctttccacagagctcattcaagacagttccttgacctcgcactgaggtacacatgctggccatttagagaaaaatcaaaactccataagagacatcctggtccttccccctttcccacatccacagaatcatggcatggaaggtggttagaaatccagggaaaattagagtcagggaccttgtacacgtcagttttaagatgggagatgattaggaagctgtgaaaaaagtagagttgagaacattgtacatgtcagttttaagagaacctgtagatttattagcaaatagaccacttgatgggagagaattcaaattgcttgttcattcttaaagataattaatcccattgtgtattcacctgaattcactcgcttggatttagtaaaatttggtgaaacagtagcattaaactttgtttagagtttatcttttgggtttatccttagaattataaagaaatgatt

SEQ ID NO: 307 - DNA, 295 bp, Cricetulus griseus
agatatccaactttgaatacttgatgcaactcaacacaattgccggacgcacctataatgacctgtctcagtaccctgtgttcccctgggtcttgcaggactacgtgtccccagtcttggacctcagcaatccagctgtcttccgggacctgtccaaacccatcggtgtggtgaacccaaagcatgcccagctcgtgagggagaaatatgagagctttgaggacccagcaggtacaatcgacaagttccactacggcacccactattccaacgcagcaggtgtgatgcattacct

SEQ ID NO: 308 - DNA, 573 bp, Cricetulus griseus
cgttaaaattgcttctaakasctactcctaraatgatggccttaaacaacatgtatttgktgctgctttgattcatttttgcttcagtttatttagctcatggaaaattttcaaacaaaactcagattaktaattgttcttcatgtccttgtccatcttttttatacttcttcattttattttattatatatattattttttscacttggtgtaatggcacacatctttaatccgaggctgatctgagtccaccacagcctggtctccatagcaagttccaagctagccacggctttatagtgataacctgtctcaaacaaaatcagtcttgcttatacctgwatctaccttaatgttattttaaacccatatcctatgtgatgtgaaggtaactyagttttttaaatcatttttattttaatgwgwtttggtgtttttcttgaatgtatgtctgwgtgagtygytggattctggasttacagttgctgtgtggatgctgggaattgaacccasatcctctggaakaacagytastactcttaaccactgattggtacatctctcctagytyt

SEQ ID NO: 309 - DNA, 559 bp, Cricetulus griseus
  misc_feature (441)..(465): n is a, c, g, or t
ttccgcgccgtcaccatggtgcgcatgaatgtcctggccgatgctctgaagagcatcaacratgctgagaagakaggcaaacgccaggtcctcatcargccctgctccaaagtcatcgttcgattcctaactgtgatgatgaagcatggttacattggtgaatttgaaatcatcgatgaccacagagctgggaaaattgtcgtgaacctcacaggcaggttgaacaagtgtggagtgatcakccctagattkgatgtgcagctcaaagacctagaaaagtggcagaacaatctgctcccgtcccgtcaatttggcttcattgtactgacaacctcagctggcatcatggaccatgaagaagcaagaagaaaacacacaggagggaaaatccttggtttctttttctagagatgtaaaacgtaartaaaaagcctccataknnnnnnnnnnnnnnnnnnnnnnnnncccccsgggggggacccccatttttggtccctttargggarggwtaactggcsscctskggsaatatcagggsmaaakmtgkysccgggaggaa

SEQ ID NO: 310 - DNA, 593 bp, Cricetulus griseus
  misc_feature (457)..(471): n is a, c, g, or t
tccggttgccgccatcttcctcgggcggaagccggcttctaggtgggagttcagtggcgggtgccgtgggtagcgcggacggtcggccggtgccatgccgtcatcaccgctgcgggtggcggtcgtgtgctcgagtaaccagaaccggagcatggaggcrcacaacatcctcagcaagcggggtttcagtgtccggtcctttggaacaggaactcatgtgaagctcccaggaccagcacctgacaagcccaatgtttatgacttcaaaaccacatatgaccagatgtacaatgatcttctcaggaaagacaaagaactctatacgcagaacggaattttacatatgttggacagaaataaaaggatcaagccccggcccgaaaggttccagaactgcaaggacctgtttgacctgattctcacttgtgaagaaagagtctatgaccasgytgtasannnnnnnnnnnnnnnataacaggagacctgccagtcagtgcatgttggcaatgyggacatccaggacaaccatgaasaggccacccykggggcatyccttmtctgcgayctctgccagtgtmtccagcacactgagg

SEQ ID NO: 311 - DNA, 585 bp, Cricetulus griseus
ttcatgactctaaagaagcttaaccgattagcccacatcaggttaaagaaaggaagagatcagacccatgaggccaagcagaaagttgatgcctaccacctgcagcttcagaacctgctctacgaagtgatgcacctgcagaaggagatcaccaartgtctagagttcaagtccaagcatgaagaaattgatctggtcagtttagaggaattttattcagaggctccaccaaacatcagcaaggctgaaatcaccatgggagaccctcaccaacagaccttggcacgtttggactgggagctggagcagcggaaaaggctggccgagaagtaccgagaatgtctgtccaacaaggagaagatcctgaaggagattgaggtgaagaaggagtatctgagcagcctccagcctcgactcaacagcatcatgcaggcgtscctcccagtgcaagaatacctgttcatgccatttgaccaggcacacaagcagtatgagactgccaggcatctgccacctcccctctatgtgctgtttgtgcasgccactgcatatgggcaggcctgtgataagacgttgtctgtggca

SEQ ID NO: 312 - DNA, 509 bp, Cricetulus griseus
tctgtgaaaagtttctataaaacagtctcctgacatggtttttatttctcaactacagctatgaatgaagtaaaatgtaatcattggttcagtttaacaaggggtaaaagtccaagtgtctgttgtatatatacttgaagaaactgattggctgttgttgtatgtaggtaaaccccagtgataggtaccatcttatgcctataattacaccagcatacccacagcagaactccacgtacaatgtgtccgtttcaacacggatggtcatggttgaggagtttaaacaaggtcttgctatcactgatgaaattttgctgagtaaggcagagtggtccaaactttttgaagctccaaacttctttcagaagtacaagcattatattgtacttctagcaagtgcgcccacggaaaagcagcgtctggaatgggtgggcttggtggaatcaaaaatccgcatcctggttggaagcttggagaagaatgagtttattacactggcgcatgtgaac

SEQ ID NO: 313 - DNA, 579 bp, Cricetulus griseus
agtgtctgggtgctggctgacgtacgacggatctcccagaaccatgcccgaggtcgccgacacttgctccttggcctctccagcctcggtctgccgaacccagcacctccatctgcgctgcagcgtggacttcgctcgccgggtgctgaccgggaccgccgcgctcaccgtccagtctcargaggataatctgcgcagcctgactttggatacaaaagaccttacaatagagaaagtggtgatcaatggacaagaagtcaaatatactcttggagaaagacaaggttacaaagggtcaccgatggaaatctcccttcccatcgctctgagcaaaaatcaagaggktgttatagaaatytcctatgagacctctcccawatcctctgctcttcagtggctcactcccgaacagacttctgggaagcagcatccatacctcttcagtcagtgccaggccatccactgcagagcagtcctcccatgccaagacactccttstgtgaaactaacctacaccgcagakgtgtctgtcccaaaagaactggtagctctcataagtgccatccgatatggagaagg

SEQ ID NO: 314 - DNA, 578 bp, Cricetulus griseus
  misc_feature (92)..(111): n is a, c, g, or t
  misc_feature (329)..(350): n is a, c, g, or t
gcgtgggctccggcacgggggatcgctgacggggacgggggctgggtccgaggagagcgggcgcaggatggacgaggacgtgctgaccactnnnnnnnnnnnnnnnnnnnncgagagtggggtgggcaagtccagcctgctcctgaggttcacagatgacacctttgatccagaacttgcagcaacaataggtgttgactttaaggtgaaaaccatttcagtggatggaaataaggctaaacttgcaatatgggatacggctggtcaagagagattcagaacattaactcccagctattacagaggtgcacagggagttatattagttnnnnnnnnnnnnnnnnnnnnnncctttgttaaactggataattggttaaatgaattggaaacatactgtacaagaaatgacatagtaaacatgctagttggaaataaaattgataaggaaaatcgtgaagttgatagaaatgaaggcctcaaatttgcacgtaaacattctatgttgttcatagaggcaagtgcaaaaacctgtgacsgtgttcagtgtgcctttgaggagcttgttgagaagatcattc

SEQ ID NO: 315 - DNA, 581 bp, Cricetulus griseus
aatatagaagcatgataattttagtgcctgttagaattcatttccattatttattttaccatgagtcacttctagcctgaaactttscartgttagcacaatattttttgaaaattttttatctataaaatttttcttatttttgcctgcacgtgtcaggaccatgtgcttgcagtgcccatggagaccagaagagggcatcagatactcctgaaactggagttacagttacagttgtgagccactatgtgggtgctcagaattgaaactaggttctctakaagaccagccaactaggacttttaactgctgggccatctctctagccctaaactttggcaactcakaattgtgtcctcgggagagtgaggtgtttarggtccatttggygtcttcgctcagtacctgccctattaatcttaactggctaaagtggagatgagcagaccaaccacctttgtgttttacactaccaggtagctatcgaattatgctcakatgtcctgtwgakaaaacaagtaagaagttagctggttttggagagctttgaactcatccagggtaaagcaccggctctccca

SEQ ID NO: 316 - DNA, 672 bp, Cricetulus griseus
gaaaagaaagttaaagaccataaatctgaaagcaaagagagagacatcagaagaaattcagaaaaggatgataaatataataaaaacaaagtgaagaaaaggggcaaatccaaaagtaggagtaagagcaaagagagatccaaaagtaaggaaagagaatcaaagcataacaaacacgaagacaagaggatgaggtcaagaagtaaagacagggatcatgagactattaaagaaaaagaaaaacaggtggattctaaagggaaagatcaggaaaggagtagaagcaaagagaattctaaacaggtagaatcaaaaagtgatgagcatgatcatagcaaaagtaaagaaaaggatagacgtgcacagtctawgagtagagaacgtgatctaactaaaagtaaacacagttacaacagtagaacaagggagcgaagcagaagcagggacaggagcagaagagtgcgctctataagccatgacagagatcgcagcagaagcaaggagtaccacaggtacagagaacaggagtataggagaagaggaaggtcacggagccgggatcgaagaactccaggacgatcaagaagtaaagacaggaggagaagaaggagagattcccggagctcagaaagagaagatagtcaaagtcgaaacaaagagaaatatagaagc

SEQ ID NO: 317 - DNA, 444 bp, Cricetulus griseus
agccccctggtgagacagctctccacctcatcagacacctccacacccaccagctctagctcacaagttggagccagcacttctcagccagtgaggaggaggaggggagagagttcattcgatattaataacattgtcatcccaatgtctgttgctgcaacaactcgtgtggagaaactacaatacaaagaaatccttactcccagctggcgagaggttgatcttcagtctctgaaggggagtcctgatgaagagaatgaggagatcgaggacctatctgatgcagcctttgccgccctgcatgccaaatgtgaggcaatggagagggcaaggtggctgtggaccacaagtgtgccaccccagcgtcggggcagcaggtcttacagatcatcagacggccggactaccccacagttgggcagtgccaacccctccactccacag

SEQ ID NO: 318 - DNA, 565 bp, Cricetulus griseus
  misc_feature (155)..(213): n is a, c, g, or t
  misc_feature (522)..(557): n is a, c, g, or t
gaagcagggagcaccctgatctgcaactgtggtgccagccctggaaacagcagtctgcagaggggagagtgcatcccagacacatccacatcacagacaccaggagcaaagaggagtccccaagctatagaactttgaatggggcattgtataannnnnnnnnnnnnnnnnnnnnnnnnnnnnnnnnnnnnnnnnnnnnnnnnnnnnnnnnnnagaagccccgcacctactacccagctgtggagcagaagctggtagtagagaccagaggatctgccctcgatgatacagtcaaccccctctgtgagaatggtgatgaccccctctcccctcgcctaagctggcctctcgaccaagacaggagcagaggggacagtgataccaaacctagctccccaaaggtgaaggaatacgtttcgaagaaggtcctgccggaagaatcccctgctctgaagctgctggacagatgcggataatggctggtgagtttctcacaccagtgggagttcaacctgctgacgnnnnnnnnnnnnnnnnnnnnnnnnnnnnnnnnnnnnatggactc

SEQ ID NO: 319 - DNA, 551 bp, Cricetulus griseus
ctattcagctggatgggttaaacgcgtcacagataagagagctcagagaaaagtctgaaaagtttgccttccaagcagaagttaacaggatgatgaaacttatcatcaattctttgtacaaaaataaagagattttcctgagagaactgatttcaaatgcttctgatgctttggacaagataaggctcatctcactaactgatgaaaatgcacttgctggaaatgaagagttaacagtcaagattaagtgtgataaagagaaaaacctgctgcatgtcacagacactggtgtaggaatgaccagagaggagttggttaaaaaccttggtaccatagccaaatctggaacgagcgagtttttaaacaaaatgacagaggcacaagatgatggtcagtcaacttctgaactgatcggccagtttggtgtcggtttttattctgccttccttgtatcacataaggtcattgtcacatctaatcacaacatcgatacccagcacatctgggaatctgattccaacgaattctctgtatttgctgacccaggagga

SEQ ID NO: 320 - DNA, 580 bp, Cricetulus griseus
gcatggtgcctcttcctccccatgggaccacaaaaatctctgctccactctatatgtgtgggagcctctggtgctctcggaggcagtgacgtggtaaattgcccctggggacaccaggcacagggtggctcgtagaggataggccttcagtgccagctttcctccacctccgcacaacttcctcagagggcttcaagccaaaccaatagcctttttgtgtgaaacatctttgaggtgggaaagggaccactggagctttgctagcaataactgactttcagtttactgttttgaaggagcagggactcagcacagaattcactttaaatggagctgaaggagtgtccctcctctgtgtgaaaagaaaatagttttattcttcattctgactttttaaactgtttgacttccagttagtttgaatgagagtaataatttttctacatggactcaaagggtaggagcattaactgtcatcattgtgatgtgtggtgtgtgccttcccttggatgtcacagccattgagttccttgtgggcctcatggtcttgctcttgttagttctaatgatagccagactt

SEQ ID NO: 321 - DNA, 305 bp, Cricetulus griseus
  misc_feature (227)..(246): n is a, c, g, or t
tgattcccaggtaactggaagttaatgtttaataccttcactagtgtgaataactgaaagcatactattcctgacagtatgtatatgtgtaaatctgtatcaaaaagaaaaagactaattcttgaattgttcttcaataagttgaacaagtttaagacggtggtgttatggtttggatatgaaatgacatgaataagttcccgtattcaacagttggccctcagctnnnnnnnnnnnnnnnnnnnntggtagaacctttcaaggccatacctggtccctggtcccttcctctcccttggcatcct

SEQ ID NO: 322 - DNA, 579 bp, Cricetulus griseus
tctcagatctctcggccttgccagggcccaccagagaagactgacgctctggtccggccatacctatgggggaccaaccttgtgcctccgggagatccacgctcccaccaggaaatacgcgggaacccaagcctccaaaaaagcgctgtctcctggctccacggtgggattatccagaagggactcccagtggaggtagtaccactctcccctcggcgcctcctcctgcatctactggactgaagtctcaccctcctccgccggagaagtagtgaaatagcttttttcgcagcctaaatcagtctttgaaagattgcagtatgactccatttccttggtgcatttgtaaaatagttcacccattgaagaccatgaagactctttccaatgctaccctgcttttgctggtgtcccgcacctggaagttgtgatgctcaaggctcatctcatattttctaccccattgaccatttctctatttggctgtgctactgggagatcatatttacaaactgagtattatgatgtgatgactgtgatttcacctccagaatttggatgaatttatgacgtgggcaa

SEQ ID NO: 323 - DNA, 567 bp, Cricetulus griseus
  misc_feature (256)..(269): n is a, c, g, or t
  misc_feature (271)..(284): n is a, c, g, or t
tcagcttgcctccaaaaccccttgtctatgatttttgagtgctggctgctaggcctgtccatcttttgcttgggttttgagaatgcaaactcaattctcacaattgtgggcaagtactttatccaccaaacacccccaacccccagctctcaaattaagctttctgttgtacttttgttagatttgattggttcctaaacagactcatttaagagtagaaactctcaggacaactgaggctatatagagaaacctnnnnnnnnnnnnnncnnnnnnnnnnnnnntagctctagctggacatggtaactcatgtgtctaatctcaccccttgagaagctgaggcaggaggatcttactaagttcaagcctagcctaaactattgatgtgttacaatattcctggtgagatgtgactagatatctacttgccccagataaagggctggcaacagacctgtaaggataccaccaaagtccatcttggtgaaccaatgagttttatgggtgttaattatcaggaatatgagtgagaggttccttataagaccggaagttattctaaagaca

SEQ ID NO: 324 - DNA, 392 bp, Cricetulus griseus
tttgttatgccaaactgtttttctgtcacttaaaaaaatatttctaaggcctatttaaagataacttctgctctgcttcacaatgacttcggaaactcgcttcagtgtttaataagtattgcccttctgaggaaatgttctttatagctgacttaaattacttactctgtagcataaagccatttgtagttttgtcttcagccatcttcttcagagggtaacaattagaagataaccactaagttatcacccattcacattctggagctttatttgcttgtttcttctttacacagagctaaaagttctgaatttctcactacaattcttattcaggagtccactatttaccactgaaattaatataccattaccaggcccttcaattgggc

SEQ ID NO: 325 - DNA, 140 bp, Cricetulus griseus
acacgtacgcccatgcgtccgtccgggacgggtccatacggagttgttcttgatttccgtcgttacttataagggaaacttacacaatgtcgcggaaccctagatgtcctgcagtatgaaggatgatgatgtcctcaagc

SEQ ID NO: 326 - DNA, 319 bp, Cricetulus griseus
gaaaacgttagtccgcttgcaactgtttaaaggtgtagagactttgaagagctgggacctggcatgaggctttccatctctggggacctgtccttaaggggagaaagctcctcacccccttcttttcctttttgcaatcctggccaggaggtaacactttgtttcacaatatattcccatagacgaaacacaatgggctggctgatcatatactgaatcctccaaaaccgtgagcctggttaacctttcttgttaggaagcctatccatcttacacatcatttatagtcatggcaacctgaccggagtcgcgaacattt

SEQ ID NO: 327 - DNA, 582 bp, Cricetulus griseus
  misc_feature (16)..(16): n is a, c, g, or t
  misc_feature (21)..(21): n is a, c, g, or t
  misc_feature (24)..(24): n is a, c, g, or t
  misc_feature (54)..(54): n is a, c, g, or t
  misc_feature (56)..(57): n is a, c, g, or t
cctggagactagcggnacgtncancgacttaggggcactcgctggcaagaatcncnnggaggtacgcccgagggacctcaggaaaccatgcccgaaaccacacagtgaagcagggactgccttcattcagacccagcagctccatgcagctatggctgataccttcctggaacatatgtgccgcctggacattgactccgcacccatcacggcccgcaacactggcatcatttgtaccattggtcctgcctcccggtctgtggagatgctgaaggagatgatcaagtctggaatgaatgtggctcgtttgaatttctctcatggaactcatgagtatcacgcagagactatcaagaatgtgcgaacagccacagaaagctttgcatctgaccccatcctctaccggcctgttgctgtggctctggacacaaagggacctgagatcaggactggactcatcaaaggcagcggcactgcagaagtagagctgaagaagggagccaccctgaagatcaccctggacaacgcctacatggagaagtgtgatgagaacatcctgtggctggactataagaacatctg

SEQ ID NO: 328 - DNA, 579 bp, Cricetulus griseus
tgttatcttttcattcatccactctgtgccttgtcagcctttgaaagtcttagttgctcccaggctgctattctcagggaccttagaaagggacctggttggtcttgtgacagaatgtgtcttctggggcacactcttccaagaatggccttgtcttcattttcattagggaatgctgcttgcagatgttcagtaaaatctaaatggaatgctcattgcactggttccagcaaggggctgccatgagaccaggagaccacacttggtgggccaatcatgtccttcactacagtgccttagattctcccttatatggactctctgaggccttgctcaagcctcgggttctgtggattgggcagcctgtctgggcccttactcaggacccacaacgtcatcctcattctttctgttcacaaacatctcaaagctctttcattgtgaccctgtgttccttgttgtaaatcacagctagctggctagtcccatgaccctcacaatccaaggtggagaactgtgatgcaggtagagagccatgtgatgactaagtacagaacgtcattgaataaatactgtgta

SEQ ID NO: 329 - DNA, 582 bp, Cricetulus griseus
ttactcccacagtttgactctcaagtgccaaagtactctgtgaaagggatagctgggagcaccggtggcctctcaagctacacacaaagaattttggagcagagggaaaatacagactttgggcttgctatattgcaagactcagatgcgttgtggcctcacaaacacaaccaggcacagaaaaaagaagagacgagctctggtccagagaatgtccagacccaaaatccacgttatagcagagaggaactgaattcaatgactcttgatgaagtagaacaactgaatacaaagctccaacagcaaatccaggaagtgtttgaagagttaacacaccaagtccaagagaaagactctttggcgtctgagctccatgtccgccatgttgctatcgagcagctcctcaagaactattccaagttaccatgcctgcaagtgggacgggcaggaccgaggtcacacctgcccataaacaactgaactgaacgtagcgtctgacttttaccctctgttagtctgccaagcatgtgtacctcgaacacatttgaagaaagttatagtccattcttacagtgtgttgga

SEQ ID NO: 330 - DNA, 568 bp, Cricetulus griseus
actttatcaacatcctgcaccgatactataagtcggccttggtgcagatctatgaactggaagaacacaagatagaaacttggagagaggtatacctacaggactcctttaagccccttgtctgcatttctccaaatgccagatcactgagttccccaagccagaattcatgtctaagtctctggaagagctacagattggcacctatgccaacattgctatggtccgtactaccacacctgtctatgtggctctaggcatctttgtacagcaccgagtctctgccctgcctgtggtggatgagaaagaatttggcagcagaaaagacctataacaacctggatatatctgtgacaaaagctctacaacaccggtctcactactttgagggtgttctcaagtgctatctacaggagactctggagactatcattaatagactggtggaagcagaggttcaccgtctggtggtggtggatgagaacgacgtggtcaagggcatcgtatcgctgtccgatatcctgcaggctctggtgctcacaggtggagagaagatgccctgagcgtg

SEQ ID NO: 331 - DNA, 578 bp, Cricetulus griseus
  misc_feature (95)..(112): n is a, c, g, or t
gcaccagttcacctgggtcctgctaggggctgctgggctctgttgggaggtgttttcttctccctgtcctcagccccacccctgcctgtttggcnnnnnnnnnnnnnnnnnnccttttaccactattgaaagcaagtgcccaggaggaaggcggagggtttgggccactcagcctgcaccccacgatgctcgcctgtcaactgtgaaggccacctgcgcccccacctccactccagccactctgctgtcttccagggttggggatcccgcagggtcacctcttcctagccctcagtattgtcagggacaggccctcctggtgagcacagtggcccttttgtctttccccaccagatcactcttgggtctggggcaggggattccactgtcttggatagagacctctggaggttgggtggatggggacgcacctggttgattccctgtccccatcacctacctgcctgtcccttggagggttgacaatcagaatctcctcccaggctgcttatctccttgcgctgggacaggcctgataccattcccacctcccatgggcaaagctgggagacgactct

SEQ ID NO: 332 - DNA, 203 bp, Cricetulus griseus
ttagtatggtcccatgcatcaacagcattggtatcatttgaggaaattattgtaaagtatattttttggtgttgcatgagacatagtgagttaaaaactttggtgctactgttcagcagtctgaaacccagtgatttttcagagtttagcatgaatcagaatcacatgaagacttacgtaagtactggttctcattcctgaaa

SEQ ID NO: 333 - DNA, 345 bp, Cricetulus griseus
  misc_feature (294)..(310): n is a, c, g, or t
tttgttgtttgtttgtttttccaagatagggtgtctatatatggctctggctgtcctatactcactctgtagaccaagctggtattaaaggtgtgggccactattcccagctgtggatgtgtaaaacaaatagcactctctttaatatatatatatacatgcatatgtatgtatatgtgtgtatataatgctcatagaaataatatgatgctcatgttgaaatccagaattgccatctgctttcaaagttaaatgcatgcttagcatttaacttgagaaatttattcctagatnnnnnnnnnnnnnnnnngaaatatattggtgggtatgggaacaaaagactgt

SEQ ID NO: 334 - DNA, 569 bp, Cricetulus griseus
ttgagcccaagagctgcacctacacctacctgctgggtgacccggagtctcgagaggctcttctgatcgaccctgttctggagacggcgcaacgggatgctcatctggttaaagagttggggctgaagctgctctatgccgtgaatacccactgccatgctgaccacatcaccggctcaggggtcctccggtccctactccccggctgccaatcggtcatctcccgcctcagcggagcccaggccgatgtgcatatcgaggaaggtgattccatccgatttggacgatttgccttggagactcgggccagccctggccacaccccaggctgtgtcacctttgtcctgaatgaccagagcatggcctttactggagatgccctgctgatccgagggtgtggacggacagacttccaacaaggttgtgctaggactttgtaccattctgtgcacgaaaagatcttcacacttcctggcaactgtctcatctatccggctcacgattaccacgggctcaccgtctctactgtggaggaagagcggactctgaacccacggctcaccctcagc

SEQ ID NO: 335 - DNA, 577 bp, Cricetulus griseus
  misc_feature (109)..(126): n is a, c, g, or t
gttaggccctgcaggtggaagccaacaggaggccccaggaatttggccagggtatgctgagtcccttctgggggtcatctcctcagcagagttaatttgagctggtgcnnnnnnnnnnnnnnnnnncatcccccttctccagtagacactaaggtctgggagggagccacagcacagggacattcctgccatcactgctgtctctggcaccaccacatccacaccatgggtagctgcttttcaagaactctgaggcaccatgaggactggcctcccgaaggttctcataagctaggtaggtgtgggaggggagacaggtaagcattcagtggcccccaccagggcctcctcggagttcctttgacatctcaacaaggtggtgattggatagtgagggaacagtggcagggatggatctgtggtcacttcatcccactgttgtgtccaccaagggatgaggcaggcagacctggtgagagctggtaaagcatctctggtctccagcgggcacccggctaacctggccttctatgcctgttgcttcttgggactcacagtgggcgggtatgggtgcctt

SEQ ID NO: 336 - DNA, 578 bp, Cricetulus griseus
gaacgaggacggactgccatgaaggcctcaggcacgcttcgggagtacaaggtggtggggcgctgcttgcccaccccgaagtgccacacaccacctctttatcggatgcgcatcttcgctccaaaccatgtggwggccaagtcgcgattctggtatttwgwgyctcagctgaagaaaatgaagaagtcatccggggagatagtytattgcggacaggwgtywgagawatcaccgcttcgtgtgaagaacttcgggatttggttgcgctatgactccagaagcggcacccacaacatgtacagggagtaccgggacctcaccacagcaggcgctgttacccagtgctatcgagacatgggggcccggcaccgtgcccgtgcgcactcaatacacataatgaaagttgaggagatcgcagccggcaagtgccgaaagccagctgtgaaacaattccatgactcgaagataaagttcccgctgccccaccgtgtgttgcggcgccaacacaagcctcgattcaccaccaagaggcccaatacattcttttagaccacagaataaagtcctgcctggcttgt

SEQ ID NO: 337 - DNA, 566 bp, Cricetulus griseus
ttttgattggctgtgtttttctgtaaatggtctctgttgcatagagaagtttcattaataaggggtgaggactatactttatttgtgggtgtaagggcaaatatttagaatgtagttaargattatgctggcttagtaaagtggtggttatagatcttcctcccccccccaagatccatgactttgctargtttggtttgttgtttgttttcaaatatttttaaattacatttagttatttattgtgtgcttgtgtatgtgtctggacttcagtgccacagtgcacctgtaaagatcagaggacagctctcaragatctgttctctccttcctccttgtgggtcccaaggattgkactcatgttgttaatcttgacaagwctttattccctgagccatctcactggctctaatgcaatttatttatcaatgacacattatgtctatgtatttatgcasatatwaaattggctacacaaacactakctgccttttactcaaaaatctatttcatgatcatgaaagctttttgctgagcaatggcggcatatgcctttactcccacca

SEQ ID NO: 338 - DNA, 637 bp, Cricetulus griseus
  misc_feature (55)..(69): n is a, c, g, or t
ctagcactgcccgcagcttcctggcctaagtgcgtctgcccacccagaacaactnnnnnnnnnnnnnnntctagcaatggccttcgcaaatctgcgcaaagtgctcatcagtgacagcctggacccctgctgccggaagatcctgcaagatggagggctgcaggtagtggagaagcagaacttgagcaaggaggagctgatagccgagctgcaggactgcgaaggccttattgtccggtctgccactaaggtcaccgctgatgtcatcaatgcagcagakaagctccaggtggkgggcagggctggcacaggcgtggacaacgtggatctggaggctgccacgaggaagggcatcctaktcatgaacacccctaatggaaacagcctcagcgccgcagaactcacctgtgggatgatcatgtgcctggccagacagattccccasgcaacagcttcgatgaaagatggcaaatgggaccggaaaaagttcatggggacagagctgaacggaaagacactgsgaattcytggcctgggcagaatyggaagagasgtggccacccgaatgcagtcctttgggatgaagactgtaggctatgaccccatcatttctccagaggtggcgggctcctttgga

SEQ ID NO: 339 - DNA, 853 bp, Cricetulus griseus
ctaatgaccaggtgaccaaggatgctgcagaagctataaagaaatacaacgttggtgtcaagtgtgcgaccatcacccccgatgagaagagggttgaggagttcaagttgaaacaaatgtggaaatcaccaaatggcaccatccggaacattctgggtggcactgtcttcagggaagctattatctgcaaaaatatcccccgactggtgacaggctgggtaaagcccatcatcattggtcgtcatgcttatggagaccaatacagagcaactgattttgttgttcccgggcctggaaaagtagagataacctacacaccaaaagatggaactcaaaaggtgacatacgtggtgcataactttgaagaargtggcggtgttgccatgggcatgtacaacgaggataagtcaattgaagattttgcacacagttccttccagatggctctgtctaaaggctggcctttgtatcwmagcaccaaaaacactattctgaagaagtacgatggacgtttcaaagacatctttcakgagatctatgacaagcaatacaaatcccagtttgaagctcagaagatctggtatgagcataggctcattgatgacatggtggcccaagctatgaaatcagagggaggctttatctgggcctgtaaaaactatgatggcgatgtgcagtcagactcagtagcccaaggttatggttcccttggcatgatgaccagtgtgctgatttgtccagatggtaagactgtagaagcagaggctgcccatggcactgtcacacgtcactaccgcatgtaccagataggacaggagacatccaccaaccccattgcttccatttttgcttg

SEQ ID NO: 340 - DNA, 624 bp, Cricetulus griseus
  misc_feature (608)..(608): n is a, c, g, or t
acgctgctccctccttcagaatgtcatacccaggctatccccctacmggsyrsysacctktccctgsmtatcmkcctgcaggtcaggagtcatcctttccccctccgggtcagtatccctatcccagtggctttccaccaatgggaggaggtgcttacccaccagcaccaagtgtcggctaccccggggctggaggctatgctacacctggaggttatccagcccctgggggctatcctgttagcccaagtccagggggtgttccagtctatccgggaggacaaggctttggagccccacctggtggagcaggcttttctggctatccacagccacctgcacagtcttatggtggtggaccagcccatgttccagtaccaggtggctttcctggaggacagatgccttctcagtaccctggaggacatgctccttaccctagccagcctgctgcgatgactcagggcacccaagggacaatcccgagcagcctccaactttgatgctatgagagatgcagaaattctccgcaaagcaatgaagggatttgggacagatgagcaagcaattgtggatgttgtgtccagccgttccaatgaccagaggcnacaaattaaaacagct

SEQ ID NO: 341 - DNA, 579 bp, Cricetulus griseus
tactgccgcttctagtagtttccaggcgctgccgggcggctgggaccgagcggtcctgaggctgtggctgcggctgcttgggagctggtagcggcgcgaagtgtgagctgatggccaagtggggtgagggagacccacgctggatcgtggaggagcgggcggacgccaccaacgtcaacaactggcactggacagaaagggatgcctcaaattggtccacagaaaagctgaaaactctattcctggcagttcgagtagaaaatgaggagggcaaatgtgaggtgacggaagtgaacaagcttgatggagaggcgtccattaacaaccggaaaggcaaactgatcttcttttatgagtggaccatcaaattaaactggacaggtacctctaagtcaggagtgcaatacaaaggacatgtggaaatccccaatttgtctgatgaaaacagtgtggatgaagtggagattagtgtgagccttgccaaagatgagcctgacacaaatctcgtggccttaatgaaggaagaaggggtgaaacttctaagataagcagtggggatttacatcagcaccctcaata

SEQ ID NO: 342 - DNA, 579 bp, Cricetulus griseus
ggcagcttgtgaggttttgtgtggtctcgtcgccagcacagccgggcctacaggcaagcaaccatgtctaarggacctgcagttggtattgatcttggcaccacctactcctgtgtgggtgtcttccagcatggaaaggtggagataattgccaatgaccagggtaaccgaaccacgccaagctatgttgcttttactgacacagaacgattaattgggtggagaagactttgataacagaatggtcaaccatttcattgctgagtttaagcgaaagcacaagaaggacatcagcgagaacaagatagctgtcaagcgtctgcgtactgcctgtgaacgggcaaagcgcaccctctcctccagcacccaggccagtattgagattgattctctctatgagggaattgatttctatacctccattacccgtgctcgattcgaagaattgaatgctgacctgttccgaggcactctggaccctgtagagaaagcccttcgagatgctaaactagacaagtcacagatccatgacattgtcttggtggggggttccaccagaatccccaagattcaaaagct

SEQ ID NO: 343 - DNA, 665 bp, Cricetulus griseus
  misc_feature (565)..(565): n is a, c, g, or t
agtgggcggtggacgcagagccgggctcggcggcttctgcgtctctatggtcggaggtgggcggctttccctgagtggctgctgaagccgrakctcggacgggatgtttcgtctcaacgccctttctgcattggcagaactagctgtgggctctcgatggtaccatggggtatctcagcccgcacagaccaaacgaagactgatgatggtggctttcctgggagcatccgcagtgactgccagtactggtctcttatggaagaaggctcatgcagagtctccgacttgtgtcaacagcaaaaagactgatactggtgataaagggaagactaaacaccaagaggaagtctccaaccatgaggaaagggctgcagatgctgggaccgagtcttacccagaagaraagaagaagaagcgttctggattcagagacagaaaagtgatggagtatgagaatcggatccgagcctactccacaccagacaaaatcttccgatattttgccaccttgaaagtaatcaatgaacctggagaaacagaagtgtttatgaccccacaggacttngtgcgatccataacaccaaatgaaaagcaacctgaacacttgggcctggaccagtatataataaagcgcttttgatggaaagaaaattgcccaggaacga

SEQ ID NO: 344 - DNA, 855 bp, Cricetulus griseus
gcctcccagcgccgagcggagctgcggaggagaaagctgctcatgaactccgagcagcgcatcaaccgcatcatgggctttcacaggcccgggagcggcgcggaagaagaaaatcaaacaaaatcaaagccccaggacagtgacaaactgaactcccttggtgttccttcagtttcaaagagggtagtgctcggtgattcagtcagcggtggaacatctgaccagcccagtggtgtggcagaagttaagggtacccagctgggagacaaattggactcattcattcagccaccagagtgcagtagtaacgatggtgtggagctccggcagcggagcagaggtgacccgacagcaggctcggcccagagggcttctcaccatggcctagaacagtacctgtccagatttgaggaagcgatgaaactgcgcaagcagctgatcagtgagaagcccagccaggaagatggaagtacaacagaggaattcgactcttttcgaatattccgattggtggggtgtgctcttcttgctcttggcgtcagagctttcgtctgcaaatatttgtctatattcgctccatttcttactttgcaacttgcgtacatgggactatacaaatattttcccaagggtgagaagaagataaagaccacagtgctgacagctgcgctgttgctatctggaattcctgctgaagtgataaatcggtccatggagacctatagcaaaatgggtgaagtcttcactgatctctgtgtctactttttcacttttattttttgtcatgaactgcttgattattggggttcagaagtaccctgaaacctgaagaactgagaacaagtttacaaagtg

SEQ ID NO: 345 - DNA, 495 bp, Cricetulus griseus
cgcggaggccgcacgatgcctggagtcactgtaaaagacgttaaccagcaggagttcgtcagagccctggcagccttcctcaaaaagtccgggaagctgaaagtccccgaatgggtggacacagtcaagctggccaaacataaagagcttgccccctatgatgagaactggttctacacacgagctgcttccacagcacggcacctgtacctccgcggtggtgccggggtcggctccatgaccaagatctacggaggacggcagagaaacggtgtcagacccagccacttcagcagaggctccaagagtgtggcccgccgcgtcctccaagccctggaggggctgaagatggtggaaaaggaccaagatgggggccgcaagctaacacctcagggacagagagatctggacagaattgccggacaggtggcagctgccaacaagaagcattagaacaaaggatgctgggttaataaattgcctcattcataaaaa

SEQ ID NO: 346 - DNA, 747 bp, Cricetulus griseus
  misc_feature (300)..(333): n is a, c, g, or t
tatccccacccccctttttgtcctggaaatctggaaagcctgctttgtgggactcattgagtcccctgaaggtactcaggagctgaagtggacggctttcacctatctcaagatcccacaggttttggtgaagttgaagaaacacctacatggagaaaaggacttcactgaggatgtcaactctgcttttgagttcctgttgaagctcacgcccttgttggacaaagctgaccagcgctgcaattgtgactgcacaaatttcctcctccaagaatgcaacaagcagggacttctgtctgnnnnnnnnnnnnnnnnnnnnnnnnnnnnnnnnnnaacagatcgggacccccagctaaaatcatcagaaaatgccaacatccagcctaaccctgggctgatcctccgggcagagcccaccgtcacaaacattctcaagacgatggatgcagaccactccaagtccccagagggactgctgggggtcctgggacacatgctgtccgggaagagcctggacttgctgctggctgssgckgctgccactgggaagcttaagtcctttgcccggaaattcatcaaggcaggagctgcagctgatctcacttctgccacagccaccgctacctcttcggaagggccaggaaggagggtgaggctgtgccatgaaacctcacccagtagctgccgagaacccccgcaacccctcatcgctggagccggagatgggagaagaagagtaacagagag

SEQ ID NO: 347 - DNA, 610 bp, Cricetinae gen. sp.
cgctgctgcgtccgcagccatgagtatgctcargctacagaagaggcttgcctctagcgtcctccgttgtggtaaaaagaaggtctggttggaccccaatgagaccaatgaaatagccaatgccaactcccgtcagcagataaggaagctgatcaaagatgggctgatcatccggaagcccgtgactgttcattcccgggcccgatgccggaaaaacactttggctcgacggaagggcaggcatatgggcatagggaaacggaagggtactgccaatgcgagaatgcctgagaaggtgacctggatgcgaaggatgcggatcctgcgtcgacttctcaggagataccgggaatccaagaagattgaccgccacatgtaccatagcttgtacctgaaggtcaaagggaatgtsttcaaaaayaagcggattctcatggagcacatccacaarctgaaggcagacaaggcccgcaagaagctcctggctgaccadgctgargctcgcaggtctaagaccaakgaagcacgaaagcgccgkgaggarcgyctccargccaagaaggaggagatcatcaagactctgtccaakgaggaagagaccaagawataa

SEQ ID NO: 348 - DNA, 953 bp, Cricetulus griseus
tgtctgtgtcgcccataccagaccacgcggctgttcgcccgacgctgctcatcgtgcattagcggtcccaaaaagttcaaagtccaagatggcaacactcaaggaccagctgattgtgaatctacttaaggaagaacagaccccccagaacaagattacrattgttggggttggtgctgttggcatggcttgtgccatcagtatsctcatgaaggacttarcakatgascttgcccttgttgatgtcatggaagacaagctgaagggggaaatgmtggatctccagcrtggcrgscttttcctcaraacaccaaaaattgtctctggcaaagactatagtgtgacagcaaactccaagctggtcattgtcacagcgggggcccgtcagcaasagggagagagccgactcaatctggtccarcgaaacgtgaacatcttcaagkksatsattcccaacgttgtgaaatacagtccagactgcaagctgcttattgtttcaaacccagtggatatcttgacctacgtggcttggaaaataagtggctttcccaaaaaccgagttattgggagyggctgcaatttgsatyctgcycgatyccgttatctgatgggagaaaggttgggtgytcacccactaagctgtcatggatgggtcctakgggagcatgsagactccagtgygcctgtgtggagkggasygaatgtagcyggtgtctccctgaagaatctsaatccagagctgkgcactgataccgacaaggagcagtggaatgasgttcacaascaggtggttgwcagygcctatsargygatcmmwcygaasggttatacatcctgggccattggtctgtctgtggctgacttggccgagagcataatgaagaatcttaggcgggtgcatcccatttctaccatgattaagggtctctatggaatcaaggatgatgtcttcc

SEQ ID NO: 349 - DNA, 581 bp, Cricetinae gen. sp.
  misc_feature (471)..(489): n is a, c, g, or t
accatggaggctgtgccggagaagaaaaagaaggttcctgctgtgccagaaacccttaagaaaaagcgaaggaatttcgcagagttgaaggtgaagcgctttcggaagaactttgctttgaakacactgcggaaggcgcggaggaagcksrtkkrtgaaaaggcaaagcattaccacaaggaatacaggcagatgtaccggacagagattcscatggctaggatggcarggaaagctggaaacttctatgtgcctgcagaacccaaactggcatttgtcatccgaatccgaggtatcaatggtgtaagcccaaaggtccgcaaggtgttgcagctgctccgtcttcgycagatcttcaatggcacctttgttaagctcaacaaggcttcrattaacatgctgaggattgtggaaccatacattgcatgggggtaccccaacctgaagtcagtmaaygagctcatctacaannnnnnnnnnnnnnnnnnnaataagaagagaattgccttgacagacaattccttgattgctcgatctcttggtaaatacggaatcatctgcatggaggatctaattcatga

SEQ ID NO: 350 - DNA, 483 bp, Cricetulus sp.
  misc_feature (345)..(345): n is a, c, g, or t
atctgagttgcagctggtggcgcagcgcatccgcagtttccccgacttccccatccccggcgtgctgtttagggatatctcgcccctcctgaaggaccccgcctccttccgagcttccatccgcctcctggggaggggaccttaagtccacgcatggcggcgagatcgactacatcgcaggcctagactccaggggattcttgtttggcccctccctagctcaggagctgggcctgggctgtgtgctcatccggaagcgagggaagctgccaggccccacagtgtcagcctcctatgctctcgagtatggcaaggctraactagaaatccagaaagacgccttanaacctggccagaaagtggttgttgtagatgatctcctggccactggaggaaccatgtgcgctgcctgtgagctgctgggccatctacaggctgaggtggtggagtgtgtgaccctggtggagctgacctcacttaagg

SEQ ID NO: 351 - DNA, 532 bp, Cricetulus griseus
caggagcaggccaggtagcccagccttggccccaggagtctgaggagcagagaaccgctggaggcaggccccggcgtcggagggacttgggcagccgtctacaggcccatcgtcgagcccagcgagtggcctgggcagaagtggatgagaatgaggatgaagctgttattccagcccaggaggaagaaggtgttgagaagccagcagaaactcacccaacagggaaaattggagccmagaaaytacggaaactagaggaaaaacaggctcgmaaagcccagcgtgaggctgaggargctgaacgtgaggaacggaaacgcctmgagtcccaacgtgaggctgaatggaagaaggaagaggagcgrcttcgcttgaaggaagarcagaaggaggaggaagaragaaargctcgggaggagcakgcccggcgggagcaygaggartacctraaactgaaggaggccttcgtggtagaagaggaaggygttagcgaaaccatgactgaggarcagtctcacagcttcctgrcaga

SEQ ID NO: 352 - DNA, 680 bp, Cricetinae gen. sp.
gccgcgctccctgagggatggtactgaatttcgccgccacaggagcccggctggagcgcccgccccgcggcctcgcctccctgccgagcttccagcgcctcgggacgcgatgaggacctgggcttgcctgctgcttctcggctgcggatacctcgcccatgccctggccgaggaagccgagataccccgagagctgatcgagcggctggctcgaagtcagatccacagcatccgggacctccagcgactcttggagatagactccgtagggrctgaggatgccttggagacaagcctgagagcccacaggtcccaygccattaagcatgtgccsgagaagcggcctgtgcctattcgcaggaagagaagyattgaggaagccatycctgcagtttgcaagaccagracggtcatttacgagatacctcggagccaggykgaccccacatcggccaacttyctgatttggccyccrtgtgtggaggtkaarcgctgcaccggctgctgcaataccagcagygtcaagtgccagccctcaagggttcaccaccgtagtgtcaaggtggccaaagtggagtatgtcaggaagaagccaaaattgaaagaggtccaggtgaggttagaggaacacctggggtgtacatgtgcgacctccaacctgaacccagaccatcgggagg

SEQ ID NO: 353 - DNA, 502 bp, Cricetinae gen. sp.
ttgctcctttctttgccccgggtccggtcktgtyyrgctctttcagcatgcctgggtcacttcctttgaatgcagaagcttgctggccaaaagatgtgggaatcgttgcccttgagatctactttccttctcaatatgttgaccaagctgagttggaaaaatatgatggtgtagatgctgggaagtataccattggcctgggccaggctaggatgggcttctgcacagatcgagaagatatcaactccctttgcctgactgtggttcagaatctgatggagagaaatagcctgtcctatgactgcattgggcggctagaagtcggaacagagacaatcatcgacaagtcaaaatcagtgaagtctaatttgatgcagctgtttgaggagtctgggaatacagatatagaaggaatagatacaactaatgcatgctatggaggcacagctgcagtcttcaatgctgtgaactggattgaatccagctcttgggatggwmkgta

SEQ ID NO: 354 - DNA, 623 bp, Cricetinae gen. sp.
  misc_feature (525)..(543): n is a, c, g, or t
tctctgtataagaatcagactaaagtagttgaggctccaaaggatgctgtaacaataagcgacacacttactgaagaaaaacaaagtattattctagaaattattcacaaggtctcttttcctccktgyagcwcgrscascgtascsatcaygaatgacacagtaacgatccggaccaggaagttcatgacwaamcgtmtgcttcagaggaaacagatggtcattgatgtccttcaccctgggaaggcaacagtaccaaagacagaaattcgggaaaarytrgccaaaatgtacaaaaccacrccagaygtcatctttgtgttcggattcagaacccactttggtggyggcaaaacgactggcttcrgcatgatctatgattctctagattatgcaaagaagaaygagcccaaacacagacttgcaagacatggcctttatgagaagaaaaagacrtcccgaaaacarcgwaaggaacgcaagaacagaatgaagaaggtcaggggractgcaaaggccaacgtnnnnnnnnnnnnnnnnnnnaaggagtagatctrcggtgacttgatctgctgtggtgtgcagatttccgagaggacaaataaactaaacatttatgtatc

SEQ ID NO: 355 - DNA, 547 bp, Cricetulus griseus
ggtggagaagtctggagacgacgttcakaaatggcacctcgcaagggaaaggaaaagaaggaagaacaggtcatcagcctcggacctcaagtggctgaaggagagaatgtatttggtgtctgccacatttttgcatctttcaacgacacctttgtccatgttactgatctttctggcaaggaaactatctgccgggtgactggtggaatgaaggtaaaggctgacagagatgagtcttctccttatgcagccatgttggctgcccaggatgttgcccagaggtgcaaggagctgggcatcactgccctgcatatcaaactccgagctacgggaggaaacaggaccaagacccctggacctggagcccagtcagccctcagagctcttgctcgttcagggatgaagattgggcggattgaggatgtcacccccatcccctctgacagcacccgaaggaagggtggtcgtcgtggtcgccgtctgtgaacaggacttctcaaattattttctgttaataaattgctttgtataagctaaaaaaaaaaac

SEQ ID NO: 356 - DNA, 466 bp, Cricetulus griseus
  misc_feature (291)..(307): n is a, c, g, or t
ccgggacgcgtgcgagatgggccgcgttcgcaccaagactgtgaagaaggcggcccgggtcatcatckagaagtactacacgcgcctgggcaatgacttccacaccaacaagcgcgtgtgcgaggagatcgccattatccccagcaaraarctccgsaacaakatagccggctatgtcacgcatctsatgaagaggattcasagaggtcctgtgagaggcatctctatcaagttgcaggaggaagacagagagaggagagataattatgttcctgaggtctcagccctagnnnnnnnnnnnnnnnnngtggatcctgacaccaasgaaatgttgaagcttctggactkcggcagtstctccaacctgcrggtsactcaksctacagktgggatgaattkcaaaacaccacgtggagccgtttgaatctgttctgtcagatkttcaataaacctgaaaaccacaaaa

SEQ ID NO: 357 - DNA, 565 bp, Cricetulus griseus
  misc_feature (96)..(110): n is a, c, g, or t
  misc_feature (216)..(241): n is a, c, g, or t
aagtcccgcagagctgagcggccaagatgtgtgacttcaccgaggaccagaccgcagarttcaaggaagctttccagctgtttgaccgaactggcnnnnnnnnnnnnnnntacagccagtgtggggacgtgatgagggccctgggccagaaccctaccaacgccgaggtgctgaaggtcctggggaacccaaaagtgatgagatgaatgtgaaggnnnnnnnnnnnnnnnnnnnnnnnnnncatgctgcagactgtggccaagaacaaggaccaggggacttatgaggattatgttgaaggccttcgtgtgtttgacaaggaagggaatggtaccgtcatgggtgcagaaatccgtcatgtccttgtcacactgggggagaagatgacagatgaggaggtggagatgctggtggcaggacatgaggacagcaacggttgcatcaactatgaagagcttgtccggatggtgctgaatggctgaggacatttccatattgcaagccggtgccttgcccagagtgagatttctatgctatgtggcccctcctaggctcccttatcaca

SEQ ID NO: 358 - DNA, 499 bp, Cricetulus griseus
  misc_feature (497)..(497): n is a, c, g, or t
gcggtagcagcttcggcgtccgcggtttagtcgccaacatgcagctctttgtgcgcgcccagggtactacacacactcgaggtgaccggccaagagacggtcgctcagatcaaagctcatgtggcctcactggaaggcatttccccggaagatcaagtcgtgcttttggctggctcgccgctggaggatgaggccaccctaggccagtgtggcgtagaggccctgactactctggaagtagctggtcgcatgttgggaggtaaagttcatggttccctagctcgtgctggaaaagtgagaggtcaaactcccaaggtggccaaacaagagaaaaaaaagaagaagacaggtcgggccaagcggcggatgcagtataacccgtcgctttgttaacgtggtgccaacctttggcaagawkaarggccctaatgctaattcctaagtccttctgtgattcttgcactctaataaagccactttgcccaraaaaaaaaaanaa

SEQ ID NO: 359 - DNA, 1212 bp, Cricetulus sp.
gcaggaccatggttgagcgcgccagcaagttcgtgctggtggtggcgggctcggcgtgcttcatgctcatcctgtaccagtacgcgggyccggggctgagcctgggcgcgcccggtggccgtgcgccacccgacgacctggatctcttccccacgccggacccacattacgagaaaaagtactacttcccggtgcgcgagctggagcgctcgctgcgcttcgacatgaagggcgacgatgtgatcgtcttcctgcacatccagaagaccggcggcaccaccttcggtcgccaccttgtgcagaacgtgcgcctcgaggtgccctgcgactgtcggcccggccagaagaagtgcacctgctatcggcccaaccgccgcgagacgtggctcttttctcgcttctccaccggctggagctgcggactgcatgctgactggaccgaactcaccaactgtgtgcccggtgtgctagaccgccgcgacccagcaggtytgcgttcgcccaggaaattytactacatcaytytastgcgagacccagtatcccgctacctgagtgagtggcgacatgtacagcgtggagccacgtggaagacctcactgcacatgtgtgatgggcgcacaccaactccagaggagctgccgccctgctacgagggcacagactggtcaggctgcacgctgcaggagttcatggattgcccttacaacctggccaacaaccggcaggtgcgcatgctggctgacctcagcctggtgggctgctacaacctgtccttcatccccgagagcaagcggscscagctgctgctggagagcgccaagaagaacctgcgcggcatggccttcttcggcctcaccgagttccaacgcaagacgcagtacctatttgagcggacgttcaaccttaagttcatccggcccttcatgcagtacaacagcacgcgggcgggcggtgtggaggtggatgaggacaccatccggcacatcgaggagctcaacgacctggacatgcagctgtatgactatgccaaggacctcttccagcagcgttaccagtacaagaggcagctggagcgcagggagcagcgcctgcgcaatcgcgaagagcgcctcctgcatcgctccaaggaggcactgccacgggaggacacggaagagccaggtcgcgtgcccaccgaggactacatgagccacatcattgagaagtggt

SEQ ID NO: 360 - DNA, 2725 bp, Mesocricetus auratus
  misc_feature (2113)..(2131): n is a, c, g, or t
gatatcaagactagccttgtctacatagggagtgcggattaaagaatagccttacatttaagtgtgaaagatcttaaataagtaaataaacagattcatgtatgttttctgttgcttagataaatgggacaactcaaatttcaaagagtctgtgaaattatctcttattaatacaaaaaggcaaattcagatgtatgtatgctttgaacatatatattgaatatggcctctctatgtatccatcatttctgaaatgatttttcaatgtccagtaaagtgatttccctaagggaggtaggttaaaatttggacaagatgttaagtgtctgttcttttaaatacacataaacatctaattttcaataaaagttgcttaggatttaaatatcccaacattaggaagttaaatgtagacttcctgactttaaaattataccaaatattaattttaaaggaaaatgctattcttcatctgtaaacagtcattgtctttcctgaatgaatcttatgagaaaattattgattattttatcaaatatcaaagcaatgagtttattacaattttccaaagttgtgccagatattaacaatccaagactaatgtttgtatggctgaatgaaaacaatccttagcagcaaacagttttcaatcagaaagcacaaaattaacatgtctgatggaaggctatgcatatgccaagataatccaaaatggttcatatgccacaatcagctctgaaaactataatgagcctgaacaggaacttctgcctgctatttataaaagctaatcaggagttgtacaattatgtaattttggtttgccttttcaagttaccagaaattttgataggaggcatcacccaaacaccccacctctcttgattggcatcacactcattaccaaataagataatacggtggtttgtatttctacttttacccctagctccatcgtgggtgtgtgaagtatatgctggcatctagcactttcctacagactcaatgcttagctttttctgacctcactcttgttcaggccttgaacatgacgttcagccttgtatgcaggttccatttgccctcacaagcatttgcttgtaatgataacaattcagactggggtgagatggaatctcaatgtaactttttgtttttatttctctgatccctaaagcttttgaaaagaattttatatatttaatggtcatttgtacttcattttctaagaatcatcagttcacctcatttttccatttgttgatttgagttgtttacatgttttgatttaacctttttgttcttcatgtattcagtcatctagtatgaaattatgggttgatataacattaaccgttgactatttatgcctatctaatggtaaagcaagattaaaattgatatattcattccctgggaaacataactctattgtactttatacttgagaaacagattatgttaagtctactgcatttgtttgtgaacaggtgaacactgaaaataaccttgtgaacgtgtggtgtaatgctttggatttaagccttcctggcactagctcatttgagctttagaaagtcaaaggctgtgtatgttttcccccttgtcctctgagagctgcttctcagcttacagttagaggatatgctctacttaacattgctgtgactttcagttctttatctattgaaaaggcctgccatatgacacaattgtgatgctattggagttcaagaaagttttaaattcttataaggggtaatcctgtatacagaaatacagataaagaagttttgtaaatattcatggaaacttctactgctttgttattccttttcttaaatattatattcattgagaatttcataatacatacacatacataaataaagtgtattctgatcatattcagcccatacttctctcctaaatcctcacctccaagatccatcatcacaccctacctcccaacttcattctcttattttaatagtcacccactgagcctagtttgtgctgctcacatacgtgtatatgtgcagctgtccactagagtgtggttgatgtacaagctgcacccttaaagaaaattgactcaatggcagcacacatnnnnnnnnnnnnnnnnnnntaggcagaggcgggcgagtctctgtgagtttgaggccagtctggtatacaaagcaagttccagaacagtcgcaggtacacagagaaaccatgtctctaaaaacacacataaaacaaaacaaacaataaagaaaagtgtctctacctcttaatcatgaactatcaatatctccccagctaggggtaggggctcatgaccccctccacttccatgctggaatgttaattgagcaggtattatgaagtcttgtgaagacagccacagatgctgtgagtaggtgagtgtagtggtcctgtcctgtctaaaagacactgttagttgaggagatttcacttaaaatcttctcctcatatatgcaagaaaatattctaggaaacgtatttgactggataagatttatttgtctggactattcacctttgtggagttattggatgtatattataaaaggtggaggaaaagttgttaatcaccatcaagcaatgactatcttttttatcactattataggcactgctataaactttgcaaggttttgcattggattggatttcatatactgccttttcagtagcacccaaacttcttactagt

SEQ ID NO: 361 - DNA, 1640 bp, Mesocricetus auratus
ggatcctgggtgtcactgaaacagtctggaaagcagtggggcagccatggyactgctgattggagatggcctgtggtctggggtcatattcacggccctcttcctgcttctggtggacctgatgcaccgacgcaagttctggagggcccgctaccctccaggycctatgccactacctggactgggcaacctgctgcaggtggacttcgagmacatgccatatagtttatacaagttccaacagcgctatggagatgtgttcagcctgcagatggcctggaagcctgtggtggtratcaatggactgaaggcagtgcgggaagtgctggtgaactgtggagaggacaccgctgaccgycctccagtgcccatctttaatcacstgggytwcsggcmyaamtctcaaggtgtggyrtttgcacgttatggaccccagtggagagagcagcgtcgattytstgtgtctaccatgcgagacttcggcgtgggcaagaagtcactggarcagtgggtgacagaggaggctggccacctctgtgacgcyttcacccaggaggctggrcatccctttaatcccaycaccctcctgaataaaagtgtatgcaatgtgatttcatccctyatttatgcccatcgcttcgactatgaagaccctttcttcaacaagctgctcaaraygttacaggaaagytttggagaggacwctggcttcattgctgaggtgctgaacgcagtcccagtgctgcttcggatccctgggctgccaggcaaagccttccccaagctaaccgcattcatggattccctatataaratgytgattgagcacaagacaacctgggatcctgcacagccaccccgaggtctgacagatgccttcctggctgaggtggagaaggccaaggggagacctgagagcagcttcaatgatgagaacctgcrtrtggtggtrgctgacmtgttcattgcaggratggtgaccacstcaaccacactgtcctgggccctgctattgatgatcctgcacccggatgtgcagagccgygtscaacaggaaattgacgatgtcatagggcaggtgcggcgtccagagatggcagaccaggcccgcatgccctacaccaatgctgtcattcacgaggtgcagcgattcggrgacattgccccagtgaatrtaccacatatgacatcccrtgatgtcgaagtacagggtttcctcatccccaaggggacgaccctcatccccaacctgtcctcagtgctgaaggatgagactgtctgggagaagcccctccacttccatcctgaacacttcctggatgcccagggccgctttgtgaagcasgaggccttcatgccattctcagcaggccgcagagcatgtctgggggagcccctggcccgcatggagctcttcctcttcttcacctgcctcctgcagcgctttagcttctcggtgcccgctgggcagccccggcccagcgaccaaggcrtcttcgccttgcctgttaccccgaccccctacgagctctgtgcagtcgtgcgctagcaaggacagcagctccatcctcctccccagctcgtgctgcgtgatgtccaataaaccagacctgtggctgtcamwmaraaaaaaaaaaaaa

SEQ ID NO: 362 - DNA, 1682 bp, Mesocricetus auratus
gcctcctcggattcctgcagggctccagacacctswtsccakstgcctstrytgagcttcwsawygywcyacwcaggaagcctggggagcagtgggacagccatggagttgctgactgggcatggcctgtggcctgtggccatgttcacggtcatcctcatattactggtggatctgttgcaccggcgccaacgctgggcttctcgctacccaccaggccctgtgccattgcctttgctcggcaacctgttgcaggtggacctcaagaacatgcagtacagcgtgcacaagctccaacaacactatggcgacgtgttcagcctgcagatggcctggaaacatatggtcatgatcaatggactgaaggcagtgcgggaagtgctggtgaactatggagaatacactgcagaccgcccaaaaatacccatctatgaacatgggagtttgggtcccaaagcaagaggtgtgattcttgccccttacgggcctgagtggagagagcagcgacgattctctgtgtccaccctgcgcaacttgggcctgggcaagaaatcactggagcagtgggtgacagacgaggctggccacctctgtgacgccttcaaggaccaggctgggcgtcccttcaatcccagcacgctgctgaacaaggctgtgtgcaatgtgatcacgtccctcatttttgctcgccgcttcgagtatgaagacgctaacctcatcaggatgctgagactgctggaggaagctctgaccaacatctctggcttcattcctgagattctgaacacattcccagtgctcctgcacatcccagggttgtttgacaaggtgttctctgggcaaaagaccttcgcggccatagtggataacctgctgactgagaacaggaggacctgggaccctgaacagccaccccgaggccttactgatgccttcctggcagaaatggaaaaggccaaggggaatcctgagagcagcttcaatgatcagaatctgcgcatggtggtgaatgacctgttcattgcagggacagtgagcacctcaacaacactgtcctgggccctgctgttcatgatccagtacccagatgtgcagcgccgagtccaacaggagatcgatgacatcttaggaccggggagaagcccagagatggcagaccaggcccgcatgccctacaccaacgctgtcattcatgaggtgcagcgctttgcagatattgccccactgaacttgccatgcatcacatcccgggacattgaagttcagggattcctcatccccaaggggacgaccctcatcaccaacctgtcctcagtgctgaaggacgagaccgtctgggagaagcccctccatttccatcctgaacacttcctggatgcccagggctgctttgtgaagcaggaggccttcatgccattctcagcaggccgcagagcatgtctgggggagcccctggcccgcatggagctcttcctcttcttcacctgcctcctgcagcgctttagcttctcggtgcccgctgggcagccccggcccagcgaccatgtagtcttaggtgttttgaaaagcccagccccctaccagctctgtgcagttcctcgctagcaggacaccaattcaatccaccctagctttgtctgatcctcccacagtaaaacagttttgtgactgtcaaaaaaaaa

SEQ ID NO: 363 - DNA, 3199 bp, Mesocricetus auratus
  misc_feature (1835)..(1850): n is a, c, g, or t
  misc_feature (2044)..(2072): n is a, c, g, or t
  misc_feature (2184)..(2209): n is a, c, g, or t
gaggctcacctgggcgccgcctccgggccgcaggtggagcgggcrgcsgcscrgscaccatgagcagcggcgccaacatcacctacgccagccgcaagcggcgcaagccggtgcagaaaacagtgaagccagtccccgctgaaggaatcaagtcaaatccttctaagcgacatagagacaggctaaacacagagttggaccgcctggctagtctgctgcccttcccacaagatgttattaacaagctggacaaactctcagttcttaggctcagtgtcagctacctgagggccaagagcttcttcgatgttgcgttaaaatcctcccccgctgacaggaatggaggccaggagcagtgtagagcgttcagagatssactggacctgcaagaaggagagttcttattgcaggcactgaacggcttcgtactggttgtcacagcagatgccttggtcttctatgcctcctctactatccaagattacctgggctttcagcaatctgatgtcatccatcagagtgtctatgagctcatccataccgaagaccgagctgagttccagcgccagcttcactgggctctaaaccccgcacagtgtacagactctgcacaaggaggggatgaatctcatggcctctcacagcctccggcagtctacttcaacccagaccagcttcctccggagagcgcctccttcctggagaggtgcttcatctgccggctccggtgtctgctggataattcctctggttttctggcaatgaatttccaagggcggctaaagtatctccatggacagaacaagaaggggaaggatggaacactactgcccccgcagctggctctgtttgcaatagccaccccacttcagcccccgtccatactggaaatccgaaccaaaaacttcatcttcaggaccaaacacaaactagacttcacacctattggttgcgatgccaaagggcagcttgtcctgggctacacggaagcggagctgtgcacccgaggctcggggtaccagttcatccacgctgccgacatgctctactgcgcggagttccacgtccgcatgattaagactggggaaagcggcatgacagttttccggcttctggcaaagcacagtcgatggaggtgggtccagtccaacgctcgcttgatctatagaaacgggaggccagattacatcatcgcaactcagaggccactaacggatgaagaaggaagagagcacttacagaagcggagtatgacgctgcccttcatgttcgctacaggagaggctgtattgtacgagatctccagccctttccctcccataatggatcccttgccaatccgtaccaaaagcggcaccggtgcaaaggactgggttccgcagtcaacaccaagcaatgattccctccaccccagctcgcttatgaattgcatgatccaacaggatgagtccatctatctctgtcctccttcgagtgctgcgccgctagacagccattttctcacccacgggagtgaaggcgatggttggcaggacagtattgcatcaataggaagtgaagctgagttgaaacatgaacaaatcggacatggtcaggacatgaaccctgcagtctctggaggccccccggggctctttccagataatagaaatagtgacttgtacagcatcatgaaaaacctagggatcgatttcgatgacatcaaacgcatgcagagtgaggagttcttcaggactgagctggctggcgaggttgacttcagagacatcgacataacagatgaaatcctcacttacgtgcaagactctctaaacaggtcgaccttgctgagttcnnnnnnnnnnnnnnnncctgtgactcagcacctgagctgcatgctgcaggaacgcctgcatctggggcagcggcagctgcagcagcacgaaactcaggcagcggagccccagcagcagctgggtcatcagacggcgccccagcaagagctgtgtcaccagacggcgccccagcaacagatgtgtcttcagatggcgccccagcaagagcnnnnnnnnnnnnnnnnnnnnnnnnnnnnnctgtgtcttcagatggcgccccagcagcagctgtgtcaccagacggcaccccagcaacagctgtgtcttcagatggcgccccagcaagagctgtgtcaccagacggcgcccnnnnnnnnnnnnnnnnnnnnnnnnnntcatgcgcaagtcaatggcatgtttgcaagttggaaccccacccctctcgtgcctttcagctgtcctcagcaggaactgaagcattatgacgtcttttcagacttgcagggggcgattgaggagttcccctacaaatctgagatggacagtatgccttacacacagagctttgctccctgtaatcagtctgtgctaccccagcgttccaagtgtgcacagctggacttgcctggaaagggtttcgaaccatccctgcaccccaacacttctaatgtaggagattttgtcacttgtttacaagttcccgaaaaccaaagacacgaggtgcatccacagtcggccatggtcgctcctcagacatactatgctggggccatgtccatgtaccagtgccagccaggacctcagcacgtccctgtagagcagatgcagtacagccctgcagtcccagactcccaggcatttctaaacaagtttcagaatcagggagtgttaaatgaaacctattcgtctgaattaaacagcgttggtcacaggcagaccactgctcatcttcatcaccctgcagaagggaggccgtttcctgatatcacacccagcggattcctgtagctttgggaacaagataccgggactgtctgtccatgttggccatcagcactctttttccaagccagattttaatctttgtgttgggaagaggagtttaaaaactgttatcggttacctataaaatgggaagctctgcagsagcatagggagagaccacaagcctttaagtagctttagcacctcagcgtgcacatgcccacarcggagagctttggggttctggagagctgagcgtctccactcagtgaccagccagaaagacaacttcaggattcccgatggtgtaccaaatacagttagaagactaattgattttaacctctctgtgtctcagatgttagaataaatggtttggtgcttttatcaaaaaaaaaaaa

SEQ ID NO: 364 - DNA, 1759 bp, Cricetinae gen. sp.
tcacsctcatcrcmaccatgctggcctcyggactgctcctggtkwctgtgctggccttcctcgtcrtcctgrtcttgatgtctgtctggaagcagaggrarctctcagggaagmtgcctccdggwcccaccccattgcccttcatcgggaactacctbcagctsaacacagmgsagatrtacaactccctcatgaagatcagsraacgmtayggycckgtgttcaccrtccacctgggkcctcgccgcagaatygtgrtrctatgbggacaggaagcwgtcaaggaggctctggtrgatcawgctkwggarttcagygggcgtggygagmasgccacctttgacwgkytcttcraaggctayggmstdgycttcagcmsyggrgagmgskccaarcmrctrmggcgcttctccatcgccacrctgmgggacttyggcrtgggcaagcgtggyrtcgaggagcgcatccwagargargcgggytttcttctggaggcattccggaagacaaacggtgctctcattgaccccaccttctacctgagcagarcrgtctccaacgtcatkagctccatcgttttcggcraccgctttgactatgaggacmaagagttcctgtcrctgctgargatgatgmyrgraasyttccagttcacagsywcmtccactgggcagctctacgagatgttctcttcrgtgatgaarcrcctgccrggrccccagcaamargcctwtaaggrrctrmaggsrctggargacttcatarccaagaaggtggaacagmaycagmgcaccctggayycyaattccccaagggacttcatygactccttcctcatccrcatgmaggmggagaagaagaaccccaayacagarttytwcatgaaraayytggtgytrackacrctraacctcttckytgctggcacagagaccrtcagyacraccytacgctatggcttyctsytgctcatgaagcacccagaygtggaggccaaartccawgaggagatyracmrggtgattggcargaaccgrcagcccaaatatgaggaccgmwygaagatgccytacacagaggctgtgatycatgagattcarmgmtttgsagaydtratmcccatgggybtgsctcgaagggtcaccaaggacaccaagttycgggrcttcytyatycccaagggcactgamgtgtttcctrtgctgggctctgtgctgarsgacyccaarttyttctccaaccccaaagacttcaayccamagcayttyctdgatgrcaakrkkcagtttaagaagaatgatgcmttyrtrcccttttccwtaggaaarcggwactgcttyggagaaggactggckagaatggagctcttyctctwcctcacrawcatcctgcagaacttycrcytcagatccycacaggcaccccrdgacatcgatgtgtcccctmramtsgtgggrtttgsmacvmtyccaccaaactayaccatgagyttyttgtcccrttrakcmakgkctkgatrwkggwmaarggarkgatggagaccmgsytagtgtgggwvattgkrahttrgadggagtcakagggacargararacagaggacaygaatmracttgstgaagagagactgbcatttccaaggyagkgwgagagaaagrrgaaatktatactatgtkgtgaatartrayratrrtaatwataataatracastagmyaytaytwmtaktaataataataataaaataataatrgcgacatt

SEQ ID NO: 365 - DNA, 2745 bp, Cricetulus griseus
  misc_feature (169)..(209): n is a, c, g, or t
  misc_feature (211)..(224): n is a, c, g, or t
  misc_feature (274)..(320): n is a, c, g, or t
agggagactgcagacacagactgctccctggagttctgttcacagcagcacagcttctcttcaggaactttcactcacaagggaatgctaggtaagtgaactatcacagaacaacactccaaattccccacgggtctttaggagagaaagcagaagaatgctcgcactnnnnnnnnnnnnnnnnnnnnnnnnnnnnnnnnnnnnnnnnntnnnnnnnnnnnnnnggagttcctggacagccagggttgttacacagggaaaccctgccccaccnnnnnnnnnnnnnnnnnnnnnnnnnnnnnnnnnnnnnnnnnnnnnnnaaggtttattttggctgcacactagtgcttagctcacgttgtttctttttgcatgtgtatgtgtgtggggggtggtacctttagtgcagaggtcagaggttcacatcaaatgtccttcatcctgtatccatctcgtcccgactttttgaggcagaccctgtcagcttgctccgggaatcctgtttctggctcctatgggctgggattacagccaccctgcccctggttatgcggaccttcgggatttgtactctagtcctcatgacctttactgctgaaccagctccacggcctcagcccagcatcccatcctgccagtttagggatggaccttcccaccggtcagcctagtagagaaactccctcacagacacgcccagaggtctgtctccagggtgcttctaggtcctctcaagttaaccatcacaggcacactaggcccccacggagctcatctttctgacctccgggatcttttgaaagagaaggtggagtcgggagcaagaggctagggaagtttgacaggatcggcttgggaaaagctgagtcaccgtgagggcttagttgcccttagccaatccctgggatccagacagactgggactcctctgaagatgggaggaagtctgatggatgtcatacccacacttagagcgcctggaatttgttcccgaattcagagtctccttgggagagggttcgcgtcgatgtagagcccttccgacctatgtacatactcgggtacacttgggcaaaaccagacgctgtcgctgggggctcctgtaggtgtccgggatacataaaacggtcctgtaaactggaacctgctctcccacgtgggggcgcaccgagacctccagacgcgcagagctcgcccacacctgttaagtctgctcccgggctctgttccctaaagcaggccgcggggaatccgctctacagcggctctgtgttaagtaatctcagttccgcagaagcaaattttacattctgcagaaatcgacgggctccagcgcaagaaaattacgtagcacttgttttcttccttctgagattcccccaaaatagttgcttcaatccgactgccacgagtcctgctgacgccttgagattcttttgggagcaggtccctgacccacgttcatctccgagccggatcactactccgcaagcctgagggaggaggcggaccttcgcgaacagagggcccctcctcggaggggagggaccgacacccagggccttgttctccagcagttgcagcgccgggtcccaggacttagtcctgcgccacggttctgaccacgggtggcccgctgcccagccggctctgcaagccggtggtccgcgtgtssmtccgatatgtcgtcctgcagccgcgtggcgctggtgaccggggctaacaagggcatcggctttgccatcacgcgtgagctgtgtcgcaagttctcgggggacgtggtgctcaccgcgcgggacgaggagcggggcaaggcggctgtgcagcagctgcaggcagagggcctgagcccccgcttccaccagctggacatcgacgacctgcagagcatccgcgccctgcgcgactttctgcgcaaggagtatgggggacttaacgtgcttgtcaacaacgcgggcatcgcctttagaatggatgatccaacaccctttgacattcaagctgagatgacactgaagacgaacttttttgccactagaaatgtctgcaatgagttactacccataatgaaaccacatgggagagtggtgaatgtcagcagtctgcagggctcaaaggctcttgaaaactgcagtgaagatcttcaggaaaggttccgatgtaacacacttacagagggggacctggtcgacctcatgaaaaagtttgtggaggacacaaaaaatgaagtccacgagagggaaggttggccagactcagcttacggggtgtccaagctgggggtgacagtcctttccagaatcctggcccagcagctgggtgagaagcgtaaagcagacaggattctgctcaatgcttgctgcccagggtgggtgaagaccgacatggcgagggaccagggctccaggactgtggaggaaggggcggaaaccccagtttacttggccctcctgcctccagatgccactgagcctcagggccagctagtctgtgacaaagtcgtgcaaacatggtgaacatctgctttgggacttaatggtttagtaactgytsgagagggakmcaaatggaggctgctgtagtttgattctctttgcacattgagaaggaaggtccgtcatacctgtgaggttctacaatctgaatctgaatgatgtgcaatgtccaaactctctatggcccttggtttttcatccagttcattgtgcctgcttgtttttcaaataaaaaaatagtttttatttt

SEQ ID NO: 366 - DNA, 1324 bp, Cricetulus griseus
gaattcctttctcttgggactatttgagactaccaagcacccagtatatattctacaggcagtcacattcttagtaacaactatattggagtwgctttctagaatattaatatctacttctgtaataaatgataaatgcttctgacatgatgtctcatttcagtttcccgtatttccctgtatgcacaatgcaaccactctcackcarattgtggtcagtgcaactcaaatgtcttactttaatttaaatggccacctgtggctattagcaacctaycaaacacaaacagmatgaaacttgaccttcagatccccatttccagggagttacagggcagtgaggatttcttccccttcatggacacatttgtgascmwstrtsasctttgtgagcacagagcatcctgtaaccttgaaaggggaactawggtgtgactccaagtgctattttgagtacaraggagcaggttccctgaaggccctggcctctgtacacctcagtgctcacatccaggtaaggtaaagcacttagragtttgtaaacacacaacccatgggattagtttggattgcttcctgccaaggattaaccaacactttgctttagcatcctaagtgggaaactcagcaggaatttccattcctcatccttctcaccagttcatcctacaactctacttcctacgataaaggsgccrtgcgttatttttctagacaccagaaagactatggacaaagatccaatctccaagttggggarggaaaacagtgcaacattgataaaagcacagagctgaagattcactcacaygggcaaggtcaatgtctsatttccgggtggacagctgcagcagcctctctgcagacttctcctgcagtctcccctggctggggcttccaaaacyccttgaggaaaaaagacagagatgcccatgagccgaccyagccmtttttctggctggattttaaytgtwcaacacgctttgcttgctctgagcctgcaaaggaactggcctgtttctttattgaacagatttatacacctaagcccgatatcagaaggtgakccatcaccgcgtaaatatacaccattaagacaagaggacagttacagggagtgtaaagctcacaagaacytgtccccgawttaccacgccctcctggaggcggggtcagatgatgcgcatgcgccttgagcccatgccggcttaaccaaacaagctgtccytagaaaaaccctaggagttaggattggctctcctcgtgcgcggggaacctcagrrtccgtgcyctgtaaccgcctcyctstgaacacccagccatg

SEQ ID NO: 367 - DNA, 2718 bp, Mesocricetus auratus
gcgcctgggactttccgcgcacacctccgagcccgcccttcttctctcccacggagactcctgggcagcggggacgccgaaagtcccaggcggagagaacagaccctggacagcgcgctccatggctgcgctcgcctggctagcggccgcgctgctgcygctggccgactggctgctgctgcggcccgggctcccgggattcttttccctgctggttcccggggtgccgctgctccggatctgggcggtgggcttgagccgctgggccatyytggggctgggggtccgcgggatcctcggggtcaccacgggagcccacggatgggtggccgctttgcagccgctgacggcggcgctgggtttagcccagccgggacttgcctcgttccgagagctggcctcctggggagcactccgggrgcgcgacaacgctgaagagctgcactggggcagccgcctcgacgcgttcgttctcagttatgtagcagcactgcccgcagccgccctatggcacaagttggrgagcctctgggcgcccagcgaccgcaggggcgctggagacatggtgcatcggctgctaggcttcctgggttcggagaagcggcgcctccacctggttctggttatcttgatcctctcctgtctcggggaaatggccattcctttcttcacgggccgcatcactgactggattcttcaggacaagacagcttctagcttcattcgaaacatctggctcatgtccattctcaccctagccagtacagcgctggagtttgctggcgatggcatctacaamaccaccatgggccacatgcacagccgtgcgcatggagaggtgtttcgggctgtccttcaccaggagacagggtttttcctgcagaaccmagcaggttccatcacrtctcgggtgactgaggacacatcmaaggtctgtgagtctattagtgacaagctgaacctgctgatgtggtacctggggagaggcctgtgtctcctggcgttcatgttttgggggtcagtgtccctcactctggtcaccctggccgccctgcccctgcttttcctcctgcctcagaagctggggaaggtgtacaagtcgctggaagcgagggtgcaggagtctctagcggagtccacgcaggtggccattgaggccctgtcggcgatgcctacggtgcggagttttgccaacgaggagggagaggcccagaagtttaggcagaagctggaggaaatgaaggcgctcagcaagaaggaggccttggcctacgtcgtcgaagtctggaccacgagcatctcgggaatgctgctgaaggtgggaatcctgtacatgggcgggcagctggtggtcagaggggctgtcagcagtggagaccttgtctcctttgttctytaccarctgcagttcaccactgccgttcaggctctgctctcctactatccctggatgcagagggctgtgggctcctcagagaagatatttgaatacctggaccggagtccttgctctccgctcagtggctctttggcgcccttaaacatgaaaggtctygtcgagttccaagacgtctcctttgcctatccaaaccatcccgatgwccaggtgcttcaggggctgacgttcacgctgcatcctggaaaggtgacggcgttggtggggyccaacgggtcagggaagagtaccgtggccgccctgctgcagaatctgtaccagccgacggggggccagctgctgctggacggacagcccctggtccagtatgatcaccactacctgcacactcaggtggccgcggtgcaacaagagccactgctatttggaagaagttttcgagaaaatattgcctacggcctgacccggaatccaaccatggaggaaatcacagctgtggccaaggagtctggagcccacgatttcatccctggactccctcagggctatgacacagaggtgggtgagtctgggaaccagctgtcaggggggcagcggcaggctgtggccttggcccgagctttgatccgaaaaccgcgcctgcttatcttggatgacgccaccagtgccctggatgccaacaaccagttacgggtccagcggctcctgtatgagaaccccggaccggcttctccaaccgtgctgctaatcacccagcagctcagcctggtggagcaggcgcaccacatcctgtttctcgargaaggctcggtttgcgagcagggcacccacctgcagctcatggaaaagactggaggtcgctaccgggccatggtggaggctctcaaggctccttcagatggacaggcctctggacctgccgaccgccctccagcactgtcctctgctaggtgtggcggagaacccgggagcaaagatattatcacacccattgaccaggctcagttgaggaactgaggtactggtcacaggataaaatgtaacatctaggagacggctggagtttaccatgaatgctattcccaccccggccccttagwtagagtcgatttcaggtacctcaggctgaccttgaactcctgcctcccccctcctggtactgttctggtatcacagcacgggcaaacctggtttatgcggtgttggatgagaagaaatgctcacagtgaagcagtttgggattaacggaaggcataggctggcctatggataacccgtgrgctactgatatttataataaaactggcgttttgkactgcgtt

SEQ ID NO: 368 - DNA, 2436 bp, Mesocricetus auratus
  misc_feature (820)..(837): n is a, c, g, or t
  misc_feature (1544)..(1544): n is a, c, g, or t
ggcacacccaggggatccagtttggggacaggcagatttcagaagcgctgctgagcggctgccccgcagagcccaccatggcgctgkccyacctgaggccctgggcctctctgctgctggtggacatggctttacttgcactgctgcaggggtctccgggaaatctgcttcccctggggcttccaggactrtggctggagggcaccctgcgccttggagggctttgggggctgttagcagtgggggggctgctgggacgtgtggggacctttccgcccttgctctgcctggctaccccgctgtttttctctctaagagcgctggtgggaggcaccatgagttccccagcagtcagagtggyctctgcctcttgggtctggctgctggctgrctatawggcygccgcgctgggctgggccgtgtgggctgtgctgagccctccaggagcccgggagaaggaagcaggccaggagaagaacaagagtctgatgtggcagttgctgaggctctccaggccggacctgcctttccttatggtcgccttcttcttcctggcgtgggctgtgctgggggagaccttaattccccactattccggtcgtgtgattgacatcctgggaagtgattttgacccggatkctttcgccagcgccatcttcttcatgtgcctgttctctgtkgggagctccytgtctgcgggctgccgaggaggctccttcctcttcaccatgtccaggatcaacctgcggatacgggagaggcttttctcctccttgctgcgccaagaccttgggtttttccaggagaacaagacaggrgnnnnnnnnnnnnnnnnnngctcagacacttccaagatgagccgctggctcccttataatgccaacatcctgttgcggagcctggtgaaggtgatcgggctgtactgcttcatgctccaggtgtcgcccaggctcaccttcctctccctgctggacctgcccctcacaatagcagccgagaaggtgtacaacccccgccatcaggcagtgttaacagagattcaggatgccacggctaaggcagggcaggtggtgcgcgaggcggttggagggctgcagactgtgcgcagctttgggrccgaggagcaggaggtcagccgctataaggaggccctggagcgatgtmgacagctgtggtggcgccgggacctggaaagagccttgtatttagccatacggagggtgatggccttgggcatgcaggtactaatcctgaactgcggtgtgcagcagatcctggctggggaggtcaccaggrgaggcctgctctccttcctgctgtaccaggaggaagtgggggactatgtccggaacctggtgtacatgtatggagatatgctgagcaacgtgggcgccgctgagaaggttttctgctacatagaccgtaagccaaatctgccccagcctgggaccctggccccttccaggctggagggccgcgtggaattccaagacgtcaccttttcctacccgagtcgcccggagaagcctgtactcaagggcctnacgttcacgctgcatcctggcaaggtgacggcgttggtgggacccaacgggtcagggaagagtaccgtggccgcccygctgcagaatctgtaccagcccacggggggccagctgcwgctggacggacagcccctggtccagtatgatcaccactacctgcaccgccaggtggttctggtgggacaggagcccgtgctcttctctgggtctgtcaaggacaacattgcctatggcctgaaggactgtgaggatgcccaagtgatggccgctgtccgggcagcctgtgcggacgacttcataggggaaatgcctgatgggatacacacagaaataggggagaaggggagccagttagccgtgggacagaaacaacgtctggccattgcccgggcccttgtgcggaacccacgggtcctgatcctggatgaggcgaccagtgccctggactcccagtgtgagcaggctctgcaggcctggcgatcgaagggggacaggacggtgctggtgattgcccacaggctgcacacggttcagaacgttgaccaggtgctggtgctcaagcaggggcagctggtggagcacagccagctcagggaggaccaggatgtctacgctcacctggtacagcagcagcggctggaggmrtgaggcctccgcacacagagccacccactgagtgctctcaggaccagacccacggggactgtgctggaggctggggtcgggataaagactgggaccatttcggactcttgtatgttttggtgggcttgagtgggtgagagttgggggatggggtggtcgctgggtggagtgagtgttttgtggttctagaaacattattattattttttgctgattatagtaaatatgtatagaaacgttttccctt

SEQ ID NO: 369 - DNA, 718 bp, Cricetinae gen. sp.
gttcctctccgcaagagacttccatccacttgtcttcttgggactgctgctggtgatggccactgccctccctacctcacaagtccggagaggagacttcacagaggacactactcccaacagaccagtgtataccacttctcaacaagtcggaggtttggttacatatgtcctcagggaaatctacgaattgagaaaagagttgtgtaataacaaccctggctgtatggacaatgactatgtgttgttagaaaataatctggaacttccggtgatacaaakaaatgatggmtgcywccaaactggatacaattgggaaatttgcctaytgaaaatcacctctggtcttctggactaccagatctacytggagtttgtgacsaacaatgtacaagataacaagaaagacaaagcmagagtcattcagagcaccaycaaaaccctaagtcagatcttcaaacaagaggtaaaggrtccagataaaatagtcaygcctagcccracytccaaggccatcctratrgagaagctggagtcacaraagsagtggccaagraccaagaccatmraactcatcctgaaagcacttgaagaattcctagaagtcaccatgaggtctactcggcaaaactagtgtgctgtgccttagcataccgatctgtggacattcactgtggtcagaaaacatatcctgtcattggggatctaccttatgttg

SEQ ID NO: 370 - DNA, 583 bp, Cricetinae gen. sp.
  misc_feature (148)..(168): n is a, c, g, or t
tgcattgttagcgtctcttgataaccttaattgtctcctatcactgacggtagagatctattgatgggtctcaggccccagctagctgccatcctgctctgccttctagcatgtaccgggaactggaccctcggatgccaccatggannnnnnnnnnnnnnnnnnnnnattttgaaccaggtcacagaaaaagggacaccatgcaccgagatggtcgtaccagacgccctttcagcaaggaagaactccacggagaaagacctcatctgcagggcttcccaggtgcttcgcaagttttatttccaacatgaggtgaccctgtgcttgaagaacaattccagggttctcaaagacctgaagaaactctacaggggcatcagcagcctgtttccacagaagagctgcaatgtgaatgagtccacgtacacaacactgaaagacttcttggaaagcctaagaaggatcatgcaaaagaaatactggcagtgtggaagttccacgttttaacttatgactttttaatgatttattttttaatatttatatatttataattcataaaataaagtatttgtgtaatcta

SEQ ID NO: 371 - DNA, 469 bp, Mesocricetus auratus
tgaaccggcctttcctgcttctcatggccaccccgctggagagggcccagcatctgcaaagctcccggcaccgccgagccctggacaccaactattgcttcagctccacggagaagaactgctgygtgcggcagctgtacatygacttycgcaaggacctsggctggaagtggatycacgagcccaagggctaccaygccaacttctgyctsgggccctgyccctacatttggagcctggacacacagtacagyaaggtcctkgccctstacaaccarcayaacccgggygcytcggcgksyccgtgctgygtgccscaggcgctggagccgctgcccatcgtgtactacgtgggycgcaagcccaaggtggagcagctgtccaacatgatcgtgcgctcctacaagtgcagctgaggtcccgccccgcccccgctgccttgcccatgggggctgtatttaaggacacc

SEQ ID NO: 372 - DNA, 138 bp, Mesocricetus auratus
tggaaagtgytgccmcargggtttaaaaacagccccactctctttgacgaggcactacaccgggatctggccgtttttcgggtccagcacccctctctgattctgctccagtacgtggatgacctcctgctggcctcc

SEQ ID NO: 373 - DNA, 138 bp, Mesocricetus auratus
tggaaagtgctgccacarggactgtcagatagccctactttatgccagtattttgtgcaaaaacctttggaaataattcacaaacaatttccacaatccataatttaccattacrtggatgacctsctgctggcckcc

SEQ ID NO: 374 - DNA, 138 bp, Mesocricetus auratus
tggaaagtgttgccmcagggaatggccaattatccaactatgtgtcaattgtttgttgtggaggctgtcatccctttaagggaggagattccaaagattatatrtatcaattacrtggatgacatsctgctggccgcc

SEQ ID NO: 375 - DNA, 138 bp, Mesocricetus auratus
tggaaagtgytrccmcargggatggctaatagtccaactatatgccagatttatgtagctgcctgtttagatcccctcagacgtaagttycctgayctttacattatccactacrtggatgacmtsctgctggcckcc

SEQ ID NO: 376 - DNA, 1062 bp, Cricetinae gen. sp.
atgaagggcaatggtagcactctgctcaatgcctcgcagcaggcaccaggcgkyggggagggtgggsgsccgcggccgtcgtggctggcctctacactggccttcatcctyatcttcaccatcgtggtggacatcctgggcaacctgctggtcatcctgtccgtgtaccgcaacaagaagctcaggaacgcaggaaatatatttgtggtgagcttggctrytgcagacctcgtggttgckatttacccttatcctttggtgctgacatccatatttaacaatggatggaatctgggatatctgcactgtcaaattagtgcrtttctgatgggkttgagtgtcattggctcratattcaacatyaccgggatcgccatyaaccgctactgctacatttgycacagtctcaagtacgacmgactstacagtaacaagaattccctctgctacgtgttcctgatatgggtgttgacgctwgtcgccatcatgccyaacytgcaaacyggaactctccagtatgatccccggatctactcctgtaccttcacrcrrtctgtcagctcggygtacacgatagcmgtggtggttttycatttcatcgtgcctatgattatcgtcatcttctgctacttaagaatctggatcctggttcttcaggtccgacggagggtgaaacccgacagcaarcccagactgaagccacargacttcaggaactttgtcaccatgttygtygtttttgtactttttgcyatttgctgggcsccrctcaatttcatcgggctcattgtrgcytcagaccctgccaccatggyccccaggatcccagagtggctgttcgtggctagttactayatggcrtatttcaacagctgcctcaatgcaatyatatayggactcctgaaccagaatttcrgacargaatacaaaagaattmtcgtctcattgttyacagcyaagatgtkctttgtggacagctcaaaygayscggcagataagattaaatgtaagcctgctccactcatagccaataataacttaataaaggtggactctgtttaa

SEQ ID NO: 377 - DNA, 1730 bp, Mesocricetus auratus
acaggatctgcctctacagtagtgtgagcaacactgctgcagcagcaaaggctcaggcccacatcctgggaaggacatggccactccctggggtgctgtcttcttcctgctcatgatagcctgtgctggcagcactgtcttctacagagaacagcagacttggttcgagggcgtcttcttgtcttccatgtgccccgctaatgtcagtgccagcaccttttatggaattatgtttgatgcgggcagcacgggaactcggattcatgtttatactttcgtgcagaaagcagcaggacagctcccctttctggaaggtgaaatttttgattctgtgaagccaggactttctgcttttgcagaccaacccaagcagggtgctcagactgttcatgcactcttagaggtggccaaagactcaattcccagaagtcactggaaaaggaccccagtggttctgaaagcaacagctggactgcgtttactgcctgaacagaaggcccaggctctgctcttagaggtagaggagatcttcaagatgtcacctttcctggtcccagatgacagtgttagcatcatggatgggtcctatgaaggcatattagcttgggtcactgtgaactttctaacaggtcaactgcatggccacagccaggagactatggggacccttgacctggggggtgcctccacccagatcacatttctaccccagttttcgaaaaccctggaacaaacacctagggactacctcacttcctttgagatgtttaacagcacttttaagctctatacacatagttacttgggatttggattgaaagctgcaagactggcaaccctgggagccctggaaacagaagggaccgatggacatacttttcgaagtgcctgtctaccaagatggctggaagcagagtggatctttgggggtgtgaaatatcagtatggtggcaaccaagaaggggagatgggcttcgagccctgctatgcagaagtgctgagggtggtgcaagggaaactgcaccagccggaagagattcggggaagctccttttatgccttctcctactattatgaccgagctgccgatacgcacttgattgattatgaaaagggtggtgttttaaaagttgaagattttgaaagaaaagccagggaagtgtgtgataacttggagagcttcacttcaggcagtcctttcctatgcatggatctcagttacatcacggctttattaaaagatggctttggttttgcagatgggacccttttacagctcacaaagaaagtgaacaacatagagacgggctggcctgggggccacctttcacctgctgcagtctctgggcatctccagctgaggctcagcgtgcccttggaaacctgcacttctgaacttctttttacaggaaggagaggactcgggcattttctgcaactacgctggcgaaagcctggcctgaaacccattgactggctttattaggagggagggggtttataatgagtgttgccccttgagcctagtgatttggtcttaatcagttttgcacatctaatgtgaacagctccctaaccacttggcaggtgcacagctggtgccagagtacaaatcttttgagattctttgtatgtcacagagtctgtgaagaaaaaagagtaggtttggaactccatgttagattgcgagttcagagatgggtcattgggaaccaaagaaaaatctcatt

SEQ ID NO: 378 - DNA, 219 bp, Cricetinae gen. sp.
aacgatgaaattgtgaagatcattaccattagaatatttgatcgtgaggaatatgagaaagattgcagtttctcccttgtgcttgaggaaccaaaatggataagaagaggaatgaaagsysksttcacattgamwgrsswdbvtgdykwcasrwwgrywsaygstagagaccatccgcttccctccactgtaatcagcatttcagacgagtatgatgac

SEQ ID NO: 379 - DNA, 1282 bp, Cricetulus griseus
agcaatagttccaacatggccggtgaggcggacggaccgttcaaacgagtgctggtgccagttctcttacctgagaaatgctatgaccaacttttcgtccactgggacttccttcatgttccctgcctcaagattctcctcagcaaaggccttggactgggcatcgtggctggatcacttctggtaaagctgccccagatatttaaaatcttgggcgccaagagtgccgaaggactgagtctccagtcagtaatgctggagctggtagcattgacaggaactgtgatctacagcatcaccaacaacttccccttcagctcttggggtgaagcgctgttcctgacactacagacaattaccatctgcytcctggtcctgcactacagaggagacactgtgaaaggagttgctttacttgcctgctatgcgacactcctgctggctctgctttctccactcacgcctctggctgtagtcaccatgctccaggcctccaatgtacctgctgtggtggtgggcaagttgctccaggcagccaccaactaccacaacgggcacacaggccagctttcagctatcacagtgtttatgctgtttgggggctccttggccagaatcttcacttctgttcaggaaactggagaccccctcatggctggagtctttgtggtctcttccctctgcaatggcctcattgccgcccaggtcctcttcttctactggaatgcaaagcctccccacaaacataaaaaggagcaatagtgctgagctagcttctagaatcattcattccacttccattcagccactcaacttgagggtcttccccacttgacgtggtctgctggtgcaactcagtcgtcctccattcctgcataactgcaacctcctgagccagggtttgtgtaaagagtaaaaagcttttccaagtcctgtattcactcgtttcaccaatggctgaggtccctcctttataagcagctattttgttattggagcagacgccttgccttgtccacttaccttctttcaggatggaggacagagcctggacaaatgtggttgggagcttgtggctgcgtccctctgccagctggttgggacagtctattggaccctagttctgaaggtgggggaggggagaatgactcaggtaaaggcctcagggtggagtagggaggttcctgctgtggcaggtccacgaagggtgtggagaaggcacaggttgctgttgtagtgggaatacagatgggacaataaagactcggagacgtgctttcat

SEQ ID NO: 380 - DNA, 1471 bp, Mesocricetus auratus
  misc_feature (67)..(81): n is a, c, g, or t
tgccgactgccttctcccgcgatacttggcatccagacgtggtttttcatcagctccaactctgacnnnnnnnnnnnnnnntcgtgccctctgaccttcaattctgtctcctcttacagtactcaccttccctcaataagctgttctgccagctggcgaaaacatgccccgtgcagctgtgggtcagctccacacctccacctggcacccgtgtccgtgccatggccatctacaagaagttacaatacatgacggaagttgtaagacgctgtccccaccacgagcgctcctccgaaggcgatggtgagctctcgggactgactgcgcaattagaaatgcttgcctgggggctccccaaccgttgatgttcttgattgctcttaggtttggctcctcctcagcatcttatccgagtggaaggaaatatgcatgccgaatacctggatgacaagcagacttttcggcacagtgtggtggtgccctatgagccacctgaggtctgttcttttgggttgggttgggttgggttgaagacagggtttagtttgctctaccccagactgatgttgaacttgcagcaactctcttgcctcgggctcctgagtactggacttataggtgtgaactactgtgttcaggctgaagtttaccttaagaagagggtctctgggagaagagagttgggaggggttcaggctgaagtttaccttaaacaagagggtctctgggagaagagagttgggaggggttgtcggtggccactcaggtgggaggtagaggggctgagtcctgtcctgttaccatcagtgtccttactacaggttccctgtggtgggattggagttggccttcacctaggtcctgtgtcctcccttaggttggctctgactgtaccaccatccactataactacatgtgtaatagttcctgcatggggggcatgaaccggcggcctatcctcaccatcatcacgctggaggaccccaggtaggcagcctcttgctgtgttcctgttggcgtgttcctccccagtctgtctctggtccatgccccacccgctgccacatgcctaccctttagctcttgctccgcctgcatacatgaagtctctggtttactcacatttggagtaggaccagagttcttactgtctcgtgctctccctcctctcaccctgggtagtgggaacctgctgggacggaacagctttgaggttcgtatttgtgcctgccctgggagagaccgtcgtacagaggaaaaaaatttccaaaagaagggagaaccttgcccagaactacccccaaagagtgctaaacgaggtaagcaggtgagacaaagagggcagaggaggaggttcagcttcaccggggaaatttactctctttcctttttcacagcattgcctaccaacacaagctcctctccccagccaaagagaaaaacacttgacggagaatatttcacccttaag

SEQ ID NO: 381 - DNA, 1419 bp, Cricetulus sp.
ccgagccgagaatgggagtagagccgactgcttgattcccacaccaatctcctcgccgctctcacttcgcctcgttctcgtggctcgtggccctgtccaccccgtccatcatcccgccggccaccgctcagagcaccttccaccatggccacctcagcaagttcccacttgaacaaarrcatcaagcaaatgtacwtgtscctgccccagggtgagaaagtccaagccatgtatatctgggttgatggtacyggagaaggactgcgctgcaaaacccgcaccctggactgtgagcccaagtgtgtagaagagttacctgagtggaattttgatggctctagtacctttcagtctgagrgctccaacagtgacatgtatctcagccctgttgccatgtttcgggaccccttccgcaaagagcccaacaagctggtgttctgtgaagtyttcaagtacaaccrgaagcctgcagagaccaatttaagrcacwcgtgtaaacggataatggacatggtgagcaaccagcacccctggtttggaatggaacaggagtatactctswtgggaacagatgggcacccttttggttggccttccratggcttycctgggccccaaggtcygtattactgtggtgtgggcgcagacaaagcctatsgcagggatatcrtggaggctcactaccgygcctgcttgtatgctggggtcaagattacaggaacawatgctgaggtcawgcmtgcccagtgggaattccaaataggaccctgtgaaggaatccgcatgggagatcatctctgggtggcccgtttcatcttgcatcgagtatgtraagactttggrgtaatagcaacctttgacyccaagcccattcctgggaactggaatggtgcaggctgccataccaactttagyaccaagrccatgcgggaggagaatggtctgaagcacatcraggaggccatygagaaactaagcaagcggcaccggtaccayattcgagcctacgatcccaaggggggsctggacaatgcccgtsgtctgactgggttccacraaacgtccaacatcaacgacttttcwgctggygtcgccratcgcagtgccagcatccgcattccccggactgtcggccaggagaagaaaggttactttgaagmccgcygcccctctgccaattgtgacccctttgcagtgacagaagccatcgtccgcacatgccttctcaatgagactggcgacsagcccttccaatacaaaaactaattagactttgagtgatcttgagcctttcctagttcatcccaccccgccccagctgtctcattgtaactcaaaggatggaatatcaaggtctttttattcctcgtgcccagttaatcttgcttttattggtcagaatagaggagtcaagttctt

SEQ ID NO: 382 - DNA, 1504 bp, Cricetulus griseus
  misc_feature (845)..(845): n is a, c, g, or t
aagctttggttctgttggtgcctgaggagacacaatgggtgcaggtgtggagctctgagtctctgtgtgtgaggagacatggtaggtgtgagtattagtcgctgtgtccagtctggatcaagggtacaggtgggacaagtctctgggtgtgtcggtgaccaagaagtcatggtaggtacaggcctgagattctgaatctgtcggtacatgaggagacagggtaggtagaggtgtggcctgtcagtgtgtgaggagatgggaagtacggtacaggtgtgaggttttgggtctatcagtggccaaagcgacatcgtaactatgagaatggggctctgggtctgtcagtaaggtcaaggaggcagggtaggtacaggtacaagattcttatctaccaatttctgaagagacccagtaggcacaggtatgagggtctggtctgccaatttctgaggagacgcggtaggcacaggtatgagggtctggtctgccaatttctgaggagacacaataggcacaggtatgagggtctggtctaccaatttctgaggagacccagtaggcacaggtatgagggtctggtctaccaatttctgaggagacgcagtaggcacaggtatgagggtctgggtctgtcaatgtctgaagagacagggtagacacaggtatgaagttctggtctaccaatttctgaggagacagggtaggtacaggtatgaaactctgggtctgtcagtgtctgaggagacagggtaggcacaagtatgaaggttctggtctatcaatttctgaggagttaggacccgggtctctcagtgtctgaacaggtaagttcagcacaggtgagngtgcttggtctgccagtatctgaagagatgaggcatggtcaaggtatgaggctttccatgttccttggcctgaggagtaaggtaggcccaggtgtggggctcttaagtcatgtctgaggcaggtgtgcacaagtttgaggtcttgttccgccagcatctgaggagattgggttgggaactggtatgcatgtcaccatctgaggtttagcccagatcgggagtcctcttcatcagcattgagaaagtagagactggcacaggtcataatgaggtgggtcaagcatggatatgaggccctggttctgccatcaccgagacggcaaaggctagcayaggtatgagactkccttcctgccagtgctgaggaamtgggagccwacagaggtttgaggccttgggtctgccaggaagaaaaggccagctgcggtaacatctttgatttgacgcgtccctcacgtagtctgccttgctggccagcatgragagtcactagttcctggatctgctgtctgaactgggmagagtcgggttgggtccagccctccaggctgttacctgtggaagattggctttctggggacaggtgtggcaggagggaggggggtagggtgtgcctgccctcctccagtgccgtttccttctctcctagtgggtaggtg

SEQ ID NO: 383 - DNA, 790 bp, Mesocricetus auratus
aacaystgtcagattttgacctytgtaagaagcagtgaatccaggctctaccatggtgaagttcctgctgcttgckcttgccttaggtgtgtcctgtgcacakyatcagaatcttgaagtcagtccctcagaggttgacgggaartggyacagcctttacatagcagcagataataaggagtaaggtaagygaaggtggacctttgagagyttacrtcaagmacstggaatgcaktgatgaatgccagacaytcamaatcamattttataccaaggtggaarrcgtgtgccaggaacacasarttgtgggaagaaaaggcraagatgggaagtatattacagacttctctggtcagaattatttccacrttgtagagaagkcagatgacaccatgacctttcacaacgttaatgtcgacgatagtggaaagacaaatgttattttagttgttgggaraggwgagagttcgagcatagaacagaagcagaggtttgagaagacagccgagraatacgatattccaaaggagaatattgagsacttggtgmccacagacamttgtratcaataaagacaccrtatggctttaccgatgacagcaagatcatgaatattccccacatcaacttttgcgtgaaatcagaatcatgacaatgaagataattcaccatttttcttttttccttctaatcttacaaatgaagtcagaatatctgcttcatggattttcttcctatcctcctactatattactgactattctgttggttaaataaattratttctcat

SEQ ID NO: 384 - DNA, 1987 bp, Mesocricetus auratus
cactcgatcattcgagcacattccttccttccttcttactgtctcggccctcacctctacaagcccatggaacgtttctgcaaaggcgctcttgcaccggcagggtggccagtccgctgctgagccctctgcgtgcgcggggagcctgtctgcgcctcgccggccgccgctaaccatgaccatgaccctccacaccaaagcctcgggaatggccttgctgcaccagatccaagggaacgagctggagcccctcagccgcccgcagctcaagatgcccctggagagggccctgagcgaggtgtacgtggacagcagtaagcccgcgatgttcaactaccccgagggcgccgcctacgagttcaacgccgccaccgcccccgcgccggtctacggccagacgggcatcgcctatggctctgggtccgaggcgaccgccttcggttccaacagcctggggctttttccscmsytcaacagcgtgtckccsagcccgctgatgctactgcacccgccgccgccgcagctgtcgcccttcctgcacccgcacggccagcaggtgccctactacctggagaatgagcctagcgcctatgccgtgcgcgacascggccctccagccttctacagatctaattctgataatcgacgccagagtggccgagagagactgtccagcagcagcgagaaaggaagcatggccatggagtctgtcaaggagactcgctactgtgcagtgtgcaatgactacgcctctggctaccattatgaggtggaacagatctggtcctgtgaaggctgcaaggctttcttcaagagaagtattcaaggacacaatgactacatgtgtccagctacaaaccaatgcacaatcgacaagaacaggagaaagagctgccaggcctgcaggctgcgcaagtgttacgaagtaggcatgatgaaaggtgggatacggaaagaccggagaggagggagaatgctgaaacacaagcgccagagagacgacttggaaggcaggaacgacatggggccttcaggagacatgagrgcyaccaasskytggcctagtcctcttgtgattaagcacactaagaagaacagccctgccttgtccttgacagccgaccaaatggtcagtgccttgttggatgctgaaccgcccttaatctattctgaatatgatccttctagacctttcagcgaagcttcgatgatgggattattgaccaacctggcagacagggagttggttcatatgatcaactgggcaaagagagtgccaggctttggagacttaaatctccatgatcaggtccacctcctggagtgtgcctggttggagatcctgatgattggtctcatctggcgctccatggaacacccagggaagctcctgtttgctcctaatttgctcctggacaggaatcagggcaagtgtgtggagggcatggtggagatctttgacatgttgctggctacatcagctcggttccgcatgatggacctgcagggagaggagtttgtgtgcctcaaatctatcattttgcttaattctggagtgtacacatttctgtccagcaccttgaagtctctggaggagaaggaccacatccaccgggtcctggataagatcacagacactttgattcacctgatggccaaagctggcctgacactgcagcagcagcatcgtcgtctggcccagctcctcctcattctttcccacatccggcacatgagtaacaaaggcatggagcacctctacaacatgaaatgcaagaacgttgtacccttctatgacctgttgctggagatgttggatgctcaccgcctgcatacccccgtcagtcgcatgggggtctccccagaggagcccagtcagagccagctgaccaccaccaactccacttcatcacattccttacaaacctactacatcccgtcggaagcagagagtttccccaacacaatctgagacctcccaggctcc

SEQ ID NO: 385 - DNA, 324 bp, Cricetulus griseus
  misc_feature (5)..(24): n is a, c, g, or t
atgannnnnnnnnnnnnnnnnnnnagccagcctctggcctccaagcaggagaaggacgggactgagaagcgaggccggggtaggccacgcaagcagcctccggtgagtcctgggacggcgctggtagggagtcagaaggagcccagtgaagtgccaacaccgaagagrcctcggggccgaccaaagggaagcaaaaacaagggcgctgccaagacacggaaagctaccacagctccagggaggaaaccaaggggcagacccaagaaactggagaaggaggaagaggagggcatctcccaggagtcctcggaggaggagcagtga

SEQ ID NO: 386 - DNA, 2091 bp, Cricetulus griseus
  misc_feature (324)..(342): n is a, c, g, or t
atgaagttcgccgagcacctctccgcgcacatcactcccgagtggaggaagcagtacatccagtatgaggcattcaaggatatgctgtattcagctcaggaccaggcaccatctgttgaagttacagatgaggatacagttaagagatattttgccaagtttgaagaaaagtttttccaaacctgtgaaaaggaacttgccaaaatcaacacattttattcagagaagctggcagaggctcagcgcaggtttgccacacttcagaatgagcttcagtcatcactggatgcacagagagagagcattggtgttactacattgcgnnnnnnnnnnnnnnnnnnnttccacctgtcccacgaggagcgtgtccaacataggaatattaaagaccttaagctggccttcagcgagttctacctcagcctcatcctgctgcagaactatcagaatctgaattttacagggtttcgaaaaatccttaaaaagcatgacaagatcctggaaacatctcgtggagcagattggcgagtgggtcatgtggaggtggccccattttatacatgcaagaaaatcaaccagctcatttctgagactgaggctgtagtaaccaatgagcttgaagatggtgacagacaaaaggctatgaagcgattacgtgtccctcctttgggagctgctcarcctgcaccagcatggactacttttagagttggcctaytttgtggaatattcattgtgttgaayattactctcgtgcttgcagctgtatttaaacttgaaacagatagaactgtgtggcccttgataagaatctatcggggtggctttcttctgattgaattcctttttctactgggcatcaacacatatggttggagacaggctggagtaaatcatgtcctcatctttgaacttaatccaagaaacaatttgtctcatcagcatctctttgagattgctggattcctggggatactatggtgcctgagccttctggcatgctttttcgctcccattagtgtcgtccctatatatgtgtacccacttgccctttatggatttatggtcttctttcttatcaaccccaccaaaactttctactataaatccagattttggctgcttaaacttctgtttcgagtatttacagctcccttycataaggtaggctttgctgatttctggctggccgatcarctgaacagcctgtcagtgatactcatggacctggaatatatgatctgcttctacagttttgagctcaaatgggatgagaataagagcctgttgccaaatgatctacaagaaccagaattttgccacagatatacatatggtgtgcgagccattgttcagtgcattcctgcttggcttcgcttcattcagtgcctgcgccggtaccgtgacacaaaaagggcctttcctcatttagtaaatgctggcaaatactccaccactttcttcaccgtgacctttgcagckctttacagcactcacaaagaacggcagcactcagataccatggtgttcctttacctgtgggtggtcttttgtgccatcagttcctgctacaccctcatctgggatctcaagatggactggggtctcttcgataagaatgcaggagaaaacactttcctccgggaagaaattgtataccctcaaaaggcctactactactgtgccatcatagaagatgtgatactgcgctttgcttggactatccaaatctctattactgctacagcttttcagcctcatgttggagacatcattgctactgtctttgctccccttgaggttttccgacgatttgtatggaacttcttccgtctggagaatgagcatctaaataactgtggtgaattccgtgctgtgcgggacatctctgtagccccactgaatgcagatgatcagacactccttgagcagatgatggaccaggaagatggggttcgaaaccgccagaagaatcggtcatggaagtacaaccagagcatatctctgcgccggcctcgccttgcatcccaatccaaggctcgagacactaaggtattgatagaagacacagatgaygaagctaacacttga

SEQ ID NO: 387 - DNA, 477 bp, Cricetulus griseus
atgggtccgaagctgcttgagtcccgactttgtctccygctgctgctgggatttktcataatggttgcctctttccagatcccacskrrtttaaccccttcccagtggtttgaaatycarcatgtaaataatagdaccawyctccratgyamtcctgmaatgargrkagtyaacrrwtacacargacgatgcaagaacataaatacttttcttaatacaagttttsctgctgtygytmgtgtgtgtggcrrwmmaaatactamttgcrcwakgagtccwsgtacaaattgycataayagttcagctcmrgtatctttaacwtactgyaacctyacaavtysrksaagymattatacacaatgycrataccaaaygacdccagcaasrawgttctacagartkgcttgtracaatmghamsccacargacartsstwmctatscagtggttccrgttcacttggatgggacattttag

SEQ ID NO: 388 - DNA, 597 bp, Cricetinae gen. sp.
cccgggcctgcagctgctccccggtgcaccmgcaacaggcgttttgcaatgcagacgtagtgatcagggccaaagcrgtragcgagaaggaggtggaytccgggaaygacatctacggcaaccccrtcaagaggatycartatgagatcaagcagataaagatgttcaaaggccctgacaaagacatcgagttyatctacacrgccccctcctcrgcartgtgcggggtctcgctggacgttggaggaaagaaggagtatctaattgcaggaaaggcagaaggrgayggcaagatgcacattaccctctgtgacttcattgtgccctgggacacrctgagcaccacccagaagaagagcctgaaccacaggtaccagatgggctgcgagtgcaagatcacacgctgccccatgatcccatgctacatctcctccccggaygagtgtctctggatggactgggtcacagagaagagcatcaacgggcaccaggccaagttctttgcctgcatcaagagaagygayggctcttgcgcrtggtaccgcggrgcggcaccccckaagcaggagtttctygacatcgaggacccrtgaattc

SEQ ID NO: 389 - DNA, 662 bp, Mesocricetus auratus
gggtgggccaacagtcacagtgggggtcccctttatatatgacccccagagagaccccatgccaagaccatcatcaccaccaagagcaggtggggaggcttccgtcctcctcctcatcccatccaggtcagctgcagcctcagcagcccagagcctcttgatctcctggcactatggttcgttaccgaatgaggagccccagtgagcgtccgcaccaggggcctgggcaagaacatggacgtgaagagcaagggcaggggcaagggttgagcccagagcgtgtggaggactatgggaggacacacaggggccaacaccaccacagacgtcgctgctcgcgtaggaagctgtaccgaatccacaggaggcgccggtcatgcaggaggcggaggagacactcctgccgtcacaggagacggcatcgcagaggctgcagaagatcacscargassmssagayscmkggcmrsmkgtgtwgswgkcccmccatctaaaccctgctgcctcccaggtagcctagcaaaccagaactttccttcccaaaggctgcagaagatcacgcaggaggaggagatgcaggtgcaggaggtgtaggaggcaccaccactaagcctccccaggccgtccatcctgtttggagccaaggaaatcacccgcccaagg

SEQ ID NO: 390 - DNA, 420 bp, Cricetulus griseus
tcacagtgggggatcagaccatctcccatccaggtcagctgaagcctcagcccagagcctcttgatctggcactatggcttgttacccagtgaacatccgcgccaggggcctgggcaagaacatgggcatgaagagcaggggcaggggcaagggttgagcccagagcatgtggaggactatgggaggacacactgccaccaccaccaccagacaccatcgttgctcttgcagccatcgcagatgtaagcacccaagaacctcagacccctggccacctgtgttgcccagcaaggcaggagtgctcccatctaccctgctgctcccagacagcaaaccagaacttttcttccaaaggctgcagaagacgcaggtgcaggaggtgtaggaggcactaagcctccaggaagtcacctgccaag

SEQ ID NO: 391 - DNA, 924 bp, Cricetinae gen. sp.
atggtgarccmracaacttcygaagtgcamcccaccatgggggtcaagatcttctcagcsggygtggcggcctgcctggcagayatcatcaccttcccgctggacacrgccaaagtccggcttcagatmcaaggtgaaggccagayctccagtaccattaggtataaaggtgtcctkgggaccatcaccaccctggcaaaaacagaagggttgccgaaactgtacagtggtctkccygctggtatycagagacaaatcagctttgcctcactcaggattggcctctacgatactgtccargagtacttctcttcrgggaaagarackcctcccactttggkaaacaggatctcagctggcttaatgacyggaggtgtggcrgtattcatygggcaacctacygaggtygtgaaagtcagactccaagcacagagccacctacacgggatcaaaccccgctacackggkacctacaatgcttayagaattatagccacaacagaaagcytktcaacactctggaaagggacracccctaayctgttgaggaatgtcatcatcaactgtacagagctggtaacatatgacctcatgaagggggcccttgtgaacaaccaaataytggcagatgacgtgccatgccayttactgtcagctyttgtcgcyggsttttgcaccacattcctggcctctccagcagatgtggtaaaaacaagattcatcaactctctaccaggacagtacccaagtgtacccagctgygcaatgaccatgytcaccaaggaaggaccaacagcttttttcaaagggttygtgccttctttcctgcgrctsgcrtcctggaatgtcatcatgtttgtgtgctttgaacagctgaagaargagytgwykaagtcgaggcagacggtggactgcaccacataa

SEQ ID NO: 392 - DNA, 1021 bp, Cricetinae gen. sp.
  misc_feature (265)..(279): n is a, c, g, or t
  misc_feature (389)..(404): n is a, c, g, or t
  misc_feature (775)..(802): n is a, c, g, or t
tttctgtctaacactgaggttcgccgggtcatggtgccagcctgactgagaagaggacgctcccgggagacgaatgaggaaccacctcctcctgctgttcaagtacaggggcytggtgcgcaaaggggaaraaaagcaaaagacgaaaatggctraattcaagatccgtccagccactgcctctgactgcagtgacatcctgcgactgatcaaggaactggctataatatgaatacatggaagatcaagtaatgttaactgagannnnnnnnnnnnnnnatggttttggagaacaccccttctaccactgcctgattgcrgaagtgcctaaagagcaytggacccctgaaggacacagcattgttggtttcgccatgtactattttacnnnnnnnnnnnnnnnnggcaarttactktatcttgaaracttctttgtgatgagtgattacagagggyktggyatasgatcagaaattttgaagaatctaagccaggttgccatgaagtgtcgytgcagcagtatgcacttcttggtagcagaatggaatgaaccatctatcaacttctacaaacgaagagstgcttctgacctgtccagtgaagagggatggaggctcttcaagattgacaaagagtacytgctaaaaatggcagcagaggagtraggagtgctggtgtagatggtgacaacctccattatactttagaatacattctcaacttatcttgctctctatcttgtttgtagtgaaatagtcgaatgagcacccattcnnnnnnnnnnnnnnnnnnnnnnnnnnnncatgtttgaaatgcagtctgtttaaaatggcactcatgtatgtggtttcgaggcagaattctcgaacatctttcagtgaacaacaaggtgatatgaccttactatatatgaaaaacaaaacttcattcttgtgagtcatttaaatgtgtacaatgtacacactggtacttagagtttctgttttgatccttttttaataaattactctttgatttaatt

SEQ ID NO: 393 - DNA, 1783 bp, Cricetulus griseus
tccaggactatgtcgtgggcgcggacgcacctgcgctcggctctgtccctggcagctgtttctgcgcgtggtgcaacgaccgagggcgcggcgcggcggtggttgagcgcgtggcccgcgcctcaggagcccggcatggagtatcaggatgctgtgcgcatgctcaacaccctgcagaccaatgccagctacctggagcaggtaaagcgccaacggagtgaccctcaggcgcagctggaagccatggaggtgtacttggcacggagtgggctgcaggtggaggacttgaaycagttaaacattatccatgtcactgggaccaaaggaaagggctccacctgcgccttcactgaacgcatcctgaggagttatggcctgaagacaggcttctttagctctccccacctggtgcaggtgcgtgaacggattcgcatcaatgggaaacccatcagtcccgagctctttaccaagcacttctggcgcctctatcaccagctggaggagttcaaggatgacagccacgttkccatgcctgcttacttccgcttcctgacactcatggccttccaygtcttcctccaagaaaaggtggacctggcagtggtggaagtgggcattggtggggcttatgattgcaccaacatcatcagaaagccagtagtgtgtggagtgtcctctcttggcatggaccacaccagcctgctcggagacacggtggagaaaatagcatggcagaaagggggcatcttcaagcctggtgtccctgccttcactgtgctacagccagaaggtcccctggccgtgctgagggatcgagcccagcagacctcatgtcctctgtacctgtgtccaccattagaagccctggaggatggtgggctgccgctgaccctgggcctggagggagagcaccagcggtccaatgcagccttagccttgcaactggcccattgttggctggagcagcaggaccaccaggacatccgggagctgaaggtgtccaggccgagcatgcggtggcagctgcctctggcacctgtgttccatcccacttcccacatgagacatgggcttcgggacacagaatggcctggccggacacaggtattgcggcggggacctctcacctggtacctggatggcgcacacaccaccagcagtgtgcaggcctgtgtgcgctggtattgccagtcattgcagcgcagcaaacaccccagtggtgggcctgaagtatacgtcttgctcttcaactccacgggtgacagggactctgctgccctgctgaagttgctgcagccctgccagtttgactacgctgtcttttgccccaacctgacggaggtgtcatccacagaaaatgcagaccagcagaacttcacagtgactctggaccaggtgctgctccgctgcctccaacaccagcaacactggagctgcctgagtgagaaacaagccagccctgacttcctgagcagccccagcccagagcctggcaggccaggttccctgcagccggcactgcgcccgcctcactctacgggcactaactcccttgtctttagctgtatctcccacgccttgcagtggatcagccaaggccgggatcccatctttsaggccccaagccctccaaggagcctcctcagccaccccacggccagtagtggggcaagcattctccgggaggctggtgccatccatgtactggttactggaagcctgcacctggtgggtggagtcctaaagctgctagagccctccctgtcccagtagccaaggacca

SEQ ID NO: 394 - DNA, 474 bp, Mesocricetus auratus
atggagccctctgcggacgggctggctagggcggctgcccagggccgcgagcaagaggttcgggctttgctggaagcaggggtttcgcccaacgccccgaactgtttcggccgcaccccgattcaggtgakgmwsatgggyawcwcmymwgyagssrgactgstrctgctytwcgktgmrgaammgmmcwgcgwkkactggtgagtttccagtgtgaccccgactgcaatrgcmcgggagggcttcttggaaactctggcgatactacaccaggcgggggcgcggctggatgtgcttgacgcccggggtcgcctgccggtggacctggccctggagcggggccactgcgatgtcgtacagtatctacgtgcggctgggaacaccccccaaggcagcgagccggcaggcgtaacttctgcccagacacccccagaggtctcggatttcgcggaccaccccctagggccctactaa

SEQ ID NO: 395 - DNA, 558 bp, Mesocricetus auratus
atgaactttctgctgtcttgggtgcattggaccctggctttactgctgtacctccaccatgccaagtggtcccaggctgcacccacgacagaaggagagcagaaagcccatggagtggtggagttcatggacgtctaccrgcgcagctattgccatccgatcgagaccctggtggacatcttccaggagtaccccgatgagatagagtatatcttcaagccgtcctgtgtgcccctgatgcggtgtgggggctgctgcagcgacgaggccctggagtgcgtgcccacctcggagagcaacatcaccatgcagatcatgcgggtcaagcctcaccaaagccagcacataggggagatgagcttcctacagcacagcaggtgtgaatgcagaccaaagaaagtcagaacaaagccagaaaatcactgtgagccttgctcagagcggagaaagcatttgtttgtccaagatccgcagacgtgtaaatgttcctgcaaaaacacagactcgcgttgcaaggcgaggcagcttgagttaaacgaacgtacttgcagatgtgac

SEQ ID NO: 396 - DNA, 379 bp, Cricetulus griseus
tacagtcatgagcagagctgaaaattttaaacaagttcagtacctccttattcatggaacagcagatggtgagtttcagttaattagactttttagtatcacagacaggtttgcaatttcactactgacaaaacaaaagcatgaggggcaagactgttacatttacttcaataaaacagtgttgctttccacaactcacttgtcttgggctaaatgggatgctgagtcctagaacttcactcactttcttcttgtgcttcccccctcggtatytgaacactccagaggctattagctacttgtttatggctgtttgttccctttctttcccgcagataatgtccactttcagcagtcagctcagatctccaaagccctg

SEQ ID NO: 397 - DNA, 408 bp, Cricetulus griseus
  misc_feature (323)..(337): n is a, c, g, or t
ccagaytcccccgcagaggcctctggactccgrgcccaagaccgcattgtggaggtcaatggtgtctgcatggagggcaagcagcatggggacgtggtrtctgccatcaaggctggaggggaygaggccaagctgctggtggtrgacaaggagactgatgagttcttcaagaagtgcaaagtgatcccrtcacaggarcacctggatggccccttgcctgagcccttcaccaatggagagatacagaaggagrgcagccgtgaagccctggtagaggcagcctcagagagccccaggccagccctggygagatcygcctccannnnnnnnnnnnnnnagctaaattcccaagacagycccaagagacaggagtcyacagagccctcatctacctcctcctcctcctct

SEQ ID NO: 398 - DNA, 649 bp, Mesocricetus auratus
gcgacgtggagctggcagaggaggcgctccccaaaaagrcgtggggcccccagaactccagccggtgcctatgcctcagcctcttctccttcctgcttgtggsaggggccacaatcctcttctgcctgctgaacttcggggtgatcggcccccaaagggaagagaagttccccaaccctatcatcggctccatggsccagacactcacactcagatcatcttctcaaaattcgaacgacaagcctgtggsccacgttgtagcaaaccaccaagtggaggagcagctggagtggctgagccatcgtgccaatgccctcctggccaacggcatgtctctcaaagacaaccagctggtgataccagcagacgggctgtacctggtttactcccaggttctcttcaggggccaaggctgccccagctacgtgctcctcacccacactgtcagccgcattgctgtgtcctacgaggataacgtcaacctcctgtccgccatcaagagcccctgccccaaggaaacccctgagggggaggagctcaagccctggtacgagcccatctacctgggaggggtcttccagctggagaaaggtgaccgactcagtgccgaggtcaacctgcctaaatacttagactttgcagaatccgg

SEQ ID NO: 399 - DNA, 571 bp, Cricetinae gen. sp.
cgggaccatgaagctgctgccgtcggtgatgctaaagctctttctggctgcagtgttgtctgcgttggtgaccggtgagagtctagaacggcttcgcagaggtctggaggcagcaaccagcaaccctgactctcctactggacccacaaaccagctgctacccacgggagatggtcgtggtcaggaagtccaggacttggaagagacagatccggaccttttcagagttgctttctcctccaagccacaagccctagccacgccaagcaaagaaaagaatgggaaaaaaaagaagaaaggcaagggattgggaaagaagagagacccatgtcttagraaatataargacttctgcatccayggggartgtaaatacctgaaggatctccgggctccatcatgcaactgccacccaggttaccatggagagaggtgtcatgggctgaccctaccggtggagaatcgcttatatacatatgaycacactacmatcttggctgtggtggctgtggtgttgtcatctgtctgtctkcttgtcatcgtggggcttctcatgtttaggtaccatagg

SEQ ID NO: 400 - DNA, 3197 bp, Cricetulus longicaudatus
cacgccttcgcgccgaggccccgccccgggtgaggtaaaatggccgcagccttggcggcgagtggaatgcttcccacagcgggcattataattgattaggtttctgatatccagatctgttcctaagacgtaaattgacaagaccacatttctgtgcaaacattgaggagctagttggcaacatgaaggtcttctgcggtcgtgccaatccaaccacaggatccctggaatggctggaggaggatgaacactatgattaccatcaggaaattgccaggtcatcctatgcggatatgctacatgacaaagacagaaatataaaatattaccagggtatccgggcagctgtgagtagggtgaaagacagaggacagaaggccttggttcttgacatcggcacgggcacaggtctcttgtcgatgatggcagttactgcaggtgctgacttctgctatgctattgaggtttttaagccaatggctgatgctgctgtgaagattgtggagaaaaatggcttcagtgataagattaaagttattaacaaacattccactgaggtgacggttggaccagatggtgacttgccatgtcgtgctaacatcctggtcacagagctgtttgacacggaactgattggggagggggcactgccctcttatgagcatgcgcatagacatcttgtgcaggaaaattgtgaagcagtgcctcacaaagcaactgtctatgcccagctggtggagtccagaaggatgtggtcatggaacaagctgtttcctgtccatgttcagaccagtcttggagagcaggttatcgtccctccctcagaactggagaggtgtcctggtgcaccttcagtctatgacattcagctgaatcaggtgccatctactgacttcactgccctcagtgatgtactaccaatgttcagtgtggacttcagcaagcaagtcagtagctcagcagcctgccatagcaagcagtttgtacctctggcatctggccaagcacaggtggttctgtcctggtgggacattgaaatggaccctgaggggaagatcacatgtaccatggcacccttttgggcacagacaaacccacaggagcttcagtggcgggaccactggatgcagtgtgtatacttcttgccacaggaggagcccgttgttcagggctcaccccgatgcctggtagcccaccatgacgactactgtgtgtggtacagccttcagaggaccagcgctgatgagaatgaggaagtttaccaagtgcgccctgtgtgtgattgtcaggctcacttgctctggaatcggcctcggtttggagagattaatgatcaggacagaactgatcagtatgcccaagccctgaggactgtgctgatgccaggcaccatctgtctttgtgtcagtgatggcagtctgctctctctgctggcccatcaccttggggcggagcaggtgtttacagttgagagttcggcagcttcctatagactgatgaaaaggatcttcaaggctaaccacttggaagataaagttagtatcatcaagaaacggcctgagttgttaacatctgcagacctggagggtaagaaggtctccctcctcctgggtgaacccttcttcgccaccagcctgctgccatggcacaacctatacttctggtatgcccgtacttctgtggaccagcacctggaacctggagctgtggtgatgccccaggctgcttcactgtatgctatgatcgtggagttcagggatttgtggcggatccggagcccttgtggtgactgcgaaggttttgacgtgcacatcatggatgatatgattaagcactccctggattttcgagagagcagagaggcagaaccccacccattgtgggagtacccctgccgcagcctttctgagcctcagcagattctgacctttgatttccagcagcctgtgccccagaagcctgtgcatgctgagggctccatggaactgagaagacctgggaagagccatggtgctgtcctgtggatggaatatcatctgactccagacagcacagtcagcaccggcctcatgaatcctttggaagacaagggggactgctgctggaacccccactgcaagcaagctgtgtacttcctcagcaccacagtggatcccagagtgcctctggatggccctcagtctgtcagctatgctgtggagtttcatcccctcactggagacatcaccatggagtttaggcttgcagacaccttgaactaattccctcattgagaaattaaatggccaataggctgcagactctgaatggcttggggctcaatggggaaagaaggccaagaacttcttttcatgcacctacttggcatctgcacagaggagacctcttatttttgtgtcttagtgctgctggcttgcagcatcaggtgtggcaggcagcatgggctggtgactgattcaagagttctgaagcaaccagggagaatggtttgtggttctgagagttcagaaagctctggtatagtgatgcttcctgtcctatctggaggacaactgaggaagaaccttcactgggactaagggagggcggccctcttagctggaacctacccagcctgtctgctttctaggaatctctaggtctctgcttagagaatggccttctaggaacttccttgggccttcgtgatcctggtaagacctgggttagaggactaggccacatccataaacatttgggtatcttgcctcagtgcataccagcaggtggcctcataagccatgagacttggacaccagggtgctgctcacagattagggaagaggccatcctcaagcagttccctgtgccactggaaagaaaactaggaaagtggccttttcctgtatttatcggatggcccttgctctgatggcctatccttgctgaagcagaaagtgcagagattccccagttggctacagccttgtcccacctctgccacttctctcccatactctttctaatgacctctcagttctgaaaggatttgggagggatccagtagtaaaacctaggtggctaaatcccttgcatttcagggcagacatggactatgtccccatagtcattccccaaatcccataggctggtatcaactctggaaatccataggtcctttcccagtttgttgagcaaataagtacagaaccagaatg

SEQ ID NO: 401 - DNA, 1344 bp, Cricetinae gen. sp.
atgctgaagaagcagtctgcagggcttgtgctttggggtgctatcmtctttgtgggctggaatgccctgctgctcctcttcttctggacacgcccagcccctggcaggcccccytyagayagtgctmtcgatgaygaccctgccagcctcacccgtgaggtgwtccgcctggctgaggacgctgaggtggagttggagcggcagcggggrctgttgcagcaaatcagggagcaycatrctttgtggarmcagaggtggaaagtgcccacygtggcccctccagcctggccccgtgtgcctgygaccccctcaccascygtgatccccatcytggtcattgcctgtgaccgcagcactgtccggcgcygcttggataagttgttgcactatcgrccctcagcygagcatttcccyatcattgtcagccaggaytgygggcacgargagacagcacaggtyattgcttcctayggsagtgcagtcacacacatccggcagccagacctgagtaacatcgctgtgcmsccagaccaccgcaagttccagggttactacaagatcgccaggcactaccgctgggcactgggycagatcttcaacaagttcaagttcccagcagctgtggtagtggagraygatctggaggtggcaccagacttctttgagtacttccaggccacctacccactgctgagaacagayccctccctttggtgtgtgtctgcttggaatgacaayggcaaggagcagatggtagactcragcaaacctgagctgctctatcgaacagacttttttcctggccttggctggctgctgwtggctgagctgtggrcagagctggagcccaagtggcccaaggccttctgggaygactggatgcgyagacctgagcagcggaaggggygggcctgtattcgtccagaaatttcwagaacgatgacctttggccgyaaggrtgtgagccatgggcagttctttgaycagcatcttaagttcatcaagctgaaccagcrgttcgtgtctttcacccagttggayttgtcrtacytgcagcgggaggcttatgaccgggatttccttgcccgtgtctatrgtgccccsctgctacaggtggagaaagtgaggaccaaygatcagaaggagctgggggaggtgcgggtacagtacackagcagagacagcttcaaggcctttgctarggccctgggtgtcatggatgacctcaagtctggtgtccccagagctggytaccggggcrttgtcactttccagttcmggggycgrcgtgtccacctggcacccccacrwwcctgggaaggctatgatcctagctggamttag

SEQ ID NO: 402 - DNA, 902 bp, Cricetulus longicaudatus
caccccttcatccaagaatgcaaaagcacatccaataaaagagctggattataactatttttttttcttttggggctgtggggcgggagtcaggacgagaagtgctgttgatatacctgcagcttttttttcggggaaggatggctcaagctgggagaacagggtatgataaccgagagatcgtgatgaagtacatccattataagctgtcacagaggggctacgagtgggatgtgggagatgtggacgccgcgcccctgggcgccgcccccacccctggcatcttctccttccagcctgagagcaacccaacgcccgctgtgcaccgggacatggctgccaggacatcgccactaaggcccatagtcgccaccactgggcctacccttagccccgtgccacctgtggtccacctgaccctccgccgggctggggatgacttctcccgtcgctaccgtcgcgacttcgcggagatgtccagtcagctgcacctgacgcccttcaccgcgaggggacgctttgctacggtggtggaggaactcttcagggatggggtgaactgggggaggattgtggccttctttgagttcggtggggtcatgtgtgtggagagcgtcaacagggagatgtcacccctggtggacaacatcgccctgtggatgaccgagtacctgaaccggcatctgcacacctggatccaggataacggaggctgggacgcatttgtggaactgtacggccccagtgtgaggcctctgtttgatttctcttggctgtctctgaagaccctgctcarcctggccctggtcggggcctgcatcactctgggtacctacctgggccacaagtgaggtccacagacctgctccccaaaatatgcaaaaggttcactaaagcagtag

SEQ ID NO: 403 - DNA, 310 bp, Cricetinae gen. sp.
gatcagaccagataagttcatacatcctagctccatgtgctcgaggcagagaggcctgaagtgggggtgctgctggtaaccccagaycctcggccaatgcaggggtgggaaaaagacccccgagggccctcctgcataccatgygtgtggagcacagaaagrtgggtagccaggcagatggcggccttgyagccatgttcccttagagcagggaaacacccgtgacggcagctggggcagaracagccccacttggcatgcytcacagacycgraggtggggatagaargggggtgtgtcgtggtggatc

SEQ ID NO: 404 - DNA, 257 bp, Mesocricetus auratus
gtggcaggtgacgggaaaccctaccaagtgcccatgctggcccagctctctgtgttccgttctggatctaccaggaccccaaatggcttatggtacaacttcattgagctgccctaccatggtgaaagcatcagcatgttgatcgccctgccaactgagagctccaccccactctctgccatcatccctcacatcagtaccaagaccattgatagctggatgaacaccatggtacccaagaggatgcagctggtcct

SEQ ID NO: 405 - DNA, 1209 bp, Cricetinae gen. sp.
  misc_feature (467)..(496): n is a, c, g, or t
catcccgagctggggctgccgtgctcaccttggcccccaggtcctccgcccctgagtgtcgggcccgctttctttagggttcccgggccccgctcccgggggcctgagccgccgcattagcgctccatggagaacttccaaaaggtggagaagatcggagagggcacgtacggagtggtgtacaaagccaaaaacaagttgacgggagaagtggtggcgcttaagaaaatccggctcgacactgaractgaaggtgtgcccagtactgccatccgagagatctctctgcttaaggaacttaatcaccctaatattgtcaagctgctrgatgtcatccacacrgaaaataagctttacytggttttygaryttctgcaccaggacctcaagaaatttatggatgcctctgctgtcactggcatycctcttcccctcatcaagagctatytgttccagctgctccaggnnnnnnnnnnnnnnnnnnnnnnnnnnnnnntgcaccgagaccttaagccccagaatctgcttatcaatgcagagggrtccatcaagttggcagactttggactagcaagagcctttggagtcccygttcgtacttatactcatgaggtggtgaccytgtggtaccgagcacctgaaatccttctaggctgcaagtactactccacagccgtggatatctggagyctgggctgcatcttcgctgaaatgcacctagtgtgtacccagcaccatgctaagtgctgtggggaacacagaagaaatggaagacacagtctctgcccgctgtgctcctatctagaagtggctgcgtcacaaggaggggggatgaccgcagtgtctaccccataccccgtgacccggcgggccctgtttccyggagattctgagatygaycaactcttccggatcttycgractctggggaccccwgatgaggtggtttggccrggagtyacttctatgcctgattataagccgagtttcccsaagtgggctcggcaagattttagcaaagttgtgcctccactggatgaagatggrcggagcytgttatcgcaaatgctgcactatgaccccaacaagcggatttcagccaaagcagccctggcccaccctttcttccaggatgtgactaagccagtaccccaccttcggctgtgatgtccttcccaaagccctcctcacccttgggtcttgacttga

SEQ ID NO: 406 - DNA, 2004 bp, Cricetinae gen. sp.
gcgaccgccacctccaatgcacaaggtgtcacatttgaaaagaaacctgagcccgggggagaaggcgctgagagaccctggcctggctagtgcaaactgcgcggcagggcgctgggcagcctggagaacccagagagctccaccgcagaccatcctagcgacctgattctgggatctcggctccacgctcccttcgcaattttcagatttctctccctcgattatttccccaaaacggaacctttataccaagagaaggtgccggagctggggcaaccaggactttcccggrcacccaagatgcgctccattagraaacggtggaccatctgcactataagtctacttctgatcttttataagacaaaagagatagcmagaactgaggagcaccargagacgcaactcatcggagatggtgaattgtgtttgagcagatcacttgtcaacagctctgataaaatcattcggaaggctggctcaaccatcttccaacattctgtacaaggctggagaatcaattcttctttagtcctggagatacggaagaacattctccgtttcttagatgctraacgtgatgtctctgtggtcaagagcagyttyaagcctggtgatgtcatccactatgtgttggacagacgccggacgctaaatatttcccatgatctgcacagcctcctgcctgaagtttcaccaatgaaaaaccgcaggtttaagacctgtgctgttgtyggraaytcyggyattctactagacagtgratgtggcaaggagattgacagtcacaattttgtaatcaggtgyaatctagctcctgtggtggagtttgctgcggatgtggggactaaatcagattttattaccatgaacccatcagttgtgcaragagcatttggaggctttcggaatgagagtgacagagmaaartttgtgcatagactttccatgctgaatgacagtgtcctttggatccccgctttcatggtcaaaggaggagagaarcacgtggaatgggttaatgcattaatccttaagaayaagctgaaagtgcgaactgcctatccatcaytgagacttattcatgctgtcagaggttactggctgaccaacaargtgcccatcaaaagacccagcacaggcctyctcatgtacacactggccaccagattytgtgatgaaattcacctgtatgggttctggcccttccctaaggatttgaatggaaaagcygtsaaataycattactacgatgacttraaatatagatacttttccaacgcaagccctcacagaatgccrttagaattyaaaacmctgaatgtgctacacaacagaggagcrctaaarctgaccacaggkaagtgcatgaagcaataaagcacatattgaaggatcaaaactggatagaaactttttctaaagatgcttctggagatttagaaacaggatccaaaacaaggctggggttcagcatccacactgactgaatagctgaaatggaagtccatgggaatccaccaccagctgatgaaatacctgccaagtgctctaactataaaatattctgacttcaagggtcctagtaagtgccacttccacgaagaatacagtttgaatgtattatcagtagtgtttacaagatccaacagtgcactcatcattaattagcaaagcaaatatgttcgtcactgtggggcagccgctgtaatgccaagcacactggaagaggaactcaggagcatcacgactcggagcttgggaaattaacatccttatccgcagaaatgaagaagaaaaagaattcaaacagtgaaatccatgagatgaagtaacttgaaggaatgtcttcagtcaggacactgagagtgatcatgtgtgtgttttgcttgtgtttttgtttgtcttctgaaacttgttttcttttgggtatggggtgaatagaaattcatctgaggtacagaaatgggaaatacatgacagagaaaaataaacatcaaacag

SEQ ID NO: 407 - DNA, 477 bp, Mesocricetus auratus
ccatcttgtaccagagaccgaccgacaagagctgcctcaacatgaagttggtcatagtcttcatgctggccatcatccccgtttactgccgaaccaatagttctggctgcaatssawtggaygatgctattgcaaagaccattaactcatcwgtgyctatggaagaatatcacgaaacagttmaaaaatacacawytcttccttatatccgamgtactrtggaaaagttcaaggaatgttttgcaaaacagtctaatgakactcagcataatrtttttgtgatggwgtwtgcsrtttacaacagtgacaagtgttcaggatattaaccttccacgagacctttggatcataagccagcagtgataccacaaatcataacttttctttcgtgattgtatctttctgtctataagtgcaagattattgttggaatctcaaaggcatttctttctacttcattaaattaaaagaaatacc

SEQ ID NO: 408 - DNA, 703 bp, Cricetinae gen. sp.
aagaaagaggactactctaccatctggctggatctcaatatgcttctatcccttgggatcgactgctggattgataataccaggtatgtatccatgtgccctacccatcctctagcacatttcccctcgttactcgttgctagatgttcactgtccccagggttgtctacaaccgcagctctgggcaygtgtccaatgctcctggtgtacagatccgygtccctggctttggcaagayctaytctgttgagtacttagaygacaacaagctagcaggtgtgtctactcagggaaaggaaggggctcttggcatcatgctggccatacaagtatgatggacagagattcctatatggctgcctccacaggctacatgcacacactggtacagaatctggttaacaatgggtatgtgccggatgagacagtgcgggccgcaccctatgactggcgtctggaacccagtgagtgtttacaggtggtgggctgggggcatgacaggtggtcccagactctcattgcttctgacctatctcgcccatctccagggcagcaggatgaatactaccggaagctdgcaggactggtagaggagatgtatgcygcytatgggaagcctgtcttccttrttgggcacagccttggctgcytacatgtgctctacttctkactgcgtcacgctcagtcctggaagcacacattc

SEQ ID NO: 409 - DNA, 471 bp, Cricetinae gen. sp.
ggcatccccatcatgtccaaggtaaacgtgaragaggagcmrcgmayaaccacgacctccccctggatgtttccagcccgycahgtatggccwgaagaccatgtrttcatttccacaccaaacttcaactayacaggccaagacttcaarcgkttttttgmrgatcttcattttgaagamggatggtacatgtggctacagtcacgkgacctgctggsaggcctcccagcacctggtgtagaagtatactgtctgtatggtgtgggyctgcccacacycmacacatayatctatgaccacagcttyccctayaaagacccagtgkctgcactctaygargatggtgatgacactgtagccacacgcagcactgagctctgtggccwggtgcawggccgccaatymcarcmtgtacacytgmtgsccatgaatgggacagaacatctcaacatggtcttcagcaataagaca

SEQ ID NO: 410 - DNA, 1846 bp, Cricetinae gen. sp.
  misc_feature (1281)..(1299): n is a, c, g, or t
  misc_feature (1808)..(1823): n is a, c, g, or t
gagcacagacctctcgcagctctttcttcgccgctccacacccgccaccagttcgccatggatgacgatatcgctgcgctcgttgtcgacaacggctccggcatgtgcaaagccggcttcgcgggcgacgatgctccccgggccgtcttcccctccatcgtgggccgccctaggcaccagggcgtgatggtgggcatgggccagaaggactcgtacgtgggtgacgaggcccagagcaagagaggtatyctgaccctgaagtaycccattgarcacggcattgtcaccaactgggacgayatggagaagatctggcaccacaccttytacaaygarctgcgtgtggccccygaggagcaccckgtgctkctsacygaggcccccctgaacccyaaggccaaccgtgaaaagatgacccagatcatgtttgagaccttcaacaccccagccatgtacgtagccattcaggccgtgctgtccctgtatgcctctggtcgtaccactggcattgtgatggactccggagacggggtcacccacactgtgcccatctatgagggctacgctctccctcatgccatcctgcgtctggacctggctggmcgggacctkmcagmctwcctymtkaagwtcctgaccgagcgtggctacagcttcaccaccacagccgagagggaaattgtgcgtgacatcaaagagaagctgtgctatgttgccctggacttcgagcaagagatggccactgccgcatcctcttcctccctggagaagagctatgagctgcctgatggccaggtcatcaccattggcaacgagcggttccgttgccctgaggcycttttccagccttccttcctgggtatggaatcctgtggcatccacgaaactacattcaactccatcatgaagtrtgacgtygacatccgmaaagacctctatsccaacacagtgctgtctggtggyaccaccatgtacccaggcattgctgaccggatgcagaaggagatcactgctctggctcccagcaccatgaagatcaagatcattgctccycctgagcgcaagtactctgtgtggatcggtggctccatcctggcctcactgtccaccttccagcagatgtggatcagcaagcaggagtacgatgagtccggcccctccatcgtccaccgcaaatgcttctaggcggactgttactgagctgcgttttacaccctttctttgacaaaacctaacttgcgcagaaaaaaaatgagacaacattggcatggctttgttttnnnnnnnnnnnnnnnnnnnggttttttaaaattttttttaaaaaaggttttgttttggcgcttttgactcaggatttaaaaactggaacggtgaaggcgacagcagtcttggagcaagcatcccccaaagttttacaatgtggctgaggactttgattgtacatttttttttcttttttaagtcattccaagtacccatgagatggctacaggaagtccctcaccctcccaaaagccaccccaattccctagaggaggatggctgagtccatgccctgagtccacactggggaggtgacagcattgcttctgtgtaaattatgtactgcgaaaattttttttaaatcttccgccttaatacttttttagttttgtttttatttttgaatggtcagccatcgtgaccctcatgggtgtttttttttgtccccccaacttgagtatgaaggctttggtctcccctgggagtgggttgaggtgttgaggcagccagaggggcttgcctgtacactgacttgagaccagttnnnnnnnnnnnnnnnnttacaaaccgtaaaaaaaaaaaa

SEQ ID NO: 411 - DNA, 283 bp, Cricetinae gen. sp.
tcctcagcagattcatgattatctgaatgcatctgactgggagagacaagtagccaatgccaaggaaaaattgactgctttcatggaaaattatagaattacagacaatgatgtactaattgcattagatagtgccaaaatcaacttcaatgaaaaactttctcaacttgagacataygtgatacaatttgatcagtatattagagacaattatgatccacaggatttaaaaaaaactattgctcagattattgatcgaatcattgaaaagytaaaaatkctt

SEQ ID NO: 412 - DNA, 1155 bp, Cricetinae gen. sp.
ccrgtcagctytactayyccataygtwgaagabacccctgagccaccyctgcatagcttctactgcagcaagctgytrgatcttgtmttcytgctggatggytcctccargctgtctgaggctgagtttgragtgctcaagrcttttgtggtgggcaygatggagagrctsyacatytctcagaagcgcatycgygtggcrgtggttgagtaccacgatggrtcccatgcytacattgaccttaargacmggaagcgkccctchgagcttcgrcgcattgccagccaggtkargtacgcaggtagccaggtggcytcyaccagcgaggttttgaagtacacactgttccagatctttrgcarraytgatcgcccygaagcctcccgcatcaytctactcctgactgctagccaggagcccccrcgsttggcmaggaatttggtccgttaygtccagggcctgaagmagaagaagatcattgtgatcccygtgggmattgggccacatgycagcstkargcagrtccgcctcattgaaaarcaggcccctgaaaacaaggcctttctgctcagtggggtggatgarctggagcakagaagggatgaaataatyrgctaystctgygacctwgcccctgagcccmgagcccctactaagcstccycaggyagcwcraatcaccacargyccagggacyttkgsrrtktcatcrcctggacccaagaggaagtccatggttctggaygtggtgtttgtcctggaggggtcbgayraagtkggygaagcyarcttcaataagagcaaggarttcctggaggaggtratwcrgcrcatggatgtsmgycaggatggyayccacatytcvgtgctgcagtattcatacayggyaactrtggagtacaccttcarkgargcccagtccaaggaggatgtgttgcggcatgtgcgwgagatccgttaccacggtggcracagraccaacactgggcaggccctgcagtacctytcygagyayagyttctctcccagccagggggaccgggmmcaggcacctaatctggtctacwtggtcacagggaaccctgcctcsgatgagatcargaggttgcctggagacatccaggtggtaccyattggrgtgggcccccrtgccaac

SEQ ID NO: 413 - DNA, 2018 bp, Cricetinae gen. sp.
  misc_feature (533)..(547): n is a, c, g, or t
  misc_feature (1958)..(1976): n is a, c, g, or t
cagcgttcaagctgctgttagcaggcaccgcgagccccgggcaccccacgagctgagtgtgcaggacgcgcccccagcacagccacctacagccgctgaatgaagcttccaggagtctgcctccggccggctgcgccccgtcggaggtgcacccgctgagagcgccagggcaccagaaagccggtgcgctcacctgctcgtctgccagcgatggggccacccgggaacgacagtgacttcttgctgacaaccaacggaagccatgtgccagaccacgatgtcactgaggaacgggacgaagcatgggtggtaggcatggccatccttatgtcggttatcgtcctggccatcgtgtttggcaacgtgctggtcatcacagccattgccaagttcgagagrctacagacygtcaccaactacttcataacctccttggcgtgtgctgatctagtcatgggcctagcggtggtgccgtttggggccagtcacatccttatgaaaatgtggaattttggcaacttctggtgygagtnnnnnnnnnnnnnnnatgtgttatgcgtcacagccagcattgagaccctgtgygtgatagcagtggatcgctacattgctatcacatcgccattcaagtaccagagcctgctgaccaagaataaggcccgaatggtcatcctaatggtgtggattgtatccggccttacctccttcttgcccatycagatgcactggtaccgtgccacccacmagaaagccatcrmctgctatcwcaaggagacttgctgygacttcttcacgaaccaggcctaygccattgcttcctccattgtrtctttctacgtgcctctagtggtcatggtctttgtctattccagggtcttccaggtggccaaaaggcarctccagaagatagacaaatctgagggaagattccaytcccmaaacctcrgccaggtggagcaggatgggcggagtgggcacggactccgaaggtcctccaagttctgcttgaaggagcacaaagccctcaagactttaggcatcatcatgggcacattcaccctctgctggctgcccttcttcattgtcaacatcgtgcaygtgatccaggamaacctcatccctaaggaagtttacatcctccttaactggttgggctatgtcaattctgctttcaatcccctsatctactgtcggagtccagatttcaggattgccttccaggagcttctatgcctccgcaggtcttcttcaaaagcctatgggaacggctactccagcaacagtaatggcaaaacagactacatgggggaggcgagtggatgtcagctggggcaggaaaaagaaagtgaacggctgtgtgaggaccccccaggcacggaaagctttgtgaactgtcaaggtactgtgcctagccttagccttgattcccaagggaggaactgtagtacaaatgactcaccgctgtaatgcaggctttctgctttttaagacccctccctgacaggacactaaccagactatttaacttgagtgtaataactttagaataaaactgtatagagatttgcagaaggggagcatccttctgcccttttttattttatttttttaagccgcaaaaatagagagggagagaaactgtacttgagtgcttgtttgtttcttgtgcaattcagttcctctttgcgtggaacttaaaagtttctgtctgaagtatgttgggttctagaggactgtctgtatgtttagatgattttccatgcatctacctcactcgtcaagtgttaggggatacgctgctagtaatttgtacctgaaggaaattttccttcctgtacccttacacttgtcaatcctgtgtcttggacctttctgctgtgaatatatactctctcccgctccacttatttgctcaaatggagtgtgtagacagggatcttgagggacagcttcagttnnnnnnnnnnnnnnnnnnnagcaaagtctaaagtttacagtaaataaattgtttgaccacg

SEQ ID NO: 414 - DNA, 4452 bp, Cricetulus griseus
  misc_feature (1828)..(1842): n is a, c, g, or t
  misc_feature (3914)..(3936): n is a, c, g, or t
  misc_feature (3943)..(3983): n is a, c, g, or t
caggaatgtaaagacatcaaaatggagccaagtatggatgtgaattcagtcactatctctgttgagggaatgacatgtatttcctgtgtccggaccattgaacagaagattgggaaagaaaatggtatccatcacattaaagtttcactagaagaaaaaagtgcaactattatttatgaccctaaacttcagactccaaagacccttcaagaagctatcgatgacatgggctttgatgctcttctccacaatgctaatcctctccctgttttaactgacaccttgtttctgactgttacggcgtcactgactttgccatgggaccatatccaaagcacattgctgaagaccaagggtgtgacagacattaaaattttccctcagaaaagaactttagcagtgacaataatcccttctatagtgaatgccaatcagataaaagagctggttccagaactcagtttagaaactgggacactggagaaaaggtcaggagcttgtgaagatcatagtatggctcaagctggtgaagtcgtgctgaagattaaagtggaagggatgacctgccattcatgtactagcactactgaagggaaaattgggaaactgcaaggtgttcagcgaattaaagtctccctggacaatcaagaagctactattgtttatcaacctcatctkatcwcmgyagaggaaatwaaraagcagattgaagckrtgggcttyccagcmttyrtmaaaaagcagcccaagtacctyaaattgggagcyattgaygtmgarcgyctraagaacacaccagtyaaatcyyyagaaggrtcacagcaaaagagcccatcatatcccagtgattcaacagccacattcatcatagagggcatgcattgtaaatcatgtgtgtcaaatatcgaaagtgctttayctacactccagtatgtaagcagtatagycgtttctttagagaataggtcagccattgtaaagtacaatgcaagctcagtcactccagaaatgctkakaaaagcaatagaggctgtttcaccagggcaatacagagttagtattgcaaatgaagttgaaagtacctccagctctccctccagctcatctcttcaaaagatgcctttgaatgtagttagccagcctctgacccaagaaaccgtgattaacattartggcatgacttgtaattcttgtgtgcagtctatagagggtgtcgtatcaaaaaagccaggtgtaaaatccatccatgtttccctcgcaaatagttycgggactgttgaatatgatcctctactaacckctccagaaaccttgcgagargtaattgwrgacatgggatttgatgctgtcttgccagacatgagcgagccattggtagtgatagctcagccctcattggaaacaccacttttgccctcaactaatgatcaagataatatgatgacagcagttcatagcaagtgttacatacaggtctctggaatgacttgtgcttcttgtgtagcaaacattgaacggaatttaagacgagaagaaggaatatattctgtacttgtggccctgatggctggcaaagcagaagtaagatataacccagctgttatccagcccccggtgatagcagagtttatccgagagcttggatttggagccacggtgatggaaaatgctgatgaaggggatggcattttgaaacttgttgtgagaggaatgacatgtgcctcctgtgtccataaaatcgagtctactctcacaaaacacaaagggatcttctactgctctgtggccttggcaaccaacaaagcacatattaaatatgatccagaannnnnnnnnnnnnnngatattatccataccattggaagcttaggttttgaagcttctttggtcaagaaagatcggtcagccagtcacttagatcataaacgagaaataaaacaatggagaagctctttccttgtgagcctgtttttctgtacccctgtaatggggctgatgatgtatatgatggctatggagcaccactttgcaactattcaccacaatcagagtatgagtaatgaagaaatgatcaagaaccattcttctatgttcctggagcgtcagatcctgccaggactgtccattatgaatttgctgtcccttttactgtgtctacctgtacagtttttcggaggctggtacttctacattcaggcttataaagcactgaagcataagacagcaaatatggacgtactgattgtgctggcaaccaccattgcatttgcctactctttgattattcttctagttgcaatgtatgagagagccaaagtgaaccctattacttcctttgacacaccccctatgctgtttgtgtttattgcactaggccgatggctggaacatatagcaaagggcaaaacatcagaggctcttgcaaagttaatttcactacaagctacagaagcaactattgtaactcttgattctgataatatcctcctcagtgaagaacaagtggatgtggaacttgtacaacgtggagatatcattaaagtagttccaggaggcaaatttccagtggatggtcgtgttattgaaggacattctatggtagatgagtccctcatcacaggggaggcaatgcctgtggctaagaaacctggcagcacagtgattgctggttccattaaccagaacgggtcactgcttatctgcgcaacacatgttggagcagacacaaccctttctcaaattgtcaaacttgtagaggaggcacaaacatcaaaggctcctatccagcagtttgcagacaaactcggtggctactttgttccttttatcgtcttggtttccattgctaccctcttggtgtggattataattggatttcagaattttacaattgtggaaacctactttcccggctacagtagaagcatctcgagaacagaaaccataatacgctttgctttccaagcctctattacagttctgtgtattgcatgtccctgttcgctgggactagccactccaactgccgtgatggtgggcacgggagtaggtgctcagaatgggatacttatcaaaggtggagagccactggagatggctcataaggtaaaggtagtggtatttgataagactggaaccattacacatggaaccccagtagtgaatcaagtaaaggttctagtggaaagtaacaaaataccacgaagtaagatcctggccattgtgggaactgcagaaagtaacagcgaacaccctttaggagcagctgtaaccaaatactgcaagcaggagctggacactgaaaccttgggtacctgcacagatttccaggttgtaccaggctgtggtattagctgtaaggtcaccaatatcgaaggtttgctacataagagtaacttgaagatagaagaaaataacactaaaaatgcatccctggttcaaattgatgcaattaatgaacagtcatcaacttcatcgtctatgattattgatgctcctctctcaaatgctgttgatactcagcagtacaaagtcctcattggtaaccgggaatggatgattagaaatggtcttgttataagtaatgatgtagatgattccatgattgaccatggaagaaaaggtcggcctgctgtattggtgacaattgatgatgagctgtgtggcttgatagctattgctgatactgtgaaacctgaggcagagctggctgtccacattctgaaatctatgggcttagaagtagttctgatgactggagacaacagtaagacagctcgatctattgcttctcaggttggcattactaaggtgtttgctgaagttctaccttcccataaagttgctaaggtgaaacagcttcaagaggagggaaaacgggtagcaatggtaggagatggaatcaatgattctcnnnnnnnnnnnnnnnnnnnnnnnggaattnnnnnnnnnnnnnnnnnnnnnnnnnnnnnnnnnnnnnnnnntgtggtttttataaggaatgaccttctggatgtcgtggcaagtatcgacttgtcaaggaagacagttaagaggattcgaatcaattttctctttcccctaatttataatctggttggaattcccattgctgctggagttttcctgcccattggtttggttttccaaccctggatgggatccgcagcaatggctgcttcatctgtttctgtagtactttcttcccttttcctcaaactctacaggaaaccaacttatgacaattatgagttgcgtacccgaagccacacaggacagaggagtccttcagaaatcagcgttcacgttggaatagatgatgcctccagaaattccccgagactgggcttgctggaccgaattgtcaattacagcagagcctctataaactcactactgtctgacaaacgctccctgaacagtgttgttaatagtgaacctgacaagcactcg

SEQ ID NO: 415 - DNA, 936 bp, Cricetinae gen. sp.
ggcttagcgggagatgtcaggagaggasgagttctatctgtttrrraatatctcctcggtggggccctgggatgggcctcagtaccacatygctcckgyctgggccttccgcctccaggcagycttcatgggatttgtcttcttygcagggrycccmctcaacgccacggtgctggtggccacactgcrttacaagaagttgcggcagcccctcaactacattctrgtcaatrtrtccctcgggggyttcctcttctgcagcttctccgtcttcactgtcttcatygccagctgtcayggatacttcctctttggccgccatgtktgtgctctggaggccttcttgggctctgtagcaggtctagtgacwggatggtcrttggctttyctggcttttgagcgctacattgtcatctgtaagccctttggcaacgtccgcttcarctccaagcaygcactgrtrgtggtcctggtcacktggrycatwggtrttggcgtgtccatcscaccyttcttyggctggagcaggttcatcccggagggcctgcagtgctcctgyggcccggactggtacacggtgggcaccaagtatcgmagcgagtmctacacctggttcctcttcctgttctgtttcatygtgcckctytccctcatctgcttctcctactcgcagttgctgaggacyctcagagctgtggcagctcagcagcaagagtcagctacgacccagaaggcrgaacgggaggtgasccwcatggtggtggtgatggtggsrtctttctgtstctgytaygtgccctaygctgccctggccatgtacatggtcaacaatygcaaccacgggctggayttrmgrctmgtcaccatccctgccttcttctccaagagctcatgtgtctacaatcccatcatctactgctwcatgaacaagcagtt

SEQ ID NO: 416 - DNA, 264 bp, Mesocricetus auratus
gatctcatacacacactgtaacagacaatgcagcttgttcaacatcaaagtggacctgttcccagagtgtcaactcagaaccctttcaagatgagcaccattccacgacaggaaaacatcccaagacttatctgacctgtaacacagaccctacaacaccctcaccccacctccatttcctcaggattcctggaatccaatccttatgtgatgggaatagcgtggaagagatggaatctaagattttaaactcggctttggatc

SEQ ID NO: 417 - DNA, 2919 bp, Mesocricetus auratus
  misc_feature (63)..(90): n is a, c, g, or t
  misc_feature (1890)..(1914): n is a, c, g, or t
  misc_feature (2074)..(2087): n is a, c, g, or t
  misc_feature (2089)..(2116): n is a, c, g, or t
  misc_feature (2145)..(2162): n is a, c, g, or t
  misc_feature (2602)..(2630): n is a, c, g, or t
ctttggggtatcctgagagcacacttttagttcagcacctcctcacaaccaacgctgccgtcnnnnnnnnnnnnnnnnnnnnnnnnnnnntaaacttcatgtcagccacagagctactcstggccatcactgtcttctgcctgggattctgggtggtcagagctttaagaacccaggtccccaaaggcttgaagactccaccagggccctggggcttgcccattcttgggcatgtgctgaccctggggaagaacccacacctgtcgctgacaaagctgagtaagcagtatggggatgtactgcagatccgcattggctccacacctgtggtggtgctgagtggcctggacaccatccggcaggccctggtgcggcagggagatgacttcaagggccggccagacttctacagtttcacacttatcactaatggcaagagcatgaccttcaacccagactgtggaccagtgtgggctgcccggcggcgcctggcccaggatgccctgaaaagtttctctatagccttagacccagcttctgcatcttcttgctacttggaggagtacgtgatcaaggaggctgattacctaattagcaagttccagaaactgatggcagaggttggccactttgaccctgataggtatttggtagtgtcagtgaccaatgttatctgtgccatgtgctttggccaacgttatgaccatgatgaccaagagctgcttagcatagtcaatctgagcaatgagtttgggaaagttaccggctctgggtacccacctgacttcatccctatcctccgctacctacctaactcttccctggatgccttcaaggacttgaataagaagttctacagcttcatgcagaagtcagtcaaagagcactacagaacatttgagaagggtcacatccgggacatcacagacagcctcattgagcactgtcaggacaaaagtttggacgagaatgccaatgtccagttgtccgacgacagggtcattaatatcattgttgacctctttggagctgggtttgacacagtcacaactgctatctcttggagtctcatgtacttggtgacaaaccctggggtgcagagaaagatccaggaggagctagacacagtgattggcaggagtcgaaggccccggctttgtgacagatctcagctgccctatctggaggccttcatcctggagactttccggcattcttcctttctccccttcaccatcccccacagcaccacaagagataccagtctgtgtggcttctatatccccaagggacattgtgtctttgtgaaccagtggcagattaaccataaccaggaactgtggggtgacccaaacaagttccggcctgaaaggtttctcacctccagtggcactctggacaaggtcctgagtgggaaggtcactctctttggtttgggcaagcggaagtgcattggggagaccattggccgattggaggtctttctcttcctggccatcttgctgcagcaaatagaattcactgtgtcaccaggggagaaggtggacatgactcctatctatgggctgactttaaagcacgcccgctgcgaatacttccaagcgcagacacggtcctctgggcctcagyatccacaagcttagactgccctgtgtggtcaccagagcagggggctgttccagggatttaacttcactcagaaacacagactctgggcttgtgcttgcctcctgatttggtcttgcttctccgcatgctgatcacagacactgggacacagcagagacccactggaacatcagagtcattcccaagttcaccagcaactaggggggcctgaaagggaaaggaggtccctgggcctcagaaaactcctgcagagastccccnnnnnnnnnnnnnnnnnnnnnnnnngaaaaatgcttagagcatggtcatgccaggatctgtcaggcttagaggagctgtccagaatagagggagaagacatcttaaaatactgccacaggcctgtccacgtttgccaggcattggtggtgcacacctttaattccagcactggggaagcagacgnnnnnnnnnnnnnntnnnnnnnnnnnnnnnnnnnnnnnnnnnncgagttccagaacagcctccaaaacaatnnnnnnnnnnnnnnnnnncaaaaaccaaaataaacatgctgccacagaagtgcttctgccatttactagggctggacagctttcccacatgggtctaggacgatgtctgtggtgatcacctttatttgtccagggtactcctgtccttgcaaaagcccccgttcctgctctggaagtgctgtgtcttgtgtctaggaagatccaagaacagagggacagactttctgggcagtaggaccaggtcaagagtaaagggatgactcttgagacaagagtcttgtgcagctcagattgcctctgagcctgctgtgtattgatcgtgaattacttacttttttaatgcttttactgacataccaagtgctaggatacagtcattggtctctcttctttactgtataaaatgttcatttaaaaaatgtttgtaccagctgggcggtggagatgcgcacctttannnnnnnnnnnnnnnnnnnnnnnnnnnnncgatttctctgagttcgagaccagcctggcctacaagaactagttctaggacaggcctccaaagccacagaaaaaccctgacttgaaaactccccccccccaccgcaaaaaataaatgtttgtacctaagaccttttattttggcccatattttgcttatgcatttgtattagtcatatcttaagagtttagatcaatgcatttactattacagagaaaaccctaactcaagtatccagaaatatataggaactacctacctgagctaaataaaatattacctggaagt

SEQ ID NO: 418 - DNA, 1870 bp, Mesocricetus auratus
tcacaactctgagacctgcagcccctgcccttcagctggtacacatggcactgtcccagtacacctccttgtccacagagctagtactggccactgccatcttctgtatagtattttgggtggccagagctttaagaacccaggtccccaaaggcttgaagactccaccagggccctggggcttgcccattcttgggcatgtgtctgaccctggggaagaacccacacctgtcgctgacaaagctgagcaagcagtatggggatgtactgcagatccgcattggctccacacctgtggtggtgctgagtggcctggacaccatccggcaggccctggtgcggcagggagatgacttcaagggccggccagacctctacagtttcacacttatcactaatggcaagagcatgaccttcaacccagactgtggaccagtgtgggctgcccggcggcgcctggcccaggatgccctgaaaagtttctccatagcctcagacccaacctcagcatcctcttgctacttagaggaccatgtgatcaaggaggctaaccatctagtcagcaagttgcagaagctaacggcagaagttgggcacttcgaacccgtcaaccaggtggtagaatcagtggctaacgtcattggagccatgtgctttgggaagaacttcccccggaagagtgaggagatgctgagaattgtaaagggtagtagcgactttgtggagaacgtctcctctgggaatgctgtggacttcttccccatcctacgctacctgcccaacccagacctcaagaggtttargargcttcaatgataactttgtgctgtttctccagaaaacagtccaggagcactatcaagacttcaacaagaacagtatccaggacatcacaggtgctctattcaagcacagtgagaactccaaagacagcggtggcctcatccctcaggagaagattgtcaacattgtcaatgacctctttggagctggatttgacacggtcacaacagccatcaccykgagcattttgctccttgtgacatggcccaatgtgcagaggaagatccacaaggagctggacacagtgattggcagggatcggcaaccackkctttctgaccgacttcagctgccctatatggaggccttcatcctggagctctaccgatacacatcctttgtccccttcaccatcccccacagcacaacgagggacacctcactgaatggcttctacatccctaaggatcgctgtatcttcataaaccagtggcaggtcaaccatgacgaaaagcagtggaaagacccctttgtgttccgtccagagcggtttcttactgataatgacacagtcatcaacaagactctgagtgagaaggtgatgctctttggcttgggaaagcgcaggtgcattggggagatcccggccaagtgggaagtcttcctcttcttagccatcctgctgcagcagctggagttcagcgtgccaccgggcmmaaaggtggacctgacacctacctacgggctgaccatgaaacctcagacctgcaaatacatccaggcgtggccacgtttttccaaatgaagatggctgaggcaggggaggaggcatccatggggctgtcacctctgtttctttccctttctttttaaataacagcttttttttggagtacaattctttcaccaaataattcacctccaatcaaatagaatattgtctgtcatatacccccaaacctatacccattaagatttatgactattcatcctaacctgtctcccttgctccacmagatgctaatgwagtttttgactcgataaatttgcctactctagtcccatcacataaactcaatgatctatg

SEQ ID NO: 419 - DNA, 1832 bp, Mesocricetus auratus
gagaagggtctccatggatgcakttktggtgttggtgtttattctctccwgtctgkttytcctctcactctggagacagagctctgagagarggaagctccctcctggccctactcctctcccamttattggcaatttcytccaaatwgatgtgaarracatcagyggatccttraccaatttctcaaaagtctatggccctgtgttcaccctrtacttgggcakgaagcccrctgtggtgttgcatgggtatgaarcagtgaargaggcwctgatygaccatggggaggagtttgcwggaagaggarrcttcccartggcwgaaagadwtaataaaggccttggyattgtttttagcaatggaarcagrtggaaagasayaaggmgmttctcactcatgrctctgmgrartctgggcatgggcaaaaggarcatygaggaccgtgtacaagaggaagcacagtgycttgtggaggaactgaggaaaaccaatggstcaccctgtgatcccacgttcatcytgrgctgtgctccmtgcaatgtgatmtgctccattattttccagaatcgttttgattatamagatmaggattttcttaccttyatgraraaastaaatgaraatgycaggattctgagctcdccctggttkcaggtctgcaataattttccttyaytaattgactactgtccaggaagtcatcayavaataacaaaaaatrtcaattatwtbaraarhtacmtttyrgagaaaatrraagaacatcaggaawcattggatrttgmaaaccctcgggacttyattgattaytacctgattaaactaaarcaggsaaacyacaatcarcaatcrgaatttwcacytgaaaatctgrcaaccactgtvagkgatctgtttgstgctgggacagagacaacragcacracgctgagrtatgctctcctgctcctgctgaagcacccacacgtcacagctaaagtccaggaagagattgatcaagtrgttggcagacaccgcaasccctgcatgcargacaggagccacatgccctacacagatgccatgattcatgaggtccagagattcatmgacctcatccccaycarcctgccccatgcggtgacctgtgacattaaattcagggactacttcatycccaagggaacaacgrtaataacwtcactgtcatcagtgytgcaygacarcaaggaattccccaacccagaggtatttgacccwggccaytttctwgataaraatggaaastttaagaaaagtgactacttyatgccyttttcrrcaggaaaacggatrtgtgcaggrgagggcctggcacgcatggarctstttctattcctgaccaccattttrcagaactttaagctgaaatctmtgrttcacccwaaggacatygatacaaccccagtrstraayggatthgcctctctgccaccctcctatcagctctgcttcattcctgtctaamgaagatwmgastttctggccyaggmtgygwttdttttytcgcaatccmctytagaccttcawtccrtcwgggacaaagtgtcctyyctmccctctcatgtattcycattcwrtsaaktcycargaaacasctgtcaaycattttgcaawwtctggartcastgcayaaatrtatttctatttkytattctttgyaacagtsttrytatyccttrtgctaatatrtatstkktcytgarmwaaamtayaamtttacyrytatatwactaatayaataagataattcattgtyatttttctkcytcatgttttcartaataaatrtatttgatttgtgtaaaaaaaa

SEQ ID NO: 420 - DNA, 2352 bp, Cricetulus sp.
  misc_feature (2)..(21): n is a, c, g, or t
  misc_feature (592)..(609): n is a, c, g, or t
  misc_feature (1149)..(1156): n is a, c, g, or t
cnnnnnnnnnnnnnnnnnnnngtaggatccgggtaccatgggcggaggaacggctgttggtgtctggccggwggccmgcyagagrcccggggttttgctggtcgccgagcctsttcttcaggaggagccatggcgctcagrgtcactaggaacacgaaacttaacacagaaaataaggccaaggtcagcatgrcaggcgccaagsstgtgcctgtgrcrmttgctgcrgcctccaagcccgggctgagaccragaaccgctctaggrgatattggtaacaaagtcagcgarcaggcacaggcaagastgcctctgaaaaaggaactaaaaacytcagttactggaaaagtttcagctaaaatcccrccaccaaaacctcwggagaaggttcctcctgtgagtgarccagaggtggaacttgctgagmctgaacmtgarcctgaacctgttatggasgaaaagctttctcctgaacctatyttggttgataatccctctccaagcccaatggaaacatctggatgtgcccctgcagaagaatacctgtgycaggctttctctgatgtaattcttgccgtgagcgatgtggatnnnnnnnnnnnnnnnnnnccaaacctctgtagygaatatgtgaaagacatatatgcytatctcagacarctggaggaagarcartcagttagaccaaratayctactgggycgtgaagtcactggaaacatgagagccatcctaattgactggctgatacaggttcaaatgaaattyaggytgytgcargagacyatgtacatgactgtytccattattgaycggttcatgcaggataaytgtgtrcccaagaagatgctgcagctagttggtgtgacwgccatgtttattgcmagcaaatatgaagaaatgtaccctccagaaataggtgacttcgcttttgtgactaayaatacttacactaagcaccaaatcagacaratggaaatgaagattytaagagttctaaacttyagtttgggtcgccctctgcctctgcacttcctccgtagarcstctaagattggagaggttgacgttgaacagcatactttggccaaatacctcatggagctcactwtgttggactatgacatggtssactttgctccttctcannnnnnnnctggagctttttgcttagcactgaaaatycttgacaayggtgaatggacaccraccctgcagcactacctgtcctayactgaagaatcccttctgcctgtcatgcagcacctggctaagaatgtagtcatggtgaaccrtggccttacaaagcacatgactatcaagaayaagtatgcaacatccaagcatgctaagatcagcactctggcacagctgaattgtacactagttcagaatttgtccaaggctgtgkcaaaggcrtaactcaagtggaccacwacactacatcgscaaatgyrattggcaccatgtgccrcctgtacatagtatmcagtgtttacttgctcttcaataaaggytgttttacttttcatagcttacctcatwtgrwwsyyggwtsytctgactctaggataacaagggttgtctaaaacatttaggattatttttgaaactgcttttagtttaacagagaatccaagtaatgtacgtaattgtagcctatatgtttatgtacttccttctttaatgtgtcctggtcatatcttttaagtcatcctgcaaagccctctgcctagctcttgtttaaactgtcaatttaccagcttgtccttagttcccttttctatttcttcaggtggttgctgtccttcactgtgtcttgagctatggactttcagatctgaaccccagttttcttgtgaattatttatttgttaattggcttgggaaatagcatgttttaaaattaaaggtataaaaagaatttgccccttaatctcaatgtcctatataaatgtaatcatgcatatgttgtcaaggagatatggactcatttttttcaacaatattccttttaatgcctatattgcatttcctaagtgtacatttcatactgtatgtaatgtattcagtgatcctttacaatacattcaaattgcattctctcattgcctctaaacaatactgctaaaatgttgttttatgccttgcttggctgtatgcatagtagctttcccagggggtatatgctttaaattctgatgaagccagatgagacttttggttgtgggcactataccaaggtgccatttcctctatctttccactgtcttatgacacttaactggcaaaaatcctgtctctgtttgttttaatttatacatctgatgtcaagttgaataaaatttatta

SEQ ID NO: 421 - DNA, 2190 bp, Cricetinae gen. sp.
  misc_feature (497)..(526): n is a, c, g, or t
  misc_feature (1333)..(1351): n is a, c, g, or t
attgtcaagggctgagctttgcttgcgttccatccmgagctggggctgcsgtgctcaccttggcccccaggtcctccgcccctgagtgtygggcccgctttcttyagggttcccgggccccgctcccgggggcctgagccgccgcaytagygctccatggagaacttccaaaaggtggagaagatcggagagggcacgtacggagtggtgtacaaagccaaaaacaagttgacgggagaagtggtggcgcttaagaaaatccggctcgacactgaractgaaggtgtgcccagtactgccatccgagagatctctctgcttaaggaacttaatcaccctaatattgtcaagctgctrgatgtcatccacacrgaaaataagctttacytggttttygaryttctgcaccaggacctcaagaaatttatggatgcctctgctgtcactggcatycctcttcccctcatcaagagctatytgttccagctgctccaggnnnnnnnnnnnnnnnnnnnnnnnnnnnnnntgcaccgagaccttaagccccagaatctgcttatcaatgcagagggrtccatcaagttggcagactttggactagcaagagcctttggagtcccygttcgtacttatactcatgaggtggtgaccytgtggtaccgagcacctgaaatccttctaggctgcaagtactactccacagccgtggatatctggagyctgggctgcatcttygctgaaatggtgacccggcgggccctgtttccyggagattctgagatygaycaactcttccggatcttycgractctggggaccccwgatgaggtggtttggccrggagtyacttctatgcctgattataagccgagtttcccsaagtgggctcggcaagattttagcaaagttgtgcctccactggatgaagatggrcggagcytgttatcgcaaatgctgcactatgaccccaacaagcggatttcagccaaagcagccctggcccaccctttcttccaggatgtgactaagccagtaccccaccttcggctgtgatgtccttcccaaagccytcctcacccttggtctgacttgactctgggccttttggacacaggtcagccttctactcttttctggctgtcttagcactcactttttctcttggccagccagttcccgggactcagaggtgcagggaaagatgaggtgacaggaaaaagttttggtatcagatgcacttaacccagcttccactaccttctctccctcttagtcatcactgagggttggtatgcaaaacaaaacaaaactgaccattctctacccacccccnnnnnnnnnnnnnnnnnnncagtcttataaattattgtgtcccatgtttaggaagacacaccccagacctcctggtgccactgttttataaaggccaactgataagttgggacatttaggaaccaagccacagaggtctattttaatgaattagatgaaaaaaaaaatagatccaaacagtttataccttagttgtagtgtctggcctcgcccgacaatcaaggaggcccagctggagaagcagaagaaatgttccctttcagcactctgtctaccttctgcagggcaagaagtcaggagggggatagggattggtctgttcaccataattcacaaggcaaggtgaaagacactggaatctttcttttagtaattttgttttctggtgctaacgactgaacacaggacctcgccctcactaagcaaatgcaccacccgtatgccagattttctagctcctctttttggcgttttagctcttcagtttgtcagaggtccctgttgccatcttcttcctctgagagtcacccctgactccatagtggaagtgaagctttagatgtcactttgaaaggctttgacctggtcaggtcatcgggggacattttctataaaagagttaacaattatatttatatttcaagttatagtagtttggatattttagtgttttgatttttgtttttttggggggcggggcagtgtggatggatttgttgccatgtgcactttggaattttgtaatgcaattgttgaaagaaaatatttcttttatgatcttctccctctaccccttgtcctccagtgttctgttaatatttatttgtaatttagtttgtaattcattaaaagaaatta

SEQ ID NO: 422 - DNA, 983 bp, Cricetinae gen. sp.
  misc_feature (80)..(104): n is a, c, g, or t
agaaggcgagtctctttccgttcccagcgcasscatggctcgtggtcccaagaaacatctgaagcgtgtwgccgctccannnnnnnnnnnnnnnnnnnnnnnnnccggcgtgtttgctcctcgtccrtccactggccctcacaagctgagggaatgtstgcctctgatyattttcctraggaacagacttaagtatgccttgrctggmgatgaaktmraraagatbtgcatgcagcgyttyattaagattgawggcaaagtyaggactgaymtaacctaccctgctggattyatggatgtsatcagcattgacaaractggagagaacttccgcctgatctatgacaccaagggycgctttgctgttcatcgtatyacayctgaggaggccaagtayaarttgtgcaaagtgagaaagatctttgtgggcacaaaaggaatcccacatctggtgacccatgatgctcgaactattcgmtaccctgatcccctcatcaaggtgaatgacaccattcagattgattkggagacaggcaaaawaactgacttcatcaagtttgacaccggtaacctgtgtatggtgactggrggtgctaacttgggaagaattggtgtgatcaccaacagagagagacatcctggctcttttgatgtggttcatgtgaaagatgccaatggcaacagctttgccacccggctttccaacatytttgttattggcaagggcaacaarccatggatttctcttccccgaggaaaaggaatccgcctyaccattgctgaagagagagacaagaggctagcagccaaacagagcagtgggtgaaatggtctctaggagacatgctggagaaatrtytgtactcttgccyttytaggcaactgtgctcaattaaacagcatgatraaattacctatgattttgtgttgcctttttcaaaaaattttttggcatcttataacgaataaattctggggctggc

SEQ ID NO: 423 - DNA, 1244 bp, Cricetulus griseus
atggctggcagagagaagacaaagagtgcaaacagagtgctgaggataagtcagctggatgcacttgaactgaacaaggctctggagcagcttgtgtggtcccagttcacacagtgctttcatgggttcaagccaggcctgttagctcgatttgaacctgaagtgaaagcatgtctgtggcttttcctatggaggttcaccatctactccaaaaatgccactgtgggccagtcagtcttgaatattcagtacaaaaatgatttctcttccaactcaagataccaaccaccaagtaaaaaccagaaactgtggtatgctgtgtgcaccattgggggtagatggttagaggaacgatgttatgatttgtttcgaaaccgtcatttagcatctttcgggaaagtcaaacagtgcatgaatgttatggttggacttttaaaattaggggaattgataaacttcttaattttcttgcagaagggaaagtttgcaactttgacagaacgcctccttggcattcattctgtattttgcaagccccagaacattcgtgaagttggctttgactacatgaatagggagcttctctggcatggctttgctgagtttctgatttttctcttaccactcatcaatatccagaaattcaaagccaaattgtcttcctggtgcatacccctcactggtgctgctagtagtgacagtgccctagccagcagtggcaaagaatgtgctctctgtggagagtggcccacaatgcctcacaccattggatgtgaacacgtcttctgttattactgtgttaaaagtagcttcctatttgacatgtactttacctgtcctaagtgtggcatagaagtgcacagtgtgcagccactgaagtcaggaattgaaatgtcagaagtgaatgctctttagacagcacattgtttcctctgagggaggatgtattgtgtcccagtccttggtattagtcatcctcagtatcatggggaggcagctgggaaaagccatgtgtggctcagccgctgtcctcttcttttccaagcacaactaaattctaatcactggaaactaaatgatacgagagactcttacaaatgttcacggtactctttaaaatcatctattacatcttttaatgtcaagaataatggaaaatttttgtcagatgaatactgagaatgactaagaatcctttatagaaaaggtcaagctctaaaaataaaagatttttgagacgctgg

SEQ ID NO: 424 - DNA, 1354 bp, Mesocricetus auratus
agggctggctaggctggagcagctatggcagcgacactcacttggattcttctctttgtgggtcttctggcagggctgagggacaccaaggcccagcagaccaccttatacccacttgtgggtcgtgtttttgtgcatcccttggaacacgccaccttcctgcgcctcccagaacacattgcggtgccacctactgtccgactcacctatcaggcccacctccagggacatccagacctgccccggtggctgcgctacacacagcgcagtccctatagccctggcttcctctatggtactcccactccagaagatcgtgggcgccaggtcattgaggtcacagcctacaatcgagacagctttgacaccacaagacagcgactgctgctgttgattgaggaccccgaaggtccccggttgccataccaagccgagttcctggtgcgcagccatgatgtagaggaggtactgccctccacacctgccaaccgcttcctcaccgccttggggggactctgggagctaggggaactccagttgctcaacatcacatctgccttggaccgtggaggtcgtgtccctcttcccatagagggccggaaggaaggggtatacatcaaggtgggctctgccacacccttctctacctgcctgaagatggtggcatcaccagacagctatgcccgttgtgcccagggacagcctccattactgtcctgctatgacagcttggcaccccacttccgtgttgactggtgcaatgtatctctggtggacaagtcagtgccagagcccttggatgaggtgcctactccaggtgatgggatcctggagcatgacccattcttctgcccacccacggaggccacaggccgagacttcctggcagatgccttggtcaccctcttggtgcccctgctggtggctctactgctcaccctgctgctggcttacatcatgtgctgccggcgtgaaggacaactgaagagagacatggccacctctgacatccagatggttcaccattgtaccatccatgggaatacagaagagcttcggcagatggcagccaggcgcgaggtgccccggcctctctccaccttgcccatgttcaacgtgcgcacgggagagcggttgcctcctcgagtggacagcgcacaggtgcccctcatcctggaccagcactgagagctctgccagttccagctgcaccactcagagttgcggcccgtgaccacacccaccgctgagaccagctcccggtcttcttcacctccggcaccagacaggcggatggatggggtagggaggcctgaggggtcagcaccaagaataaatacctgctgctctgwtc

SEQ ID NO: 425 - DNA, 1680 bp, Cricetinae gen. sp.
actggccaccatgctgggctcagrgctgmtcctggtggccatactggcctacctgagtgtcatggtcttggtgtytgtctggaagcagaaaktcagggggaarctccctccaggacccactcctttgccttacattgggaattacctgcagctgaatacmaaagacatstacagctccatcacagagctcagtgagcgctayggccccgtgttcaccatcyacctkgggcctcgcccmgtcgtggtgctctatggatacgaygcagtmaaggaggctytggtggaccaagcrgaggarttcagtggacgaggcgarcaggccacctataayacactcttcaaagrctatggtgtgrcsttcagcagcggggaacgagccaarcarctcaggcgcttctcyatygcracactgagagactttggwgtgggaaagcgcrgtgtggaggagcgtatccaggaggaggcggcctrtttgrtcaagatgttacrgagcaccmgyggagcacccatygaccctamygwctacctgagccaaacagtstccaatgtcattarytccrttgtcttcggggacsscttcgactaygaggacaaagagttcctggarctgctrcryatgatgrrtsagatraacaratttgcagcttctcccrywggacagctctatgacatgttccaytcagtgatgaartacctgcctggaccacagcaacagatcatcaagaatacraaggaactggaagacttyatgrtcaggaaagtgaagcagaaccagagcaccctggacctcaactccscacggaacttcattgaytcctttctcatccacatgcawgaggagaagaagaaccccrmttccgagttcaacatamagaacctggtgatgacatcactgaacctcttcttygctggttctgagacmgtcagctccacgatrcgytatggcttcctgctgctcatgaagtacccagargtggaggccaaggtccatgaggarattgaccgggtgattggcaggaaccgacagccccagtttgaggaccgcatgaagatgccytacacsgaggctgtcatcaatgagatycagagatttgctaaycttgctccctkkggcattcctcggaagactatcmagaayaccacattccgtggcttcttcctccccaaggacacygamgtgtwcccyatactaggttctctgctgackgacccaaagttcttcmccagtcccaaasatttcaacccccagaacttcctggatgacarrgggcagytgaagaagawtgctgcttttgtgcccttytcygtaggaaagcggttctgtytgggggacggcctsgcyaggatggagctctttctcttcytcaccacyatcttgcagaacttccgsttmaagttcccaaagaagctggaagacatcgacgcgtcccccaaaccgttrggrtttkccaggatcataccacrttacaccatgagcttcctgcccatctgattcyggrrycaaccaaggtggagcaarakggrggkrgagtctggagtgagrccagagrcagagygaagggagaaggtgaaaaytggggtttcagaagggaccacatgsctggaagaaaatttayryrccyrcttaaattgkgaygctaatwaaacraatarcrykcagtggacagtggtcaaaaaaaa

SEQ ID NO: 426 - DNA, 6645 bp, Cricetulus griseus
  misc_feature (4002)..(4019): n is a, c, g, or t
ccgttcaggatcccggttacttatttattcgttaccccttttcttcttcttyctccctcccaaaacctcctcctttcctcccttcttttgtttccytyttgggagccgacaagtctccggaaagggagawaaggctttcyttctgccctyttcgtttccccgcctcctcccctcccccacctttccytcctccggcctytycctccctgctcsgggagatctttccyggcggccgccckgacggggtctgagcwcttargcggcggtggcgcaggctttttgtagcgagmtttgcgcctgcgcagcgcgcctgcctcrccatgcacgggggtggccccccctccggggacagcgcatgcccgctgcgcaccatcaagcgagtgcagttcggagtcctgagtccggatgagytgaagcggatgtctgtgacagagggtggcatcaartacccagagacracygagggaggtcgccccaagcttgggggactaatggatccaaggcagggggttattgagcggactggccgctgccaaacatgtgcaggtaacatgacygagtgtcctggccaytttggtcacatcgaactggccaaacctgtgtttcatgtgggtttcctggtgaaracaatgaaggttttacgctgtgtctgcttcttctgctccaaattgctygtggattctaataacccaaagattaaggacatcctggccaaatctaagggacagcccaagaaacggcttacacatgtctatgacctttgcaagggcaaaaacatctgcgaaggtggagaggagatggataacaagtttggtgtggagcagccygagggkgatgaggatctgaccaaagaaaagggtcatggtggctgygggcgktaccagccycgsatycgrcgctctggcctggagctgtatgcygagtggaaacatgttaatgaagactctcaggagaagaagatcttrctgagtccagaacgagtccatgaaatcttcaaacgcatctcagaygaggaatgttttgttctgggcatggarcctcgctaygccaggcctgagtggatgattgtcacagtgytgcctgtgcctcctctctctgtgcgacctgctgtggtgatgcagggttctgcccgcaaccaggaygatctgactcacaarctggctgayatcgtgaagatcaayaatcagctrcggcgraatgagcagaayggtgcagctgcccatgtcatcgcagargaygtgaarctcctccagttccatgtggccaccatggtggacaatgarcttcccggcttaccccgmgccatgcagaagtctggccgtcccctcaagtccttgaagcaacggttgaagggcaaggaaggacgggttcgagggaatctaatgggcaagcgagtggacttctcagcccgmackgtcatcactcctgaccctaacctatcyattgaccaagttggtgtkccccgctccattgctgccaacatgacctttgcagagattgtcacccctttcaacattgacagacttcaggaattagtacgmaggggaaacagccagtatccwggagccaagtacatcattcgagacaacggtgatcgaattgacttgcgtttccaycctaaacccagtgacctacacctgcagactggctataaggtggaacggcacatgtgtgatggrgacattgttatcttcaatcgtcagccaactttgcacaaaatgtccatgatggggcatcgggtccgcatcctcccctggtctactttycgcttgaatcttagtgtgacaactccatacaatgcagactttgatggggatgaratgaatttgcatytgccacagtctctggagacacgggcagagatccaagagttggccatggtrcctcgmatgatygtcacccctcagagcaatcgaccwgtcatgggtattgtgcaagacacactcacrgcagtacgmaaattcactaagagagatgtcttcctggagcggggtgaagtgatgaaccttttaatgttcctktccacrtgggatgggaargtyccacagccagctatcctcaagcccaggcccctgtggacaggcaagcagatcttctccctcatcatacctggtcacatcaattgtatccgtacccacagcacccaycctgatgatgaagacagtggcccttacaagcacatctcacctggagacaccaaagtggtggtggagaatggygagcttatcatgggcatcctttgtaaraagtcyctgggcacctcagcaggctctytggtycacatctcctacctagagatgggtcaygacatcactcgcctcttctactccaayattcagactgtcattaacaactggctcctcattgagggtcataccattggcattggggactccattgctgattccaagacttaccargacatccagaacactattaagaaggctaaacaagatgtaatagaggtcattgagaaggcycataacaatgagctggaacccaccccaggaaacacrttgcgtcaracatttgagaatcaagtgaaycgcattctcaatgatgctcgagacaaaackggctcctctgcacaraartccctgtctgaatacaacaacttcaagtccatggtggtatctggagctaaaggktccaaratcaacatctcccaggtcattgctgttgtyggrcaacaaaacgtggagggcaaacggatcccatttggatttaagcatcgracgctycctcactttatcaaggatgattatggtcctgagagtcgaggyttygtagagaactcatacttagctggtctcacrcccactgagttcttcttccatgccatgggaggacgagagggcctcatygacacagckgttaagactgctgaracygggtatattcagmgaaggctgataaaatccatggagtcagtgatggtgaaataygatgcaactgtgcggaactccatcaaccaggtggtacagctgcgctatggagaggacggcctagcaggcgagagcgtkgagttccagaatctggctacacttaaaccctckaacaaagctttygaraagaagttccgctttgattayaccaatgagagggccctgcgkcgcacwctrcaggargayctggtraaggacgtgytgagcaatgcacacatacaraaygagctggarcgkgartttgagcggatgcgagaggaymgggaagtgctsagggtcatcttcccaactggtgacagcaaggtggtcctcccctgtaacctycttcgtatgatctggaatgctcagaaaatcttccacatcaaccctcgmcttccytctgacctgcacyccatcaaagtggtagagggagtcaaggaattgagcaagaagytggtmattgtgaatggggatgacccactaagtcggcaggcccaggagaatgccacwttgctcttcaacatccacctaagatccacactctgctctcggcgcatggctgargagtttcggctaagtggagaggcctttgactggctgcttggggagatagagtccaagttcaaccaagccattgcccatcctggagaratggtgggagctctggctgcacagtctcttggagaacctgccactcagatgactctgaacactttccactatgctggtgtgtctgccaagaatgtgacactgggtgtacctcgacttaaggagctyatcaatatttccaagaagccaaagacyccttcactcactgtcttcctattaggccagtctgctcgagatgccgagcgggctaaggacattctttgccgyttggaacatacaacmttgagaaaggtgactgccaacacagccatctattatgaccccaacccccagagcacagtggtggcagargatcaggartgggtgaatgtgtactatgagatgcctgactttgatgtggcccgaatatcyccytggctgctkcgtgtagagctrgaccggaagcacatgactgaccggaagctcaccnnnnnnnnnnnnnnnnnnaaaatcaatgcaggttttggygatgatttgaattgcatcttcaatgatgataatgcagagaagttggtccttcgtatycgaattatgaacagtgatgaaaacaagatgcaagaggaggaagaggtggtggayaagatggatgaygatgttttcctgcggtgyattgagtccaacatgctgacagatatgaccctgcagggyatcgagcagattagcaaggtrtacatgcacttacctcagactgacaacaaaaagaagatyatcatcacagaggacggagagttcaaggccctgcaagagtggatcttggagactgatggtgtgagcytgatgcgggtgcttagcgagaaggatgtggaccctgtrcgcaccacgtccaatgatattgtggagatctttacggtrctgggcattgaggctgtgcggaaggccctggagcgggaactgtaccatgtcatctcctttgayggttcctatgtcaattatcggcatttggctctcttgtgtgacaccatgacytgtcgmggccacttgatggccatcactcgtcacggagtcaaccgccaggacactggaccrctcatgaaatgctcctttgargaaacggtggacgtgcttatggaagcagctgcccayggggagagtgaycccatgaagggmgtctctgagaatatcatgytgggccagcttgctccagckggcactggctgttttgacctcctsctygaygctgaraagtgcaaatatggcatggagatycccaccaatatccctggcctgggggctgctggacctactggratgttctttggctctgcacccagtccratgggmggaatatctcctgcaatgacaccctggaaccagggtgcaaccccagcctatggtgcytggtcyccaagtgttgggagtggratgacyccaggagcagctggcttctcgcccagtgctgcatctgatgccagtggcttyagcccaggttactctcctgcmtggtctccsacaccaggctctccaggctcccctggaccctcragcccatayatcccctcaccrggtggtgctatgtctcccagctactcaccaacwtcacctgcstatgagccacgctcccccgggggctatacaccccagagcccttcatactctcctacttcaccytcctactccccaacctcgccatcttattccccaacyagtcccaactatagccctacrtcacctagctactckccracctctccatcctactcsccaacctctccwwsctactcmccracctctccatcctactccccracytctcccagctactccccracmtctccyagctactcmccracatcaccyagctactccccracttctcccagctactccccracatcwccyagctactcaccmacmtctcccagctactccccmacytcmccaagytaytctcccacctcccccagttactcaccgacwtcyccmagctaytctcctacatctccaagctactcgccaacttctccaagttattcwcccaccagccctaactattctccaactagtcccaattayacsccaacatcmcccagctacagcccaacatcacctagytactcrcctactagtccaaactacacaccaaccagyccyaactayagcccaacctckccaagytattccccaacttcacccagytactccccsacctcgccaagctaytcmccctccagcccacgstacacaccacartctcccacctacacmccmagctctccmagctacagccccagctcwccaagctacagccccacytcacccaagtataccccaactagtccttcytacagtcccagctcwccagagtataccccaacctctcccaaatactcacctacaagccctaaatattcacctacwtctcccaagtattctcctaccagycccacytactcacctaccacmccaaaatactcgccaacctctcctacatactcrccaacctctccagtctacaccccaacctcccccaagtactcrcccaccagccccacctactcccccacctcycccaagtactcrcccaccagccccacctactcccccacctcccccaagggctccacttactcyccyacytcccctggytactcwccyactagccccacctacagcctcaccagcccagccatcagccckgaygacagtgatgaggaraactragggygagcagggcgcagcagcagcaggttagggtcrgacagcctyagtggcctgtgcagtcacttcccttgrgctgtgaccctrgcctggrccccttgtacataactccttgtgacagaaccctcyggaggttctagatcccatttttgatgggcttttygtcttgycctrcactcrtgctktctkkskwsksactsacagctgcaggrytttrttaccccacctgttccrtgcctgactccacagtgaaggtctttgcttgcctgtgacttgattgggattmaaggcattttmacytctgaaggctmrttcctgctttgggtcayacaaatgacctctggaagaacaaagcttaagctgccttttgtctgttatttttttgaaatttaaataaagtttactmattttgacc

SEQ ID NO: 427 - DNA, 2138 bp, Cricetulus sp.
cttgatctccagccgcgggtttcatggggctcctcaggatcatgatgccgcccaagttgcagctgctggcggtggtggccttcgccgtggcgatgctcttcttggagaaccagatccagaagctggaggagtcccgggcgaagctagaaagggcaatcgcaagacatgaagtccgggaaattgaacagcggcatacaatggatggccctcggcaagatgcggctgtagatgaagaagaagatatagtcatcatttataacagagttcccaaaactgcaagcacctcgtttaccaatatcgcctatgacttgtgtgcgaagaatagataccatgttcttcacatcaacactaccaaaaacaacccagtgatgtcattgcaagatcaggtacgctttgtaaagaatataaccacttggaacgagatgaaaccagggttttatcatggacacatttcttatctggattttgcaaaattcggtgtgaagaagaagcccatttacattaatgtcatcagggaccctatcgagaggcttgtttcctactattactttctgaggtttggggatgattacagaccaggattaaggagacggaaacaaggagacaaaaagacctttgatgaatgtgtggctgagggcggctcagactgtgctccggagaagctctggctccagatcccatttttctgtggccacagctcagaatgctggaatgtgggaagcagatgggctatggatcaagctaagtataacctcattaacgagtactttctggtgggagttactgaggagctggaagacttcatcatgctactcgaggcagctttgccccggtttttccggggtgctacagacctctatcgtacaggaaagaaatcccacctgaggaaaaccacagagaagaaacttcccaccaagcaaaccatcgcgaagctgcagcagtctgacatttggaaaatggaaaatgagttctacgagtttgcactagagcagttccagttcatcagagcccacgctgtccgtgagaaagatggagacctctacatcctggcccagaactttttctatgaaaagatttacccgaagtcgaactgagtggaagtgtgaccagagcagtcttgaacctggacttggctgtgttgtcaccgttgttctcagcttctgcacctgttctgctaatcgagtccaagccgagccagttcttgttgggccgagttggggaacagacaggagtgtcaagaaattagatgctgaatgggatgtcagtgttctaaggagttcttaagttcttaagtgtgatgaattgttatttcttttgttactttgttttcattttcatgatagctataatctcccagtgaggagaaatctcatgtcacttaaaatacacacatggaggtttaatcagaaggctgaataccatttcagaagaggttctgtgattctcttgcttttgatgaagcatttttatcacctctctttggatgcagatgagtctgtatggcacttggagttttgtgttgcacacccctactggatagtgctaataactatttgccagtagctgatttgtttatgtggatcacgtctcacagagtttattggaatgtttgatcatgttttctcagaactgtttttgctgtagttgagtttgcccatatttatgtaggctttattttattttttggatgatcattagtgttaaagaaatcaactgaaaaccatgaataatactgtaaaaagacaaaacagttaaaagcagtattcctgatttctgtctccccagtatctaatattggggtggtatttctaagaatgttgacaacattatctgaggctttcttaaggatttccacacattcatataaaaaaaatgagtttagtatttgtttctccatggcttctctataacccagtacactgaagtatcggtgactgcatatggcaactccatcagtgagctgtgatggtaggattttcctacctctgtacttttacctgtagactatttttactacggtgctttataatgtgttttaaagcattgcatttacaaaagaaaaatgctgtaaatattgcatattttatgtatttggaccaaaaagttacaagtcagtagataaaaagtggttttgcacc

SEQ ID NO: 428 - DNA, 603 bp, Cricetinae gen. sp.
  misc_feature (508)..(536): n is a, c, g, or t
gcaagagagagagcaagccaccaccacagcagcctggcccatcaattctgtgacatggatctccggaaggtgctgtcccgggtggttctgttcctgctttttctctatctgtcaccgctgggaagtcactcccaccctctgggcagtcccagccagtctccggaacaatccaagatgcagactctgctagacctgctgagggaaaaggcagaggcggtggctcgggggcagctcctgaaggaccaagacgtcatcacaaaagcacctctccaaagcacccttgggtctcaagacagcaccctccatgtcctgcagaaacttcgaaactccaagaagatgcataattcgggctgctttgggcagaggatagacagaatcggctcattcagtcgtctgggctgcaatgtgctgaagcggtattaggatgagctcccagctgcagacaccggctcctgactccacctggggctccttccccaatgctgggacccccttttgaagtgatccnnnnnnnnnnnnnnnnnnnnnnnnnnnnntggttgttttctacaagactgtttcttacctttgagcacagacttttcatggtgtaataaacacagc

SEQ ID NO: 429 - DNA, 2378 bp, Cricetus cricetus
  misc_feature (1953)..(1975): n is a, c, g, or t
cgcagcggccgccgccgtccgcccgccctcagccagctgctcggtgccactcgggcagcgtctgcggcggctcgacgaggcgctgacggggcggcggcggacggccggagctcctcggggttcttcggcggcgactagttctcatggggctggccgagtcattgcgtccgtgcgctgtgaggacgttcacattcaaggagttcggaagttcctggatagtgtgcttgggaggaactgccataactggattccatctctagagtttttgtagcacaccgagagccatgaacagcttcaataaggacgagtttgactgccatatcctcgatgaaggctttacggccaaggacattctggaccaaaaaattaatgaagtatcctctgatgacaaggatgctttttatgtggcggaccttggagacgttctgaagaagcacctaagatggctaaaagctctccccgtcactcccttttatgcagtcaaatgtaatgacagcagagcgttagtgaacaccctagctgccattacagttgactgtgcaagcaagactgagatacagttggtacagggccttggagtgcctcccgagagagtcatctatgcaaatccatgtaagcaagtgtctcagatcaagtatgccgccagcaatggagtccagatgatgacttttgacagtgaaattgagttaatgaaggtcgccagagcacatccaaaagttaccaagttggttttgcggatcgccactgacgattctaaagcagtgtgtcgmctcagtgtaaagtttggtgccacactcagaaccagcaggcttctcttggaacgggcaaaagagctaaatattgatgtcattggtgtcagcttccacgtggggagtggatgtactgaccctgagaccttcgtccaggccttgtcggatgcccgctgtgtctttgacatgggaacagaagttggtttcagcatgtatctgcttgatattggtggtggctttcctggatctgaggatacsaagcttaaatttgaagagatcaccagtgttatcaacccagctctggacaagtacttcccgccagactctggagtgagagttatagccgagccaggcagatactacgttgcctcagctttcacactggcagtcaatatcatagccaagaaaatcgtatcgaagggctctgacgatgaagatgagtccagtgagcaaaccttcatgtattatgtgaatgatggagtgtatgggtcatttaactgcattctttacgatcatgcacatgtgaagcccctgctgccgaagagacccaagccagatgagaagtattactcatccagcatctggggaccaacatgcgatggccttgaccggattgtggagcgctgtaatctgcctgaaatgcatgtgggtgattggatgctctttgagaacatgggtgcatacactgttgctgctgcatctactttcaacgggttccagaggccttctatctactatgtgatgtcgaggccaatgtggcagcttatgaagcagatccagaaccatggcttcccaccagaagtggaagagcaggatgttggcactctgcccatctcttgtgcccaggagagcgggatggaccgtcatccagcagcctgtgcttctgctagtatcaatgtgtagatgccattcttgtagctcttaccttcaagtttagcttgaattaagggatttggggggaccatttaacttaattactgttagttttgaaatgactttgtaactacagagtagggcttggcacagatgaagtatggaaggctaggagatgggtcacacttacctgtgttcctatggaaactttgaatatttgttttatatggatttttatcacttttcagacatactaacgtgtgcccctcagccactgagcaagcatttgtagcttgtacatttggcagaatgggccaaaagctaatgttgnnnnnnnnnnnnnnnnnnnnnnntcttgaaataattgggcatcagggaatgtttgcaatgtcccttaaagaagggacacacttcctgcacaggctgctgtagtcatacgagtgagtccaaacatagcagagaaggaaaaggtggatgggacaaggctataccctctacacagcatcagtttgcctagccagtccttaaagtgtgtacttggctgtgaagttggtgaggaacgtcatctgcctagcgacctgatatcctggccacaccccagggaaggcatctaaggctttttgaaccttgcctgcagaagccttgaatgttcctcaacccttgacttcgcctgcatcaccacctagtaacagttggaagtatcatacagcacttggcaatcaacttcctgtaataaatctcaacagcagcaactac

SEQ ID NO: 430 - DNA, 487 bp, Cricetinae gen. sp.
  misc_feature (306)..(325): n is a, c, g, or t
ttttttacgagaagccgtcaaaatggccgaagtggagcagaagaagaagcggaccttccgcaagttcacctaccgcggcgtggacctggaccagctgctagacatgtcctatgagcagctcatgcagctttacagcgccaggcagaggcggcggctgaaccgcggcctgcggcggaagcagcactcgctgctcaagcgcctgagaaaggccaagaaggaggcgccgcccatggagaagcccgaggtggtgaagacgcacctgagggacatgatcatcctgcccgagatggtgggcagcatggtggnnnnnnnnnnnnnnnnnnnnttcaaccaggtggagatcaagcctgagatgatcggccactacctgggcgagttctccatcacstacaagccggtgaagcacggccggcccggcatcggtgctacccactcctcccggttcatcccgctcaagtaactgcccaataaagactctagagtgcga

SEQ ID NO: 431 - DNA, 377 bp, Cricetinae gen. sp.
  misc_feature (228)..(260): n is a, c, g, or t
cactcaagtttcgacttttcctcggtcctcagccggtctycaaccgycgycttcactcgccatggaccccaactgctcctgtgcyacagatggatcctgctcctgckctgggtcttgcaaatgcaaagagtgcaaatgcaccacstgcaagaaaagctgctgctcctgctgcccggtgggctgtgcgaagtgctcccagggctgcgtctgcaaagaggcttcggasannnnnnnnnnnnnnnnnnnnnnnnnnnnnnnnntcagctgyctgtaaatagagcaatgtgtagaaacgtatttttttttacaaccccgkcctattckccacacccctttctataaagcatgtaattgataataaaaggggtgtggcgaat

SEQ ID NO: 432 - DNA, 2460 bp, Cricetulus sp.
  misc_feature (499)..(517): n is a, c, g, or t
cgagagtgtccacttatcttttcttcggttgagtttccaaaactctaatgatgccgctcctctccaacaaaagtttagtttaaaaataacaccactcgtccggctctggtgcccgttttaaaaatggtgcctcggtcttcagcagcgatagttcttttgcaattaagatccgggcggaaacaatgggtaggtgtgcagcggggcagagccgaggttgcttcacagaacctcttgcaggtcaggagggagggtcaggtcatagttgggttttgttcctgctggcgcggaatactcttgcgtgtaggaagcggctctaccgactgccgaggcctctgggattgtgccgggttgctagttagctcagttggcggcggassggcggcccctggcgggtcaccatgtgggccttcccggagttgccgctgccgctgctggtgaatttgttcggctcgctgctgggatttgtggctactgtgaccctcatccctgccttccgtannnnnnnnnnnnnnnnnnncctctgtggccaggacctcaacaagctcagccggcagcagatcccagaatcccagggagtgatctgcggtgctgttttccttatcatcctcttctgcttcatccctttccccttcctgaactgctttgtggaggagcagtgtaaggcattcccccaccatgaatttgtggccctgataggtgccctccttgccatctgctgcatgatcttcctgggcttcgctgatgatgtactcaatctgcsstggcgccataagctgctgctgcccacagctgcctctctacctctcctcatggtttacttcactaactttggcaatacaaccattgtggtacccaagcccttccgctggattcttggcctgcatttggacttgggaatcctatactatgtctacatgggactgcttgcggtgttctgtaccaatgccatcaacatcctagcaggaattaatggcctagaggctggtcagtcactagtcatctctgcttctatcattgtcttcaacctggtagagctggaaggtgattatcgggatgatcatgtcttttccctctacttcatgataccatttttttttaccaccttgggattgctataccataactggtacccatcacaggtgtttgtgggagataccttctgttattttgctggcatgacctttgccgtggtgggaatcttgggacacttcagcaagaccatgctactcttctttattccacaagtgttcaatttcctctactcgctgcctcagctccttcacgccatcccctgccctcgacaccgcatacccagactcaatccgaagacgggcaaactggagatgagctattccaagttcaagaccaagaacctctctttcttgggcacctttattttaaaggtagcagagcgcctccagctagtgacagttcaccgaggcgagagtgaggatggtgccttcactgaatgtaacaacatgaccctcatcaacttgctactcaaaatctttgggcccatacatgagagaaacctcacactgctcctgctgcttttgcagatcctgagcagcgctgtcaccttctccattcgataccagcttgtccgactcttctatgatgtctgagttccctgaagactgactgcccatagcctccgttggacctcacccaggaccaacctgtctggtccaagactgccttctggtccaggcctctccaactgttggttttttcagttttgttttcagcttctcccatcacctgtaatgattattggcctggaccttattggactttaaagtccattagttgcactttgcccctggctttcttcagcttgctactcttyccctttctgtcccatctgcagcaccataagggggatgtagcagctcttatgcaaatacagctcaactttcagagccctgcatttgctggaccttgagagagaacctgggctatgtgctagagttagggccctatactccaaggtaacctcacatttgactttaaaattaagtgttctgattaggaagatcagaggcagggmtgacatttcagtttgcctcaaatktkactrarggwttggtctttttgcgttccactctaccttgtagcagtagtatgaattcacatgatcccgtaacatgtcaacagtagtcatacagtacatggccttgcaattacttttcaatgcaactttatgataattttttctaactgcttctttatatagaaaatacattatttccttcaggcaggtaaaataactttccaaaaagaaaatactgagaaacaacaaataaaaatatttataccaaacacaaaatgttggattcaagtctaatgagtcctttgcataagaacaaacaatgtgttgtactgtttttttttttaataataagtagacattcagacaggaagataactttaaagttaaaaaaattaatgactttctcc

SEQ ID NO: 433 - DNA, 1964 bp, Cricetinae gen. sp.
  misc_feature (1716)..(1733): n is a, c, g, or t
agccccctcttctcctccccctcccgccttcctcacttctctctgggtgcccattggttggcgcgccccgcggctaggatggcagtgggaggggaccctctttcctaacagtgttataaaagctgcgcccttggcggggtccggtcctctgccactcttgctcsgggacyccagagacarcagcrctcccrcggttcgcmtscaccgygccctygctctcctwtcggagccagtccttgyagctgcagcagcccagyccaccttcgcyctcsaaaccatrtcyaccaggtccgtgtcctcgtcctcttaccgcargatgttcggtggymccggcacctcgarccggcmgagctccaaycggagctatgtgaccacgtccacccgcacctacagcctgggcmrcgcrctgcgccccagcaccagtcgcagcctctattcctcatcycccggtggcgcctatgtgacccgatcctctgcggtgcgcctgcggagcagcatgccsggcrygmggctgctgcargaytcggtggacttctcgctggcsgacgccattaacaccgagttcaagaacacccgcaccaacgaraaggtagaactgcaggagctgaaygaccgcttcgccractacatcgacaaggtgcgcttyctrgagcagcagaacaaaatcctgctagccgagctcgagcarctcaagggycagggcaagtcgcgcctgggcgacctctatgaggaggagatgcgggagctgcgccggcaggtggatcagctcacyaacgacaaggcacgcgtcgaggtggagcgtgacaayctrgcwgaggacatcatrcggctgcgagaaaaawkgcmkgassagmkrstsswgrswgwggragcsgagagsaycctgsagycctkcmgacaggatgttgacaatgcctctctggcacgyctygaccttgaacgtaaagtggaatccttgcaagaagagattgcctttttgaagaaactgcatgatgaagagatccaggagctacaggcccagattcaggagcarcatgtccagattgaygtggatgtttctaagccygacctcactgctgccctgcgcgatgtccgccagcagtatgaaagtgtggctgccaagaacctccaggaggcrgaggaatggtacaagtccaagtttgcygacctctctgargctgccaaccggaacaatgatgcyctgcgccaggcaaagcaggagtcaaatgagtaccggagacaggtgcagtcactyacctgcgaagtggaygcacttaaaggaactaatgagtcyctggaacgccagatgcgtgagatggaagagaattttgcccttgaagctgctaactaccargacactattggccgcctgcaggatgagattcagaacatgaaggaagagatggctcgtcaccttcgtgaataccaagacctgctcaatgtyaagatggctcttgacattgagatwgccacctacaggaagctrctggaaggcgaggagagcaggatttctctgcctcttcccaacttttcttcmctgaacctgagagaractaatctggagtcactccctctggttgacacccactcaaaaagaacactcctgattaagacrgtggaaacyagrgatggacaggtgatcaatgaaacctctcagcatcaygatgaccttgaataaaaattgcacayactcygtgcaacaacgcagtaccagcnnnnnnnnnnnnnnnnnnttygtatcttaaggaaacagctttcaagtgcctttactgcagtttttcaggagcgcaagwwasatttgggatagaaataagctctagtttctaacaactgacaccctaaaagatttagaaaaggtttacaacacaatctagtttacgaagaaatcttgtgctagaatacttttcaaagtattttgaataccattaaacgctttcccagtatacgaccaactgacgcttata

SEQ ID NO: 434 - DNA, 2945 bp, Cricetulus sp.
  misc_feature (1388)..(1407): n is a, c, g, or t
  misc_feature (1683)..(1714): n is a, c, g, or t
  misc_feature (2298)..(2312): n is a, c, g, or t
aatttcgcgccaaacttgggggaagcacagcgtacaggctgcctaggtgatcgctgcyscygtcatggttcgaccgctgaactgcatcgtsgccgtgtcccagaatatgggcatcggcaagaacggagayyttccctggccaatgctcaggaacgaattcaagtacttccaaagaatgaccaccacctcctcagtggaaggtaaacagaacytggtgattatgggccggaaaacytggttctccattcctgagaagaatcgacctttaaaggacagaattaatatagttctcagtagagagctcaaggaaccaccacaaggagctcattttcttgccaaaagtctggacratgccttaaaacttattgaacaaccagagttrgcagataaagtsgacatggtttggatagttggaggcagttccgtttacaaggaagccatgaatcagccaggccatctcagactctttgtgasaaggatcatgcaggaatttgaaastgacacgttcttcccagaaattgatttggagaaatataaacttctcccagagtacccargggtccttyctgaagtccargaggaaaaaggcatcaagtataaatttgaagtctatgagaagaaaggctaacagmmmgatacttgctgattgacttcaasttctactgctttcctcctaaaattatgcatttttacaagaccatgggacttgtgttggctttagatctatgasttattctttctttagagagggatagttaggaagatgtatttgttttgtggtaccagagatggaacctgsgatcctgtgcatcctgggcaactgttgtactctaagccactccccaaagtcatgccccagcccctgtataattctaaacaattagaattattttcattttcattagtctaaccaggttatattaaatatactttaagaaacaccatttgcyataaagttctcaatgcccctcccatgsrgcctcaagtggcyccccagcagatgcatagggtagtgtgtgtacaagagaccccaaagacatagagcccctgagagcatgagctgatatgggrscycatagagataggagcyagatgaataagtacaaagggcagaaatgggttttaaacagcagagctagaactcagacyttaaagaaaattagatcaaagtagagactgaattattctgcacatcagactctgagcagagttctgttcactcagacagaaaatgggtaaattgagagctggstccattgtgctccttagagatgggagcaggtggaggattatataaggtctggaacatttaacttctccgtttctcatcttcagtgagattccaagggatactgcagwgacagaacaagaataggctgcttctaccnnnnnnnnnnnnnnnnnnnntaagtaatggcaagcataatagctactgttaagaattcagagataatgaattgagaatggatattgcttgaaatgaaaattaatgaacatgaaaaaaatgaaaattaaaatgcctttcctatctcagcagggtttgtagcatcaggtcaaaaaaagtagtaaattaatacaatcttttcgtaaaagaatctttttttatcttttacttgacaatttcatatatgtagatccaaatccccctcccattccctccactaccttcatatcctcttttgnnnnnnnnnnnnnnnnnnnnnnnnnnnnnnnngcaacccactgaaaccagtaaggctttcttcatgttcctaggtgtggacaatccacyggagtatgggcaacctacagtggccacacctacacacacccagccaccatcagttaccagtggctcttcaactataggtggagcctaatgagcctctcctatgcatggtggaatattgactggattgatctacagacaaccatagctgctgtgagcttgtgagtgtaatggccatrtcctgtccagaagacagcattatatatacaacactcttccctatccttcaggcttttcactgtgtccaccacttcttcgtcaatgttctctgaaccataggcagggttcttgatataaatggtctattccgaattgagtaataaacaatcgtttattccatgcactttgatcagtcgtgagtctscatgctgactgctgtccacagcaaaaaggaacttcttctctgaccagagttatgagcagcactaatccagggtatgaacatagatatttagaaggtactttgaaaacccatccattttagcaaaacaacagtagtaagttcacccttagagcccatgaattccacnnnnnnnnnnnnnnnaccagttttacagtaccatacataagaattctctcttgtggagcaggctctcagatacaattagaaagaagttggttacactatagtagacaagccactactgcaccagtagactaatattgtarcattcgrggcctaccactaggtaagtccattaatgacttttctcccccagtgatatgcatagcaccttctgtcactgtgaaagctatccagtaagggggaagtttacaagtcaactccagatttaattctctatgtcctgcaaccacaatgtcttttgcctttaccatctagctgtggtgaccatccaagagcaatggcaataacctgtgttgtttgggaaacctctataaccaattgctcctaaggaggtagcccataccttgcactgagattttcatttaatgacctatgtcttcatttaataaccattgcccaccagtgtgcagggtactgcaattcagacttttttttttttagttataattaccttacaaagtagtggaatgctttgttttctcatacaggctcagatttagttaacccatagatacaaaagactatagatacagtcttttgaatgtgagtagtcaattcaaattcataatattctagatttggatccgtcga

SEQ ID NO: 435 - DNA, 1769 bp, Cricetinae gen. sp.
  misc_feature (200)..(225): n is a, c, g, or t
  misc_feature (748)..(763): n is a, c, g, or t
  misc_feature (765)..(796): n is a, c, g, or t
  misc_feature (801)..(823): n is a, c, g, or t
  misc_feature (844)..(885): n is a, c, g, or t
  misc_feature (1660)..(1688): n is a, c, g, or t
gatcacgagttcgaggccagcctcgggctacacatttttttctcctcgcctggggcctggctgcactttttcgtctctcccgtctgcgctcggctcctttgcttcggcctcttttgctccggcctcgtcttcagccccgctgcccgcttgccacaaccccccgttgccgttgccattgtccctgcctctgccccgtgcannnnnnnnnnnnnnnnnnnnnnnnnnactccaccgacgcggcctctccgcacgcttgcacaagcagcaaccagctcctcccgcttccctcgctctccgcgtcccgcgctcaaccgtggcccgccctcgggagaccccaccgtgcccttcagccctttctccggcgcctgcctcgccctgcctcgcctccccggctccaccagcaagcgctcccgccagaccgatgcgccgcaagccacgcctcctcgtcctcgcaagccgcacgccgaggtyyggcctcggtttccccgagcctcccgcgctccggctccgacttgaaggagacgccgccctctccgggggtgcgagtgccaccggggtcctccccgacgacgcccacgtcctctttggccctgcctgtgcgtcgcccccagtggcacagccactcctttggccttgcttggccttggcctcttcggggctctcattctcaccccaggccgtctccaacttttaggaaacaccacgccctcgccttagttcggaccacctcctccctcccttccttctnnnnnnnnnnnnnnnnannnnnnnnnnnnnnnnnnnnnnnnnnnnnnnnccctnnnnnnnnnnnnnnnnnnnnnnngtctttctttctctcttctcnnnnnnnnnnnnnnnnnnnnnnnnnnnnnnnnnnnnnnnnnnagtcgtgggagtggaataacattattaatagcaaaagtactcctagcaatagcaatactggtcctacaagaagaagaacattttcattttcgggcctactcccaggcaggtatttttcagcttgccttgcctgccttcattcggacatagggacaggaaccacggggagtcggtagaatgggatagcctggccagagggagcacgcagcgcgaccaaaaggcagcccgagtcacagcagctaacagggattgagataggttgcaaacctccgaggcttggcatcctttgaatacagactcaactgagacgtcgtgttcggttgaatgacagactgaatgatggtttgtttgtttgtttagtgtccttccgcagaaagaagccttggctttcgttccctgatggaatttggagttcagcgggccaccaagggtccctgccagtgctgccaggtgctgagaccctcggtggaaagaagccggttcagtgtctgtggctctgcactggtcgtgcccagtgtggattcccttggtggttgttcctgggctccatggccttgagggttgcacgcagggggaggcgtcgggtcgggtgcggagcaatatccagcctcgaccccagcaggcttgcgggcaccctctgagccgggtccttgccctcctattgctccccgagtttgtcctccagctcccggtgtatttcatggaggagcgacggctgttttgtaaccttccttgtgctgagtgcactttcttaggtgggcttgtcgggagaccnnnnnnnnnnnnnnnnnnnnnnnnnnnnngagatggatggaagcgtggatggatggttggttggatggatggttggttggatggatgggtgtgtgggtggatggatggat

SEQ ID NO: 436 - DNA, 5673 bp, Cricetinae gen. sp.
  misc_feature (4908)..(4927): n is a, c, g, or t
ggatcccctatcgcccgcgagggtggcgtccttgctggcgccccgcacggctcagggaccaataagaaggccgcgatgctggacctcgaccagctattggttggctcggccgtggtgagagatggtgcggtgcccgttctccgcccggggtgcgagcagtgggcggttgttaaggcgaccgttcgtgacgtaggccgtcaggccgagcagccgcccggcgattggctaggcgatcggacgatcctttctgattggcggccgctggcggccggagcgtgcgtaagcgcagttccttccgcccgaggctccgttgactggagacggcggctgggccggcttggggacctccattgagatccggaggtgagcgggcagactctggggaccggccgggcagtggccgcggggctggcgggcggcggagcccgcgctccgccagggctcacgaggtggctggggaccgaggggaccgcgagacgtccttgaggcccggcggcagggcgggggcctggggatccgggggccgtctaggccgctgagccagtgcagcatcgggacgtccgtgggtccagttcagagggctgtgtgccgaccgggcggtcacgtccttaccggtaggacgagtgtcaggcaggggggaccgcgggagcggatattcgtggagccctgggggacaagtgttcacgcccaggcgttgccttgaagcaggacctctttatagtgatagagaaggtcccggtgtaggctgcagattgacccaaagccagaatccgcgtggaaacggcaggttatgcctctcctagtgggccgggaggatgcgaggtcagtgcagcaaagccagccctcaaaagtctgtctcgctgcctgtatgtcttgtctttctcctaaggggcgtaggctcattgatactcatgtccttactttgcactccttttggaattacttggtttgagtgaggaagaccggaccttggaggttcgcaagttaaacaatagacttstgaggtaggaggaggttaatgtatyccatcttaagtartcatatggratattaacttacttgaggatgtgccttttcgggctaggtyctgtaaagccataggraacstttgyttctggkctttrctrctaagtcttygtgtacaattagagcatctcayagagaagagaatacgttcgtttacttgtgagttttaattttgggcaaagactcggatatactgtgaggttggactgcactttgtggacttgctttgttgtatgtgcctttctagaattggaataatttgtcaggaagcagacatggaaattagtgcgtgaaaagtagaaagaatccgtgcataaactatccgattaacataacaactggtgtgtatgtcatggctatttcaaggaaaagtgtgagcctgtgggggaacgtggcacttacacacacactatatttttgtctatagtctgggatcaacatctgtgctgttaaacccatatgaaattgttggtatgtgaaatcggactattttttaactcgaaaaatagtaattctttacggttgcacttaatactttggtcaaagaacttcaaaacaaagaaaagatggacttacaaaggggtaatgtataacgaggtcgggtatagaacctgttttctaatgcaagatgatgatcttgtgtgatggtaggttaagaaagcagaatgttacatcctattagataaagtaactgcagcataggttaggctcttaccctcaaaggacagcatgcatatattaattaatttgaggtcagtgtagatactattcaatcaaagattggaatgtgtgacacaggcagagtgctgagtgcattggaagaatcagaatcctttctgtaattggccgtgctgggtgggtctagtcatagattgagttggaatttaagaattccaacacatttagctaggcaaggtctacaaatgtacgggttcaaaggccaacttggtcaactaagtaatttgcaggacagccagagctgttacacagagaaatcctgtctctgaaaaaaaaaaagaaagaattccagtaaatttaaaatttcaaacctttgaagagtttgaaatgtttgctgtatactttatttggataagtaggcataatataccttgttttagttattttattttattgttcgaatacagcacaaaggttatttactgagcttttgtaaactgccacatagcccactggtgtcacctgtaaatcgtttgtagtcacagaatggaggtgcttgttagaggagatataatgtggttacttttgacacacctttgtagcattgctcagtttttatttccaggtaggtgctgttctctgtgtttggattgggttttctgtaacttctcccctgcccccaatataaaaaatatgaatttacagctagcaggggaaagtggtaggattgacagtgttccaggaatccagctggatgaaaaatcagatatatatgtgtgtaggtttgggattactaatttgtaattagttggggcccatttctgatagcctttcagattttaatttggccagaatcaactttaatgatgaatggatactactcagtaaggaagcatattcagctttggcggcaaatgaggggtggagaattggaagtgatttgacttagatttgaaactaatttaccttctgaagtcttgaagccaatccttcagaccagtttgcagtgtttcttaaaaaacaaacaaaaaaacccagagattatatgagagaagtcagtggacatgtttaaagttttcttactctaaatctaggccccaattaaaagcattttgtagttgtcatttttcagatatttattgatcagtgcaaaatgctggaaaggcaaatggtacagttcactgtgcaagactgaaaaaaatgaataaatacagataaatgtctattatatctttatgccttatgaataattgctgtcttttcaaaattgagacccacagtaagaaacacaaatctcagcgggactgtcatgaataatttcatgacaggtgaatgtatatattactcactcatgcttcctgtcttatctagcaactgcttttatgtcattttctattttgaattaattaaaactgttcttattgagaaaattgattcatgattaaattaatgtgttgtgaccaccttgaaccagtttactggcatgtctggtatgattgaaatgtagggggaaaatggagtgtttcagtttagagataatatttgctaatttgcttcattcttaaaagccaggcctctacctacccccccatacattattgccttcttttaactaaatttgttttttactgtcatcagtaagatagtggattcttaatatgtttgaattcttgctgacagtcagtggactcaatggttggttttcattttgtcttttgcattaaattgtgtgtgttagtgtgtgtgccagggcatgagtgtgaagatagagtacaggcctttggatgtgaggaatagtgaggcttagatgcaaatacgtttcccactgaatcatctcacaggccctagttgtgaaatcctaattgtgattgatttttatgggtaatattcttcatttttgttatgtaagaaataaatacggcttacacgtatccctgtaggccatcggaggccttataggtactttcaaataggaatgtcaaaattattaattagtcggcaagcatgggaaaagtggtagtcattaactcagttcttcttgctattattctgttgagaatccttttgtcagacaagttgttaggtttgttgttgttttgtctaacagagggcctttccctgagcagtatcttttctccccgtgggtctttgtacatgatatggacatacattttagccagtcatctgtttctactgactttccagtcttggttagctgtaaaagtttaggaacctttcctaaacttaacacatttaaattggttttatagccctgtagtttgcctgggagaaaagccagccatcctagcaaaatgcaggccacttctttactaatgtagaaggcatctatcagaaaagacttatggggatagtcatcttagggcagtttattagtttattagacattgtgccagtgatgttctgccaagtgttttatagaataaaatgggtaacagggtcttgcttataaatcaccatgatttatggcaagaaatcaagaaacttcattgatgttacctttttttaaccatatggatagtgaagagggtgtttatgggttttctatttgaataagtagaaaatatgaatacttgtttggggttatgcttgaaacttacttttaaagaaacaattgtatagaagttggttgccagtgagtaataaaagatttaagtgtttgaagaagtagcaagagccgttttaaaagaatattacaattacttcccagaaatatgtggaacactgaaatagtcctctgtgtaagatgctccacatggggcttacagcatccttttgttttcctgaaagtgagctgtatgctaaatgttcatatgtggtgtttccttcaggatcsrgggaccgagtggctacaatgttgtcacgacttttccgtatgcatggcctctttgtggcctcccatccctgggaagttattgtggggacggtgacacttaccatctgtatgatgtccatgaacatgttcactggcaacaacaagatctgtggttggaattacgagtgcccaaaatttgaggaggttagtgagattcatttgattctgactaaagtaaattacattgcaatttctaaagaatgtctgctttttagagaacatataagctaagaattctgagtgaagtcttagctggtgggcttacctcagattctcagctattcacatggtatggattgcatttaaaaatnnnnnnnnnnnnnnnnnnnnactagttagagtgggtggctctgggaaatacaccttttgtaaggactatcaggggaaaatgactgaagaattacagattgcttaataattgtattcaatttttttatttctgtgttggctattttgatttggttgtactatgctggcatttatattcttgtggtaacatgtaaaccaatgatacagaataaaagtcttgcttttgagaacttctttgaaagtgctctctctgccaataggatgtattgagcagtgacatcatcatcctcaccataacacggtgcatcgccatcctgtacatttacttccagttccagaacttacgtcagcttgggtcgaagtatattttaggtaatactgattttcccctttgcatgctgtctgatttgctgtgggaatttctaattacataatgccgttaaaagtgttgggacgttcagtagttaccagattctccttagtaaatattctcaaatctaaagcctcagtaacatggaggaaagtgaaattgttcttatcagaacagtgtatgagtctaaatgttggcctttgtgcaataaagagttctgagtgttgaattttgccattttaggtattgctggcctgttcacaattttctcaagttttgtctttagtacagtcgtcattcacttcttagacaaagaactgacgggcttaaagtaagtatttaaagctcaagtgtatgttctctaaaatacattttaagaacctttatttcctgtgtt

SEQ ID NO: 437 - DNA, 1016 bp, Cricetulus griseus
cgggacgggtccatacggcgttgttcttgattcccgtcgtaacttataagggaaacttacacaatgtccggagccctcgatgtcctgcagatgaaggaggaggatgtcctcaagttccttgcagcaggaacccacctaggtggcaccaacsttgacttccakatggagcagtacatctacaagaggaaaagtgatggtatctacatcatcaatctgaagaggacgtgggagaagctgttgctggcagcccgggccatcgttgccattgagaaccccgctgatgtcagcgtcatctcctccargaacactggscagcgagctgtgctgaagtttgctgctgccaccggarccactcyaattgctggccgtttcactcctgggaccttcaccaaccagatccaagcagccttccgggagccacggcttctagtggtcaccgaccccagggctgaccaccagcccctcactgaggcgtcttatgtcaacctgcccaccattgctctgtgtaacacagactctcctctccgctacgtggacattgccattccgtgcaacaacaagggagctcactcggwgggtctgatgtggtggatgctggcccgggaagtackccgtatgcgtggcactatctcccgtgagcacccatgggaggtaatgcctgacctttacttctacagagacccagaggagattgagaargakgagcaggctgctgccgagaaggctgtgaccaargaggaatytcagggtgaatggactgcgccagctcctgagttcactgctgctcagccagaggtggccgactggtctgagggtgtgcaggtgccctctgtacccatccagcagtttcctactgaagactggagtgcccagccagccactgaggactggtcagcagctcccacagcacaggccactgagtgggttggagccaccactgagtggtcctgagctgctctgcagacagctcagcaaagggaaaaaaggtggaaggaaaataaagttcttacaagttg

SEQ ID NO: 438 - DNA, 5965 bp, Cricetinae gen. sp.
  misc_feature (3616)..(3808): n is a, c, g, or t
  misc_feature (4690)..(4729): n is a, c, g, or t
cccttttggttaacagattagtaattcattaatttatgatgaagactgtaagcagctggttaacctattctttgaattttatgatattcattgattaacaccttaacctgtaattacatatcccctgggttcatattaaactctaccctcagcttctatttatagcattacctagtcgttttactcaattatattataccatgtgttgctactaaactctacgtcaaaaaaatctaaacctggaatagtggcaatggttcaatagattaagtgactgctgttcaagcataaaaacctgagttcatatatccagcacccacataaaagctaggcatggtataacacttctaggacagccggtgttgggtgtaggctatgaaaagggtcaactaagtcaaagatgcaagctctagatccactgagtgactttgtttcaaaaaataaggtagaggccacagaggaagccatgggataatgacctctggcatctttgatattaaccttattgtagtgacttgaatgagaatgaccccaataggtttgtgtatctgaatacttgtacctcagctgatagaactgtttgagaaggataaggaggcaagaccttgctagaggaggtctgtccctgggagtgggctttgagatttcacaggactcatgctgttcccagtctcccattacctgtctgtcttatagttgtgcctcaatatatgggctcccactactcttccagggtcagtcatgccttcctacctgctaccatgcaccccaacatgatagccatcaactctaactctctgtaactgtaaacctaaacaaattcttctactagttaccttgaatatggtgtcttatctcagtaataggaaaataactaagattttttaagagtccaaaaaagtgaaaataatgtatagttgggccttcagaaaagttttataaaggagatcacttttgagattaattttgaagaacatttaggatgtgaataaaaaatataaaagagaatttgaaggcaatgaatagaagtaacaaaatcaggaaagctagtcataagtgaagagcaacaattagagatgtttgatttgagaatagggtttattaggagatcataggcagtttaggatgattctggaggtagcattgactttcaagtggaaggactgggatttaatctaggagataatgtgatgtacaaccccaactaactctagtattcacccatagtgtgcaagtcagataagactctacaaccttatattcaacttagattagaaaaatagtagaaatagctattgcctagagatgaggacttggagaataatgagagaactggagagagtcaattacccatggtagttactatgtcattgaaaaggttaattaacctgaggtgagctgagaggaaagagggtaaataataagaagctagacaaaaaagaatgggaataaagattctatagactttagaggwragarwgrraawcargmaagcagamaskskmarwarytrwgtwtgwyakcwwaracagcywagtcrtgatgagaagtragaaagtttaggrtaagaaagcatsatgagtcattaaggaaaggctgaatgacaatagtagaaaacyaktaagcttcaaagcaaacagaaaattttgcttcacaactgyytttatcctcttagtaatgccygratacgtycattcctcmatawttaattaatmaaatacaaagggacraatagacwttttagagtttaaccgaaaatagatactasarkktmctwyscaggtwrctttmswwggtatgcaattgccctrttcccatatccctttctggmraagyayrgggtcatgmgatggararccagywgcaaaatsgaacaaggccktmctcatgttgccaasctgrccccttgytycatcytgtaggaccttgtagctctgcagctcccctcttmcyagaaataaaatctgggtcayrggrgttagaactcyagcattgacttgtgtctaatgaataacttccatygayttcccacctaggrgaatcagcattcytwttccaacaacagctrtgattattggcagaaagraggrggaacctgggaaggctkctctccacccctcaacatcatcaaaggcacatataaaacctgaatrcttggagccttmagastggtagtgggcagcyryctttctgtctccyactcragtagactgctgctgtcatagccctggacwragagcatggacaagmtgctgyysctgcttggggtgtctatacttgcagkcctsctttyagaagyctttgctcagacaggtaagaaatttaggctacagtcagggagagaartcgatyttgagctattgtttctctgaatttgytgaaactyactatrtctwwctyatakcctcacagacctcacaggaaaggtatttgtgttccccagasagtctgaaastgattatgtgaagctgatmccacgwytggamaaaccwctgsagaacttyacastgtgttttcgarcctatastgacctttcccgccctcacagtcttttctcctacaatrcwragwacrragamaatgagctgctaatttataaggaaagaatkggagaataygraytgtacattgraaatswgggarccawagtycrtggggtggaagaatttgcttctccrgtrcatttctgyacyagttgggagtcctcttctggcattgctgawttttgggtcaatgggawaccttgggtaaaaaagggtytgmagaaggggtacactgtgaaaamcmaacccagtattatcytaggacaggarcaggataattatggaggagggtttgataaktmccagtccttygtrggrgagatkggggatttgaacatgtgggactctgtgctgaccccagaagaaattaaatctgtataysaaggtgtccyscttgagcctaacattctrgattggcrggctytgaactatgaaatgartggctatgcagtyatcagrccycgatgtgtggcattaagctcttacaacaaaatctcatgaaaatgaaatgayyaatgtccaagaggtcaartcagcacaackyracacttaatcctgaatctgcagccttttctyccttgtgarcttcctgyctacttatctgsctaataaaawattrtcmarttctgcctgyatwytttgccacttgayrtaatctcaaatgctttctttkagatytwctmswaaacttgagttgtaaaatggggaggtggaaaattaacagaggaaaatggcaacacttacagcttcgataatcaatttaataataactcaaaatatgtataaaattgcagtagaaatcattccatttgtttatccaaacacaagtcaataaaatgcctgatattactcaagggacacacaactataataagataggtaaatgacagttgaggactagacagcaaataatgagatgggaaatccaggataagaatgaaaatgaaataaaagaaacagattgttttgtacaaagaaaaacatgattgatgtctcagaatcccagggtgattgatgaagagcacctggctttgtaatgctaccagatgtcatcagagcagaacatagctctnnnnnnnnnnnnnnnnnnnnnnnnnnnnnnnnnnnnnnnnnnnnnnnnnnnnnnnnnnnnnnnnnnnnnnnnnnnnnnnnnnnnnnnnnnnnnnnnnnnnnnnnnnnnnnnnnnnnnnnnnnnnnnnnnnnnnnnnnnnnnnnnnnnnnnnnnnnnnnnnnnnnnnnnnnnnnnnnnnnnnnnnnnnnnnnnncaattataagccacaatggaaccaatcgtacagcaaagataatacataaaaatctcagcaagcatatgagtttaaaatctacaaaaaacacatttgtgcattttatgttggcttctactgctggcacggggccttgtaagtgtcatttatatacctagtgactccactggtgaaaactgatttttcctttgagagatagctccctagttatggatggaaacttatgtccacttcctcatttcagttcttggacctcatatggcttgaacctgtactggccctgaacatgctaccatagtctctgtggttcatatttgtgtcagtctctgtgaatggaaggccttgtttccttggtgccctttgtacccactggcttttctttgtgtccttctcccctcctgtaatagttccctgacctgagggaggatttgatgatgccttcccatttagactgagtggtatctgtattagtccctagctgctgcaggaggaagcatctctgatggttgaattaaatacccatattatagttcaggtttgctttatggtttttaatgttaagaaacctttctagggcctcagaggtggttccacaaataagaacactgcctgagcaagcatcaggacctgagttcagatcccagcacctacatcaaaagccagatgctgccatatagacctggatctccactgttgggcctggaaagtggagacagaaaatcactgggaactcactggtcagagagttcatctaaaaaattggtgagttccaggttcagttagaaatcctgtctcaaagggatatggcagagaacgacagagcaaggcaccacatctttcttttcctcctcacatacatacacagatacatgcacgtgcatnnnnnnnnnnnnnnnnnnnnnnnnnnnnnnnnnnnnnnnntgtacacagatgatatacagagagaaattttcgatagacatgtactaaaaacgcctatctattcttggtaattggtatttctaccaaaaacatcgaaacgacattgtttgccttaatcttgcatctccatagtaggttgtttttgttagcatgccctctgcaaataacataaaacaaatttgagaaatgaacccgatactcaaattgtagcatccatttttttaatatttattgagacacaattccattccagcatgatggccagctactggaaatgttatactggtgaataatcatgcacttgcctttttggggttatattctggtaagtttgtgttgtctagtatggatcccttccaacaataatcagcctgtgccataatccatccttcacatcttcaggcctctcttctgagtaacatgctcctgttcccctcaactccatctatcatttgtaatatcgattatgtctggtagatccaattcggacccagtctcttgcacataaaacccctgcctcttagatagctctttttagtagaatccaagataatgatgcatcagttctttcagttgtgtggcccaaacttcatctcaaagaaacactcatgcatcctttagtcctgtaaattctaggagtccatgatgatcttaattcagtatactatctgctccacaatggaccctgtcctcctcaaggttctgtgaggtccttcaaataccaagaaggcatgttgcagctttgcggttccatggactgtctcactaagcctgaagtgaaagaagctgaaagacaaataaccatcttctcaagaagccaggtatatgacccatgactccatcaagcaacaactcaaagcagtacctctctctaaacaagttcttccccttccctgtagtctgtcacaccttgttctggctgaggaatacaagcatcacagattcttaatcatctcctttgtcaattcttgtatgtggaattgtgtggttattattatatcattattatctaatttatattattcattattcattcaagactaaagaaaaagtgtccctccaagagtcaaaagccatctaacaaaaactcaaacaccaagcacaaggaagaccctctttttaattgtttgtcagagttgtccaagaaactctcaagacattataggctattgctattgccattggttgttccagcaggggtagaaattaagtcactaatgctgaagatatgaattc

SEQ ID NO: 439 - DNA, 3298 bp, Cricetulus sp.
  misc_feature (1820)..(1842): n is a, c, g, or t
  misc_feature (1932)..(1959): n is a, c, g, or t
  misc_feature (3238)..(3273): n is a, c, g, or t
cgtgactggtcggccgtgtgggtgctgcagccaacgaacccggcggcggcggcggcaagggaagcgagcgggaccccgggctccgaggaactgcggcccgcgccgccgcgtcacgcaccctctgggcgccgcgagacacacataacgataatagatttgcattgcattttgggattcatctacacttaaaatgccacctgcaattggaggaccagttggatatacccccccagatggaggctgggggtgggcagtggtagttggagctttcatttctattggcttctcttatgcatttcccaaatccatcaccgtcttctttaaagaaattgaaggtatattcaatgctactaccagtgaagtgtcatggatatcatccatcatgttggctgtcatgtatgctggaggtcctatcagcagtgtcctggtgaataaatatggcagccgtccagtaatgatcgctggtggatgcttgtctggttgtggcttgattgcagcttctttctgtaacacagtgcaggaactttacttgtgcatcggtgtcattggaggtcttgggcttgctttcaacttgaacccagctctgaccatgattggcaaatatttctacaagaagcgaccattggccaatgggctggccatggcaggcagccctgtgttcctctctaccctggctccacttaatcaggctttctttggtatttttggctggagaggaagcttcctaattcttggtggcctcctactaaactgttgtgtagctggatccctgatgcggccaatagggcctaagccaggcaagatagaaaaactaaagtccaaagaatctcttcaggaagctggaaaatctgaggcaaacacagatctcatgggaggaagccccaaaggagaaaagcgatcagtcttacagacaattaataagttcctggacctgtccctgtttgcccacagaggctttttgctgtacctgtctgggaatgtagtcatgttttttggactgtttacccctttggtctttcttagtaattatggtaagagtcagcattactccagtgagaagtcagccttcctcctttccattctggcctttgttgatatggtagccagaccttccatgggacttgcagccaacaccaagtggatcagacctcggatccagtacttctttgctgcttctgtggttgccaatggagtgtgccatttgctagcacctttgtctacaagctacatcgggttctgtatctacgcgggagtctttggatttgcctktggttggctcagctccgtattatttgaaacattgatggaccttgttggtccccagaggttctccagtgctgtgggcttggtgaccattgtggaatgctgtcctgtccttctagggccaccacttttaggccgccttaatgacatgtatggagactacaaatacacgtactgggcttgtggcgtgatcctcatcattgcaggtatctatctcttcattggcatgggcatcaattatcgacttgtggccaaagaacagaaagcagaagagaagcagaaacaggaagaaggtaaagaggacgacaccagcactgatgttgatgagaaaccaaaggaattaacaaaagcaacagagtccccgcagcagaatagctccggagaccccgcagaagaggagagtcctgtctgaactgaagcatgaatagagcagtgtgtgacccaagacatctgaaaccattctgctggcctctagtctaccagtggtgctcaatgcagacagtggacatttgtgtggaaaacctaccaggtgttcattggtggaattttgttttgtnnnnnnnnnnnnnnnnnnnnnnncactccttaccaatgccagagtttaaaatttactatgctttaggtagggattggttggcaaaggatatgggaaagaagtgtagggatttnnnnnnnnnnnnnnnnnnnnnnnnnnnncttagcttttaacagtgtcatgaagattatawtrwrwgcctyawgttkwarttttagaactctttagagagccttaacttttaaaatcattctgctgaattcatctattwkwaatgttttaaaaggaaaaataacaactaacttgcttgaggtaactctaaccttaatcttgttttgttgttgtttgtaatgctttgtcagagattgttactggaacatttatggataaaaatactagttaaaagttggaggtttataaaatactgactaaagtatttttctagcatcatagttgcctckagtaggtgcctgctargtatatmtttaasaaatttaaagcatgaaattctggaaacatcttggctgttatagccacagtctgtctgtctgtcatctgctggrgacttctcaratgcttactgcaagcctagtgctasaatgttgtcactaaattgctaccttgctcctcttcagagacattgagtggttacaggtcattgccatttttgaaatctactgcaaaaaagttagtattaaaatctacaaaacttttaacacagtctgatttaatatagacaggtatttcaggcatctgctaaattcaktttarttttccaaaaccctasttatggtatgaaamtcttgyaatctttgagtatgtgtgggttttggggggcctggtggttctgakgattgaacccagggccacaagcatgctaagcacatgctgtaccactgagccacatcccaccagcaccctggaatcctccttaaccccgagacctttgctctttgatttttgatagttccatttatatcctagtttagagctgtatgcgagatatcagtatggactaaatgtgtgtgctagttttgttttttacattgtttttcagtatttgcaaaaccaagagggccagagtttggccccggggaagccaataaagataaaatagggagggagtttgctgagttcacttgatttcagtaagtacccacctccctgccacatacaccaaggcttaaagagaaacttatatcatgcttagaattattggacatagccttacctctacaaaccttagctttcgtgacccttttcacttacctgaaatatagaaaatgggttcaatgtaaggataggaggaaggatgggcaggattggaattgtagtattttttaaaaccaatatcttctaaatagagacagaaaagatatatgacactaaattgtactcaatgcatctaaaataccattgtaattgacggggtgaaaatannnnnnnnnnnnnnnnnnnnnnnnnnnnnnnnnnnnaataaaacatttattttatttttag

SEQ ID NO: 440 - DNA, 2972 bp, Cricetinae gen. sp.
  misc_feature (1666)..(1667): n is a, c, g, or t
  misc_feature (2516)..(2534): n is a, c, g, or t
  misc_feature (2775)..(2791): n is a, c, g, or t
ctggcagtcgggagctgactccagccggtggaacctgcagccctcgctcactcaggacagcagcacgctgggcagacgcctgggacaggaaagcgcagcccaatcagcagagccggcccgcagctccgcgcaacccgcaactccgacccgcgcagcccgcggagctcccgccgccggtctgggcagcatgagrcgcgcggcgctctggctctggctctgcgcgctggcgctgcgcctgcagcctgtyctcccgcaaattrtgrcygtcaatgtgccycctgaggatcaggatggctctggggatgactctgacaacttctctggytcaggcacaggtgctttgccagacatcactttatcacggcagrcttctyccactttgaaggatgtgtggctcctgacagccacacccacrgctccagagcccaccagcagggacrccsaggccaccwycacctccatcctgccagctgsagagaagcctggggagggagagccrgtgctcayrgcagaagtggacmctrgctycaccrctygggacaaggartyggaggtmacyaccaggcccagggagaccacacagctcctgrtcacccatygggtytcaacagccagagccaccacagcccaggcacctgtcacatctcatccccacagagatgtgcaacccggcctccatgagacctyggckcccacagcrcctggccaacctgaccakcarcctccaagtggaggtacttctgtcatcaaagaggttgccgaggayggagctaccaatcaacttcctacaggggagggctctggagagcaggacttcacctttgagacatctggggagaacacagctgttgctgccgtagagcctgaccagaggaaccagcctccagtggatgaaggagccacaggygcctctcagggccttttggacaggaargaagtrctgggaggtgtcattgctggaggcctggtgggrctcatctttgctgtgtgcctggtgggtttcatgctgtaccggatgaagaagaaggaygaaggcagctactccttggaggarcccaaacaagccaatggcggtgcctaccagaaacccaccaagcaggaggagttctacgcctgatggaggaacggttctccccccacccccagcccctgccactcactaggctcccactcgcctcttctgtgaaagacttgggccccggcctccacactgcgttgcctcctcagcacccagacccttccagctgttcctgcctcagcagtcccagggtgtgctgggactacattctacttctttgacttctgcctagaagcttgggtgcaaagggtttcttgtatctgaccttgctaccacagccacacctgatgtccactattcygacttggtttctccmaatgggaggagacccagctytggagagaaaggggacccaactgctttggacctagatggctggaggaatcgggggacaggagagggkcttcggctgacgtgccatagcacttaycyrttgagaccgytagggtyggccatgctgtgggtaggggatggagtccagrgctccttggaattcacttcacattgtggggaaktctactttagatrtcaacttgtttttgcacatgtttcctctagtttctctgttcagagccccaggcgactttnnttctggggtaaggcaagtcagttgactggggtccytcacctcgcttcccyaatctacattygggcracmgcatcggggtcacttaagactttctgtttttgtttttaacctagaagaaccaaatcckgatgccaaaacgtargcttagyttgtgtgttgtctctaagtttgtcgctcatgcgtgcaacagggtatagactattctgtatggtgccccatttttttggtgattcataagtaggctggctagtccaggacgccatggggtagccacctcctgaccagtcatgcctgtgtgcataaactcagggccatgaccgtggcctgggccactgtgacatcagaagagcctgtgtgagaacttaactcctatagcacagtctagggatggaggggaagaagactgtggggtgggggaggggtggcaaggatgcccaagactctcctgcctttggtaccatctctggtcacctttctcccggaagttgacaagacacatcttgagtacagctggcgctggctcctccaagaaccaagttcaccttcagctcctgcggccctgccccaggctggagtcagaaatgcttcccaaagactgagagtcttttgcttttggcaaaacgctacttaatccaatgggttctgtacagtagattttgcagatgtaataaaccttaatataaaggagtcctatgaactctactgctttcgtttcttctctgggctggtggtgtagatatagccagccttctctcaaaccctggtagctcagggaagcttggctcaaggctgcgtgcctccaattgtattctctgaggggtaggatcctgggtccaggattcctcttannnnnnnnnnnnnnnnnnntgttttcttttggccaaacttcttttgaaagttggtaggatcagccaaggttttacagggcctgatgtctgctcttgtaaataagtggtataagtaactgggactctagcataacttgacctggggccaccagagtcacacttggtttgcagagcagacacctgggacagcgttcctcccgtgtgtttgccgggacacttttccgaggactccttgcttatttagcacaacaatgttccannnnnnnnnnnnnnnnnccgttggcccagctagacaagagacctgtgccccgtgttccatcccagaacttgttgccagcatataatggctggcggggggtggggtgggggtggggtcagatctgagacagcttgtgagaccctcaggctgggcccattcgtgtaattgcaataaatggtacgtgtccatttggacagc

SEQ ID NO: 441 - DNA, 761 bp, Cricetinae gen. sp.
ctgcacccaagattctttcctgtcacctcagctcggagtccgtgtctccgtctacgcagcagccatgccgccrtacaccattgtctacttcccagttcgaggrcgctgtgaggccatgcgcmtrctgctggctgaccagggccagagctggaaggaggargtgrttacygkagawwcctggrkgaaaggytcgctcaagtccacctgtttrtatgggcagctccchaaatttgaggatggagacctcaycctgtaccaatctaatgccatcttgaggcacctgggycgatccttrgggctttatgggaaagaccagarggaggctgccctggtggatatggygaatgatggggtggaagaccttcgctgcaartacrtcaccctcatctacaccaaatatgaggagggcaaggatgactaygtgaaggccctgcctggacacctgaagccctttgagaccctgctgtccmagaaccaagggggcaaagccttcatcgtgggygaccagatctcctttgysgattacaacttgctwgatctgctgctgatccaccaggtcctggcccctggctgcctrgacaacttccccctgctctctgcytaygtggcwcgdctyagtgcccggcccaagatcaaggccttcctgtcctcycctgaccatgtgaaycgtcccatyaatggcaayggcaarcagtaatggacagaagaaacagcatctgtctgtccccttttctatggctaataaagtgtgtagacaaaga

SEQ ID NO: 442 - DNA, 2370 bp, Mesocricetus auratus
  misc_feature (1048)..(1065): n is a, c, g, or t
  misc_feature (1219)..(1236): n is a, c, g, or t
  misc_feature (1615)..(1629): n is a, c, g, or t
ggcacgagcacagccacagcacctgccttgagtctgtctcggcccccttcccgcctgctcaccaccatcatgaccccaggcatccgggctcctttcctcctgacgctacttctagcgcttgtaacagatccaaacagtgtcgccttatctcaggacaccagcagttcctcaaccttgaacaccacccctgtccacagtggttcctcggctccagccaccagctctgcagtggactcggccaccactccaggccacagtggttcctcggccccacccacaagctctgcagtgaattcggccaccactccaggccacagtggttcctcagccccacccaccagctctgcagtgaattcggccaccacccccgtccacagtggttcctcagccccagtcaccagctctgcagtgaattcggccaccactcctgtccacagtggttcctcagccccacccaccagctctgcagtgaattcggccaccactcctgtccacagtggttcctcggccccagtcaccagctctgcagtgaattcggccaccacccccgtccacagtggttcctcagccccagtcaccagctctgcagtggactcggccaccactcctgtccacagtggttcctcagccccacccaccagctctgcagtgaattcggccaccactcctgtccacagtggttcctcggccccagtcaccagctctgcagtgaattcggccaccacccccgtccacagtggttcctcagccccagtcaccagctctgcagtgaattcggccaccactcctgtccacagtggttcctcggccccacccaccagctcagtagtgaattcggccaccacccccgtccacagtggttcctcggccccacccacaagctctgcagtgaatttggccaccacccccgtccacagtggttcctcgactccagccaccaactctacaacagactcagccaccactccagtcccccctggttcctccatgcaaaccaccgaggctatatcaggctcagctaacactccaatccacaatggctccttgnnnnnnnnnnnnnnnnnngcactggtccccactaccagtgcagcccacagtggtgcctcagctatgactaatagctctgaatcagacttggctaccactccaattgacagtggcacctctatctctactaccaaggcccctgccaccaccccagtccacaatggctccttgnnnnnnnnnnnnnnnnnngtgttgggctcagccaccactctgatccataatgacacctctacaatggctactacaactccagttggcaatggtacccaatcttcagtcccaagccggcaccctgtgactcccacccctcctgccgtctccagcaacagcaccattgccctaagcacttactatagcacggccctctcccctgccttctccagccatgctgcaccgcaggtgtctgttggagtctctttcttcttgttgtcttttcacatttggaaccaccagtttaattcttccctggaagatcccagctccaactactatcaagaactgaagaggaacgtctctggattgtttctgcaggtttttagccgagctttcctggggatctctaccatcnnnnnnnnnnnnnnntccgtggtcgtagactcgactgtgattttccgggagggtgctgtcaatgcctctgaggtgaagtcacagcttttacagcatgagcaggaggcagaagagtataatctggccatttcaaaaatcaacgtgggtgagatgcagtttccttcctctgcccagtcttggcctggggtaccaggctggggcattgccctgttggtgctggtctgtattttggttgctttggccatcgtctatctcattgcattggcggtgtgtcagtgccgccggaagaactatgggcagctggacatcttccccayccaggactcctaccatcctatgagtgaataccccacctaccacactcatggacgctatgtgccccctggcagtaccaaacgtagcccctacgaggaggtctcggcaggcaatggcagcagcctctcttacaccaacccagtagtggcaaccacttckgccaacttgtagggcaagccacccgcgcagggcagctgtgtagtctgccctcagtcttcactgccagccccccccccccctgcactctgatctgggctggtgagccagagttctgataggctgttcccagccttcctgacacgcgcctggtgaagcccagccctgccctgggggacaccctggggcaggggttcagtggtgactctcaggaggactgacctagaaaggctggggacggagatgggaacccaagcctggctgaataaaagctggcctcctgtt

SEQ ID NO: 443 - DNA, 1628 bp, Cricetulus griseus
  misc_feature (587)..(601): n is a, c, g, or t
  misc_feature (726)..(739): n is a, c, g, or t
  misc_feature (741)..(753): n is a, c, g, or t
acctcattgcgttacttacctcgactcttagctgtcgggaacggtaaccgtgacccgctgtctgcttttgtcaccttcgccttctaacccgtmgmyaccaygcgtgrgkgcmtctccatccacgttggccaggctggtgtccagatcggcaatgcctgctgggagctctactgcctggaacatggsatccagcctgacggccagatgccaagtgacaagaccatcgggggaggagatgactccttcaacaccttcttsrgkgrgacargcgctggcaagcatgtgccccgggccgtgttcgtagacctggaacccacagtcatcgatgaagttcgcactggtacctaccgccagctcttccaccctgagcagctcatmmcaggcaaggaagatgctgccaataactatgcccgtggccactacaccatcggcaaggagatcattgatcttgtcttggacagaattcgyaagctggctgaccagtgcacaggtcttcakggcttcttggttttccacagctttggtgggggaactggctctgggttcacctccctgctgatggagcggctctctgtcgattatggaannnnnnnnnnnnnnnagttctccatctacccagccccccasgktttccactgctgtggktgagccctacaactycatyctyaccacccacaccaccctggagcactctgattgtgccttcatggtagacaacgaggccannnnnnnnnnnnnncnnnnnnnnnnnnncattgagcgccccacctacactaaccttaaccgcctcattagccagattgtgtcttccatcactgcttccctcagatttgatggagccctgaatgttgacctgacagaattccagaccaacctggtaccctaccctckcatccatttccctctggccacatatgcccctgtcatctctgctgagaaagcctaccatgagcagctttctgtagcagagatcaccaatgcctgctttgagccagccaatcagatggtgaaatgtgaccctcgccatggtaaatacatggcttgctgcctgctgtaccgtggggatgtggttcccaaagatgtcaatgctgccattgccaccatcaagaccaagcgcagcatccagtttgtggactggtgtcccactggcttcaaggttggcattaattaccagcctcccactgtggtacctggtggagacctggctaaggtccagagagctgtgtgcatgctgagcaacaccacagccatcgctgaggcctgggctcgcctagatcacaagtttgatctgatgtatgccaagcgtgcctttgtgcactggtacgtgggtgagggcatggaggagggggagttctctgaggcccgtgaggacatggctgccctagagaaggattatgaggaggtgggtgtggattctgttgaaggagagggtgaggaagaaggagaagaatactaatctattctttctgcccctggatcatgtcaaactcctagaacttcagcttcaacattagctgataggcattgattcctctaattgtgtcatcttcattctgtgatcatgtatttgtctgtggccctgtatggtctttccatgatgtctcaaagtaaaaagctttaagacactt

SEQ ID NO: 444 - DNA, 2474 bp, Cricetinae gen. sp.
  misc_feature (1416)..(1430): n is a, c, g, or t
  misc_feature (1555)..(1579): n is a, c, g, or t
  misc_feature (2001)..(2018): n is a, c, g, or t
cgtccggaaaaagtaaccaaaccgcccgtggaccagcaacatggcgtggtccgctaataaggcagctgttgtgctrtgtatggatgtgggcrttgcyatgggtaactcttttcctggcgaagaatccycgtttgaacaagcraagaaagtgatgactatgtttgtccaacgacaggtgttttctgagagcaaggatgagattgcyttrgtcctctttggaacagacarcactrasaaygcccttgctagtgaggaccagtatcagaacatcacagtgcrcagacacctgatgctaccagattttgatttgctggaagacatcgaaagcaaaatccaactaggctctcgacaagcygacwtcytggacgccctgatygtgtgcatggatttgattcagcgtgaaacyatagggaagaagtttgrgaagaagcatattgaagtgttcactgacctcagcagcccattcagccaagatcaactggatgttatcatttgtaacttgaagaagtctggcatctccctgcagttcttcctgccttttccaatcagcaagaacraygagactgggsacagmggagatggtgacttgggcttggaccacygtggaccctcctttcctcaaaaaggarttactgagcagcaaaaggaaggcatcygcatggtggagagggtgatggtgtctttagaaggtgaagatgggctggatgagatctactccttcagtgagagtctacggcrgctgtgtgtctttaagaagattgagaggcgctcyatgccctggycctgccagctgaccatcggcccygatytgtctataaagattgtagcctataaatcgatcgtacaggagaarsttaaaaagasctggrtagttgtggatgcaagaacyctraagaaggaagatatacagaaaagaaactgtctattgcttaaaygaygatgacgaaactgaagtttccaaagaggacactattcaagggttccgctacggaagtgatataattccyttttctaaagtggatgaggaacaaatgaaatataaatcrgaggggaagtgcttctctgttttgggattctgtagatcttctcaggtccacaggagattctttatgggatatcaagttctraaggtctttgcagcaaaagatgatgaggcrgcggctgttgctctytcttcccttattcatgctttggatgaattaaacatggtcgccatygttcgatayrcttatgacaaaagagctaatcctcaagttggtgtagcctttccttatattaaggattcctatgagtgtttagtttatgtgcagctgcctttcatggaagacttgcggcaatacatgttttcatcactgaaaaacaataagaaatgcactcccacagaggcacagttgagtgctattgatgatctgattnnnnnnnnnnnnnnngtaaagaaaagcgaggaagaagataccattgaagacttgtttccaacctccaaaattccaaatcccgaatttcagagatttttccagtgtctgctgcacagagtcttacatccccaggagcgtcnnnnnnnnnnnnnnnnnnnnnnnnngaatatgctgratcyccccactgagrtgaaagccaaatgtgagattcctctctckaaagtgaggacccttttccckctgacagaagccgtcaagaaaaaggaycaagtgactgctcaggacattttccaagacawtsaygaagaggggccygctgccaaaaartgtaagayrgagaaagaagarrgtcacatcagtatctctagcstggctgaagggaatgtcaccaaggttggaagtgtgaatcctgttgaaarcttccgtgttctagtgaggcagaagattgccagctttgagsaggcragtctccagctaataagtcacattgagcagtttttggataccaacgaaacgctgtattttatgaagagtatggagtgcatcaaagctttccgggaggaggccatccagttttcagaagagnnnnnnnnnnnnnnnnnnctggaagcccttcgagagaaagtggaaattaassaattaaatcatttctgggaaattgttgttcaggatggagttactytgatyaccaaggatgaaggcyctggaagctctgtcacaactgaggaagccacaaagttyctggctcccaaagacaaagcaaaagaagatkcagcaggacttgaagaaggtggcgatgtggatgatttactggayatgatatagacyrtggatgtgttgggaatcyaagcatgccatctccgttgctgagagctcagaaagagcatcctggaagccattcagggggacctgaagccctggtgatcattccagcagacagctcaggagcgaatcactccaagtctctacagaatgaccacatccacatatattacaaggggtaacttagaccctatccaaatttataaagactcactattttttgattgaaaaaaaaaa

SEQ ID NO: 445 - DNA, 748 bp, Mesocricetus auratus
  misc_feature (578)..(611): n is a, c, g, or t
ccagctcagccctgtttgtgtttctcttttcttagctcagtgagtactgggtatgtgtcaccctgccaaatccctgatcacaagtctccatgaactggcggtgagctgggataataaaacccctgacatcaccattccagaagcttcacaagactgcatatataaggggctggctgtagctgcagctgaaggagttgaccggccaactgaccmtacattcacctagccaccatggacatcgccatccaccacccctggatccgccgtccctttttccctttccactcccccagccgcctctttgaccagttcttcggagagcacctgttggagtctgacctcttctcaactgccacttctctgagtcccttctacctgcggccaccttccttccttcgggcacccagctggattgacactggactctcagagrtgmgkmtsswswakgrcmswtyctssgtcaacctggatgtgaagcacttctccccggaagagctgaaagtcaaggtgctgggggacgtggttgaagtgcatggcaagcacgaagagcgccaggacgaacacggcttcatctctannnnnnnnnnnnnnnnnnnnnnnnnnnnnnnnnntgtggatcctctgaccattacttcatccctgtcatctgacggcgtcctcactgtgaatggaccaaggaaacaggcctctggccccgagcgtaccattcccatcacccgtgaagagaagcctgctgtcactgcagccc

SEQ ID NO: 446 - DNA, 1445 bp, Cricetinae gen. sp.
tggtcctgcgaggggaggttgcttatatcgatggacaggtgttggtacccccaggctatggacaagagctacggaagtggcctcagggggctgttccccagccccctccttcagctcccgccaccaccgaagtaaccacgacacctgagagaccacgccgagtcatcccaggccttcctgacggccgcttccacttgccaccccgaatccaccgagcctctgacccaggtttgccagctgaggaacccaaagagaagccatccaggaaagtagtggagccaggtgagcccacctttctgaacagtcaccagggggcctctgtcgtcagggccaagttggggatcctctgactcacatcttctgcactgccccccactgcaaagctgatggggaccccygacggcycctgctaccctgcaccrccggtmcctagacaggcatcacctcagaacctgggstcttctggcctactgcacccacagacttcacccctgctgcactcyttagtgggccaacacatcctgtctgtcaagcagttcactaaggatcagatgtctcatytgttcaacgtsgcrcacacactacggatgatggtgcagaaagagcggagccttgacatcctaaagggcaaggtcatggcctccatgttctacgaggtgagcacccgcaccagtagctcctttgcagcagccatggcccggctcgggggcgctgtcctcagcttttcagaagccacgtcctccgtccagaagggggaatcccttgccgactctgtgcagaccatgagttcgtacgctgatgtcgttgtgctccggcaccctcagcctggagctgtggagctggcagccaaacactgtcgcagaccagtgatcaatgctggggatggagtcggagagcaccctactcaggccctgctggacatcttcactatccgggaagagctggggactgtcaatggcatgacgatcaccatggtaggtgacctgaagcatgggcgcacagtgcactccctggcctgcctgctcacccagtaccgtgtgagcctacgctacgtggcacctcccagcctgcgcatgccacctagcgtgtgggactttgtggcttcccggggcaccaaacaggaggagtttgagagcattgaggaggcgctgcccgacacggacgtgctctacatgactcgcatccagaaagagcgatttggctccacccargaatacgaagcttgctttggtcagttcatcctcactccccacatcatgacccgggccaagaagaagatggtggtgatgcatccgatgccccgagtcaatgagataagcgtggaggtggactcagacccccgagcagcctacttccgccaagctgagaacggcatgtacatccgcatggcgcttcttgccaccgtgctaggccgtttctaggccagcctcctgctggcctggtct

SEQ ID NO: 447 - DNA, 250 bp, Mesocricetus auratus
accttcaacaaatgaacagcacagattaagcataatgctgcctgaccatcattttattactactaaaatcccctttgctctctatttcatggtggggtagtcattatgggaatggaggtaaaacagcttatmtmtcmtctattktskawgtaaaaactaaattcatgaagaatattcatttttaagagcatagatttctgaattagaaaaaagttgtttttgttctgttttggataaaatcttgctacat

SEQ ID NO: 448 - DNA, 683 bp, Mesocricetus auratus
  misc_feature (470)..(489): n is a, c, g, or t
aaaaatgacgtaacggttaaagtccacaaaaaacacccagaaaaccgcacgcgaacctacgcccagaaacgaaagccaaaaaacccacaacttcctcaaatcttcacttccgttttcccacgatacgtcacttcccattttaaaaaaactacaattcccaatacatgcaagttactccgccctaaaacctacgtcacccgccccgttcccacgccccgcgccacgtcacaaactccaccccctcattatcatattggcttcaatccaaaataaggtatattactctcatctattgtctaagtaaaaactaaattcatgaagaatattcatttttaagagcatagatttctgaattagaaaaaagttgtttttgttctgttttggataaaatcttgctacataacccaggttaaactcaaactcagggtcctcctgtctcagcctccagctgttataaaatctaaattctnnnnnnnnnnnnnnnnnnnnagtgggggcgcacacagggatggtggaccctaggtagctaacatactatgaccagccacatttgtacagtggggtcacagctgtagtatcttaaagaaaacttgtcaagggactcatggcaaaaaacaccccacaaacttcaattagttccttcgactttttgaaacagttactttgtttttctgacactttaa

SEQ ID NO: 449 - DNA, 2984 bp, Cricetulus sp.
  misc_feature (480)..(498): n is a, c, g, or t
aaaagcataacgtcaaccgttgacccagggtctggaaggacgcgggtcgtcctttgaacatttgcaacaacttagatgcaaagtgcggtgggatggggaggccggagttgcgggagcttcaagggttaactgttcggccgtgtcacatcggccgttcgaagctcctccccgggccgtgaggtgaagacttttgaaaatcacaccactgcagactcctcccccgccgggaagcctcgcccgcaagagctgggaatgcctctggatgcgcgcgtgtagtcggcggccggctgagcccagcgcaggtttgtagcggggaagccgccgggtccgggatccttggtctttggcgcggacacagtggggtctgtgaaccatcggagacgcgacgcaggctctgaggatgagcaccgcggatctcaggctgcgctgggccatcgccctgctcctggccgctgccggggctgcagcagaagacacatnnnnnnnnnnnnnnnnnnngtgcagggacgggaaatgtatcgccagcaagtgggtctgtgacggcagccctgaatgcccggatggctctgatgagtcctctgagacatgcatgtctgtcacctgtcaatccaaggaattcagctgtgggggccgtgtcagccgctgcattcctaactcctggcgttgtgatgggcaaacagactgtgagaacggctcagatgaacaaggctgtgcccccaagacgtgctcccaggatgagttccgctgccaggatggcaagtgcatctcccagaagtttgtgtgtgaccaggaccaagattgcgtggatggctctgacgaggcccactgccaggccgccacttgtgggcccgcgcatttccgttgcaactcctggccctgcatccccagcctgtgggcctgtgacggggatgacgactgtgaggacggctccgatgagtggccacagaactgtgggggccgcgacaccgccgctgcctggagtagcagcccctgttcctccctggagttccactgtggcagcagtgaatgcattcatcgcagctgggtctgtgatggcagcgctgactgcaaggacaagtcagatgaggagcactgcgtgacagccacctgccggcctgacgaattccagtgtgcagatggcacctgcatccatggtagccgccagtgtgaccgtgaatatgactgcaaggacatgagtgacgagcttggctgcatcaatgtgacacagtgtgacgggcccaacaagttcaagtgccacagtggcgaatgtatcgccttggacaaagtgtgcgactccatgcgggactgccgggactggtcagatgagcccatcaaggactgcaggaccaatgagtgcttggacaacaatggtggctgttcccacgtctgcaaggacctcaagattggctacgagtgcttgtgtcccaatggcttccagctggtggaccagcacaggtgtgaagacattgacgagtgtcaggagccggacacctgtgaccagctctgcgtgaaccttgaaggcagctacaagtgcgagtgccgggctggattccacatggaccctcacaccagggtctgcaaggctgtaggctccgtagcctatctgctcttcactaaccgccacgaggtacggaagatgaccctggaccgaagcgagtacaccagcctgatccccaacctgaagaacgtggtggccctggacactgaagtggccaacaatagaatctactggtccgacctgtcccagggaaagatctatagtgccctgatggaccaagcacctaccttgtcctatgacaccatcatcagtggggatctgcaggccccagatgggctggccgtagactggatccatggcaacatctactggacagattcagttccaggcagtgtttctgtggctgacaccaagggtataaggagaaggacactgttccaagagaaggggtccagacccagagacattgtggtggaccctgtgcatggcttcatgtactggacagattgggggacacctgccaagatcaagaaagggggcctgaatggtgtagatatctactcgctggtgactgaggacatccagtggccawatkksatsaywytagatattcccagtggccgcctctattgggttgattccaaactccactctatctccagcattgatgtcaatgggggcaatcggaagaccattttggaagatgagaagcagctggcccaccccttctccttggccatctatgaggwsamwgtattttggacggatgtcataaatgaagccattttcagtgccaatcgcctcacaggctcagatgttaatttggtggctgaaaacctcttgtccccagaggacattgtcctgttccacaacatcacacagcctagaggggtgaactggtgtgagagaacagccctccccaacggtggctgccaatacctgtgcctgcccgccccacagatcaatcctcactccccaaaattcacctgtgcctgccctgatggcatgctactggccaaggatatgcgaacgtgcctcacagaagtggcacctgtactgaccacccagggaacatccaccatcaggcctgagatcactgcaggagccgaaggctgcccgaagcacaaggaggatcagtcggcttccagtacttccaggcagcctgcacttagcacagtggagtcggtgacaatgtcccaccaagtccagggtgacagaaggaacgaggagcggccacagggtgtgggggtcttgtccatcaccctccccatcgcactggtcatcctccttgtctttggggccatcctgttgtggaggaactggcggctgaggaacatcaacagcataaactttgacaacccagtgtaccagaagaccacagaagatgaactccatatttgccgaagccaggacggctactcctacccctcacgacagatggtcagcctggaggatgatgtggcatgaacagctgtgagaaccttcc

SEQ ID NO: 450 - DNA, 2947 bp, Cricetulus griseus
  misc_feature (1100)..(1141): n is a, c, g, or t
  misc_feature (1239)..(1258): n is a, c, g, or t
  misc_feature (1260)..(1278): n is a, c, g, or t
  misc_feature (1303)..(1330): n is a, c, g, or t
  misc_feature (1340)..(1359): n is a, c, g, or t
  misc_feature (1396)..(1401): n is a, c, g, or t
  misc_feature (1403)..(1420): n is a, c, g, or t
  misc_feature (1427)..(1444): n is a, c, g, or t
  misc_feature (1480)..(1491): n is a, c, g, or t
  misc_feature (1493)..(1497): n is a, c, g, or t
  misc_feature (1508)..(1524): n is a, c, g, or t
  misc_feature (1528)..(1541): n is a, c, g, or t
  misc_feature (1544)..(1573): n is a, c, g, or t
  misc_feature (2504)..(2507): n is a, c, g, or t
tccgccgcagccgcagccatcgtcggcgcccctcgctcttctcctgtgcccgtgagaatccgtcgccatccgccactatggtgaacttcacggtagaccagatccgtgccattatggacaagaaagccaacatccggaacatgtcagtcatcgctcacgtggaccacggcaagtccacactgacggactccctggtgtgcaaggcgggtatcatcgcctctgcaagagccggtgagacacgcttcacagacacccgcaaggacgaacaggagcgctgcatcactatcaagtccacggccatctccctcttctatgagctctctgagaatgacctgaacttcatcaagcagagcaaggatggatctggctttctcatcaacctcatcgactctccaggccatgtggatttctcctcagaggtgacagctgcacttcgtgtcaccgatggagctcttgtggtggtggactgtgtgtctggtgtgtgcgtgcagactgagaccgtgctgcggcaggccattgccgagcgcatyaagcctgtcctgatgatgaataagatggaccgtgccctgcttgagctgcagctggagcctgaggaactataccagaccttccagcgcrttgtggagaatgtcaacgtcatcatttccacctatggcgagggcgagagtggacccatgggaaatattatgattgaccccgtcctgggcactgtgggctttggctctggcctgcatggctgggccttcactctgaagcagtttgcggagatgtatgtggctaagtttgcagcaaagggtgagggccagctggggcctgctgagcgggccaagaaagtggaggacatgatgaagaagttgtggggagatcggtattttgatcccgccaatggcaaattcagcaagtccgctaacagccctgatgggaagaaactgccacgcaccttttgccagctcatcctggaccccatcttcaaggtgtttgacgccatcatgaacttcakaaaggaggagacggccaagctgattgagaagctggatatcaagctggacagcgaggacaaagacaaggagggcaagcccctgctgaaggctgtgatgcgnnnnnnnnnnnnnnnnnnnnnnnnnnnnnnnnnnnnnnnnnncacacgwcckcccttcccccgtcaccgcccagaaataccgctgcgagctgctctacgaggggccacctgatgatgaggcgrccatgggcattaaaagnnnnnnnnnnnnnnnnnnnntnnnnnnnnnnnnnnnnnnnatggtgccaacctscgacaaaggcnnnnnnnnnnnnnnnnnnnnnnnnnnnnccggggtagnnnnnnnnnnnnnnnnnnnnccgcatcatgggccccaactacacgcctgggaataannnnnnannnnnnnnnnnnnnnnnncagagtnnnnnnnnnnnnnnnnnnccggtatgtggagccaattgaggmcttgccctgtannnnnnnnnnnnannnnnwtggtgtagannnnnnnnnnnnnnnnncagnnnnnnnnnnnnnnttnnnnnnnnnnnnnnnnnnnnnnnnnnnnnntgttcagcgtcagccctgtsgtsaragtggctgtggakgccaagaacccagctgacctgcccaaactggtggagggcctgaagcrgctggcaaaatctgaccctatggtgcagtgcatcattgaggagtctggggagcacatcattgctggagcaggtgagctgcacctggaaatctgcctcaaggacctggaggaggaccacgcctgcatccccatcaagaaatctgaccctgttgtctcataccgggagacagtgagcgaggagtcaaatgtgctgtgcctgtccaagtcgcccaacaagcacaaccgattgtatatgaaggcccggcccttccctgatggcctggccgaggacatcgacaagggtgaagtgtctgctcgccaggagctcaaggcacgcgcacgctatctagctgaaaagtacgaatgggatgttgctgaagcccgcaagatctggtgctttgggcctgatggcactggccccaacattcttaccgatatcaccaagggtgtgcagtacctgaatgaaatcaaggacagtgtggtggctggcttccagtgggccactaaggagggcgctctctgtgargagaacatgcgtggtgtgcgcttcgatgtccatgatgtgaccctacatgctgatgccatccaccgaggaggtggtcagatcattcccacagctcgtcgttrtctgtatgccagtgtgttgactgcacagccccgcctcatggagcctatctacctggtggagattcagtgtcctgaacaggtcgtgggtggcatctacggtgtcctgaacaggaagmktggccatgtgtttgaagagtcccakgtggctggcacccccatgtttgtagtcaaggcctatcttccagtcaacgagtcctttggttttacagctgacctgcgctccaacactggtggccaagnnnncccccagtgtgtgttcgaccactggcagattctgcccggggacccgttcgacaacagcagccgtcccagccaagtggtggctgagacccgcaagcgcaaaggtctaaaggagggcatcccagcactggacaacttcctggacaaactgtaggcaggcttgcacagccacacactgcacagtgcccacccatcagaagacaccttgagactgtccccataatgctgctctggaggtggctggggccaccctgccattgagcactaacacttgatgccgactctatttatttcggaatttccgaggcagtggagtcgccctctgcaggctggactggctggcgggccatggggtgggcaggacacagctctttatcattttcagagggaaaaatgctcagatatcaaacatctaaataaatgcattcagaggaaaaaaaaaa

SEQ ID NO: 451 - DNA, 1880 bp, Cricetulus griseus
  misc_feature (111)..(142): n is a, c, g, or t
aagcttaatctttgcactgcattaaaatacagtagatagctaaagccagtctacaccaaccttcttcatcctcagtctgggaaatcacagagtccagacctaaggcactcnnnnnnnnnnnnnnnnnnnnnnnnnnnnnnnnggaaaattaaccaggaacttcagggactgctcaccttgggtctgcacttgtgcactatcactatggggtttgggttttgttttgttttgctttatctatttgaaaggctgcaagcaacagggagtagccaaccaatagacaacggaagctgcacagaagaatgttctggcacagtgatctgaaatattgagcagtgcttctgaattctgaaaaactagccttaaagacagacagctttgttctagtcagccaggcaagcatatgtaaataaagttcctcagggaactgaggttaaaagatcgtatcctggacctgccagacctggccattcacgtaaacagaagattccgcctcaagttccggttaacaaccaggaggcaacgagatctcaaatctattacttctaatcgggtaattaaaacctttcaactaaaacacggacccacggatgtcacccacttttccttccccggctccgccccttctcagtactccccaccattaggctcgytactctacctccacttccgggcgcgacacccacgtgccctctcccacccgacgctaaccccgcccctgcccgtctgaccccgcccaccacctggccccgccccgttgaggacagaagaaaccccgggcagccgcagccaaggcsgacgggtagacgctgggggcgcttgaggagtcgtcctctaccttctctgctggctcggtgggggacgcggtggatctcaggcttccggaagactggaagaaccggctcagaaccgcttgtctccgcggggcttgggcggcggaagaatggccgctagacgcggacttggtgcgaggcatcgcaggatgcagaagagcaagcccgccgggagcgcgcggctgtactaccccgcgcctggagcggccacgccggactgggcggggccggcctggtggaggcggagtctgacctcgtggaggcggggcctctgatgttcaaataggatgctaggcttgttgaggcgtggcctccgattcacaagtgggaagcagcgccgggcgaatgcaatttcgcgccaaacttgggggaagcacagcgtacaggctgcctaggtgatcgctgctgctgtcatggttcgaccgctgaattgcatcgtcgccgtgtcccagaatatgggcatcggcaagaacggagaccttccctggccaatgctcaggtactggctggattgggttagggaaaccgaggcggttcgctgaatcgggtcgagcacttggcggagacgcgcgggccaactacttagggacagtcatgaggggtaggcccgccggctgcagcccttgcccatgcccgcggtgatccccatgctgtgccagcctttgcccagaggcgctctagctgggagcaaagtccggtcactgggcagcaccaccccccggacttgcatgggtagccgctgagatggagcctgagcacacgtgacagggtccctgttaacgcagtgtttctctaactttcaggaacgaattcaagtacttccaaagaatgaccaccacctcctcagtggaaggtaatttggggttaagatgaggatttctagggtttgtatgaagcaagatttccaatgcagacgtggaagtgcgaagtctcccgtgggaatctgggaactttgcttcttggcagaaatttttgtgctgttcccagagtttattaagcatcctctttatatacaaaatatttgaaattttgttagcaagagcagtt

SEQ ID NO: 452 - DNA, 4282 bp, Cricetulus griseus
  misc_feature (82)..(102): n is a, c, g, or t
  misc_feature (762)..(778): n is a, c, g, or t
  misc_feature (1698)..(1756): n is a, c, g, or t
aggtcgtgatggagtttgaagaggactttagcgcaagagcagacaaggacttcttgaagatgggcagaaagagtaaaaaggnnnnnnnnnnnnnnnnnnnnncccaaacgttggtatatttgggatgtttcgctatgcagattggctcgacaagctgtacatggtcctgggaactctggctgctgttctccatgggacttcacttcctctcttgatgctggtgtttggcaacatgacagatagttttacaaaagcagaaaccagtatttggccaaacatgactaatcaaagtgaaatcaacaacacagaagtcatcagcggcagtctggaggaagacatggccacgtacgcctattactacacggggattggtgctggtgtgctcatagttgcctacattcaggtttcattttggtgcctggcagctggaagacaaataaacaaaattagacagaagttttttcatgctataatgaatcaggagataggctggtttgacgtgcacgacattggggagctcaacacccggctcacagatgatgtctccaaaattaatgatggaattggtgacaaaattggaatgttttttcagtccatagcaacatttttagctgcttttatagtaggatttataagtggttggaagctaacccttgtaattttggctgtcagcccccttattggattgtcatctgctatgtgggccaaggtattgacttcattcactaataaggaacttcaggcatatgcaaaagctggagnnnnnnnnnnnnnnnnnttagcagccatcagaactgtgattgcatttggaggacaaaacaaagaacttgaaaggtacaataaaaatttagaagaagctaaaaatgttggaataaagaaagcggtcacagccaacatttccataggtattgcctacttattggtctatgcatcatatgcactggcattctggtatgggacctccttggtcctgtcgaatgaatactctgttggacaagtgcttactgtcttcttttccatactatttggaacttttagtattggacatatcgccccaaacatagaagtctttgccaatgcaagaggggcagcctatgaaatcttcaagataattgataatgagccaagcattgacagcttctcaacacagggacataaaccagacagtgttatgggaaatttagaatttaaaaatgtccacttcagctacccatctcgaagtggaattaagatcttgaagggcctcaacctgaaggtgcagagtggacagacagtggccctggttggcaaaagtggctgtgggaaaagcaccactgtccagctgctgcagaggctctacgaccccacagagggcgtggtcagtatcgacggacaggacatcaggaccatcaatgtgaggtatctgcgggaaatcattggggtcgtgagtcaggaacctgtgttgtttgccaccactatcgctgaaaacattcgctatggccgagaaaatgtcactatggacgagatcgagaaagctgtcaaggaagccaatgcctatgacttcatcatgaaactgccccataaatttgacactcttgttggtgagagaggagcacagctgagtggaggacagaaacagagaatcgccattgctcgtgccctggtccgcaaccccaagatccttttgttggatgaggcgacatcagccttggacacagnnnnnnnnnnnnnnnnnnnnnnnnnnnnnnnnnnnnnnnnnnnnnnnnnnnnnnnnnnngtgatagcccaccgcttgtctacagttcgtaatgctgacgtcattgctgggtttgatggtggtgtcattgtggagcaaggaaatcatgaagagctcatgaaagagaagggtatttactgcagacttgtcatgatgcagactagaggaaatgaagttgaactgggaagtgaagctgatggatcccagagtgacaccattgcctctgaattgacttcagaagaatttaaatccccttcagtgaggaaatcaacttgtagaagcatctgtggttcccaagaccaagagaggagagtcagtgtgaaagaggcccaggatgaagatgtgcctctggtttccttttgggggatcctgaagctaaacataactgaatggccttatttagttgttggtgtactttgtgctgttataaatggatgtatgcaacccgtcttctccatagtattttcagggatcataggggttttcacaagagatgatgaccccaaaaccaaacaacagaattgtaatttgttttcactgttttttctggtcatgggcatgatttgttttgttacatatttcttccagggcttcacatttggcaaagctggagagatcctcaccaagcgactccgatacatggttttcaaatccatgctgagacaggatataagctggtttgatgatcatagaaatagcactggcgcattgaccaccaggctagccagtgatgccgctaatgttaaaggggctatgagttcaaggcttgctggaattacccagaatgtagcaaatcttgggacaggaatcatcatatccctagtctatggctggcagttaacacttttacttgtagtgattgctccactcattatactaagcggcatgatggagatgaaagtgttgtctggtcaagctctgaaagacaagaaagagctagaagtctctgggaagattgctactgaagcaatagagaacttccgcactgtcgtctctttgactcgggagcagaagtttgaaaatatgtatgcccagagcttgcagataccatacagaaatgctctgaagaaagcacacgtctttgggatcacattctccttcacccaggccatgatgtatttttcgtatgctgcttgtttccggtttggtgcctacttggtggcacatcaaatcatgacttttgaaaatgttatgttggtattttcagctgttgtcttcggtgccatagcagctgggaatgccagctcatttgctcctgactatgccaaagccaaagtgtctgcatcgcatatcatcaggatcatggaaaaaatcccttccattgacagttacagcaccagaggcctgaagcctaattggttggaaggaaatgtgaaatttaatgaagttgtgttcaactatcccacccgacctgacatcccagtgcttcaggggctgagcctggaggtgaagaagggccagacgctggccctggtgggcagcagtggctgcgggaagagcacagtggtccagctgctcgagcggttctacgaccccatggccggaacagtgtttctagatggcaaagaaataaagcaactgaatgtccagtggctccgagcacacttaggcattgtgtcccaagagcccatcctgtttgactgcagcattgctgagaacatcgcctatggagacaacagccgggtcgtgtcccaggatgagatcgagagggcggccaaggaggccaacatccaccagttcattgagtctctgcctgacaaatacaacaccagagtaggagacaaagggactcagctgtcgggtgggcagaaacaacgcatcgccatagcacgcgccctcgtcagacagcctcacattttgctcctggatgaagcaacatcagccctggatacagagagtgaaaaggttgtccaggaagccctggacaaagccagggaaggccgcacctgcattgtgatcgctcaccgcctgtccaccatccagaacgcagacttgatcgtggttattcagaatggcaaggtcaaggagcatggcacccaccagcagctgctggcacagaaaggcatctatttctccatggtccaggctggagcaaagcgcttgtaaactgtgactgtttgaaatgctaagtgtttttaatattgttgcttaaatatggcacttaaccaaagtttaaaaaggtgaacactgttgatggtaatttcatcaagatgacagtcttcagaaacttcgtaatttaattaataaaaactgaaaaaaatgtcattgatgggggcattgtgtttaattgcattatctgagacataaaagaaacttaaagaatttttaaaaataaaatgtgtaattttgtttcagtttttaatttcaaccctactttgttaaatgattataaaggttgtaaaatgtacttaaatattccataaagtgcctataaaaactaaatgttcatataattggagtcatcttgtctgttgtgtgtattaatttatatatttttccaaataggatgctgtaaataattttagctttcataaaatggattttaag

SEQ ID NO: 453 - DNA, 3961 bp, Cricetinae gen. sp.
ggatccggacaacacccacaccggcccctccaggtccagaaagctggccctgcgagaagcgggactgaaaaggsgtgcgggagccagaaatccaaaagggtgccaaggcatgcgtcctttttccacccagaaataaccccaggctttcaatttgaggttatttcaatatccagcaaatgcgttacttcctgccaaaagccagcctccccgcaacccactctcccagaggccccgccccgtcccgccccctcccggcctctcctcgtgctggatcgctccctaaggacgccccgctccagaagccccacctaccaaggacgccccacccttgttcccggactggtatgaccccagcctgctgacatccctccgccctttctcgtgcacgcggctatggcggaatctgagttgcagctggtggcgcagcgcatccgcastttccccgacttccccatccccggcgtgctgtttaggtgagatcacgagccagcaaggcgttggagccctgttcctgggctcccggcgaggcgcatgggcagtctcggggatcttgtggggtctccgcccccctttccccggccaccagcctctccttgttcccagggatatctcgcccctcctgaaggaccccgcctccttccgagcttccatccgcctcctggccagtcaccttaagtccacgcatggcggcaagatcgactacatcgcaggcgagtggccatgccaggccgtgctggtcccccactgtgcaggctcccctcccttcccttatgtcaccctcagtccatcccacacccatcccttctttcttcaacccctaatcctcttttagcactctgtttctcttgccttggtccctcgttgaccctggatgagtactgcgtctcccacccctgctaggtctctgacctccgccctcagtgcctgttctactagagatgaactctgctcggtccttgttcagggccagcccttctctcttggggtgtgaagttggctagcagcctggaggcaggactgtaagaagcatacgtgtgctttgagaactttgaggaaggccctggaacctccttgctaggagtagcacctaagatgaactagatgctaaaaaatgctgtatctttggggcacacgagggcatgcctgggcaggcttagagcctggtagtctcaggggctgcaccaaagtgtaattcttgtgctaaataactttcacttaccagtgccaagcacgggcttcagaaacaccctagggtcgctgaatgtccaccaggggagtcagacatgtccagagggtgagaaccccagagaattcggtagccctgacatgtgctacaattactgatgcccacttcctactggttcctcctggccatacctcaggaattagggcatgctttctgcctgctacagtagctcatcctccctggaagtgaccccagacatataccctgaactgtaaccgataaagtgcgcctgggcagatgtatttgagaggtggcaaaagtaaaccataggtgtccccgagctagatacagaaggcagataacatccccaaggctaagctgctgccccaatagccatcagccttctagttatagctagtaagacctagtattcctggtcaatactattcactcaatccttacacctcagccctaacacgccccctctctcatcctaacaggcctagactccaggggattcttgtttggcccctccctagctcaggagctgggcctgggctgtgtgctcatccggaagcgagggaagctgccaggccccacagtgtcagcctcctatgctctcgagtatggcaaggtaagcaggcagtgggtagctgtctaggagtaaatgtgggggctcagagaggttaagtcatcaggccaggtttataccaccaggaaacatggagaagctaggggtggtggtcacttgttagctactagactctcactctacttcctgtctgcaggctgaactagaaatccagaaagacgccttagaacctggccagaaagtggttgttgtagatgatctcctggccactggaggtaagagccactctgtagcataaagaggtttcaaagggataagccctatccggggtgctgactaagcaagagccttactacctgtgtctttcctcgtcccttcaccccaggaaccatgtgcgctgcctgtgagctgctgggccagctacaggctgaggtggtggagtgtgtgagcctggtggagctgacctcacttaagggcagagagaagctaggatcagtaccattcttctctctcctgcaatatgagtgactggaatggttgctgcatccctgccctcagcatctacggttgaacagtggctcagccttaccaaagtgacctttgtgagccaccagctgcactttctctaactctattcactcatttctttggtcagctgatggccatgcctatggaccacctgggtccttgcattttatatatgtgctgagtcctggagcagagcagagctactgtgggttatgacacagcagatcaataaatagtttggtacatatggtgcttcctgttgtcttgttgcatggatcacgttccatagctgccaggtgacagtccctgtcccttgggattccctgtgcaaatgttctccacagagtcaatcccacacactgccccggccgtagggtcttatagaaccagaatccgttttaagcaaaaggctttcatcagtagtctctagagtgacatgatgggaacaggggctcagtgtcaccttgcagacctcttcaaaacaggtggaaaccagtaggcacagctctgtatagatttcacagcctctaggaagttttctgggccattcctttaggaccaaaatggagagagtagcccaagggaataccttattcatattttgttgaacatcaataccaggttgtttgtagggatgctgagccacacccccagcaagactgttcccatccagacttttactggcctggtcttgctagccatagaagaaaacattgcaacaacagcagggcatcatttataggtattttatggtgacccattcagtttaatttctgtattacttttatttaaatcttacgtgactttattaaaagccaagattaacagtcacatccaaggtacagaaggttaaataaaaattttgatctcaaaacctatagttatttccattatatacagaaggcccaatttcactcttgccattcagaactctctgtccttatgaaagctggccagaagcccaagttctctgtgtgggtcttaaggctctaagcaagacagcagctttcatgagcatggagaacaggctaggctttggcctaaggctcccaactggaccttgccagtacctagatgagtagtttgtgggacgggcatctaacatactctgctctccaagtctacttccccaacacccacacaagtgctgggtctggggtacccaaagcctcaggaaccaatttagcactttatgggcacaattgctgcccatactggcagtaagcccttgggcctgtgacactgcgagggatgctcaagtgcattgtactgataaagggaacagactatcaggtaaagaaatgagtcacaacccctcagtgtggatctggtgggtcagcctttcagtgaggccagctaagtcagcagctttgtccagcttgatgtaggtgtccatgcgaatccgatgcaggctcagccagtctggcagcaactcagataggagcaacacatgtttctccatctcccctgtggaagtgcattgtggttaactgaagcacagtgcctggatgacttgcttaactcacttacccagcctggtgccttacacccctcaaggcttaacctgtgtgcagtggatccaagcagagcctgggccctgctctcaaacaccagggggatgaacagcaagggcaagacacatatacgccaagctt

SEQ ID NO: 454 - DNA, 6215 bp, Cricetinae gen. sp.
  misc_feature (180)..(201): n is a, c, g, or t
  misc_feature (1290)..(1306): n is a, c, g, or t
  misc_feature (2405)..(2462): n is a, c, g, or t
tcaggcccctggcaccagaggtttctattaagaccccacgggtattcaatgcagggggtgcccctcggatctgtgccttggactgcggcctcaagtataatcagatcagatgtctctgccagcttggggctgaggttactgtggtgccctggaaccacgaattagacagtcagaagtatnnnnnnnnnnnnnnnnnnnnnngacctggcgatcctgcctcttatcctggtgtggtagccacactgaaccgcgtcttgtctgagcccaatccccgacctgtgtttggaatctgccttggacaccagctgttggctttagccattggggccaaaacttacaaaatgaggtatggaaaccgaggccacaaccagccctgtttactggtgggcaccgggcgctgctttctgacgtctcagaatcacgggtttgccgtggatgcagactcgctgccagcaggctggactccgctcttcaccaatgccaacgactgttccaacgaaggcattgtacatgacagcctgccctttttcagtgtccagtttcacccagagcaccgagctggcccttcagatatggaactgctttttgatgtatttctggagactgtgagagaggctgtagctgggaaccccgggggccagacagttaaagagcggttggtgcagcgcctctgtccccctgggcttctcattcctggttctgggcttccaccaccacggaaggttctgatcctaggctctgggggcctctccattggccaggctggagaatttgactactcaggctctcaggccattaaagccctgaaggaggagaacatccagacgctgctgatcaaccccaacattgctacagtgcagacctcgcaggggctggcagacaaggtctacttccttcccattacacctcactacgtaacccaggtgattcggaatgaacgcccagatggtgtgttactgacttttgggggccaaacagcccttaactgcggtgtagaactgaccaaagccggagtgctagctcggtatggggttcgggtcttgggtacacctgtggagaccattgaactgactgaggaccgacgagccttcgcggccaggatggctgagatcggagagcatgtagcccccagcgaagcggcaaattctcttgaacaggctcaggcagctgctgagcgactgggctaccctgtgctggtgcgtgcagcctttgccctgggtggtcttggttctggctttgcttccaccaaagaggaactctcagctcttgtggctccagctttcgcccatnnnnnnnnnnnnnnnnnagacaagtctctgaagggctggaaggagattgaatatgaggtggtgagagacgcctatggcaactgtgtgacggtatgtaacatggagaacttagacccactgggcatccacactggtgagtccatagtggtggcgcccagccagacgctgaatgacagagagtaccaacttctgcgacggacagctatcaaagtcacccagcacctggggatcgtcggggagtgcaacgtgcagtatgccttgaacccggagtctgagcagtattacatcattgaagtaaatgccaggctgtctcgaagctctgccctggccagtaaggccacaggctatcctctagcctatgtggcagccaagctggcgttgggcattcccctgccggagctcaggaactctgtcactgggggaacagcagcctttgagcctagcctggactactgtgtggtaaagattcctcgatgggacctcagcaagttcttgcgtgtcagtacgaagattgggagctgtatgaagagtgttggtgaagtcatgggcattggacgctcatttgaagaggccttccaaaaggccctgcgcatggtggatgagaactgtgtgggcttcgaccatacagtgaagccagtcagtgatgtggagttggagacaccaacagataagcggatctttgtggtggctgctgctctgtgggctggctactcggtggagcgcctgtatgagctcacacgcatcgactgctggttcctgcatcgaatgaagcgtatcgtgacccacgcccagttgctggaacaacaccgaggacagccgttgtctcaagacctgctgcaccaggccaagtgcctcggcttctcagacaaacaaattgcccttgcagtcctgagcacagagctggcggttcgaaagctacgtcaggaactgggaatctgccctgcagtgaaacagattgacacagttgcggctgagtggccagcacagaccaattacctgtacctgacatactggggcaacacccatgacctcgactttcgaactcctcacgtcctggtccttggctctggtgtctaccgcatcggctccagtgttgagtttgactggtgtgccgtnnnnnnnnnnnnnnnnnnnnnnnnnnnnnnnnnnnnnnnnnnnnnnnnnnnnnnnnnnccagagacagtcagcacagactatgacatgtgcgaccgactctactttgatgagatctcctttgaggtggtgatggacatctatgagctggagaaccccgacggcgtgatcctgtccatgggtggacagctgcccaacaacatggccatggctctgcatcggcagcagtgccgagtgctgggcacctccccggaagcgatcgattcagctgagaaccggttcaagttctcccggcttctagataccatcggcatcagccagcctcagtggcgtgaactcagtgacctcgagtctgctcgccagttctgccagactgtggggtacccctgtgtggtgcgcccctcctatgtgctcagcggtgccgctatgaatgtggcctacactgatggggacctggagcgcttcctgagcagtgcggccgctgtctccaaggagcaccccgtggtcatctccaaattcatccaggaagcaaaggagattgatgtggacgctgtggcctgcgatggcgtcgtgtcagccattgccatctccgagcacgtggagaatgcaggtgtgcattcaggggatgctacgctggtcacccccccacaagacatcacccccaaaactctggagcggatcaaagccattgtgcatgccgtggggcaggaactacaggtcacagggcccttcaatctgcagctcattgccaaggatgaccagctgaaagttattgagtgcaatgtgcgtgtctctcgctccttccccttcgtgtctaagacgctgggtgttgacctagtggccttggccacgaggatcatcatgggagagaaggtagaacccatcggactcatgacgggctctggagtcgtgggagtaaaggtgcctcagttctccttctcgcgcttggcgggtgctgatgtggtgctgggcgtggagatgaccagtactggagaagtagctggctttggagagagccgttgtgaggcctacctcaaagccatgcttagcactggctttaagatccccaagaagaacatcctgctgaccatcggcagctacaagaacaaaagtgagctgctcccgactgtgcggttgctggagagcctgggctatagcctctacgccagcctgggtacggcggacttctacactgagcacggggtcaaggtgacagctgtggactggcactttgaagaggctgtggatggcgagtgcccgccacagcggagcatcttggatcagctggctgagaatcactttgagttagtgattaacctgtcaatgcgtggggccgggggtcgacggctttcctccttcgtcaccaagggctaccgcacgcggcgcctggctgctgacttctctgtgcctctcatcatcgacatcaagtgcaccaaactcttcgtggaggccctgggtcagattggccccgccccgcctttgaaggttcatgtagactgcatgacctcccagaaactggtgcggctccctgggttgatcgacgtccatgtgcaccttcgggagccaggtgggacacacaaagaagactttgcctcgggcacagctgctgccttggctgggggtgtcaccatggtctgtgccatgcctaatacccggccccccatcattgatgcccctgctctggccctggcccagaagctggcagaggccggtgcccgctgtgactttgccctgttccttggggcctcatctgaaaacgcggggactctgggtgctgtagccgggtctgcagcaggactaaagctctacctcaacgagaccttctccgagctgcggctggacagtgtggcccaatggatggagcattttgaaacgtggccttcccacctccccattgtggcccatgcagagcggcagagtgttgccgcagtcctcatggtggctcagctgacccagcgcccagtgcacatatgtcacgtggctcggaaggaagagatcctgctgattaaaactgcgaaggcacaggggctgcctgtgacctgtgaggtcgcaccccaccacctcttcctgaatcgggaagacttggagcgcctgggacctgggaggggagaggtccggcctgagcttggttcccgagaggatatggaggctctgtgggagaatatggctgtcatcgactgctttgcctcagaccacgctccccataccctggaggagaagtgtgggcccaagcctccacccggcttcccagggctggagaccatgctgccgctcctgctgacagctgtgagtgagggccggctcagtctggatgacctgctacagcgcctgcaccacaacccgcgccggatcttccacctgccccttcaggaggacacctatgtagaggtggatctggagcatgagtggacaatccctagccacatgcccttctccaaggcccgctggaccccttttgaggggcagaaggtgaagggtaccatccgccgtgtggtcctgcgaggggaggttgcttatatcgatggacaggtgttggtacccccaggctatggacaagatgtacggaagtggcctcagggggctgttccccagccccctccttcagctcctgccaccacagaaataaccacgacacctgagagaccacgccgagtcatcccaggccttcctgatggccgcttccacttgccaccccgaatccacagagcctctgacccaggtttgccagctgaggaacccaaagagaagccatccaggaaagtagtggagccagagctcatggggacccccgacggtccctgctaccctgcaccgccggtgcctagacaggcatcacctcagaacctgggctcttctggcctactgcacccacagacttcacccctgctgcactccttagtgggccaacacatcctgtctgtcaagcagttcactaaggatcagatgtctcatctgttcaacgtcgcgcacacactacggatgatggtgcagaaagagcggagccttgacatcctaaagggcaaggtcatggcctccatgttctacgaggtgagcacccgcaccagtagctcctttgcagcagccatggcccggctcgggggcgctgtcctcagcttttcagaagccacgtcctccgtccagaagggggaatcccttgccgactctgtgcagaccatgagttgctacgctgatgtcgttgtgctccggcaccctcagcctggagctgtggagctggcagccaaacactgtcgcagaccagtgatcaatgctggggatggagtcggagagcaccctactcaggccctgctggacatcttcactatccgggaagagctggggactgtcaatggcatgacgatcaccatggtaggtgacctgaagcatgggcgcacagtgcactccctggcctgcctgctcacccagtaccgtgtgagcctacgctacgtggcacctcccagcctgcgcatgccacctagcgtgtgggactttgtggcttcccggggcaccaaacaggaggagtttgagagcattgaggaggcgctgcccgacacggacgtgctctacatgactcgcatccagaaagagcgatttggctccacccaggaatacgaagcttgctttggtcagttcatcctcactccccacatcatgacccgggccaagaagaagatggtggtgatgcatccgatgccccgagtcaatgagataagcgtggaggtggactcagacccccgagcagcctacttccgccaagctgagaacggcatgtacatccgcatggcgcttcttgccaccgtgctaggccgtttctag

SEQ ID NO: 455 - DNA, 3958 bp, Cricetulus sp.
  misc_feature (152)..(172): n is a, c, g, or t
  misc_feature (743)..(758): n is a, c, g, or t
  misc_feature (773)..(792): n is a, c, g, or t
  misc_feature (1970)..(2014): n is a, c, g, or t
caggctgagatggatcttgaggcagcaaggaacggaacagcgcggcgccccgggacagtggagggcgactttgaactaggcagcatcagcaaccaaggcaggaataaaaagaagaaagtgaatttaattggaccactgacactgttccgctnnnnnnnnnnnnnnnnnnnnntgttcatgctcctgggcaccatcatggccatagctcacgggtcaggtctccccctcatgatgatagtctttggagaaatgacagataagtttgtgaataatgcggggaacttttccttgccagtgaatttttcattgtcaatgataaatccagggaggattctggaagaagaaatgactagatatgcatattactactcgggactaggtggtggagttcttgttgctgcctacatccaagtttcattctggactttggcagctggccggcaaataaagaaaatcagacaaaatttttttcatgccatcctccgtcaagaaatgggctggtttgacatcaagggtaccactgaactcaatacacggctgacagatgacatctccaaaatcagtgaaggaattggtgacaaagttggaatgttctttcaagcagtagccacgttttttgcaggattcatagtggggttcatcagaggatggaagctcaccctggtgatcatggccatcagccccatactcgggctgtctgcagctgtttgggcaaagatactctcaacattcagtgacaaagnnnnnnnnnnnnnnnnaaaagcaggtgctgnnnnnnnnnnnnnnnnnnnnagccatcagaaccgtgatagctttcgggggccagaacaaagagctagaaaggtatcagaaacacttagaaaatgccaaaaaaattggaattaaaaaggctatctcagcaaacatatccatgggcattgccttcttgttaatatatgcatcctatgcattggccttctggtatggatccactttggttatatcaaaagaatatactattggaaatgcaatgacagtgttcttctcaatcctcattggggctttcagtgtgggccaggctgccccctgtattgatgcttttgccaatgcaagaggagcagcttatgtgatctttgacattattgataataatcctaaaattgacagtttttcagagagaggacacaaaccagacagcatcaaaggaaatttggacttcagtgatgttcacttttcctatccatctcgggctaatatcaagatcttgaagggtctcaacctgaaggtgcagagtgggcagacggtggcccttgttggcaacagtggctgtgggaaaacgaccactctccagctgctgcagaggctctacgaccccacagagggtacgattagcattgatgggcaggacatccggaacttcaatgtcaggtaccttcgggaaatcattggcgtggtgagtcaggagccggtattgttttctaccacgattgctgaaaacattcgctatggccgtgggaatgtaaccatggaggagataaagaaagctgtcaaagaagccaatgcttatgagttcatcatgaaactaccacagaaatttgacaccctggttggtgagagaggggcacagctgagtgggggacagaaacagagaatcgccattgcccgggcactggtccgcaaccccaagatcctcctgctggacgaggcgacatcagccttggacacagaaagtgaagctgaggttcaggcggctctggataaggccagagaaggccgaaccactattgtgatagctcaccgattgtctacagtcagaaatgcagatgtcattgctgggtttgaggatggagtcatcgtggaacaaggaagccacagtgagctgatgcagaaggaaggggtctacttcaaactcgtgaacatgcagacatcaggaagccagatcctatcacaagaatttgaagttgaactaagtgaagaaaaggctgctgatnnnnnnnnnnnnnnnnnnnnnnnnnnnnnnnnnnnnnnnnnnnnnaccaaaaaaagtcttaaaagttcacgagcgcatcatcacaggctagatgtagacgccgatgaactcgatgcaaatgtgccaccggtgtcttttctgaaagtcttgaaactgaataaaactgagtggccctactttgtggtgggaacggtctgtgccattgtcaacggggccctccagccagcgatctccatcatcctgtcagagatgatagctatctttggtcctggggatgatgcagtcaagcagcagaaatgcaacctgttctcgctggtcttcttgggcctgggagtcctgtccttctttactttcttccttcagggcttcacatttgggaaggctggcgagattctcaccacaaggcttcggtccatggcctttaaagcaatgctgcggcaggacatgagctggtttgatgattacaaaaacagcactggagcactttctacaagactcgccacagatcgtgcgcaagtccagggagccacaggaaccaggttggctttaattgcacagaacacagccaacctaggaaccggtatcattatatcatttatctacggttggcaattgacacttttgctgctatcagttgttccattcatcgctgtatcaggaattgttgaaatgaagatgttggctggaaatgccaagagagataaaaaagcactggaagctgctggcaagattgcgacagaggccattgagaatattcggactgttgtgtccttgacccaggaaagaaaatttgaatcaatgtatgttgagaaattgcatgaaccttacaggaattcggtacagatggcacacatctatggcatcacttttagcatttcacaagcgtttatgtatttttcctacgctggctgttttcgatttggtgcttacctcattgtgaatggacatatgcgcttcagagatgtcattctggtgttttcagcgattgtgtttggcgcagttgctctagggcatgccagttcctttgctcctgactatgcaaaagccaagctatctgctgcacacctattcagcctgtttgagagacagcctctcatcgacagctacagtggagaagggctgtggcctgataagtttgaaggaagtgtgacatttaatgaagtcgtgttcaactatcccacccgggccaacatgccagtgcttcaggggctgagcctggaggtgaagaagggccagacgctggccctggtgggcagcagtggctgtgggaagagcacagtggtccagctgctcgagcggttctacgaccccatggccggaacagtgctcctagatggacaagaagcaaagaaactcaatatccagtggctccgagcccaacttggcattgtgtcccaagaacctgtcctgtttgactgcagcattgccgagaacatcgcttatggtgacaacagccgggttgtgtcccaggatgagatcgtgagggcagccaaagcagccaacatccaccccttcattgagacactgccccaaaaatacaaaacaagagtaggagacaaggggactcagctctcaggaggyyagaarsagaggcttgctatccgtcgcgccctcawtagwsarcytcgkrtcttgytgctrsatgwwsycacgtacarmyctskmtactgagwgttsaamaggttgtccaggaagctctggacaaagccagagaaggccgcacctgcattgtgatcgctcaccgcctgtccaccatccagaacgcagacttgatcgtggtgattcagaatggcaaggtcaaggagcatggcacccaccagcagctgctggcacagaaaggcatctatttctccatggtcaatattcaggctggtgcacagaactcatgaactcttgttacagtgtatttttaaaataaattcaaatcattttacactttgtgacatgtagaagaagtttctcattgaagccataaaatataaatctacc

SEQ ID NO: 456 - DNA, 770 bp, Cricetinae gen. sp.
gtcgaccagaagccttttaaaagtccttcacgtcccgtaactgtaactaaccctcggtccccggcggtggtctcggcgacccgaggccgagaggaagcgctgttcccggattcactagcgggccgggacccgggattctctgggtgcctcggaacattttatcttgtgtgcgtgcggtagccaccctcggtcgatccccggcggtggtctcggcgacccgaggccgagaggaagcgctgttcccggattcactagcgggccggggcccgggattctctgggtgcctcggaacttttccttctgcggaagccctcggtccccagcggtcgtctcggcgtctcgaagccgagaggaggcgctgtttccggcctcactgcctgctagttcccggttccttgtagggtcagacttttgtttttcttcgacgtgtcctcccatcccgggctcctgcctccgggtccttgcccgagaggatgccggtgtgtgccgatcttttctgcatgtctacctcgctcttggtcctatcacggttatgaggtcgaccagttgttgctttgatgttcggttctctcgttgattgggacaatatttggggcacttcgccggtcccgacttccagaatttccgtgtggtctgtgaatttatcaccgctacactgtcatcatattccagttttgcaatctgctctctttgtacctgcagataggtactgacacgcttgtcttgtgagtgggtgacattagtaaaggactgctctcgggctttttctg

SEQ ID NO: 457 - DNA, 642 bp, Mesocricetus auratus
tccagtgggatttgttactggacttcaaggagtgctcaacattactgaagcaacttcaccccaagaarkggcmtmtwsasycwstswyytcctggcatacagcaggatgaagcctttysttkccatcattttttgcttcttgrwcctgggagttgacagccaaaggtggttccagttcatgaaagaagctggccaagggastasrgacatgtggagagcttacwctgacatgagagaggccaactggaaaaactcagataaatacttccatgcmcgsgggaactatgatgctgccmaaaggggaccaggaggagcctgggctgctaaagtgatcagtgatgccagagagggtwttmagaggwtsasaggacgtggaryagmggactcaagagctgaccagtttgccaayraatggggccggagtggtaaagaccccaacywcttycgacctsctggcctrcctagtaaatactgagtttyatcttcatgytrttcccagccatgyagtccccaaggwyrsakkyactwgaywgaagttagttcchrarctctggaygtgtaagcaccccacaatggagaataaatacttgtgaaatgcyaaaatgtcactgcttgatgtatgaagcagcacggaacgtgtaa

SEQ ID NO: 458 - DNA, 1771 bp, Mesocricetus auratus
  misc_feature (522)..(556): n is a, c, g, or t
  misc_feature (1632)..(1649): n is a, c, g, or t
cttyccactgccaccatgctggtgtccgggatgctcctcgtggttgtgctracctgcctcagcgtcatgatcataatgtctgtgtggaggcagaggagactgttgaggaagatgcctccaggacccaccccactgccctttattgggaactttctggagctggacacagagaagttttatgactgcctttcaaagatgagggagcggtatggccctgtgttcaccatccacctggggcctcgacctgctgtgatgctgtggggttacgatgctgtgaaggaggctctcattgaccaggctgaggagctcagtgaccgaggagagcaagctttcttcgactggttcttcaaaggctatggtgtggtgttcagctccggggagcgcgccaagcaactcaggcgcttctccatcgccacgctgagggacttcggctttggaaaacgtggcattgaggagcgcaccatagaggagaccagctttctcatacaggccctgcgggacacaaacggtgccacaatagannnnnnnnnnnnnnnnnnnnnnnnnnnnnnnnnnntcatcagttccattgtgtttgggaaccgctttgaatatgacgacaaggaattcttgtcactgttgggcatgataatgcgaagtttccagttcatgtctacttcaacaggacagctctttgagatgttctattcagtgatgaagcacctgccaggatgccagcaccaggcctataaggaaatgcagggactggaggacttcatagccaggaaggtggaagagaaccaacgcaccctggaccccaactccccccgggacttcatcgactccttcctcatccgcatgcaggaggagaagaagaaccctcgaactcagtttcacatgaggaacctgctcatgaccacactgaaccttttcttcgcgggtacagagaccgtcagcacaaccacgcgttacggcttcctgctgctcatgaagtaccctcacattgcagccaagatgcatgaggaaattgaccaggtgattggcaggaacaggcagcccaagtatgaggaccatttgaagatgccctacactgaggctgtcatctacgagatccagagatttgtagatgtggttcctttgggtctgccccgtagcaccaccaaggacatcaagtttcgggacttcctcattcccaagggcactgacgttttccctgtactgagctctgtgctgaaggaccccaagttcttctccaaccccaacgactttaacccccagcacttcyyggatgacaagggacagtttaagaagagcaatgcttttatgcccttctccgttggaaagcgatactgttttggagaaagcctggctaagatggagctcttcatcttcttcacaaccatcatgcagaatttctgcttcaagtccccacaggcaccccaagacatagatgtgaccccacaatatttcagctttgccgcaatccctccaaaattcaccatgagcttcctgcctcgctgagcgggaactctgatgggtggagacaatgagcatgtccagaaacagggcggggctaatggggtggggccaatccgggtagggctaaaggagagcatgaaaattagagggaagtctggggcctgaagtattacnnnnnnnnnnnnnnnnnnctgagcagagtgatcaccttcctgaagacgggttcttcaaagttgggaagagaggctgggatgccttcccgtcgtatctgaacaccgatcgtaataattaaagctattgttgattgtgcaag

SEQ ID NO: 459 - DNA, 2937 bp, Cricetulus sp.
  misc_feature (348)..(365): n is a, c, g, or t
gaattctatctccacaatatgttacaatgtaaaatacaagaacaatgtgaccatgctactgtgtaacaatatacctgtttctagtgctaaactcccactctgtctaatctgtgattcttaatgccacacattagaatcgctcacaaagcctatcacacatttcagagattaaaaaatgctggatgtatttctccggttatgactgatgagatactaaaatactgccagtctacacccaaacaccgtggaaggctcctaaacagagcttctgagtagctatcataggtcaaatcgacaaaagcagcagcagtttaattcttatttcgattactgtatacaaatctaagnnnnnnnnnnnnnnnnnnaatttgagtaaactccccgcaaactgtatctggtcttttcaagcactcccaggtgtggatggattgagaaattttgttgccgttgtatggaaataacatttaaatgtaacgaatttaagtgaggctcctacgggtaaacgtttaaaatgtaacaagtaggttttacactgtttcaagtagaaggaaaaagaggatatcggaattactctttacttcctaggtatcaaaaacgcagtttccagcattcctaaaaggaaaaccttctcatacacaaggaggttcttaactcaggccttcttggaggcaaggcacatttcgccagcttcctgaccagcagagagcgcgagcaggccgggcgacccgctgagtgtcgcaacaacggccgcacgcaaatgaggccgccgagcacgcgcgtcgtgattcgcgcgttccaaggcgacgctggggccagggagccgggcttatgtaaatgagaggattctgtctctgcgctcctattggccgcggcgccaggacgcgtgtgggccaatgagagcgtcgggcggacaatcgggtgtctgtctataaaagggtgaggcgtcggcgttggcgcacagtttcctggttgtgaccgtccgtctgtttgcgctctcgtgatgtccggccgtggcaagcaaggaggcaaggcccgcgccaaggccaagtcgcggtcgtcccgcgccgggctgcagttcccagtgggtcgcgtgcaccggctgctgcgcaagggcaactacgcggagcgcgtgggcgccggcgcgccggtatacatggcggcggtgctggagtacctgaccgccgagatcctggagctggcgggcaacgcggcccgcgacaacaagaagacccgcatcatcccgcgccacctgcagctggccatccgcaacgacgaagaactcaacaagctgctgggcaaagtgacgatcgcgcagggcggcgtcctgcccaacatccaggccgtgctgctgcccaagaagacggagagccaccataaggcgaagggcaagtgaggcggctgctggcaccggcccgcgtctctacgaacccttcccccccccccagagaactctcaaaaaacggctcttttcagagccacccacagaatcagataaagagttgtgtcacggtaacccgtctcttggcctttcccggcccttccccaacagtaagaatgtcgtgtgccctactcttcccctgggtccctctggtagtgcctgttgctgttctttggtatccttcctcggcggagtggaggcagcgacctcaccgactgtcccaagcatttagcgcttagcgccgtctataaccctgctactatccccgtccccctccactgtatcgctcactcagcaccccgccaccaacctactcttcctgaccgaaggcctctcccttcccaggaccggaactcgactaggtctaggccagtcccgatataagtcgcagtcagccgcccctcttcccccacccccctcgttcttcgggccaagtctaggacgtgtccctcgaggatagggcgcggccagctctaggaatcatggggacctgggtaccgggctggggctggggctggggctgggcctgggcctgggaaacattagctgagtagctgagttctgtccctgggactttggacggcgagcggggtcgcgccgagcstccctcgggcagtcgcttgggacccsccctcttaaagggctaagcctaaccaagaccgggctccaccctcgcagaaccttggcgagtcagccagccgcggggctggacaagggggcgggcggggagggggagtggcgggtccaasccaatgggcgaggcgggatgggtgacgcccgggccaatgaccggacagcgcgggagtttcaagtcgctgtctccgccccgccgtggtggggggggaagactggtcctataaagacggtcggctgcgacctgggtctagtccccgtgtgctcctcgtcttggtgacttcckkctccgccatggcccgtacgaagcagaccgcccgcaagtccaccggcggcaaggccccgcgcaagcagctggccaccaaggccgcccgcaagagcgccccggccacgggcggcgtgaagaarccgcaccgctaccgacccggcaccgtgacgctgcgggagatccggcgctaccagaagtcgaccgagctgctgatccgcaagctgccgttccagcgcctggtgcgcgagatcgcgcaggacttcaagacggacctgcgcttccagagctcggccgtcatggcgctgcaggaggcgagcgaggcctacctggtgggtctgttcgaggacaccaacctgtgcgccatccacgccaagcgcgtcaccatcatgcccaaggacatccagttggcccgtcgcatccgcggggagcgcgcttgagctctctatcttctccctgtcccccacaaaggctcttttcagagccacactacaccttcccggaaagagctgtttgactttagtttcctctgctcccctgtgagttactgtgtaatgaaactttttctcatgaacaccttcctagtaaagttgcaggatcc

SEQ ID NO: 460 - DNA, 1893 bp, Cricetulus sp.
  misc_feature (183)..(201): n is a, c, g, or t
gatgcgagctctgggccccggcgacggcctccgcgtagagatctgcacccctcggcccgacccctttcccagtcctgccctgcgcgtccgggtcggagaaggcgccgcggacgaccgacggccgaggagcggggatgcacatgcactagcggcaccccctaactcactccctccacaccccgnnnnnnnnnnnnnnnnnnntccaccttctccgcctccgcctcctcctcctccgcctccggcagccgcggcagaaggacccaccctgccccccaccccaccctccgccggctccggctgcggatccagcctctactcyyattttatttattttgggtcgtgcactagcctcagtgcctgcagcccgcgcctcccgggcccgcgggcacctcctccctcggctccggagscccagaccccggccaccctcacctcgacaccctcagaccccggccagtcgccgctagtctccgccgctggaatcttgatagaggctgtcattttttgggggttctggccttttcgacaattttgttcccagccaaggagaggatatcgtgattttctcccctttgagcccaggctctgctctgtgggggggtggggggcgcgccgacccggggagtcgtgccagccgagtcgtgcgggctgtggcagggaaggggccaccatgggatgtactctgagcgcagaggagagagccgccctcgagcggagcaaggcgattgagaaaaacctcaaagaagatggcatcagcgccgccaaagatgtgaaattactcctgctgggggctggagaatcaggaaaaagcaccattgtgaagcagatgaagatcatccatgaagatggcttctctggagaggacgtaaagcagtacaagcctgttgtctatagcaacaccatccagtctctggcagccatcgtccgggccatggatactttgggtgtggagtatggtgacaaggagagaaaggcggactccaagatggtgtgtgatgtggtgagccgtatggaagacactgaacccttctctgcagagctgctttctgccatgatgcgactctggggtgactcagggatccaggagtgcttcaaccgatctcgggagtatcagctcaatgattctgccaaatactacctggacagcctggatcggattggagccgctgactaccagcccactgagcaggacatcctccgaaccagggtcaaaaccaccggcatcgtagaaacccacttcacattcaagaacctccacttcaggctgtttgatgttgggggccagcgatctgaacgcaagaagtggatccactgctttgaggatgtcacggccatcatcttctgtgtcgccctcagcggctatgaccaggtgctccacgaggacgaaaccacgaaccgmatgcaygagtcyctsawgctyttygacwscatctgyaacaacaagtkkttcaymgayacstcyatcatyctsttyctcaacaagaargacmtmtttgrsgagaagatyamsargtcmccmytgaccatctgcttycctgaatacmcaggcyccaryrcctatsacagawgcwgctgsctcacatccarrsrcagtwtgaragyaaraacmrmtcasctmacaargaaatctaywsycaywtsacytgtgccacmgacacsaayaayatccagktkgtmttygaygctgtsacsgacrtcatcatygccaamaatctscggggctgyggmytstactgascyctkgcctcctgymyagcmwsctkytsactkctycmctggacycwkwgctytgmtryyactcgatgctctgtgcactgagggaaaacccagaggctggccctgggggaggaggaagcaccctctgagcatccccaccctaccccactccagagg

SEQ ID NO: 461 - DNA, 1930 bp, Cricetinae gen. sp.
agttaaaccttttcatatatctatcacgtcccagcctgtgacaggttccatccatcctccttgcccctgctccctgcgaccctttttaagaggcgactagattcctcggttctatgccgcacaccatggacaagttttggtggcacgcagcttggggactctgcctcttgccgctgagcctggcgcassagcagatcgatttgaacataacctgccgctatgcaggtgtattccacgtggagaaaaatggccgctacagcatctcacggactgaggcagctgacctctgccaagctttcaacagcactctgcccaccatggaccagatggtgatggccctgagcaagggctttgaaacatgcaggtatgggttcatagaaggccacgtggtgatcccgaggatccagcccaatgccatctgtgcagccaaccacactggggtgtatatcctcacatccaacacmtcycactacgatacatattgcttcaatgcctcagcaccccttgaagaagactgtacatctgtcacagacctgcccaattccttcgaaggaccagttaccataactattgtcaaccgtgatggtacccgctacagcaagaagggcgagtatagaacacaccaagaagacattgatgcctcaaataccacagatgatgatgtcagcagcggatcctccagtgagaagagcacctcagggggctatgttttccacacctaccttcccactatacactcaactgcagaccaggatgatccctacttcatcgggagcaccatggccaccagagaccaagactcatccatggatcccagggggaattccctcactgtgactgatggatccaaattaactgracactcaagtgggaatcaagacagtgggsywaacwcaacttctcgtcctgggaggaaaacctcgagattccagaatggctcatcgtcttggcatctctcctggcgctggctctgattcttgctgtttgcattgctgtcaacagtaggagaaggtgtggrcagaagaaaaagctggtgatcaacagtggcwrtsgammsryggwssacwggaagccaagtgagctcaacggggaggccagcaagtctcaggaaatggtgcrtkkggtgaacaaggaaccmtcagagactccwgaccagtttatgacagckgatgaracccggaatctgcagaaygtrgacatgaagattggggtgtagtgcctataccagyaayttggaaagacaccaaaatcgcaracwtgtcaatactgggagctgggacccttaacagatgcaatgtgctactgattatttttattgggggtagtttctgyryaaaattttctattcmytttkcattttgttaawagtcyrttccaatttatraaaacagcattgctttctgmaatgagggcccaaagaataytccattaagawttygaytcttccagctccttcctagaggtcttgcattcccaakggatgctatggayggcttckatcamwtgcawattcytggtccctattgaaycttttccctaamctaagtcccargtaacagycacccagccagggacttaccccagggctwmgaggkattggtctctgggaggaaatttgaatgggtccatattgcctctcmrcaagyccartccttgggyattgttttccagttgggtgggagatcaggtgtactggttacacacctttttatagactcccctttctgctggaaaattttcagatgcttctgagagatccccaaagggtgaagctatttatctgtagtaagctatttatctttgtttttgaaatatcaaaccctggaggtcctttgtgcagtatgacttttgactttttttaggttactttgtcagaagcataacagggtataagttgattcataataaacacctgtcaatcttccatctt

SEQ ID NO: 462 - DNA, 2341 bp, Mesocricetus auratus
gaattccagcttcctcgcctctcacacacaattgagatacctgcttttggcagacttcatggaatcctgaaaatccagtctcccctctttatattagatgcaaatgccaacatacagaatgtaactactttagagaacaaagcagagattgtggcctccatcgctgctacaggagagtccgaaattgaagctctcaattttgattttcaagcacaagctcaattcttggagctaaaccctaatcctctgatcctgaaggaatccatgaacttctccagcaagcatgcgagaatggagcatgagggtgagatactattttctggaaagttcattgagggaaaattggacacggtcgcaagtttacagacagagaaaaatatggtggagtttaataatggtatgattgtcaagataaacaatccaactcatccttgacagtcacacaaagtattttcacaagttgagtatccccaggctggacttctccagtaaggcttcctttaacaatgaaatcaagatgctattagaagctggacatgtagcatggacttcttcagggactgggtcatggaattgggcctgtcccaacttctcagatgagggcacacattcgtccaaaattagcttcactgtagaaggacccattgctttttttggcttgtctaataacatcaacggcaaacacctgagggttatccagaaattggcttatgaatctggcttcctcaactattccatgttggaagttgagtcaaaagttgaatctcagcatgtgggttccagcattctaactggcaagggaacggtactgctcagggaggcaaaggcagaaatgactggcgagcacaatgctgacttgaatggaaaagttattgggactttgaaaaactctctttccttttcagcacaaccatttatgattactgcatccacaaataatgatgggaatttgaaagttagttttccactaaagttgactgggaaaatagacttcctgaataactatgcactatttttgagtcctcatgcccagcaagcaagctggcaagtgagtgctaggttcaatcagtacaaatataatcaaaatttttctgctataaacaatgaacataacatrgaagcccatgtaggaatgaatggagatgccaacctggatttcttaaccatacctctaacaattcctgaagtgaaactaccttacatagggctcacgactcccttgctgaaggatttctccatatgggaagaaacaggcttgaaagaatttttgaagacaacaaagcaatcgtttgatttaagtgtaaaagctcaatataaaaagaacagagacaggcattccattgcgattcctctgaatgggttttatgagtttattctcaacaatgtcgactcctgggatagggaagattgggaaagtcagagacagcgcattagactatcttatttcatcctataatgaagcaaaaaacaagtttgaaaattcccttattcagccctccaggacctttcaaaagcgtggatacactatcccatttgtcaacattgaagtgactccattcactgtagagacactggcctccagccatgtgatcccaaaagcaataaatacccccagtgttcacattctgggccctaatgtcattgtgccttcatacaggttagtgctgccctccctggagctgccagtccttcgtgtccccaggaatctactcaagttttccctcccagatttcaaggaattgagaacaattgacaatatttatattccagctcttggcaattttacctatgatttttcctttaaatcaagtgtcatcacgctgaataccaacgttggactttataaccggtcagacatcgttgctcatttcctttcttcctcttcatttgtcacggatgccctgcagtacaaattagagggtacttcacgtctgactcggaaaagaggattgaagctagccacagccgactctctcactaacaaatttgtaaagggcaatcatgatagcacctttagcttaaccaagaaaaacatggaagcatcagtgaaaacaactgcaaacctccatgctcccattttaacaatgaacttcaagcaggaacttaatggaaatgccaagtcaaagcccattgtctcatcatccattgaactaaactatgacttcaattcctcaaagctgtactctactgctaaaggaggtgttgaccacaagtttagcttagaaagtctcacttcctacttttccattgagtcatccaccaaaggaaatatcaagggatctgtcctttcccaggaatattcaggaagtgttgccagtgaggccaacacatacctgaattc

SEQ ID NO: 463 - DNA, 3002 bp, Cricetinae gen. sp.
  misc_feature (102)..(117): n is a, c, g, or t
  misc_feature (685)..(702): n is a, c, g, or t
  misc_feature (733)..(750): n is a, c, g, or t
gaattctggggaatgtggtctacatatgtggataacagttctccttagtatagagacacacacccacaggacccagagtccttgatagcagccttctgagtnnnnnnnnnnnnnnnnccacaagatcatacccagttccaaattccactgatctccagaagcccaaagccagggcacacccatcatgcactgcttttctcccagacaagactgggcgcaattcttgtttccagagaatagagagagagacatttgtcaattttgccctacgagaatgagaatgagttgtgtatctttgctttacagttacttttctcctaaatgctgtcaaggaataggcctgggagggaggggtggctgatgccatgacygtcacccatttgttctgcaaaaaatgtcaagtrgcttcagcctgcgtgctggacartgwygtgttgytggagtayamtgaygccttgttcttcattttgcagatyagccatcatggcraaccttagctactggctgctggcactctttgtggctaygtggactgatgttggcctctgcaaraagcggccaaagcctggagggtggaacactggyggaagccgataccctgggcagggcagccctggaggcaaccgttacccacctcagggtggyggcacmtgggggcaaccccatggtggtggmtggggacagnnnnnnnnnnnnnnnnnnggacarccycatggtggtggytggggtcagnnnnnnnnnnnnnnnnnnggtcaaggaggtggcacccacaatcagtggaacaagcccartaagccaaaaaccarcatgaagcayrtggcmggygckgctgcggcwggggcvgtggtggggggccttggkggctacatgctggggagygccatgagcagrcccatgmtscattttggcaatgactgggaggaccgctactaccgtgaaaacatgaaccgctaccctaaccaagtgtaytaccggccagtggaccagtacaacaaccagaacaacttygtgcacgaytgtgtcaayatcacsatcaarcagcayacagtcaccaccaccaccaagggggagaacttcacggagaccgacrtcaagatratggagcgcgtggtggagcagatgtgtrycacccagtatcagaaggagtcccaggcctactaygayggaagaagrtccagcgcggtgctsttctcctcycctcctgtgatcctcctcatttccttyctcatcttcctgatrgtgggatgarggaagcctccctgcttgtacttcctcgttcttgtgstctargctgggggaggggttatccaccgtagctcttttaattgaggtggtgtctcattcytgcttctctttgtcccccataggctaatgcccttggcactrgtgggccctgggaatgtayagtagaccagatgctattcsatccagagcctttkrattgagtccatcacgggccagcactaacaccaggcctatctgaatataacagcaagtaatggctggctagtcagggctttgttttggtctagtgagtaaatactgatgtgaccctctgacttccacacagagtacgcagtgacagacacacctaactgttaaaataggcgaagggttctacagccaaagaagtcactgtttggcatggtccctaagaaacagcctcccatttgggatatttaaagcatccatatgaggcattcctccttcactaacaaactctagctgagtaaggcaacgggaaaaaaacaaaattaccctactaacatggaaagcaaacctgtgttcatttcctaggaactagaatgatgttttagccttgcttggattgaaccaggagattttggctctgaagagccaacactgtaaaaatgtggtcctcctgcaaagggagagatggttaggacacaaagtcacggcgcttggcgtttcttcatttctgtctcataattgtcaaaagtcacaattaggtcatgcccttagttaatatacttgtatttgaatcggacgacaagagacaatctaaaaattctcctaggttgtagatgaaataggctccattcaaggtgaaaagacagtttgttagcgttgcttatgtaaggcaaactttgttccttaagttgctccgtgtttccctgascagacataaccactctgcaacagcattgccctgctgtagaatatataaagtgtaactacaagcttagaccttctgttctgatgcatccgaagtacgtaatgcactgaccatttcacccggtatcagatgttttctgtgtggcccctagctttccttcaacatgcattcggttccatatatgaatccaaagtggaccccctaactggtctctgaaatctgcatgtacttcacattttctatatttgtaactttgcatgtccttgttttgtcatataaaaagtttataaatgtttgctatctgactgacattaaataggagctatgatgagcacccctgcagggtttgttctctgttctctgcttctggcccttgtgtttgttgccagggtaacttgggctcacacaaggtaggtaatggctaatttcacatgccttcccctgatgggcctcagttcttacctctggtcatagattactttttttctactgccttttcatttttcccttatatgtactcagccctgctgaaccacaaaggcatccctggggggaggttgtatgtaggtagggctcatgttctgaaagaggttttcccccaccccctccctcccccctcccccttcctccctccctcccttctttaatgtgtatcaggagtttgcctgcatgtacttgtctgtgtaccacatgctttgccctcgagtcaaaagaggggctcagatcccctgaaattgaagttacaaatgtttgtgagccattatgtggagtctggaactcaaacccaggtcctctgcaagaagagctagtggtcttaaccagtgattcactgcaccagccccagtggaaatgtcttcctgaattc

SEQ ID NO: 464 - DNA, 4809 bp, Mesocricetus auratus
  misc_feature (1031)..(1060): n is a, c, g, or t
  misc_feature (1587)..(1645): n is a, c, g, or t
  misc_feature (2451)..(2478): n is a, c, g, or t
  misc_feature (2742)..(2793): n is a, c, g, or t
  misc_feature (3085)..(3109): n is a, c, g, or t
atggagcatcaacggcagcagcaagaggaccacgcgaacgaggcaaactatgcaagaggcaccagaccccctatttctggggaaggaccaacttcccagccgaacagctccaagcaaactgtcctgtcttggcaagctgcaatcgatgctgctagacaggccaaggctgcccagaccatgagcacctccgcacccccacctgtaggatctctctcccaaagaaaacgtcagcaatacgccaagagcaaaaaacagggtaactcgtccaacagccggcctgcccgagcccttttctgtttatcgctcaataaccccatccgaagagcctgcattagtatagtggaatggaaaccttttgacatatttatattattggctatttttgccaattgtgtggccttagctatttacatcccattccctgaagatgattctaattcaacaaatcataacttggaaaaagtagaatatgccttcctgattatttttacagtggagacatttctgaagattatagcgtatggattgttgctgcaccctaacgcgtatgttaggaatggatggaatttactggattttgttatagtaatagtaggattgtttagtgtaattctggaacaattaaccaaagaaacagaaggcgggaaccactctagtggcaaatcaggaggctttgatgtcaaagccctccgtgccttccgagtgttaagaccacttcgacttgtatcaggagtgcccagtttacaagttgttctgaactccattataaaagccatggtccccctccttcatatagcccttttggtattatttgtaattatcatctatgctattataggattggaactttttattggaaaaatgcacaaaacatgtttttttgctgactcagatatcgtagctgaagaggacccagctccgtgtgcgttctcagggaatggacgccagtgtgccgtcaatggcacggaatgcaggagtggctgggtgggccccaatggaggcatcaccaactttgataactttgccttcgnnnnnnnnnnnnnnnnnnnnnnnnnnnnnntggagggctggacagacgtgctctactggatgaatgatgctatgggatttgaattgccctgggtgtattttgtcagtctcgtcatctttgggtcatttttcgtactaaatcttgtacttggtgtattgagcggagagttctcaaaggaaagggagaaggctaaagcgcgaggcgatttccagaagcttcgggagaagcagcagctggaggaggatctcaagggctacttggactggatcacccaagcagaagacatagatcccgagaacgaggaggagggcggagaggaaggcaaacgaaacactagcatgcccaccagtgagacggaatctgtgaacaccgagaacgtaagtggcgaaggcgagacccagggaagctgtggaagtctctgtcaagccatctcgaaatccaaactcagccgacgctggcgtcgctggaatcgattcaatcgcaggaggtgcagggctgccgtgaaatctgtcacgttttactggctggttattgtcctggtgtttctcaacactttnnnnnnnnnnnnnnnnnnnnnnnnnnnnnnnnnnnnnnnnnnnnnnnnnnnnnnnnnnncaaacaaagtcctcttggctctgttcacctgtgagatgctggtgaagatgtacagcttgggcctccaggcgtattttgtctccctcttcaaccggttcgactgctttgtggtgtgtggggggatcaccgaaaccatcctggtggagctggagctcatgtctcctctgggggtctctgtgttccggtgcgtgcgcctcctgaggatcttcaaagtgaccaggcactggacttccctgagcaacttggtggcgtccttgctgaactccatgaagtccatcgcctccctgctgctgctcctcttcctcttcatcatcatcttctccttgctggggatgcagctgtttggggggaagttcaattttgatgagacccaaaccaagcgaagcacctttgacaactttccccaagcgctcctgactgtgttccagatcctgacaggtgaagactggaatgcggtgatgtatgacggcatcatggcctacggaggcccatcctcttctgggatgattgtctgcatctacttcatcatcctcttcatctgtggcaactatatcctactgaacgtcttcttggctattgctgtagacaatttggctgatgctgaaagcttgaacactgctcagaaagaggaagctgaagaaaaagagaggaaaaaaattgccagaaaagaaagcctagaaaataagaagaacaacaaaccagaagtcaaccagatagccaacagtgacaacaaggttacgattgatgattatcaggaagagacggaagataaggacccttacccaccctgtgatgtaccagtaggnnnnnnnnnnnnnnnnnnnnnnnnnnnncccgaggtccctgctggcccccgtcctcgcagaatctcagagctgaacatgaaggagaagattgtacccatccccgaaggaagtgctttcttcatccttagcaagaccaacccgatccgcgtgggctgccacaagctcattaaccaccacatcttcaccaacctcatcctggtcttcatcatgctgagcagcgccgcccttgcggccgaggatcccatccgcagccattcattccggaacactatactgggttactttgactannnnnnnnnnnnnnnnnnnnnnnnnnnnnnnnnnnnnnnnnnnnnnnnnnnnggagctttcttgcataaaggggctttctgcaggaactacttcaatttgctggacatgctggttgtcggagtgtctctggtgtcctttgggattcaatccagcgccatctccgtggtgaagattctcagggtcctgagggttttgaggcctctcagagcaatcaatagagcaaaaggactcaagcacgtggtccagtgtgtctttgtggccatccgaaccattggcaacatcatgattgtcaccaccctgctccagttcatgttcgcgtgcatcggggtccagttgttcaagnnnnnnnnnnnnnnnnnnnnnnnnnaagccaaaagtaaccccgaagaatgcagggggctcttcattctctataaggatggggatgtcgacagtcccgtggtccgtgagaggatctggcagaacagcgattttaattttgacaacgtcctttcggccatgatggcactcttcacggtctcgactttcgagggctggcccgcgttgctgtacaaagccatcgactccaacggggagaacgccggtccagtctacaaccaccgcgtggagatctccatcttcttcatcatctacatcatcatcgttgcctttttcatgatgaacatctttgtgggctttgtcatcgtcaccttccaggagcagggagaaaaagagtataagaactgtgagctcgacaaaaaycagcgtcagtgtgttgagtatgccttgaaagcacgccccttacggagatacatccccaaaaacccctaccagtacaagttctggtacgtggtgaactcctcgcctttcgaatacatgatgttcgtcctcatcatgctgaacacgctctgcctggccatgcagcactacgagcagtccaagatgttcaatgatgccatggacattctgaacatggtcttcacgggggtgttcactgtcgagatggttttgaaagtcattgcgtttaagcccaaggggtattttagtgacgcctggaacacgtttgactccctcatcgtaatcggcagcattatagacgtggccctcagcgaagccgacccaactgaaagtgaaagtctccctctcccaaccgctactccagggaactctgaagagagcaatagaatctccatcacctttttccgtcttttccgagtgatgcggttggtgaagcttctcagcaggggcgaaggcatccggactctgctgtggactttcattaagtccttccaggcactaccatatgtcgccctcctcatcgccatgctcttcttcatctatgcggtcatcggcatgcagatgtttgggaaagttgccatgagagataacaaccagatcaacaggaacaacaactttcaracgtttccccaggcggtgctgctgcttttcaggtgtgccacaggggaagcctggcaggagatcatgcttgcctgcctcccggggaagctgtgcgacccagactcagactacaaccccggagaggaatacacttgcggaagcaacttcgccatagtctatttcatcagcttttacatgctctgcgctttcctgatcatcaacctcttcgtggctgttatcatggacaattttgactacctgacccgggactggtctattctggggcctcatcacttggatgaattcaaaaggatatggtcagaatacgaccctgaagcaaagggaaggataaaacacctcgatgtggtcactcttctccgacgaatccagcctcctctggggttcggaaagttatgtccacaccgagtagcttgtaagagattagtcgccatgaacatgcctctcaacagtgacgggacagtcatgttcaacgcaaccctgtttgccttggtccgtacggctctcaagatcaagactgaagggaacttggagcaagccaacgaagagctccgtgcagtgataaagaagatctggaagaagacgagcatgaagctgctggaccaagtcgtccctccagctggtggtcagtgtggcctctgcttcctaagtccgtctcggtcgaggagctag

SEQ ID NO: 465 - DNA, 4305 bp, Cricetulus sp.
  misc_feature (857)..(873): n is a, c, g, or t
aagcagcggttccaggagcctgctcccatctccccaggcccgctaaactcggaatcgcttcttcccaattctacgactgggcggactttgcgaaggaaagcggaggtcgtgatggagtttgaagaggactttagcggaagaaaagacaagaacttcttgaagatgggcagaaagagtaaaaaggagaagaaagagaagaaaccagtggtcagtgtgtttacaatgtttcgctacgcaggttggctggataggttgtacatgctggtggggactctcgcagctattatccatggagttgcactcccgcttatgatgctggtgyttgragayrkgacagamagmktwrmaagkrkargaaasawmsmaacmartgstastrwkwwtrcmactcaagtcaatgcttcagacatctttggcaaactggaggaagaaatgaccacgtacgcctattactacacagggattggtgctggtgtgcttatagttgcctacattcaggtttcattttggtgcctggcagctggaagacaaatacacaaaattagacagaagttttttcatgctataatgaatcaggagataggctggtttgacgtgcacgacgttggggagctcaacacccggctcacagatgatgtctccaaaattaacgaaggaattggtgacaaaattggaatgttctttcaggcaatggcaacattttttggtggttttataataggatttactcgaggctggaagctaacccttgtgattttggccatcagccctgttcttggactgtcagctggtatttgggcaaagatattatcttcatttactgataaagaacttcaggcatatgcaaaagctggagnnnnnnnnnnnnnnnnnttagcagccatcagaactgtgattgcatttggaggacaaaagaaagaacttgaaaggtacaacaacaatttagaagaagccaaaagacttgggataaagaaagcgatcacagccaacatttccatgggcgcagctttccttcttatctatgcatcatatgctctggccttctggtatggaacgtccttggtcatctcaaaagaatattctattggacaagtgctcactgtcttctttgctgtattaattgsgscattcagtattggacaggcatctccaaatatcgaagcctttgccaatgcaagaggagcagcctatgaaatcttcaacataattgataataagcccagtattgacagcttctcaaagaatgggtacaaaccagacaacattaaaggaaatttggaattcaaaaatattcacttcagttacccatctcgaaaagacgttcagatcttgaagggcctcaacctgaaggtgcagagcggacagacagtggccctggttggcaacagtggctgtgggaaaagcaccactgtccagctgctgcagaggctctacgaccccacagagggcgtggtcagtatcgacggwcaggacatcaggaccatcaatgtgaggtatctgcgggaaatcattggggtcgtgagtcaggaacctgtgttgtttgccaccactatcgctgaaaacattcgctatggccgagaaaatgtcactatggacgagatcgagaaagctgtcaaggaagccaatgcctatgacttcatcatgaaactgccccataaatttgacactcttgttggtgagagaggagcacagctgagtggaggacagaaacagagaatcgccattgctcgtgccctggtccgcaaccccaagatccttttgttggatgaggcgacatcagccttggacacagaaagtgaagccgtggttcaggctgctctggataaggctagagaaggccggactaccattgtgatagcccaccgcttgtctacagttcgaaatgctgacatcatagctgggtttgatggtggtgtcattgtggagcaaggaaatcatgaagagctcatgagagagaagggcatttacttcaaacttgtcatgacacagacagcaggaaatgaaattgaattaggaaatgaagttggtgagtctaaaaatgaaattgataatttagacatgtcttcaaaagattcagcatccagtctaatcagaaggagatcaactcgcagaagtatccgtggaccacatgaccaagacaggaagcttagtaccaaagaggccttggatgaagatgtacctccaatttccttttggcgtatcctaaagttgaattcatctgaatggccatattttgtggtkggtatattctgtgccatagtaaatggagccttgcaaccagcattctcaataatattttctaaggttgtaggggttttcacaagaaatactgatgatgaaaccaaacgacatgatagcaacttgttttccttattgtttctgatccttggggtcatttcttttattacattttttcttcagggcttcacatttggcaaagctggagagatcctcaccaagcgactccgatacatggttttcaaatccatgctgagacaggatgtgagctggtttgataaccctaaaaacaccactggagcattgaccaccaggctcgccaacgatgctggtcaagttaaaggggctacaggagccagacttgctgtcattacccagaatatagcaaatcttgggacaggaatcatcatatccctaatctatggctggcagttgacacttctactcttagcaattgtccccatcattgcaatagcaggagtggttgagatgaaaatgttgtctggacaagcactaaaagataagaaggagctagaaggttctgggaagattgctactgaagcaatagagaacttccgcactgtcgtctctttgactcgggagcagaagtttgaaaatatgtatgcccagagcttgcagataccatacagaaatgctctgaagaaagcacacgtctttgggatcacattctccttcacccaggccatgatgtatttttcgtatgctgcttgtttccggtttggtgcttacttggtggcacgggaattaatgacatttgaaaatgttctattagtattctcagctattgtctttggtgccatggcagttgggcaggtcagttcatttgctcctgactatgccaaagccaaagtgtcggcatcgcatatcatcatgatcattgaaaaagtcccttccattgacagctacagcaccggaggcctgaagcctaatacattggaaggaaatgtgaaatttaatgaagtcgtgttcaactaccccacccggcctgacatcccagtgcttcaggggctgaacctggaggtgaagaagggccagacgctggccctggtgggcagcagtggctgcgggaagagcacagtggtccagctgctcgagcggttctacgaccccatggccggaacagtgtttctagatggcaaagaagtaaaccaactaaatgtccagtggctccgagcacacctaggcattgtgtcccaagagcccatcctgtttgactgcagcatcgctgagaacatcgcttatggagacaacagccgggtcgtgtcccaggatgagatcgagagggcggcgaaggaagccaacatccaccagttcattgagtcactgcctgacaaatacaacaccagagtaggagacaaagggactcagctgtcgggtgggcagaaacaacgcatcgccatagcacgcgccctcgtcagacagcctcacattttgctcctggatgaagcaacatcagccctggatacagagagtgaaaaggttgtccaggaagctctggacaaagccagagaaggccgcacctgcattgtgatcgctcaccgcctgtccaccatccagaacgcagacttgatcgtggtgattcagaatggcaaggtcaaggagcatggcacccaccagcagctgctggcacagaaaggcatctatttctccatggtcagtgtgcaggctggagcaaagcgctagtgaactgtgttaaatatttttttaatatttgtattaacacatagcatttaaccaaagttaaaaagaaagtacgtaccagaataaccagttatctatttcctgtcattatgagaagcatttagtccagtttagagttttcagagactttgtaattaaagkgacagaaatagatatatcatcaaatggaaaggaatcatttaaattgcactataaaattatacaagaattaaaagtaaatgtttcataatatatacttttatttatactttctcatttgtaactataactgatttccttgctaaacaaatcatgtgtgtatcaaaaattaatgaaatgtttgtataaagtatatatagtgaaact

SEQ ID NO: 466 - DNA, 2855 bp, Cricetulus sp.
  misc_feature (2610)..(2631): n is a, c, g, or t
  misc_feature (2733)..(2764): n is a, c, g, or t
ccgcgggcgcccggccgcgcgggcagcctcgggacaatggggccgcagcgcttgctgctcgtcgccgctggcctcagcctgtgcggtcccttgctgtcttcccgtgtccccgtgcgccagccagaatctgagatgacagatgccactgtgaacccccgctcattttttcttaggaatcccggtgaaaatacatttgaactgattcccctgggggatgaggaggagaaaaatgaaagcaccttgccagagggcagggcaatctacttaaataaaagccactctcctgcaccacttgctcccttcatctctgaagatgcctcagggtatctgaccagcccctggctgaggctcttcatcccctcggtttacacctttgtgtttgtcgtcagccttcctctgaacatcctggccatcgcagtgtttkkcttgaagatgaaggtcaaaaagccggctgtggtatacatgctgcacctggccatggctgacgtgctgttcgtgtccgtgctycccctgaaaatcagctactacttttccggcagtgattggcagtttgggtctgggatgtgtcgcttcgccactgcagcgttttattgtaacatgtacgcctccatcatgctcatgactgtcataagcattgaccggttcctggcagtcgtgtaccccatccagtccctgtcctggcgcactctgggcagagctaacttcacttgcctggtcatttgggtgatggccatcatgggggtggtgcctcttctcctcaaggagcagaccacccgggttccagggctcaacatcaccacctgccaygatgtcctcaatgagaccctgctgcagggcttttactcctactacttctcggccttctccgctgtcttctttcttgtgccattgatcatttccacgatatgctacatgtccatcattcggtgtctcagctcctcctcagttgccaaccgcagcaagaagtcccgggctttgttcctgtccgctgctgtgttctgcgtcttcatcgtctgctttggacccaccaacgtcctcctgatcatgcactacctgctcctgtctgacagccctgccacagagaaggcctacttcgcttacctcctctgcgtctgtgtgagcagcgtgagctgctgcatcgatcccttgatttactactacgcctcctccgagtgccagaggmmcctctacggcatcttgtgctgcaaagaaagctccgaccccaacagttacaacagcaccggccagctgatgccgagtaaaatggatacctgctctagtcacctgaataacagcatatacaaaaagctattagcttaggggaggattgctagaaggtcacatagaaaaggttggaaaagtggacagcccgggatcctggcaagaactatatttacttcacaagccatgactgacttgcatgtctacttcttatwagtgctatcaagcataattatcagaaaggtaatgggaaccagagagagatttccagtgctgcggtagcaaccgtcacttcttgtatatctaggtgacttaattatataggtggtgtgcgcacacatatttgcaatgcagtatgaaatcaatgctttgacactttcttgtttattccctagcaattactatggaaataattggattctctgagttataataaacaaagtctgttaacaytgaacagctgaaggtatctaatgatagggaaggagtccatagtttakacttcacacagcttttgcccatatgtatttttttcagttatttgatggtaatgtttaaagwatagaagggtgaaacagtattatctgtataggggaagatctagtgcttttcatcttgaattaccaaagccgttggaaagcctattttgatatggggtatcatttttgcaatttacatactgaatacatggaccaagactgagcataaaactcaccaggatcataagaaaccttacaaagcagccaagggggcctctgacagcagatgcatacttaaccagctgtgcctcccasagagtggtgatggggaccaccaggcccactccttcctccaaggcwtcccattagctatgagttgactgtatctggattgaagctggcaagataggatatgacatccasggagggaatagccacaaaagtcgtctgcacatctgaggagcagagaaggtgtgtttatatccagtagctgtcctgcaaggctggctcttgcacagacacacccatgtgccctgggtcactctggtggatactgggcctgcagactgaccactgcaggagattaactgagtcttgcctttactctagcaaagcagatagctgacatggccaatgtgatgtatacactgcaaatacaccattgtacatagaagtgtgtcagccacacatcgccaagcatatttcacataagcaaggcctaacagctaaacagctttggagatctgagtttctgcatcagtagctgtaggttaggataaaaacacagtttaagatgtatatttttaagaaacaaacccttaagtctacaataattagacactatttatttacaaatgttttattaaaaattgcccaaatcagacaggcattgaggcacatgcctttaagnnnnnnnnnnnnnnnnnnnnnntaggcagatctctgtgcattcaggtcagcctggtctacatgatgacttctaggtcatctagggctatatagtgagaccttggcttaaaacaataatgacatnnnnnnnnnnnnnnnnnnnnnnnnnnnnnnnnaaaacccacatttttagaaagcaagaaaacacaaaaagttacctgaatccagttttaagaaatacataggtcagtctggttaaaaaaaaaa

SEQ ID NO: 467 - DNA, 2182 bp, Cricetulus griseus
  misc_feature (1556)..(1588): n is a, c, g, or t
ccatggagtggggggtggggtagggaaagtttatgtgggggcttttcttccacgtgttccagaacactaccatctggcccatctgctaggcaaacacctcattgccctcaggcagaaagtcctggtgtgtatccttccagactggcctgctcccctgctcttgaatttcacctcccatagagacaccttcaacactttccctcttcaaaagctctagctgcccccaagaataagtgtccttagaacaaggcttgtgtcttcccagtctctagtctctggctacgtgctagcgctagcgactcagcggattctaatcctaccctcatgttaggcaagtgactaagtgactgagcctccgtttccacatttataccgaacccacacccccaccccaccccccgccccgcgttgtaaagcaaaaatgagaggtctaacataatgcctggcagcacgggatacgcagtggggacatcaccaacagcgactaagtctgggctagaactgtttttttgtaacctggtcccacttccaacttaattttcctgtaagcagggtctccacaacccgctttcatccaggttggcacacacgataagcacgggatgctgtacccgcgcaggggaaactgggtagccccctctgcacccggcccctccgccccagggcgcggcaaagcgcgggtggacaagcttccgggaactgtcccggtccgagcgcagatcctttgcgctcagtccgtgggccgtgcggagaggggcgtgactcagagcggaggcgtgtgcaggcggtatcccacgtgcaggaagagggacgcttgcagtctgcgggacgtgtgcagtctgcgggggcgtatgcaggtggtgggcaacctgggcggaccttttgcgctcgccccaaatccttccctctataaaggcagcgctctgcacgcttctctccatcacgccttctcctagcgctcgggtttctgtgtttcatcgctcctcagccggtctccaaccgtcgtcttcactcgccatggaccccaactgctcctgtgctacaggtaagggggactgctgacgggcctccgcagcctaagtttctccgagagcwwggcaaggtgtttggggtcccttctctagtcactttcagggtactacctgctgccctttcccaacgaattctggagaaccccttttaaccagtcttcacccaagctgggtcggggatttgcacttgagttcctatgggaactcctgcgtccaggtgcgtcaggtcgcgctaactgccttgtccctgcagatggatcctgctcctgcgctgggtcttgcaaatgcaaagagtgcaaatgcaccacctgcaagaaaagtaagttggatcctctctatccctttacccttcgctctgcatcagcccctagtccgccctaccatcccgggagcatccaggtgtggtgcctctgactcagtttttccgctcacggtcaactcttctcctctaggctgctgctcctgctgcccggtgggctgtgcgaagtgctcccagggctgcgtctgcaaagaggcttcggacannnnnnnnnnnnnnnnnnnnnnnnnnnnnnnnntcagctgcctgtaaatagagcaatgtgtagaaacgtatttttttttacaaccccggcctattcgccacacccctttctataaagcatstaattgataataaaagcgttgacttgattaactcagcttgtctttgtgtgcattggaaataagggactgggcggagtttgaaatggaactgcagaggcttgagttctggactcaaatactagtttgtggcttgggctgctcaggttacctctcgggcttttatcctggaagtggtgggcaagaagatggcactagtcacacaaatgtgccagtccccactgtgcatgtgtatattggggattaaacctagggcttccggcactaatgagtcacacccctaccccctagatacaagatactctttctctctccaaattcagttggattttaggcttcacattgacttaagtatggaatgccagtacctaaacttaagtaaataaaacaaaaagtaagaattagaggggctggctattggtgcctgcctttaatccagcagaggctggtgaatcctgagttgggaggctagcctcatctacagaacaagttctggggtggccagggat

SEQ ID NO: 468 - DNA, 646 bp, Mesocricetus auratus
ctctccagcgccccgctcagcgagccacgtggaccaacttcggcgcgcggtgttcgcttggttccagtggggctcgccgcgcctcccgcttctcggtgctcgcctcgtctsagctccgaccccatggcggctctggtgttggaggacgggtcggtgctgcagggccggccctttggggccgctgtgtcgactgctggggaagtggtgtttcagaccggcatggtcggctacccagaggccctcactgacccttcctacaaagctcagatcctggtgctcacgtaccctctcatcggcaactacggcattccctcagatgaagaggacgagttcggcctgagcaagtggtttgaatcctcggagawccacgtggcaggactggtggtgggagaatgctgtcccacgcccagccactggagtgccacctgcaccctgcatgagtggctgcagcagcatggcatccccggcctgcaaggagtagacactcgggagctgactaaaaagttgcgggagcaagggtctcttttggggaagctggtccagagtgggacagagccttcaaccctgccgttcgtggaccccaatgccaggcccctggcaccagaggtwtckattaagaccccacgggtattcaatgcagggggtg

SEQ ID NO: 469 - DNA, 4062 bp, Cricetinae gen. sp.
  misc_feature (405)..(419): n is a, c, g, or t
  misc_feature (1911)..(1952): n is a, c, g, or t
  misc_feature (2375)..(2419): n is a, c, g, or t
  misc_feature (2527)..(2551): n is a, c, g, or t
  misc_feature (2634)..(2651): n is a, c, g, or t
  misc_feature (3090)..(3106): n is a, c, g, or t
tgagccatggggccggagccgcagtgaacaccatggagctggcggcctggtgtggctgggggctcctcctcgccctcctgtcccccggagcctcgggcacccaagtgtgcaccggcacagacatgaagttgcggcttcctgccagtcctgagacccacctggacatcgtccgccacctctaccagggctgccaggtggttcagggtaacctggagcttacctacctgcctgccaacgccaccctctcattcctgcaggacatccaggaagttcagggatacatgctcatcgctcatagccaggtgaggcacgtcccactgcagaggctgcgcatcgtgagagggacccagctctttgaggacaagtatgctctggctgtgctagacaaccgagatcctttggacnnnnnnnnnnnnnnnacaggcagaaccccagaagggctgcgggagctgcagcttcgaagtctcacagagatcctgaagggaggagttttgatcagagggaaccctcagctctgctaccaggacaccgttttgtggaaggatgtcttccgcaagaataaccagctggctcctgtagatatagacaccaatcgctcccgggcctgcccaccctgtgccccagcctgtaaagacaaccactgctggggtgcgagccccgaggactgtcaaaccttgaccggcaccatcgcaccacgggctgtgcccgctgcaagggcccggctgcccactgactgctgccatgagcagtgtgctgcaggctgcacgggccccaagcattctgactgcctggcctgcctccacttcaaccatagtggcatctgtgagctgcactgcccagccctggtcacctacaacacagacacctttgagtccatgcccaaccctgagggtcgttacaccttcggtgccagctgtgtgaccacctgtccctacaactacctttctacggaagtgggatcctgcactctggtctgtcccctgaataaccaagaggtgacggctgaggacggaacacaacggtgtgagaaatgcagcaagtcctgcgcccgagtgtgctacggtctgggcatggagcacctgcgaggggcaagggccatcaccagtgccaatatccaggagttcgctggctgcaagaagatctttgggagcctggcgtttttgccagagagctttgatgggaacccctcgtccggcattgcccctctgacgcccgagcagctccaagtgtttgaaaccctggaggagatcacaggttatctatacatttcagcatggccagacagcctccatgacctcagcgtcttccagaaccttcgagtcattcggggacgagttctccatgatggtgcttactcattggcgctgcaaggcctggggatccgctggctggggctgcgctcactgcgggagctgggcagcgggctggtactcattcaccgaaacacccatctgtgctttgtacacactgtgccttgggaccagctcttccggaacccccaccaggccctgctccacagtgggaacccatcagaggaggaatgtggtctcaaggactttgcctgctacccactgtgtgctcatgggcactgctgggggccagggcccacccagtgtgtcaactgcagtcacttcctgcggggccaggagtgtgtgaaggagtgtcgcgtgtggaaggggctccctagggagtatgtgaatggcaagcactgtctgccatgccaccccgagtgtcagcctcaaaacagcacagagacctgcactggatcggaggctgaccagtgtaccgcctgcccccactacaaggactcgcccttctgcgtggctcgatgccccagtggagtgaaaccagacctctcctacatgcctatctggaagtacccagatgaggagggcatgtgccagccctgcnnnnnnnnnnnnnnnnnnnnnnnnnnnnnnnnnnnnnnnnnnggctgcccagcggagcagagagccagcccggcgacttccatcatcgcaacggtggwgggcatcctgttgttcctggtcataggggtggttgtcgggatcctgatcaagagaaggcggcagaagatcagaaagtacacaatgcgaaggctgctgcaggaaactgagctagtggagccgctgacgcccagtggagccatgcccaaccaggctcagatgcggatcctaaaagagaccgagctaaggaaggtgaaggtgcttggatcaggagctttcggcactgtctacaagggcatctggatcccagatggggagaacgtgaaaatcccggtggccatcaaggtgttgcgggaaaacacatcccctaaagctaacaaagaaatcctagatgaagcatatgtgatggctggtttgggttctccctannnnnnnnnnnnnnnnnnnnnnnnnnnnnnnnnnnnnnnnnnnnnggtgacacaacttatgccctatggctgccttctggaccatgtccgagagcaccgaggtcgcctgggctctcaggacctgctcaactggtgtgttcagattgccaaggnnnnnnnnnnnnnnnnnnnnnnnnngctcgtgcacagggacctggctgcccggaatgtgctggtcaagagtcccaaccacgtcaagattacagactttgggctggcannnnnnnnnnnnnnnnnngagacagagtaccatgcagacgggggcaaggtgcccatcaaatggattgcattggaatccattcttcgacggcggttcacccatcagagtgatgtgtggagctatggtgtgactgtgtgggagctgatgacttttggggccaaaccttacgatgggatcccagcccgggagatccctgacttgctggagaagggagaacgcttgcctcagcctccaatctgcactatcgatgtctacatgattatggtcaaatgttggatgatagattctgaatgtcgcccgagattccgggagttggtgtcagaattctcccgcatggccagggacccccagcgctttgtggtcatccagaatgaggacttgggcccttccagccccttggacagtaccttttaccgttcattgctggaggatgacgacatgggggacctggtagacnnnnnnnnnnnnnnnnncccccagcagggattcttcttcccagaccctgctccaggcgccgggagcacggcccaccgtaggcaccgtagctcgtcaaccaggagtggaggcggcgagctgacactgggcatggagccctcgggagaagagccccccaggtccccactggctccctcggaaggggctggctctgatgtgtttgagggtgaactgggaatgggggctaccaaagggccgcagagcatctctccacgtgacctcagccctctacagcggtacagcgaggatcccacattacctctgcccaccgagactgatggctacgttgctcccctggcctgcagcccccagcctgaatatgtgaatcagccagaggtgcggcctcagcctcccttgactccggagggccctctgcctcctgtgcggcctgctggcgctactctggaaagacccaagactctctctcctgggaagaatggggtcgtcaaagacgtctttacctttgggggtgctgtggagaaccccgagtacctagtacccagaggaggctctgcttctcaaccccatcctcccgccttgtgcccagcctttgacaacctctattactgggaccaggacccatcagagcgggggtctccaccaaatacctttgaagggacccctacagcagagaaccccgagtacttgggcctggatgtgcccgtgtgacgtcacgtttgtagaggccctgttctgccttcagagtgagggaggcctggtctccttcaccccaaagcagggggaggtcctctggccacattatttccagggcagcctgcttgccaggagcccaccctgcggaaccttccttgctgcttgagtcctgagtggttgacaggggccccctggttggaagaggtggcacactgaacagcctcattggatcacagaccctgccctgacaccctgtagggtccaggggcatcacagtcat

SEQ ID NO: 470 - DNA, 1400 bp, Cricetinae gen. sp.
ggtacctgaatacgcacagaaaagagtgcagagcaccccccccccatctaagcaaattgtgagccagacctgtatttcaaggaaatgagaaaaccttcatcctgggtcactgagaaaagtcaacacttgtccaagtgttacaaatgttgattgtgtgtcagttcatataacaggagcrarwtmaacataggtagttgtaagcattatctacatttatttgttgaaaatgagttttaactgtaattatcctactccagtaaatccacaagcaaaagttgtaatatttgattgttttgttttccttgwcytrgggaaccatggacattgamgcrtactttgaaaggattggttaycagaaytccaggaacaaactggacttgcaaacattaactgaaatccttcagcaccagatacrarctattccctttgagaacttgaacatccattgtggggaatccatggarctgrgcttagagacyatctttgatcaaattgtgmrgaagaagaggggtgggtggtgtctycaggttaatcatctcctgtactgggctctgacmaaaatgggctttgaaaccacaatgttgggagggtatgtctttaacactccagctaataagtayagcagtggtatgattcaccttytagtacaggtgaccatcagtgayaggaactacattgttgatgctggrtttggacgttccctccaratgtgggagcctctkgarttagymtcaggraaggaccakcctcaagtkcctgccatcttccgtttgacagaagagaatgaaacctggtacttggaccaaatcagaagagaacartatgttccaaaycaagmatttgttaactcrgacctccttgagaagaacaaatayagaaagatctattcttttactcttgaaccccgtactattgaggactttgagtcyatsaatrcctaccttcagacrtcrccagcatcygtrtttacaagcaaatcattttgttctttgcagaccccagaaggggttcactgtttagtgggctgcaccctcacctatagghrattcagttayaaggacaatgtagatcttgtrgagttyaagagtctgaaggaggaagaaatagaagatgtrctsaaaactatatttggcatttctttagagaaaaaacttgtgcccaarcatggtgatagrttttttaccatttagaataagcagcagtagaagttttcagtgtccctccawrkacytggatttttaatgataaattttcaaacagatttacagtgcatgtaatcacatgagcctttttgcattcattccgcagctgactagttattggtaaataataatttcttgtctcctctctacccctatattttcattagcagtaatcacaccttggataaacctcattgg

SEQ ID NO: 471 - DNA, 3036 bp, Mesocricetus auratus
  misc_feature (2414)..(2484): n is a, c, g, or t
  misc_feature (2819)..(2843): n is a, c, g, or t
gctggtttagtttggctctcaagatgaaaacttccttgattttccttcttgaatgaaacacatttcttaaaagaccaaaaactgtagcccacctgtgtttaatcattaatagtcagccctcccatgaacttaggtcctgattttggagtttggaatctgacctttcccctatagataaacactgttgtcgcagattctgaggagggtcacttccttgctgcctgccaccagaagagtccgcttctcagagattcctgggaagtggatgccttagagggtagccaggcagcatgattctcctggcagtgcttttcctctgcttcttctcctcgtactctgcctctgttaaaggtmaswswactgktckytywytaaaywrtgakcggctgtacaagctcacatactccacggaagtgtttcttgatgggggcaaaggaaaactgaaagacagcgtgggctaccggatctcctctgatgtggacgttgtgttattgtggaggaaccctgatggcgatgatgaccagctgatccaagtcacgataacggccgtcaatgttgaaaatgtgaatcaacagagaggagagaagagcatcttcaaaggcaaaactacgcctaagatcataggaaaggacaacctggaggctctgcagagacccgttcttcttcatctggtccgggggaaggtcaaagagttctactcatatgaaaatgagcctgtgggcatagaaaatctcaagagaggcttggctagcttattccagatgcagttaagctctgggaccaccaacgaggtagatatatctggggattgtaaagtgacctaccaggctcagcaagacaaagtggtcaagactaaggccctggacacatgcaaaattgagaggtctggatttacaacagtaaatcaggtattgggtgtcagttcaaaagccacatctgtcaccacctataagatagaggacagttttgtcacagctgtgcatgcagaagagacaagggatttctccttgaacttcctacaagccattgcaggaaaaatagtatcaaagcagaaattggagctgaagacgactgaagcaggtccaagaatggtgcctgggaagcaagttgcaggtgtaatcaaagcccttgattcgaagtacacagccattcccatagtggggcaggtcctccagagtgcctgccaaggatgtccttctctggcggagcactggcagtctatcagaaaacacctggagcctgagaacctgtccaatgccaaggcggtcagcagcttcctggccttcattcagcacctcaggactgcaaggagagaagagatcctccagatcctgaaggcagagaagaaggaagtgctacctcagctcgtggatgccgtcacctctgctcagactccagactcgttggaagccatcctggactttttggattttaaaagcgacagcagtattgttcttcaggagagattcctgtatgcctgtggatttgcctcccaccccgatgaagaactccttcgagccctccttagtaagttcaaaggttcgtttgcgagcaacgacatcagggaaaccgttatgatcatcattggagcccttgtcaggaagctgtgtcagaatgaaggctgcaagctcaaagccgtggttgaagctaagaagctaatcctgggagggcttgaaaagccagagaaaaaggaggacaccacgatgtacttgctggccctgaagaacgccttgcttcccgaaggtatcccgctccttttgaagtatgctgaggctggagaagggcccgtcagccacctggctaccactgtactccagagatatgatgtctccttcatcacagatgaggtgaagaagaccttgaacaggatataccaccagaatcggaagattcatgaaaagactgttcgcacgactgccgctgctgtcatcttaaagagcaacccatcctacatggatgtgaagaacattctgctgtccattggggaacttcccaaagaaatgaataaatacatgctgacctttgtgcgagacatcctgaattttgaaatgccctcgagcaaaatgatccgccgggtcctcaaggagatggttgcccacaattatgaccgtttctccaagagcgggtcctcttccgcctatactggctacatcgaacgtagtccccacgcagcatccacatacagcctcgacatgctttattctggctctggcattctgaggaggagtaacctgaacgtcttccagtacctcgggaaggcaggccttcatggcagtcaggtggtcattgaagcccaaggcctggaaagcctaatcgcagccactcctgatgaaggagaggaaaacctggactcctatgctggcatgtcagccatcctgtttgatgttcagctcagacctgtcacttttttcaannnnnnnnnnnnnnnnnnnnnnnnnnnnnnnnnnnnnnnnnnnnnnnnnnnnnnnnnnnnnnnnnnnnnnnttctgctgatagatcattctcaggatattcagctgcaatctggactaaaggctaatatggagatccaaggtggtctagctattgatatttcaggttcaatggaattcagtctgtggtatcgtgagtccaaaacccgagtgaaaaatcgggtggctgtggtaatagacagcgctgtcacagtggactcttctttcgtgaaagctggcctggagagcagggcggagacagaggcgggtctggagttcatctccacagtgcagttctctcagtacccgttcctggtctgcatgcagatggaccgggctgaagctcccttcaggcaatttgagacaaannnnnnnnnnnnnnnnnnnnnnnnnggctatgtctctcggagaagaaaagaaagcctagtgtctgggtatgaactcccactccatcaagagaactctgagatgtgcaacatggtgttcccccctcagccagagagtgataactcgggaggatggttttgaaactgatgagtggtgtttccctcagatccatttctttgagagtgatatacttcgacgt

SEQ ID NO: 472 - DNA, 1341 bp, Cricetulus griseus
  misc_feature (317)..(335): n is a, c, g, or t
  misc_feature (552)..(566): n is a, c, g, or t
gacccctacattaacattgatgcaggaacattctctccttatgagcatggagaggtctttgtactggatgatggtggagaagttgaccttgacttgggaaattatgaacggttccttgatatccgcctcaccaaggacaataatctgaccacagggaagatataccagtatgttattaacaaggaacgcaaaggagattacttggggaaaactgtacacgttgtccctcacatcacagatgcaatccagcgctgggtgatgagacaggccttaatacctgtagatgaagatggcttggagcctcaagtgtgtgttannnnnnnnnnnnnnnnnnngggagacattgaaagcatgccsttyattgargccttccgscagttccagttcaaggtcaagagggaaaacttttgtaatatccatgtcagtctggttcctcagccaagttcaacaggggaacaaaagacaaaacctacccagaacagtgttcgggagcttagaggacttgggctttctccagacttggtggtgtgcaggtgytcaaatcctctggannnnnnnnnnnnnnntaaaatatcaatgttctgccatgtkgaacctgaacaagtgatctgtgtycatgatgtttcatcyatctaccgkgtacccttgttgttagaagagcaaggggttgtagactattttcttcggagmcttgascttcctattgagagacagtcacgaaaaatgctgatgaaatggaaggagatggcagacagatatgatcgcttgttggagacctgctctatcgctcttgtgggcaaatacaccaaaytctcagactcctatgcatctgtcattaaagctctagagcattctgcattggctattaaccacaagttagagataaagtacattgattccacagacctggagcctagcaccctgcaggaggagcctgtgcgttaccatgaggcatggcagaagctctgcagtgctcatggagtgctggttccaggaggatttggtgttcgaggaacagaaggaaaaattcaagcaattgcctgggctcggaaacagaagaagccttttttgggtgtgtgcttaggaatgcagctagcagtggtagaattctcaagaaatgtgctgggatggcaagatgccaactctacagaatttgaccctaagactagtcatcctgtggtcatagacatgccagaacataaccctgggcagatgggtggaaccatgaggctgggcaagagtagaaccctgttccagaccaagaactcagtcatgagtaaactctatggagacacagactacttggaagagaggcaccgccaccgatttgaggtgaatcca

SEQ ID NO: 473 - DNA, 2858 bp, Cricetinae gen. sp.
  misc_feature (129)..(191): n is a, c, g, or t
  misc_feature (366)..(400): n is a, c, g, or t
  misc_feature (405)..(423): n is a, c, g, or t
  misc_feature (481)..(501): n is a, c, g, or t
  misc_feature (1020)..(1034): n is a, c, g, or t
aagcttatctccacagtctggcggtttcatgtgtcggcactgtggaccagatgttcttttcgatctgaccttgttccctgcctaggggaccttggggaattttccactggggcgatcttctgagtctcnnnnnnnnnnnnnnnnnnnnnnnnnnnnnnnnnnnnnnnnnnnnnnnnnnnnnnnnnnnnnnnctgtgaaatgccacaaagagaaaaataccgttagagtatggagaaaaacaattgagttttgtgccaaggaacaaagtagtgcagagtgggaagtgatttttagatgtgggtttcacatcttccagagcacacagaggccttaaaggaagagagccttgctggacgttggtggcgnnnnnnnnnnnnnnnnnnnnnnnnnnnnnnnnnnnaggcnnnnnnnnnnnnnnnnnnnaccagcctggactaccgagcgagttccaggacagagtccaaaacaatacagagaaacnnnnnnnnnnnnnnnnnnnnntcaaaggaagagggccttgcatagacaaagattagtagctatagttttgttgtatggacttaatgtttttggaaagagaacagccacggacacaactgcaaataagaagaaagtagttccaatcaatatgagtttctgaaagaacaaatataggcagaatgtaagctcaaagttcagattaggtgaattcatgaaccttttggcattttaaccaataccagttacccaagttcctggaagcgtgcaagaggcccttctactggctgcagccctgacacctccttctttcccagcacataaactctgcagtctggactcactgggtctcagctgagcacagcaggggagccctgcaagactctcagttgggagggaaacttggagccagacctgctgaaggctgaagaaaagctgcaatggagctgatccccaacctttctatagaaacctgggtgctgctggctatcagcctggtgctcatctacatrtrwggtasctattctcatgggacttttaagnnnnnnnnnnnnnnnggaccaaaacccctgcctttttttggcaccattttaggctatcatgatggtacatggaaatttgacgaaacgtgctataaaaagtatgggaaaatatgggggttttatgacggtcgagtgcctgtgctggctattgcagatccagagatcatcaaaacagtgctggtgaaagaatgctactcaaacttcacaaaccgtcggtcttttgggccagtgggatttatgaaaaagtcaatcaccatatctaaggatgaagaatggaagagacttcgaacactactgtctccagctttcaccagcggaaaactcaaggagatgttccccatcattggacagtatggagatacgttggtgaaaaacttgagacgagaagaagagaaagggaagcccgtcaatatgaaagaaatccttggagcttatagcatggatgtgatcactggcacatcatttggagtgaatgtcgattccctcaacaacccagaggatccctttgtgcagaaggccaggaagattttaaagtttaatttttttgatccctttattctctccataatactgtttccattccttaccacaatatatgacttgttaaggttctccatttttccaagacaatcaacaaactttttcaaaaaatttataacaacgatgaagaaaaatcgccttcattcaaaccagaagacccgaatggatttttttcagctgatgatgaacactcagaattccaaaggcaaagagtcccagaaagctctttccgatctagaaatggcagcacaagccattattttcattttcgctggttatgaatccacaagcacctccatttgtctcgtattgtatgaactggccacccaccctgatgtgcagaagaaacttcacgatgagattgacagcgctctgcccaataaggcacctgtcacctatgatgtcctgatgggcatggagtacctggacatggtgataaatgaaggtctcagattgtacccaattgctaacaggctagagaggatctcgaagaaggctgtagaaatcaatggactgttcattcctaaagggattacagttatggtaccaacctatcctcttcatcgggaccctgagtactggccagagcctgaggagttccgccctgaaaggttcagcaaagagaacaagggcagcattgatccttatgtatacatgccctttgggaacggacccaggaactgcattggcatgaggtttgccctcctaagcatgaaactggctgtcgtcagtgtcctgcagaacttcaccctccagacttgtgagcaaacagagaaccacctgaagttcgccaggcaaataattctccagccagaaaaccccatcatcctgaagatcatatcaagagataaacccataaccggagcatgaatttccctcaggaattatgctatattcttcaatgggactgtgtcacagaacaccagcaaatttaatttagcacagaatgtagcacagatgaaattggcttactgaactttcattgatgattgagaactcagtacttcactgaatgtgttcagtgtctatagggagtattatctattgtgtaattcaatggaaataattaagtcaatgatagttgtggagattcatcttctgattctcttgtaaccatctacactaattgcaattagttccatcaattctgagctccaactgtagtaactgtttctttatagttctatcaataatttttatgaaaatagaaactattgtgttgactgttagtaaaaatatatcaaactgtttctttgtaaaattttatgatattgaggatataaataaatatctccttca

SEQ ID NO: 474 - DNA, 440 bp, Cricetulus griseus
gatccggactttggaactaaaacatggttattgcatacttatggatgattccataaacctagtttccttcatttcattttatccggtcattagaatacaacagagtttttggttgttaggaaagattccataaacccagttttgtgtatttcgttgtatctggactttgaactacaacagaattaatgcatagttatgaacgaatccataaaactagttttgtgtatttcgttgaatccggactttggaactaaaactcagttagtgcatcattatgaacgcttccataaacctagttttgtgtatttcgttgtatccggactttggaactaaactctgttagtgcatcatcatgaacgattccatcaacctagtcttgtgtatttcgttgtatctggactttgaactacaatagagttagtgcgtagttatgaacgatt

SEQ ID NO: 475 - DNA, 357 bp, Cricetulus griseus
gacaatccataacctagttttgtgtatttcgttgtatctggactttgtaatacaacagaattaatgcgtatttatgaatgattccataaacctattttgtgtatttcattgtatacggactttggaagtgaaacacaattagttcttatttatgtaaaattccataaacctagttccttgtatttcgatgtatcctgacgttggaactacaacagagttattgagttgtttgaaattttccataaacctggttttgtgtatttcgttgtatatggactttggaactacaacagtgttattgggttgttataaacgattccaaaaacctagttttgtgtatttcgatatatctggatc

SEQ ID NO: 476 - DNA, 902 bp, Cricetulus migratorius
atgagggcccctactgtgtatcctgtgctcttgtttctttggtttacaggtgccatatgtgacatmcagatgacscagtstccatcmtcactgcctgcctccctgggagacagagtcactatcaattgtcaggccagtcaggacattrgcaattatttrarytggtaccagcagaaaccagggaaagctcctmarctcctgatctattatayaaataarttggcagatggagtcccatcaaggttcagtggcagtggttctgggagagattmttctttcactatcagcagcctggaatcygaagatattggatcttattactgtcaacagtattmtaactwtccryksacgttcggwsmtggcaccaagctggaratmaaacgggctgatgctaagccaaccgtctccatcttcccaccatccagtgagcagttgggcactggaagtgccacacttgtgtgcttcgtgaacaacttctaccccaaagacatcaatgtcaagtggaaagtagatggcagtgraaaacgagatggmgtcctgcagagtgtcactgatcaggacagcaaagacagcacctacagcmtgagcagcaccctcwcgytgaccaargmmgaktatgarmgrcataacmkstatacctgtgaggyyactcayaagacatcaactkcasccattgtcaagascytsaacaggaatgagtgttagagccagaggtcctgaggcaccaccacctgctccctaggaccattctcagtcttccctggtaaggtcttggagctttcttcatagacaacctaccactgttgcagtcctccaaacccccaccacctcatctccctccctttccttggcttttatcatgctaatatttggggaagatattgaataaagtgaatcatggg

SEQ ID NO: 477 - DNA, 1223 bp, Mesocricetus auratus
  misc_feature (333)..(350): n is a, c, g, or t
agtgcattctagccagagtaagccaactccaggatgtccaggaggagctgttgtaatgtataattggtttcatgttgtttgtckyakgsgatcatggacatcgaagcctatttcgaaaggatcggttataacaacccagtctatacattggayttggccacactaaccgaagttcttcagcaccagatgcgaacaattccttttgagaatctcaacatgcactgtggagaagccatggacctgggcttagaggctacttttgatcaaattgtgcggaagaagcggggcgggtggtgtctccaggttaatcatctcctgtactgggctctgacnnnnnnnnnnnnnnnnnncaccatgttgggaggatatgtttacatagtgcctgtcagtaagtacagcagtgagatgattcaccttctagtgcaggtgaccatcagtgacaggaactacattgttgatgctgcctatggaggctcctaccagatgtgggagcctgtagaattagcatcaggraaggaccagcctcaggtgcctgccatcttccgtttgacagaagagaacgaaacctggtacttggaccaaatcagaagagagcagcatgttccaaaccaagaatttgtcaactcggacctccttgagaagaacacatatcgaaagatctattcttttactctccaaccccgcactatcgaggattttgaatatgcgaatacctaccttcagatatctccagtatctgtgtttgtaaacacatcattttgttccttgcaaacctcagaaggggtttgctgcttaataggctccactattgcgaggaggaaattcagttataaggaaaatgtagatctggtggagtttaagaatgtgagtgaggaagaaatagaagatgtgctgaaaactgcgtttggtgtttctttagagagaaagtttgtgcccaaaaatggtaacctatcttttagtatttagggtaaagcgcaaaactgcwwttcattattatttcatgttcttaaacatttgagacatatgcaaatatattcataggagtccttaaagagtcatcacccagctcgatgttgatcagctgatgacttgtatcttctacttcctacattttatgaaaaagcaattgtagctgtcctgttatttcaccaataaaaatataatgtggctaagtgaatgctaggacctgtacagccagtggtctttaccattgagctgtctct

SEQ ID NO: 478 - DNA, 207 bp, Mesocricetus auratus
  misc_feature (198)..(198): n is a, c, g, or t
tcaactcatatatggattttagacataggatggatcaggatagtgccagtctgcacttccactgatcgcgcgtcagggaaacaggaaagaacctaaaagatatgcatatatgcatagtacccaagagaagaggattgagacaagatcctctgaatggatggggaacacggcgagggctggggaggagtaggagctggnaagaagaga

SEQ ID NO: 479 - DNA, 248 bp, Mesocricetus auratus
aataaggcaggctttgtagtcttcacttatcattaaaaatgcaatttaacacacaacagctgaaaaataacatgctcttagaacatgtttaccattaattaattagcaagtaaaaattatacttttagatctgataatgaattgtggatcgatatctgccttgcaaaataaattgctttgttttcccaagctttgttcctccaaatgagaagacatgacagatagtttcctctatgctcgaagactcc

SEQ ID NO: 480 - DNA, 255 bp, Mesocricetus auratus
  misc_feature (76)..(93): n is a, c, g, or t
  misc_feature (183)..(183): n is a, c, g, or t
  misc_feature (236)..(236): n is a, c, g, or t
  misc_feature (240)..(240): n is a, c, g, or t
  misc_feature (242)..(242): n is a, c, g, or t
  misc_feature (245)..(245): n is a, c, g, or t
  misc_feature (250)..(250): n is a, c, g, or t
agcagaaaaaacacaataaaatgaaagtagaaaagaaaaaaatacaaagaagtaaaaataatcacgcactctcacnnnnnnnnnnnnnnnnnncacacaccgataccaaagcacaatctccagtgttaatagtgattaaaaaaatacagagtaagtgaaacagcgcaagaaaaatgtgtgatngtctgtgccagccttcctttgtcctgtttgtcccagaactttattctaggtcnagtngntcncactnagact

SEQ ID NO: 481 - DNA, 193 bp, Mesocricetus auratus
aggtatttaatagctcaagacacagatgtgaacactgaggctccagtccaacccaagctctcagtcaaaaccttaagtgccacctggctagttagcaaaacttcctaagcctctctctctaccacaccaaacagaaacccacgacagaaaggtgcacacctaggaggttgccccagctacagcagaggccatg

SEQ ID NO: 482 - DNA, 185 bp, Mesocricetus auratus
catatctctgtagaagtcaacatgcattaagaaaacccattccctgcatgaatgccaggctccatcttaaataaaaaataggcaacagcaccagctatactaagaataaaaggaagttggttaatggctaacttgagttacagtatacgtctggagatagctctatatattctctaggcgcttaa

SEQ ID NO: 483 - DNA, 238 bp, Mesocricetus auratus
ttaataaatggaccacctgaactgcatagctaatgttaggcaaaggtacattgcaaagaaaaacagcagcccacaaatgtgacagacttcaacaaccccaaatctgacagagggctgatctacaaacttacaaaaaagtccagaatctagtctccaaacactaaatgattcctttaaaattagggtacagaactaaatagagaattctcaatagaggagtctaaaatggctgaatagg

SEQ ID NO: 484 - DNA, 257 bp, Mesocricetus auratus
  misc_feature (234)..(234): n is a, c, g, or t
  misc_feature (237)..(237): n is a, c, g, or t
  misc_feature (252)..(252): n is a, c, g, or t
gaatctctgtgcttaacttcatgaaaactaacgatacaacactgtgtgagaatctccctgcttaacttcatgaaaattaacggtacaacactgtgtgtgatactatgtgctaaacttcatgaaaactaacgatacaacactgtgtgtgaaaccctgtgctcaacctcatgaaaactaacgatacaacactgtgtgtgatcctatgtgctcaacatcatgaaaactaacaatacngcnctggggtaccgagcncgaat

SEQ ID NO: 485 - DNA, 265 bp, Mesocricetus auratus
ctacataaacagctgatctgaacaagtgggagctcacggactccagaatgacaacacagaaaccagcataggacagaaccaggtccctgaatgtgggtgtagttacgaagcctgggaagtctatgggacctctggtagtggaacattattatgcctagtatatgaatggacactgggaacccattgcccatagagggatactctctcagtctattccttgccccaaattgtttgcacagaatttaattgatctcctatctggaaa

SEQ ID NO: 486 - DNA, 272 bp, Mesocricetus auratus
atgttaactctccccaacaattacgtatccgtcttctaggatcacttctgcccataattaggcaatctcatctttattaaaaggcatcataatttctgccgagtctattcctactaactgatgaagtctcagttttcattttataattaactcaaagatactttgcacataattttaatagtttactcagtttatgttgtaaatatatccatttaatgataatatcttctgtctacattaaaattcctgtaaggaattcttgcacgtataga

SEQ ID NO: 487 - DNA, 2429 bp, Cricetulus griseus
tgcgctctaggaggactcttggcctcccgaagttagcaacctcaaattttgtttatctaaaatatttctgcaaaagaaaagtaccctagagcccattctccacaatrgcyatggatgrgtatytgtggatggtyattttgggctttattattgctttcatcctggcgttttcagtgggtgcaaatgacgtcgccaactcgtttggaaccgccgtgggctctggtgtggtgaccttgagacaggcatgcattctggcttcgatatttgaaaccactggctctgtgctwttgggagcgaaastwggagagactatccggaagggcatcatcgacgtgaacctctacaatgacactgtggtgaccctcatggctggggaagtgagtgcaatggttggttcagctgttkggcagttgatcgcatccttcttaagacttccaatctcgggaacgcactgcatagtkggytctactataggtttctcacttgtggcaaatggwacaaaaggagtgcagtggatggagctcgtcaagattgttgcttcctggtttatatcgccactgctttctggcttcatgtctggagtgctgtttgtgctaatcagaatgttcatcttaacaaaggaggaccctgttcccaatggtcttcaggcacttcctctgttctatgccgccactatagcaataaatgtcttttccatcatgtacaccggagcaccagtgctgggtctgtcgcttcccatatgggctatagcactcatttcctttggcgtggctytgctgtttgcsttctttgtgtggctcttcgtgtgtccgtggatgaggaggaaaatagcaggcaaattagaaaaggagagcgctctgtcacgcacttctgatgaaagcctcagtaaggtccaggaggtggagtcccccttcawggagctccctggtgccaaagccagcgatgacagcgctgtccccctcaccaacccgactggggaggctgtggggccctcagaaggcacatcgacagggaaccacccccggacagcytatggacgcgcactttccatgactcacggctctgcaaagtcacccatctcgaacggcacgttcagctttgaaggccacatgaggaatgacggtcatgtttatcatactgtacacaaagactcrgggctctacaaagacttgttgcacaaaatccatgtagacaaaggccctgaggaaaagctctctcaggaaaacaactacaggctgcttcggcggaacaatagctacacatgctacacagccgccatatgtggcatgccagtgcataccaccttcagagccactgatgcctcctctgcccctgaggacagcgagaasstcgtgggcgacaccgtgtcctattycaaaaagaggctccgctatgacagctactccagctactgcaatgcagttgccgaggcagagatcgaggctgaagaggggggcgtagaaatgargctggcctcggagctggcggatcccgaccagcctcatgacgaccccacagaagaagagaaggaggagaaggacacggcagaggtccacctgcttttccactttcttcaagtgctcactgcctgctttgggtcctttkctcatggtggcaatgatgtaagcaatgcaattgggccccttgtggctttgtggctgatatatgaacaaggtggagttatgcaagaagccgccaccccagtctggctactgttttacggaggagttgggatttgcacaggtctctgggtttgggggagaagagtgatccagaccatggggaaggacctcactccaatcacaccatccagtggcttcactattgagctggcctctgccttcaccgtggtgattgcctccaacattggacttcccgtcagcaccacacactgcaaggtgggctcagtagtagctgtgggctggatacgctctcggaaggctgtggactggcacctcttccggaacatatttgtggcctggttcgtgactgtcccygtggccggattattcagtgctgctatcatggctatcttcatgtatggratcctwycatakgtgtgattttgtttcttccagtcgggaaatggctatggggacggtctaacgtgggtatgcgtattcacacctctccacccccactgtttgacacaagcacacccctcccacataccttcccagatggtttgacgccacacactgcttacccaggccacagaagttcatcttccagaattaacctaactactgtacatagtaggtgtatatcaaactgatattgtgatgacataatgtggtgcagttacttatattaaatatatattgtgtacctagaatattgtagcatttattccaaacaaactcagaatgaaagtggagagtaccgcctggaattgcaaatattcttgttaagtgtattttaatgatttc

SEQ ID NO: 488 - DNA, 2514 bp, Cricetulus griseus
  misc_feature (180)..(203): n is a, c, g, or t
  misc_feature (934)..(949): n is a, c, g, or t
  misc_feature (2019)..(2075): n is a, c, g, or t
  misc_feature (2285)..(2363): n is a, c, g, or t
tctgctccgtgcttttagccctccagagccaaagaaaccccagacaacagacgcccatacgcagcgtatagcagtaacttcccagctcggtttctgtgccgtagtttacagtatttaattttatataatatatactatttattatagcattttgatacctcattccgtttacacatcttnnnnnnnnnnnnnnnnnnnnnnnnttaattaaagaaccactacactaaaaaatggcatctacartggcaccgattacyartactmyagctrctryygcyrctkctgstscwtyggtggaykacmaagtatggatgstcatcctgggcttyatyattgcatttgtcttggcattctccgtgggagccaatgatgtagcaaattcktttggtacagctgtgggctcaggtgtagtgacyctgaagcaagcctgcatcctagctagcatcttygaaacwgtgggctcygycttarctgggggccaaagtgagygaaaccatccggaagggcttgattgaygtggagatgtayaackmractcaagrsytrctsatggcyggctcmgtcagtgctatgtttggttctgctgtgtggcaactmrtggcttcgtttttgaagctsccyatttctggracccattgtattgttggtgcaactattggtttctccctcgtggcaaaggggcarragggtgtcaagtggtctgarctgataaaaatygtgatgtcttggttcgtstcyccactgctttctggwattatgtctggaattttattcttcctkgttcgtgcattcatcctccrtaaggcagatccagttcctaatggyttgcgwgctttrccrgttttytatgcctgyacarttggaataaacctcttttccatyatgtatactggagcaccgttgctgggctttgacaaacttcctctgtggggtnnnnnnnnnnnnnnnntgggatgtgcagttwtctgtgcccttwtcgtctggttctttgtatgtcccaggatgaagagaaaaattgaacgagaaataaagtctagtccctccgaaagccccttaatggaaaagaagaacaacttgaaagaagaccacgaagaaacaaagatgtctcttggggatgttgagaatgggaattccgtgtctgaggtagcttgtgccactgggcctctycrggctgtggtggaggagagaacagtstcattcaaacttggrgayytggaggaagctccagagmgagagmggcttcccagcctggacttgaaggaggagaccagcatagatrgtaccatcaatggtgcagtgcagttgcctaatgggaaccttgttcagttcagtcaaactgtcagcaaccagatcaactccagtggccactatcagtatcacactgtgcacaaagattctggcttgtacaaagagttgcttcataaattacatctggccaaagtgggagattgcatgggagactctgggkataagccgttgaggcgcaacaacagctacacttcctacaccatggcaatatgtggcatgcccctggattcattccgtgccaaagagggtgaacagaagggmgaagaaayggagamgctgacatggcctaatgyagaywcyaagaagcgrattcgaatggacagttacaccagttactgcaatgctgtktctgaccttcactcwgmatctgagatrgacatgartgtyaaggcwgagatgggtctaggtgacagraaaggaagtaatggctctctwgaagrrtggtrtgaccaggataagcctgaagtctcyctcctcttccagttyctgcagatccttacagcctgctttgggtcattygcccatggtggcaatgacgtmagcaatgccattggkcctctggttgctttrtatytkgtttatgacaacwsragatgtktctwcaaarrtrgcaacaccaatatggcttctrctytatggtggtgttggyatctgyrtwggkctgtgggtttggggaagaagagttatccagaccatggggaaggatctgannnnnnnnnnnnnnnnnnnnnnnnnnnnnnnnnnnnnnnnnnnnnnnnnnnnnnnnntgattgcatcaaayattggccttcccatcagyacaacacaytgtaaagtgggctctgttgtgtctgttggctggctccgrtccaagaaggctgtygactggcgwctstttcgyaacatttttatggcctggtttgtcacagtccccatttctggrgttatyagtgctgccatcatggcaatcttcagatatgtcatcctcagaatgtgannnnnnnnnnnnnnnnnnnnnnnnnnnnnnnnnnnnnnnnnnnnnnnnnnnnnnnnnnnnnnnnnnnnnnnnnnnnnnngaagacagacaaggtcaaagtttggagccatggggagtgtaattacactataatgcttttgtgctaaaatgactgtctcaaaatagctatgaaaatagccagtttccatggtcacctaagtcccttttcttctggcatgatcgaacaactt

SEQ ID NO: 489 - DNA, 5529 bp, Cricetinae gen. sp.
  misc_feature (1246)..(1274): n is a, c, g, or t
  misc_feature (1877)..(1910): n is a, c, g, or t
  misc_feature (2817)..(2846): n is a, c, g, or t
  misc_feature (3348)..(3389): n is a, c, g, or t
  misc_feature (4679)..(4699): n is a, c, g, or t
  misc_feature (4769)..(4789): n is a, c, g, or t
gaattcttcagttatccaagtaacgtacatcagtaaatatctttccctgtaagaataggctaagcactaaagaaaagactcgaaatgccagtggatgtgtcatagaagcagtggcttttttttttttttgctgttttaaaacaagaactgaaggaataaaattgtgaacaaatgggcacagcacactgattttctatttaattcttatttgatcaaccactatgtatgcagaatcagagttgccaggtttttggcattgtcactcctggattaggcagagctcattgatggcaaccattgttctgtctttgctctctcagcatccaagctactgctgtggatgtggagagatgaggtgcagattgttaggtaaagtatactggcagcagtgtgatttgaagggtacaaatgtcaatcatgcataaaatcttgaaaggcaggagtcacagaagtagaggtcaacatttcataaagtattaaaagggaaccagtagagtatcaggccatgagagagcctgacaagactgaggccccagaaaccaaccttagtaccagtaatttccagatcaccttgcaagtcatagattcaataacaagaattggggcacatgggcagtgactgagaaaagcatggtcattagagtcgaacatcgggagtcgtttaattattgccttgggaggcttgctgatcttctgatttaggttaacagtagcccaaagaatgaagcatgtagataggactcaaaggaccccagggatgatgcagagcaggaaggggccctggggtttgtttgataataaagccaatgatttcttactgcaaccattgttgctttccaagaactatctctctctctctccttcatttgcctttgttctttgatattagtataaaaatgagtttcttgcttagttcatcacataagtgaaggtcagatgctcaacagatttgaccgctgggcactaatttctctaaaccctttctacacatgtgcagcagcatctgtctcagagagagggcacacggttgaaaccatctggaacaggaaaagagaaaacacatggattaaagcaacagctgatgtacagactttttaaaaatctttcattgttgcatttctttaaaattgacttctgggtgtccataatcatattcatattcctgaggctcaggtgccattctcatggctggctcatatacttgcccaaatgttttctagtttcagggttttgtttgtttgcatgnnnnnnnnnnnnnnnnnnnnnnnnnnnnncgtgagaaagtaatggctctatcaactccaggcccactcgccatgcaggacaaccaataactgctattcaagtgtactatcccctactttaccaatctctcctgaccgaagggcttcatgtcagttgacagtgaaaggtcagaggaagcagaggagagggactagtgcgatagttctccagtcagactgcacactggacaccgggtctgaactctgtttgtgtagagaatgcgctgtttcagggtgtttactccacctgttgacttgagctgcttggtgagtgtcagggtttgagtttgagcattctgctcttctagccagcttcctaattaacatctgtaatgaattaagctcttgtttttatgcaagccgcaatttcacactatctcttcagttcctgtatattcctgggagataagaatgagctattagctcgagaaaaacagacttttctttgtgtgtggaaacttcaggggctcaataactcatccaaaattataaaacgtgtaagtggtgtaacaagagtgctaccttggctctgaagccagaatccaaagctgaagcaccaaagcttcatgacactgcttttctgataatctatgnnnnnnnnnnnnnnnnnnnnnnnnnnnnnnnnnntcagctgtggggagttgggtaccaggaaatggggccaattgccagacaaggctacggaacactgcccttgtctttgttatagcctagggtgaacactgactccctgctagcgtcaggccacggatgtggctttgttggccctgagaactacagctgttcctgagagggagtaggagtatttctgaggtcactgtgacttgtttctggcatggcatgtgtgtgtactgggctctccccatgctgcacatgggccagctcctattaaagggtcttgagctcccgccccattgctgccagacagctgagatggggaggctgctgctgtgggttggtgagtatggcggatcctagcagtgccacacagttcaggagatagcagtttgttgcttctctggtgcccagtaagcagcctgggactcggagtctggatgaggcagatatgagacagacacaataaagaatcagaggtactcggaggaaggggccgggcagcagttctccaacctagctgctttcatgcttgggctttatcttgagccagtttattcagaatttctggggagagggctttgatatgagtgcttttgagtttatagctggattgagaatcaccggccgagagcttcagcttggacatctatcattgtccctatgcaaagcatgagcaggtgcaattgatgattgtagaaaagaggcttagactagctccactgttaactttgaaatagaggaaaccagtgactgatgtgtgtcaccaagtgtgcatctgcatgcatatatggtgctgagctggagggggcacccgctaactaaggggtgtactggggcaagccacactgcgtgtgtatattaattcctccatttcctgcagggctggttcttctgatgaaacccaacgacggtaagnnnnnnnnnnnnnnnnnnnnnnnnnnnnnnagattttctggctaggaaatctccatccagtgtctcctggacttctgcctgtcttggctccttggtcagaggttgctgatccaatataattcagcacaggacgctggccacttgctgtttgtatggctcagtgtgtgccggcatctagatggataagacattctttcttctcttgggccttagcagcaagggtgagaggtctaggggcttgtggaggaggcgccggtgtatgtgggaggagtgggctgttacagtggcttgctctctttggctgtgctgtctctacckccrgaagcygagtkssswssytgcscyrtgrkytskgctgrytmwtctswtgwwryccaaygmcggtactgcctacaagctggtctgctatttcaccaactgggctcacagtcggccagtccctgcctccatcttgccccgtgacctggatccctttctttgtacacacctgatatttgcctttgcctcgatgagcaacaatcagattgttgcnnnnnnnnnnnnnnnnnnnnnnnnnnnnnnnnnnnnnnnnnncaaactcaaggagaggaacagagccctgaaaacactactgtctgttggaggctggaacttcggcacatcacgsttcaccactatgctgtcyacccttgccagccgtgaaaaatttattggttcagttgtatccttcctgagaacacatggctttgatgggcttgrtctcttcttcttgtaccctggactacgaggcagccccattaacgaccratggaattttctcttcttaattgaagagctccagtwtgcctttgagaaggaggcactgctcacccagcgcccgaggctgctgctgtcggctgctgtctctggcatcccatacatcattcwaacatcttatgatgtgcaccttttaggaagacgtctggatttcattaatgtcttgtcttatgacttacatggaagttgggaaaagtctacaggacacaacagtcctctgttctcccttcctgaagacccaaaatcttcggcatttgctatgaattactggagaaatcttggggcacctgcagataaacttctcatgggcttccctgcctatggacgaacctttcacctcctcagagaatccaagaatggattgcaggctgcctcaatgggaccagcatctcctgggaagtmmaccaagcaggctggcttcctggcttactatgaggtttgttcctttatccagagagcagaaaaacactggattgatcatcaatatgtcccatatgcctacaaggggaaggagtgggttggctatgatgatgccgtcagcttcagttacaaggcaatgttcgtgaaaaaagaacattttgggggggccatggtgtggacactggatatggatgacgtcaggggcactttctgtggcaatggccctttcccccttgtccatatattgaatgagctcttggtgcgggcagagttcaactcaacccctttgccacaattttggtttacattgcctgtgaattcctcaggacctggctctgagagtcttcccgtgacagaggagttgaccactgatactgtaaagattttgcccccaggaggagaggctatggccactgaggtccacagaaagtatgaaaaggtgactacaatccctaacggtggatttgtgactcctgcgggaacgacatctcctacaacacatgctgtagctctagaaagaaacgctatggctcctggggcaaaaactacaacctcactggaccttctgtctgagaccatgactgggatgacagtgacagtccagacacagacagctgggagagagaccatgaccacagtgggtaatcnnnnnnnnnnnnnnnnnnnnnagaccatgaccacagtgggtaatcagtctgtgacccctgggggagagaccgtgaccacagtgggtaatcnnnnnnnnnnnnnnnnnnnnnagaccatgaccacagtgggtaatcagtctgtgacccctgggggagagaccgtgaccatagtgggtaataagtctgtgacccctgtgggagagaccgtgaccatagtgggtaataagtctgtgacccctgggggacagaycacagccacagtgggtagtcagtctgtgacccctccagggatggatacaactcttgtctatcttcagactatgactctcagtgagaagggaacttctagcaagaaggctgtggtccttgaaaaggtcactgttcctcctagagagatatcagttatgcccaatgaacagaatacagctctaaatcgggagaatttgattgctgaggtggaaagttattcccaggatgggtgaattggcccttatgtaaaagcggagaacaggatgctctcctccagctttatcgtcctgttcccaggatatgtgcctttttcttttgaaaatggcttcactcttactaatggaaaccactcctttgtcaactcaatagtccttctaacaaatctcttcctcttaaaaaaaagaaaacctaggacaccctgttatggatcaagaatgttgagctccattagtggcaaatcctagagaaaaactcttgttttttcttctatgtggtatgacagaagccatctcatattgccacccatgaaccatttgtgggacaaggttggcaccaaagccatggggcaatctcctttctgtcgaataaattggaagcatgag

SEQ ID NO: 490 - DNA, 2840 bp, Mesocricetus auratus
gggcccccagattagaggagacaaaggcaagacgaaagtaaagatgccaggctctcttctgttttcagtaactttgtagtgggtgctctttaggaaaagcggtttctaagtgccttgctacttttcaaagaatccagtcattcatccgtgtggtcacctcagtcagctacaggatgctgtctctaaacaggactcgcagtcaagcagagagaccacatatccattgttaggagtgtgttggtgacagaatgagacttttgtggggactcactgcacacattcctgtatttatattcagttatttcttcagcccggctggcattatgtcctgaccccagtttaatcccgtgtcactataaagtcccgtccattgttagcctcctcccgtagtgcttagtggttgtcttctgtagttttgggttgcatctggtccaagctggcctctctggattcgtcagcctttctcgtctccatcttctgacccatcaaggaagggcgcacgagtccctcccctcccatctttccccctaagccatgccgcgggcctgtcttccccttctcagtctctgctgtgccccacagcactggctaggaatgtttgagctgttgtgttactggataccatcttgctgtggccagatgccctccgcagcaatgcagtccagggaagcagggcgggctaagggatctgtcctgcggaagctagccgcaggcggaggaaaggaagccactctataatttttttttcccagcagcctccttaagtctatgggtgacagcttgggcaccttgtctgggacgaggaaatgagctcagagctgaggaaacttgccccaggtcgcaaattaaatccgtgctgatgcagaagtgaacacagcctcagactggaagctgtccaaatagctgcaagagaaaaatcacagctctttgaaagcctcgaagcgtcccaccacgggctctgggcagttactggaagctgtgccagactcgcccgtcctctctgtcctgtaaacacgctgcacggtggattactcattttctctcttgcctgtgactgaggctgttttctcacaccctacccctggtttcatggtcccaaggatttcatttgaagggcggggcattcttcacatccctccaccccaaccggagcctgaagtctggaccaatgaaagcacagtacctcatttactggcactaaggcctggcactatttaagtggtagcaggaacgggctgtgagtcgcgtctgctttctccagaaacaggcacaccgttgtctgatccggacatctctgagctgaagagagggaagggcgaaagcctgtagggccccgactgccaccatgtgctccagcaagtgtacaagatacatcggacactccctggtggtgtttgctgtcctctgcatcgtagctaatattttgctctactttcctaatggggaaacaaagtatgcttatgaggaccacctcagccgctttgtgtggttctttgcyggcatcgtaggcggaggcctgctgrtmmgtyactcgcaackgytttctstgywccttsksctsgarkgagwrgastgctktkkctscyggrgctgtgagaactatggcaagagatgcacaatgctttcttccataatggctgctctcattggcattgcgggatccggctactgcgtcatcgtggcggcactgggtttggcagaagggccaaagtgcggtgattcccacggcatgtggaactacacctttgccaacactgacggacagtaccttctggatcccactacgtggtccaagtgccatgagcctaataatattgtggagtggaatgtgacgctattttctatcctcttggcacttggtggacttgaattcatcttgtgtcttattcaagtcataaatggagwgyttgaagkmatrystarctawwkytsmtyyymyywacagcaatatgactgctgaaaggacacaagacagcactacatgctccctttgtttccctgtaacttgtatatttcactcgagttatgaaactttgtcctggtgtatcatattccatacattctgcttttataaagaaatgtgctgacatcatcacatgatgtcagtgtttgcatttatcaggcaaactttgtttaaaggatgaggcaacagactgcactcactctgaaggtattttgcagactgaatgaatgttcaactcttcaacatttaagataaaaatcacctttaactactgtgcatatgtgtattttaaataaaagatctccagtttcccttttaagatccagaaggacaggaaaacttcgaagagatgttgtttaaactgtttacatggtgtttcccatctctaagaggcccctctgaagtgagagagaagcgcttgcctggatttggaaagctcactgagaaagcgctaatccaagtacgtgagaagaaatacgcgaagcggccagtggctgtggacacaaccagaggctgaagccttctatcgtgtagaaagctttttgcccttcaaagacagagactgtgtagagaagaaggatagttggacgagaacgaagatgggaaatggaataaaacagttgatcaccgtggttgggaaaatcggttggtggagtggggactgaagaccacaaagggaatgcccccaaactcccttgttgagcataaaacraaatattctctaccgctgagctgttgtttttggttttatatgagaagaggcaacctctctggtcagacaatttatccgagtcgtgtagagaggacgtcttcctaactcttaggaagatctattaccttttgtggaagacaaagggtcctttcagggtgcaagctt

SEQ ID NO: 491 - DNA, 2074 bp, Mesocricetus auratus
  misc_feature (1345)..(1379): n is a, c, g, or t
ccggcgccggtccgcgcccccgccctgccccggccccggccccgggggcagtcactccagcaagcggtggggcaggagttcccggagtggcagcctctatagaagcgatgacagaatacaagctcgtggtggtgggcgctggaggcgtgggaaagagtgccctgaccatccagctgatccagaaccattttgtggacgagtatgaccccaccatagaggtgagctctggctacctgcctgggctctggcagtggtcatggaagagtcaggaaaggcccacacagctaggtcttgcaggtggtacgagtctgtttccacctgatctaacagggcatgagaggtgcaagggtaggcgggctcttggcatctctgaggagaggtggaacccctaagctctgttcttctgcaggattcctaccggaaacaggtggtcattgatggggagacatgtctgctggacatcttagacacagcaggccaagaggagtacagtgccatgagggaccagtacatgcgcacaggggagggcttcctctgtgtgttcgccatcaacaacaccaagtcctttgaagacatccatcagtacaggtgagttgcctatggctagcacagatgaggaaggtctgtgtacacatcgagggtttatgtcttctgagtgtcctgggtacagccatgtgtgtagcctgctggccagctcacatactccccatccccttctagggagcagatcaagcgggtgaaggactcagacgatgtgccaatggtgctggtggggaacaagtgtgacctggccgctcgaaccgttgagtcgcggcaggcccaggaccttgcccgcagctatggcatcccctacattgaaacatcagccaagacccggcaggtgagcttgctcccctctccacagctagtcagggactcaccccaccccacccccagccaggagcagagctcatcgcccctctccctcaacacagggcagccgctctggctctggctccagctccgggtccctctgggaccccccgggacccatgtgacccagcggcccccatgctgtaagtctcccagacggcagggctgtgagggaggcaagggccagggtctgggcttatgctgcagttctgggttgacacagcgccaggacaggagggggtcatggagagagctgccctgagccaggccggagcggtgacccaggggcttagtccttcctgtcttcatagtgtcctatggctacctgatagttttgagcccttaagtatggtcagggtgttcatatctgagccatactggggatctgggagagttctgagtcaggttgctctgaagaatattccagagtgannnnnnnnnnnnnnnnnnnnnnnnnnnnnnnnnnntgtgcgagtcccagctccctatttgtgttggttatgcagctgaggaagggttgttttccagggttggggtgttacctgatgcaggcagggagtttcttacccagacagtacaccttcctcctcagagttccctctgacccagtccctctgttcccagggtgtggaggatgccttctacacactagtacgtgagattcggcagcataaactgcggaagctgaacccacccgatgagagtggccctggctgcatgagctgcaagtgtgtgctatcctgacagcaggtgaggcagggaccagccgacatctggcagtggccccagctagccagatgaacttcatatccactctgatgtccctgctccccccatcctgccaattcccctgctgcggtcagtggtgtcctttgtgcccgtctcggcacaggctcacgacgtggaggtgccggatgcagggaggaggtgcagacggaaggaaggaaagagaagggaaggaaggaaggaaacgatgctggagccagtccagtccagggatggtggacagaggtgaccaagaccttcgcatggacaatttgaacagactgtcatgaactgtccctattgccactggcaccccagtcctcaacccctctcagttcctttgggcgcctatggggcacaggttgaatcacagtaaattatttgatggtcaaaaaaa

SEQ ID NO: 492 - DNA, 1888 bp, Cricetinae gen. sp.
atgggctgcaaaaacctgctcggtctgggtcagcagatgctgcgtcggaaggtggtggactgcagccgggaggagagcagactgtctcgctgcctcaacacctttgacctggtagctcttggggtgggcagcaccttgggtgctggcgtctacgtcctggctggtgcagtggcccgtgaggatgctggtcctgccattgtcatctctttcctgatcgctgccctggcctcagtgttggctggcccgtgctatggagagtttggtgcccgtgttccgaagactggctcagcctacctctacaggtacgtgacagttggggagctctgggccttcatcaccggttggracctgattctstcctacatcattggtacytcaagtgtgscaagagcytggagtgcgacttttgacgagctgatagscaaacccattggagagttctcwcggaaacacatggccctgaatgcccctggggtgctggcccmaaaccctgacatattagctgtgattataattctcatcttaacaggrttgttaacgcttggtgtraaagartcagccatggtcaacaaratcttyacctgtattaatgttctggtcttatgcttcatcatggtgtcgggrttcgtgaaagggtccattaaaaactggcagctcamggaggaggacttcttgaatagatccagccctctytgtggsaayaatgacacaaatgtraagyatggtgagggagggttcatgcccttyggattctctggcgycctgtcrggggcagcsacmtgcttttaygcctttgtgggctttgactgcatygccaccacaggtgaagaagtcaagaacccccagaaggccatycccgtgggcatcgtggcgtccctcctcatttgcttcgtagcttacttcggggtgtcygcagccctcacgctcatgatgccttackcctgcctggacacygacagcccrctgcctggtgccttcaagtacagtggctgggaaggagctaagtatrcagtggctgtcggctccctctgcgcactctcyrccagtctcctaggctccatgtttcccatgcccmgagtwatctaygccatggctgaagayggactactgtttaaatatttggscagagtcaacragaggaccammmccaccagtaattgctacactgacctcaggcgccattgytgctgtgatggccttcctctttgaattgaaggacctggtagacctmmtgtccattggcackctcctggcttactctttggtggctgccysygtrttrgtcttrargtaccagcccgarcaacctaayctggtataccagatggccagaaccaccgatgagttagatcatgtagaccagaatgagctggtcagtgccagtgactcccagacaggctttttaccagtaactgagaacttttctctgaaatccaaactctcacccaagaatatggaaccaacccaattctcaggcctaattgtgaactgttcaacaaccctcctaactaatcttatcatcatcgtgtgcattgtggccgtgctcccaagagagcctctggctgaagggacgctgtgggcagtctttgtaatgacagggtcagtcctcctctgcatgctggtgacaggcatcatctggaggcagcctgaaagcaagaccaagctcacatttaaggtaccctttgtccccgtacttcctatcttgagtatcttcgtgaatgtctatctcatgatgcagctggatcaaggcacatgggtccggttcgcagtgtggatgctgataggcttcagcatctacttcggttacggactgtggcacagtgaggaggcgtccctggctgctggccaggcaaggactcccgacagcaacttggaccagtgcaaatga

SEQ ID NO: 493 - DNA, 741 bp, Phodopus sungorus
ggtaacttgtttgtggtgagtctggccttggatgacctggtggtagccttgtactacccttacccactcgtggccattgtccatgatggttgggccattggagaggcccactacaaagccagtgcctttgtgatgggcctgagcgtcatcggctctgtcttcaacatcacagccattgctatcaaccgctactggtgcatctgccacagtgcaacctaccaccacgtctgcagtcactggcatgcccccttctacatcggcctcatctggctcctcactctggtggccttggtgcccaatttctttgtagggtccctagagtawgacccacgcayctattcctgcaccttcawccagacagccagcacccagtatactgcggctgtggtggccatccatttcctctttccaatcgctgtggtatccttctgctacctgtgaatctgggtgctggtgctccaggcccgaaggaaggccaaggctgacagtaagctgcacctaagacccgttgacttgcccagtttcctaaccatgtttgcagtgtttgtggtttttgccatatgctggggccccctcaactgcatcgcccttgcagtagccctcaacccagaggtgatggctctccgggtaccagaagggcttttcgtcaccaactacttcctagcttacttcaacagctgccttaacgccattgtctacgggctcctgaaccagaacttccgccaggagtacaagaggatc

SEQ ID NO: 494 - DNA, 1399 bp, Phodopus sungorus
  misc_feature (348)..(391): n is a, c, g, or t
tcctcaggttgagccacagagtggacagctgctaaccatggagaaccgagactctgtggcctccttgctacttctgctcttgctgctgccgccacctcacacccaccagggacaggtcctgagacatgttgtccctacccagaattcccaggattctccagctagatacctcagcaatggcccaggacaagagcctgtcgctgttatgacaattgacctcacccaaatgagcaaaccctattcctcctttgagtttcgaaccttggatccagagggagtgattttttatggggacaccaacaccaaagatgactggttcatgctgggacttcgggatggccagcttgnnnnnnnnnnnnnnnnnnnnnnnnnnnnnnnnnnnnnnnnnnnnggccctcggctgaatgatgggagatggcaccaggtggagctgaagatgagtggggactcactgcagctgtgggtggatgggaaagagctgctgtgcctgagacaaatctctggaaccctggctaacaattcctggcccagcatgaggattgcgctagggggactcctcctccccacctccagtcttcggttcccgctggttcctgccctggatggctgtttacgtcgagatacctggctgggccaccaggttcatctctcaccctctgcccctaaccttggaaactgtgatgtggacttgcaacctggactgttcttccctcaaggaacccatgcagaattcagtctccaagacattccccagcctcgcacagacccctggagcttttctctggaactgggattgaagctggtggatggctcaggatgcctccttgctcttgggacaagaacaaattcttcttggctttcccttcacctccaagaccaaaaggtggtgctgtcttctggartagaaccaaaattagttttagccttggacatggggctccctcttcagctgaagctggatatactcaaagtggttttaagccaaggaccaaagacggaggtccttgkcgcgtctgcttcaagacttgctgctctccggacactctggtctcaccctcagggccttctctcccttggggctttagcaggggacaactcttccgcttccttttgcttgagtgatctttgggtacaaggacagagactggacatagaccaggccctgaacagaagccagaacatctggactcacagctgccctcacagcccaaacaatgtctctcacatttcacactaaaccacctttgagaaggcatggtggtacatgcctgtaaatccagggcaggtggagttgggagaatcaggacctcagtgtcatccttgactacataacatgtttgaggccagcatgggcttatctgaaaccctgtcgttaaaaataaaaaggaactttgaatgc

SEQ ID NO: 495 - DNA, 1255 bp, Mesocricetus auratus
  misc_feature (106)..(123): n is a, c, g, or t
cttgcccactctggattctttcgggggcgtggcggggtgtggccagcgagggtatgagccccacccccgtgccagagcgcaaggaaggctgcagcggaccaagatnnnnnnnnnnnnnnnnnnagcggcggcgacagagcagcaaagttccaatgggccagtgaagaagtccatgcgggaaaaggctgtggagcgaaggaacgttaacaaggagcataacagcaactttaaagctgggtatatccctattgatgaagaccggctccataagaccggattgagagggagaaagggcaacttggccatctgtgtgattgtcctcctgtttatcctggctgtcatcaatctactcattactcttgtcatctgggctgtgattcgaattgggccaaatggctgtgacagcatggagttccatgaaagcggtctactgcgattcaagcaagtgtccgacatgggtgtcatccacccgctctataagagcacagtgggaggaaggaggaatgaaaacctggtcatcactggcaacaaccagccaattgtttttcagcaagggacaaccaagctgagtgtagaaaagaacaaaacgtctatcaccagtgacattggaatgcagtttttcgacccgaggacacaaaatattttattcagcacagactacgagactcacgagtttcatttgccaagtggagtgaaaagtttgaatgttcagaaggcgtccactgagaggattaccagcaatgctaccagtgacttaaatatcaaagttgatgggcgtgcgattgttcgtggtaatgaaggcgtgttcatcatgggcaaaacyattgaatttcacatggggggcaatgtggagctaaaggccgaaaacagcatcatcctcaatggaactgtgatggtcagcccaackcgcctgcccagttcctcaagtggggaccagtygggaggtggtgactgggtgcgctacaaactctgcatgtgtgccgatggcacgctcttcaaagtgcaagtaacgggccacaacatgggctgccaggtggcagacaacccctgtgggaacactcattagaagctccagccccagggtcaatatgatccgatctcagcttgaccttttcttttcatgaatgcatgtgaaccaggttttgcagtttgtgataacttgtatttgaactggggagcaccactgtatctgttacgtgctctccatatttaagggatttttgagtgcctaaattctaatatgctttattaagtt

SEQ ID NO: 496 - DNA, 1550 bp, Mesocricetus auratus
  misc_feature (1293)..(1310): n is a, c, g, or t
cagaaatcagtgtccacctcacactacacaaatgggattttaaatctttccagccgcgcagagctcggtccctcgtcaggaatcagttcctcagtggggtttctgagtcgctaagaagatggcacgagaacagtacaccacagtcacagagggcacccacatagagaggcccgagagccagcttgtccacaggatcgggatttatggctggaggaagcgctgtctctacctatttgttcttctcttgctcatcatccttgttgtgaatctcgctctcacaatctggattctgaaagtgatgtggttttctccaataggaatgggtcacttgcatgttacgcaagatggacttcgcctggaaggggaatcagagtttttatttccactgtatgtcaaagaaatacgctccagagtggactcatctctgcttctgcagtcaactcagaatgtgacagtcaatgctcgcaactcagaaggggaggtcacaggcagggtgaaagtgggtgcccaaatggtagaagtccagagccagcacttccagatccgttctgaagacggcaagccactgttcaccgccgaggagcggggtgtcatggtcgataccggcagactgcgagtaaccgggccagaaggcgctattttcgaacactcagtggagacaccccttgtcagagctgacccatttgaagaccttcggttagaatccccaacccggagtctaagcatggatgccccaaggggagttcacattaaagctcacacggggaagatggaggccctttctcaaatggacatcatcttgcagagtagtgatggagtgctggtgcttgatgctgagactgtgggtttgcccgagttggagcaagggacaccgggtccctctggcagttctaagggattctatgagatttgtgtgtgtcccgatgggaagctgtacctgtctgcggctgatgaggccaccacctgcgaggaacacagccacatctgtctctgaccactacctcttctgcagaacagatgttgtcttggtgagctgtggcctcagccttcatgtccctggcagctggacgggagctggtagattcactgctaagcacttagaagcttgcagggggagtgtgcccatggaaccattgggctagagtgcctgctttcagcatggcacaaagaaatgtcaagaacttagtcactggattttcatctttctagcctccttccacatctctcgtgttgaactgctgtctgcaagcagtttatagtactcaacagcagacatctatacacacacacaannnnnnnnnnnnnnnnnnctgactagtggattctaaaatgccccaactctgcacaacccttcctttacgttaagcctcaagtgctcccttcagtcaagtgcagtgtgtcaggttttactaagagatctccagagtttgaagggagtctgaagttgatagattttcaatatgtagttaggggaagaaattacacaaaattagtcatgctttttatacacataccaatgagcaataaaatgacattgcttttcagaccag

SEQ ID NO: 497 - DNA, 964 bp, Cricetinae gen. sp.
  misc_feature (854)..(869): n is a, c, g, or t
cccggtgtcgccgcgcctctcaggccccagatggaccttgggaaagacgagggaagcctgccgcagcccaccaggaagaagtttgtgatcccactggaagacgaggcccctcctgcaggggccaagcccttattcagatcctcacggaaccccagcaccacggccccctcggtcccagcggcccctcagacgtacgccgagtatgccattgcccagcctccaggaggggctgggcccacagggcccacaggctctgaacctgtgaagggagagaaccccggccagacggtgaaaacgggagcgaaatccaatagcatccttgtgagcccccggcagaggggcaaccctgtgttgaagttcgtgcgcaacgtgccctgggaattcggcgaggtgacccctgactatgtgctgggacagagcacttgcgcccttttcctcagcctccgctaccacaatctccatccagactacatccacgaacggctgcagagcctggggaagagctttgccctgcgtgtgctgttggtccaagtggatgtgaaagatcctcagaaggccctgaaggacctggctaaaatgtgtatcttagcggactgcaccctggtcctggcctggagtgccgaggaagcaggacggtacctggagacctacaaggcatatgagcagaagcccgctgacctcctcatggagaagctggagcagaacttcctgtcccgggccaccgagtgtctgaccaccgtgaagtcagtcaacaaaaccgacagccagaccctcctggctacatttggatcccttgaacagctcttgacggcatcacgggaggacctagccttgtgccccggcctgggcccccnnnnnnnnnnnnnnnnctttgacgtcctccatgaacccttcctcaaagtgccccgatgacccgaggtcgctgaggctacagygtcataataaagcattttccaggctgcgt

SEQ ID NO: 498 - DNA, 1527 bp, Cricetulus griseus
ctgggctacaagagacccttctgaaattttcaaatgaccatgaatggtaatggtggcacctcacgttcctattattcccctctctttgtaggactaccaggccatggatgtaccccgagcagccaagggacagtgtccctggcgtccgtgcctcatagggctgttgctgcagctgctgtttgctctgtgcttcttctcctacatccgagtatcccatgaccaacctggcccccctgctcctgatagctccacaggaccagcctccaccccaactacccctgtccccagacccttcctcatcttactgtggacatggsccttccacagsccactgactctgtacccctgttccaagatgctcccaggcaccgccgactgccagatgactgtcaaccggagcttgtacccccaagcagatgcagtcatcttccaccaccgagaaatcagccccaaccccaggtcactgctgccaagtcagccgaggccgccaggccagcgctgggtgtggttcagcctggagtcacccagccactgcagcaggctgtcagccctggatggatacttcaacctaaccatgtcctatcgcagcgactctgacatcttcacaccctatggctggctggagccgtgggcagagcctccagtccaaacccaggtcaacatgtctgccaagactgacctggtggcctgggctgtgtccaactggaaccccaagtcggctcgggtgctgtactatcagaagcttcagagtcacctccatgtggacgtgtatggccgaggacatatgcccctttcccgaggggacatgatggggacgctggccagatacaagttttacctggcgtttgagaactcacttcacccagattacatcacagagaagctgtggaagaatgctctggaggcctgggctgtgcccgtggtcctggggcccagcaggaagaactatgaacgcttcctgccccctgatgccttcatccacgtggatgactttgagagcccagcagacctggctcagtacctgcagaagctagacaaggacagccagagctaccagcgctacttccgctggagggagacgctcaggcctcgcttgtctagcatggcccttgccttctgccaggcatgcaggcagctgcagtgggaccagaggtaccagacggtccacagtgtggcctcttggttccactgaggtggctggccagagtcctgcaggcagtgtcccactcgaaagtcatcctctgtcgcccctggtgctagacactcccttgatgagcatctcagctgctcagagccttgattctggggtcttcatctttgctcactggggatgtgagttcccagaagcctgagctgtatcgagagaccctgctgctgacacactctacttcccagagccccaccctctcccactggtgggtggtgggtctgcctcaattgctcctggtgcacgacataagtaacgtctgaggtgcttgcagggatgtggtactgtcacagtgatccagatgagaccttattctgtca

SEQ ID NO: 499 - DNA, 709 bp, Cricetulus griseus
  misc_feature (178)..(195): n is a, c, g, or t
  misc_feature (263)..(284): n is a, c, g, or t
tagaattcmgcgkccgctgwayyskaggcagccatggcgcccagccggaatggcatgatcctgaagccccacttccacaaggattggcagcggcgagtggacacttggttcaaccagccggcacgcaagatccgcakacgcaaggcccggcaggsgaragcgcgccgcatcgcccctnnnnnnnnnnnnnnnnnnatcaggccgatagtgaggtgccctacagtgagataccacaccaaggtccgagctggcaggggcttcannnnnnnnnnnnnnnnnnnnnntggtatccataagaaagkggctcgaaccatcggcatctctgtggacccaaggagacgaaacaaatccactgaatcactacaggccaatgtgcagcgcctgaaggagtaccgctccaagctcatacttttccccaggaagccytctgctcccaagaagggagacagttctgctgaagaactgaaactggccacccagctaacgggacctgtgatgcgcatacggaatgtctacaaaaaggagaaagccagagttatcacagaagaagagaagaacttcaaggcttttgccagtcttcgtatggcccgggccaatgcccggctctttggcatccgagcaaaaagggcaaaggaagctgcagagcaagatgttgaaaagaaaaagtgatgtgctattggagtactgcaataaaactttgcataaagcg

SEQ ID NO: 500 - DNA, 1959 bp, Cricetulus sp.
  misc_feature (1041)..(1065): n is a, c, g, or t
gcgagagcgagcgctcttgggaggaacttgggcccgcggcggtcgattagtcaggcctcaggaagatggcgtcctcggagcaggcagagcagccgagccagccaagctcttctccaggaagtgaaaatgtggtgcctcgagagccattgattgccacagcagtgaagttcctacagaattctcgggtccggcagagcccacttgcaaccaggagagcatttcttaagaagaaagggctgacggacgatgagattgacctggctttccagcagtcgggcactgctacagaagagcctccatccttgggcctggctacgccagtggctcctgtccagaccccccacctcatcgcacagccatgcagccccggaagttcccgatggcgagattacggtgccttggccatcatcatggcaggaattgcatttggctttcaccagctctacaagaagtacctgctgccccttatcctgggaggcagagaggacaggaagcagctggagaggatggcatcgagtctctccgaactgagtggcagcgtggcccagacagtgactcaggtacagacaacgctggcctctgtccaagagctactgagacagcagcagcagaaggtccaagagctggcccatgagctggccgctgccaaggccaccacatcaaccaactggatcctggagtcccagaatatcaatgagctcaagtcggaaatcaactccttgaaagggcttctcttgaataggaggcagttcccgccctccccatcagccccgaagattccctcctggcagatcccagtgaagtcgccctcgccctccagccccgcggccgtgaaccaccacagcagcagcgacatctctcctgtcagcaacgagtccacatcatcctctcctgggaaggagagccacagccccgagggctccacggccacctaccacctgctgggcccccaggaggagggggagggggtggtggacgtcaagggccaggtgaggatggaggtgcagggggargaggagaagagggaggacaaggaggagnnnnnnnnnnnnnnnnnnnnnnnnngtgagccacgtggatgaggaagacgtgcttggggtgcagagggaggaccggcggggcggtgacgggcagatcaatgagcaggtggacaagcttcggcggccagagggcgccagcaacgagagcgagcggcactaggtgggcgcttgcttgcccgccttcccagcgccccaggacatcagtggcaggtgggcatgagcgtggctctgcctccatgagggtggctggcaacccaggtaggggtgaggctgtcctcagctgcagcagtgtggggttcctccgttcaccakcctcccaaacacctcccccagccctggtggctctggctgttggaggccaagcggaggactccagagccctgtgctcacacccctgcctacccctcctggacaggtgtcctgtccaggtgtgtcctctgaggatcttgactacctgacaccatgcatggccagagctcatgtcatctcctgcctcctgtcaccttagtgcagggggctgtggcccccatggtcttgctgtctcctactgtgccctggcttggcctggggcttcttttttgcctgttccaaaagccagagccctggacctgctcttcatctgtgggcctgccaggacccagcctccctacaaccaggtcctggctgacagatgctcccacctgccctgttgtcctgtataccacacaagaccatcctcgcttgctgtgtcatggtttggctactcagtggtgaggtgtgcttctccctcctgcagtggagccaggcagcagggccttcctgaccaacagccacatctgtcctgcccactgagaaacatgttcatttatgtgatcatgtatagatttcagaatataagatatgactgtacatattgtaataaatatgagttgccatattt

SEQ ID NO: 501 - DNA, 1152 bp, Cricetulus griseus
  misc_feature (1129)..(1147): n is a, c, g, or t
ccttagaaaaaccctaggagttaggattggctctcctgctgcgcggggaacytcagrrtccgtgcyctgtaaccgcctcyctstgaacacccagccatgycgtccwscagscgcgtggcgctggtraccggggctaacaagggsatcggcttcgccatcackcgtgasctgtgtmgcaagttctckggggacgtggtgctcaccgcgcgggacgaggcgcggggyaaggcggctgtgcagcarctgcaggcagagggcctgagtccccrcttccaccagctggacatcgacgacctgcagagcatycgcgccctgcgcgactttctgctcaaggagtatggggggctcgacgtgctgatcaacaatgcgggcatcgccttcaagaatgctgacccaactcccttccacattcaagcagaagtgacaatgaaaacaaacttttttggtacccaagatgtctgcacsgagctactccctctaawaaaaccccaaggcagagtggtgaatgtatcaagyatgswsagyctcakggccctgaaaaactgcagtcyggagctgcagcagaartttcgaagtgacaccatcacagaggaggagctggtggggctcatgaacaagtttgtggaagacacaaagaraggratgcatgagaaggaaggctggcctaatagtgcttatggggtgaccaagattggggtgacagtcctgtccrgaatccatgcccggraactcagccagcagaggagagmwgacaagatcctcctcaatgcctgttgcccagggtgggtgagaacagacatggcaggaccaaaagccmccaagagyccagaagaaggagcagagacccccgtgtacttggcccttttgcccccagrtgcagaggggcctcatgggcagtttgttcaggagaaaaaagtagaacaatggtgaactcaactcttccccyctccccayagcaccctctcyctagytgtawcctgtcttggtgaggactgtggacatttatratctgctgacacaatatactaatttaactctcattaattacwtgagtcattgacccttgtrattctrtgaawtaytttatgattctgtctgtgwtacaggaaagagaaaaagtaaattctcnnnnnnnnnnnnnnnnnnnctggt

SEQ ID NO: 502 - DNA, 1924 bp, Cricetulus griseus
  misc_feature (775)..(799): n is a, c, g, or t
  misc_feature (972)..(995): n is a, c, g, or t
atggcaatgagggagctggtggagggcgaatgtgggggtgccaacccgctcatgaagctggccactcacttcacccaggacaaggcccttcggcaggagggactgaggcctggcccctggcccccgggagcctcagctgcagagacggtttccaagcctttgggagtaggttctgaagatgagttggtggcagaattcctgcaggaccagaatgcaccccttgtatcccgtgcccctcagaccttcaagatggatgacctcttggcagagatgcaggagattgaacagtcaaactttcgccaggctcctcagagagcccctggtgtagcagacttggccttgtctgagaattgggcccaggagtttcttgcggctggagatgctgtggatgtagctcaggattataatgagactgactggtcccaagaattcatcgctgaagtcacagacccattgtctgtgtcccctgcccgatgggctgaggagtatctggagcagtctgaggagaagctgtggttgggagagccggaaggatcatccaccactgatcgatggtatgatgactatcatcccgaggaggatctgcagcacacagccagtgactttgtgtccaaggtggacgaccccaaattggctaactccgagttcctgaaattcgtgcgacagattggcgaggggcaggtgtccctggagtctgctgcagggtcgggccgagctcaggcagaacagtgggcagcagagtttatacagcagcagggcacatcagaggcctggnnnnnnnnnnnnnnnnnnnnnnnnnacacgtctgccctggatgtagaatttgaacgagccaagtcagctatagagtctgatgtcgatttctgggacaagttgcaggcagagttggaggagatggcaaaacgggatgctgaggcgcacccctggctttctgactatgatgacctcacatctgcttcctatgacaagggnnnnnnnnnnnnnnnnnnnnnnnncctgcgtgaccaccctcaggctttcgaagaagggcttcgtcggcttgaggagggggacctgcccaatgccgtgctgctttttgaggctgcagtgcagcaggaccctaagcacatggaagcttggcagtatctgggtaccacccaggctgagaatgagcaagagctcctggctatcagtgccctgcggaggtgtctggagctgaagccagataaccggacagcactgatggccctggctgtaagcttcaccaacgagtccctgcagcggcaggcctgcgagaccctgcgagactggctgcgctactcaccggcctacgcccatctggtgactcctggtgaagaaggggcgagtggggcaggactgggtcccagcaagcgtgtcttgggatccctgttgtctgactccctgtttcttgaagtgaaagagctcttcctggcagctgtgcgtctggaccctacatccattgaccctgacgtgcagtgtggcttgggagtcctcttcaacctgagtggggagtacgacaaggctgtggactgttttacggctgccctcagtgttcgtcccaatgactatttgttgtggaacaaacttggggccacactggccaacgggaaccagagtgaagaggcagtggctgcgtaccgtagagcccttgaactacagcctgggtatatccggtsccgctataacctargcatcagctgcatcaaccttcggggctcaccgtgaggctgkkgaacactttctggaggccctgaacatgcaraggargagccggggccctcggggtgaggggggcgccatgtcagagaacatctggagtaccctgcggttggccttgtctatgttaggccagagtgacgcctatggggcagctgatgctcgggatctgtctgccctcctagctatgtttggcctgccccagtga

SEQ ID NO: 503 - DNA, 1779 bp, Cricetinae gen. sp.
  misc_feature (277)..(295): n is a, c, g, or t
  misc_feature (1474)..(1479): n is a, c, g, or t
  misc_feature (1680)..(1694): n is a, c, g, or t
atggaagggaagtggttgctgtgtatgttactggtgcttggaactgctattgttgaggctcatgatggacatgatgatgacatgattgatattgaagatgatcttgatgatgttattgaagaggtagaagattcgaaatcgaaatcagattccagtactcctccatctccaaaggtcacctacaaagctccagttccaacaggggaagtttattttgctgactcctttgatagagggtctctatcagggtggattttatctaaagccaaaaaagatnnnnnnnnnnnnnnnnnnnccaaatatgatggaaagtgggaggtagatgaaatgaaggacacaaagcttccaggtgataaaggacttgtactgatgtctcgagccaagcatcatgccatctctgctaaactgaacaagcccttcctgtttgacaccaagcctctcattgttcagtatgaggttaattttcagaatggaatagaatgtggtggtgcctatgtgaagctgctttccaagacctcagaactcaacttggatcaattccacgacaagactccctatactaaaatgtttggtcctgataaatgtggagaahactacaaactgcacttcatttttcgccacaaaaaccccaagacaggtgtatatgaagaaaagcatgctaagaggccagatgcacatctgaagatgtattttactgacagaaaaactcatctttacacattagtcttgaatccagacaatagttttgaaatattagttgaccagtttattgtgaacagtggaaatctgctaaatgatatgactcctgctgtaaacccttcacgtgaaattgaggacccagaagaccagaagcctgaggattgggatgaaagacccaaaataccagatccagatgctgtcaagccagatgattgggatgaagatgcccctgctaagattccagatgaagaggccacaaagcctgaaggctggttagatgatgagcctgagtayatyccagacccygatgcrgacaagccagaggattgggatgaggatatggatggagaatgggargctcctcagattgccaaccctaaatgtgartcagcccctggktgtggagtcyggcagcgacctkwgattgacaaycccaattataagggcaaatggaagcctcccatgattgacawtcctaactaccagggagtctggaaaccaaggaaaataccaaatccagatttctttgaagayctagaaccttttaagatgackcctttyagtgctattggtttggagctstggtccatgacytctgacatyttttttgacaactttatcattagtggtgaccgaagrgtrgttgatgattgggccaatgatgggtggggcctgaagaaagctgctgatggggctgcygakccaggtgtagtggggcakatgctggargcagctgaagagcgtccgtggctstgggtggtctacattctgactnnnnnnttgccagtgtttcttgtgatcctcttctgctgctccggaaagaaacagtccagtgctatgcagtacaagaagacagatgctccccagccagatgtgaaggaagaagatgggaaggaagaagagaagaacaagggggatgaagaggaagaaggagaagagaagcttgaagagaaacagaaaagtgatgctgaagatgatggnnnnnnnnnnnnnnnagatgaggaagatagaaaacctactgcagaggaggatgaaattttgaacagatcaccaagaaacagaaagccacgaagagagtga

SEQ ID NO: 504 - DNA, 2194 bp, Cricetulus sp.
  misc_feature (941)..(1035): n is a, c, g, or t
  misc_feature (2027)..(2105): n is a, c, g, or t
aaaaatagcaaaatctgaacccccaacattagcacagccatcaaaatggtcttcaaattttaaggactttctaaagaagtgcttggaaaagaatgtggatgcccggtggactacatctcagttattacagcatccctttgttactgttgattccaacaaaccagtccgagaattgattgctgaggcaaaggctgaagtaacagaagaagtagaagacggcaaagaggaagatgatgatgaggaaacagaaaatgctctgccaatacctgcaaataaasgtgcctcctctgacctcagtattgccagctctgaagaagataaactttcacaaaatgcttgcattttggaatctgtttcagaaagaatagaacacaatactcctggggataaatttagcaataaagttcttaatgaaagacccaccactgatgaacctggaaaggcactgaasggtgttaatgagcatatgggtgattctaacttggaatctatggctgaactcagcgaccaaacagtttgaatccatgatcatgggagggagaakagacccaaactggwkawtcctcctgwcacasaasaccaacagctggtggatattaattcagtccgtgaaggaaatgaggagaatatagtgactttagagatgaacactaaccatgtgaaaccagaggaagaccgagaaaaagaaaaccaagagatacctgagaataaacttagacagtctgaagaaattaaagatatgaatattcaaacaatggacttagtttctcaagagaccggagaaacagaggcagactttcaggcagttgacagtgaagttgggtttacaaaagcagatggtcaggagaaactgagaaaagatgataacactcaaaaagttgtaattaatgatagaatcagtgaggtagtggcaaatgaggcactagatgttgctgagaagnnnnnnnnnnnnnnnnnnnnnnnnnnnnnnnnnnnnnnnnnnnnnnnnnnnnnnnnnnnnnnnnnnnnnnnnnnnnnnnnnnnnnnnnnnnnnnnccctgaggctggcagtgctgaggaagagccttctgctcaaggaagagttgagaataaagaggtacatcaacagtctgcggtgtgtgaaggtgacggacagttcatcagcacttccgtgaccacacaggcaacccctgaggaaccagggacagatgaagttgagcaagttagtgagtcacatagcactgaggagagagagccaagcccagtgtctggtggtgctgaggaacagactccaggaagtgaagctgtggccgctgctgctgaggtagagttggagggcagagaagctgcacaggaagtaccagtgaaagcagagcccgaagctcctgcagcctcaccgtccaacgagcctcatcttatcctaatacccagtatcaatattaactctgaaaacacagaaaataaaggagagttgggtgatttaccaaaaactgaaagcattctgccaccagagcctgaaaatgaaaaggaaaatgacactgactcagggactgggtccactgtggagaagagcagcagtgacttgaatttgtccatctctagcttcctaagcaaaactaaagacagtgggtcaatgtcactacaagagacaagaagacagaagaaaacattgaagaaaacacgcaaatttattgttgatggtgtagaagtgagtgttacaacgtcaaagatagttacagatagtgactccaaaactgaggaattgcggtttctcagacgtcaggaacttcgagagctgagatttctccagaaagaggagcagagggcccagcagcagctcaatggcaaactgcagcagcagcgggagcagattttcaggcgctttgagcaggagatgatgagtaagaagcgacaatatgaccaggaaattgagaatcttgagaagcagcagaaacagacaattgaacgactagaacaagaacatacgaaccgcttgcgagatgaagctaaacgaatcaaaggagagcaagagaaggagctgtccaaannnnnnnnnnnnnnnnnnnnnnnnnnnnnnnnnnnnnnnnnnnnnnnnnnnnnnnnnnnnnnnnnnnnnnnnnnnnnnntgaaaaagatcatccaaaacagaaggcagagttggctaatattgagagagagtgtttgaataacaagcaacagcttatgagagctcgag

SEQ ID NO: 505 - DNA, 1234 bp, Cricetulus griseus
gagagagagaaatggaaaaatgagagcgtagtgtggcccaagaagaggacgagcgcaggaagcgcgcggccgctgtggggtggatgtgtgaagttttcaggcgtttaccggggacagcccccgggtcctctccccccgcccccgccacgcaccggctgaggctgctcgggagggagctgcggttcgccgcttcatgattttctgccgattctgggcaaagatggccaccaatgatgctgttctgaagagactaggagcaggaagggtgcagaggctgaccaggatcattgagtatctcaagcagcaggttgctcttctcaaggagaaagcagttttacaggcaactttgagagaagaaaagaaacttcgagttgaaaatgctaaactgaaaaaagaaatagaagaactaaagcaagagctaattcaggcagaaattcagaatggagtgaagcaaattccagtgccagtccaatctgatactccagtgcaagctagctctgcagtttctacaagtgtgatacagtctacatcggtatcaaccatctcttgtagtataaaagaacacagtaaaggagggggagaagaaaagaaggtaaaagagaaaactgataagaaaggagagaaaaaggagaagaaactgcagtcagcagcaccaagtgctgactcgaagccagtagatgtttctcgtctggatcttcgaattggtcgtattgttactgtcaaaaagcacccggatgcagactcactgtatgtagaagaagtggatgtgggggaggcagccccaaggacagtcatcagtggactggtgaatcatgttcctctagaccagatgcaaaatcgaatggtggttttactttgtaatctgaagcctgcaaaaatgcggggaatactgtctcaagcaatggtgatgtgtgctagttcaccagagaaagtggaaattctggcccctcccaatggatctgttcctggagacagaattacttttgatgctttccctggagagcctgacaaggagctgaaccctaagaagaagatctgggagcagatccaacctgacctgcacaccaatgctgagtgtgtggccacatacaaggggtctccctttgaggtgaaggggaagggagtttgcagggcccaaaccatggccaatagtggcattaaataagtactctgttactgaaggccatggagaaaccttagtaacaataaagaggagtatattgtcacacacaca

SEQ ID NO: 506 - DNA, 2475 bp, Cricetulus griseus
  misc_feature (1781)..(1818): n is a, c, g, or t
  misc_feature (1861)..(1879): n is a, c, g, or t
  misc_feature (2284)..(2340): n is a, c, g, or t
tgaggcgggtcagctcagtcaaagcacccgccctcctgcgttaaacgagccagctaagcgcacgccccggaaacgagctgtgcactccagaactgtaaacctgtttggcagcagcaactaaacacagaaaacaccatggcagagcaggtggccctgagccggacccaggtgtgtggcatcctgagggaagagttgtaccagggtgatgccttccaccaagctgatacacatatatttatcatcatgggtgcatcgggtgacctggccaagaagaagatctatcccactatctggtggctgttccgggatggccttctacccgaagacaccttcattgtgggctatgcccgctcccgactcacagtggatgacatccgcaagcagagtgagcccttctttaaagccaccccagaggaaagacccaagctggaggagttctttgcccgtaactcctatgtggctggccagtatgatgatccagcctcctacaagcacctcaacagccacatgaatgccctgcatcaggggatgcaggccaaccgcctattctacctggccttgccccccacagtctatgaagctgtcaccaagaacattcaagagacctgcatgagtcagacaggctggaaccgcatcatagtggagaagcccttcgggagagacctgcagagctccaaccagctgtcgaaccacatctcctctctgttccgtgaggaccagatctaccgcattgaccactacctgggcaaggagatggtccagaacctcatggtgctgagatttgccaacaggatctttggccccatctggaaccgagacaacattgcctgtgtgatcctcacatttaaagagccctttggtactgagggtcgtgggggctactttgatgaatttgggatcatcagggatgttatgcagaaccacctcctgcagatgttgtgtctggtggccatggaaaaacctgcctccacagattcagatgatgtccgtgatgagaaggtcaaagtgttgaaatgtatctcagaggtggaaaccagcaatgtggtccttggccagtatgtggggaaccccaatggagaaggagaagctaccaatgggtacttggatgaccccacagtgccccgtgggtccaccactgccacctttgcagcagctgtcctctatgtggagaatgagcggtgggatggggtacccttcatcctgcgctgtggcaaagccctgaatgaacgcaaggctgaggtgagactacagttccgagatgtggcaggcgacatcttccaccagcagtgcaagcgtaatgagctggtgattcgtgtgcagcccaatgaggctgtatacaccaagatgatgaccaagaagcctggcatgttcttcaaccctgaggagtcagagctggacttgacctatggcaacagatacaagaatgtgaagctccctgatgcctatgaacgcctcatcctggatgtcttctgtgggagccagatgcactttgtccgcagtgatgaactcagggaagcctggcgtatcttcacaccactgctgcacaagattgatcaagagaagccccagcctatcccctatgtttatggcagccgcggccccacagaggcagatgagctgatgaagagagtgggcttccagtatgagggcacctacaaatgggtgaaccctcacaagctctgagccttgggaacttataccatctgcactctgccccttttggacaccctttctgtgtctatccttcttaccacctaacctcatatttggactattagccnnnnnnnnnnnnnnnnnnnnnnnnnnnnnnnnnnnnnncacattccagtccctgggctcgtgccaccactctataccctannnnnnnnnnnnnnnnnnnaccactgccaccaccaccatcactgctgctgctgctgttaccaccaccactgaccccagctacattcctcaactatcaaattctccaagttctcaaaactcactgtaatgctttcagggccaccattgaccctatctgagccacccatctctccacaagaagcaaatcacctcctcccctcactccagcccctgcaaagggaagaagaacagcctatcagtctgtccctagactcctcaagacaggagttaggaacaatggggaggaaccttgagcctcagagggataaagaccaaaccacactccctagtgtctatgggcaagctcctcaaaattcaaatgaaatggtcaaggacacccatgtgagaagacctgcccatggccacaccagcttcagtgccactnnnnnnnnnnnnnnnnnnnnnnnnnnnnnnnnnnnnnnnnnnnnnnnnnnnnnnnnnctagagatgtcccctaaccaactccatactccatggtcatcatcccacccacaggcagccttctcaccaaaggaaggcagaagtagcagctatgatttccctaccccaaccttgcaattaaatcctccaacagtt

SEQ ID NO: 507 - DNA, 1015 bp, Cricetulus griseus
tttggggaccccswcccatcgaagactctcgctgtgaggtgaggttctctgaagagggatgtgcaaagtccctgctctggcttctaccccctcaacgacttcgcaggacagcgggggcctaggccgtcctgcgcgtgattctggaagccggggcctcgstcswscywsggskggggsttsctcttcaccgacggacttaagccgaggcctakcgcctcagtactggagtgcagagctcaattctgagcacattgtcttctccacggcctgcgctcactgccwgggggacgatggmttcctgtgtcctcctacacactggacrgragatgcctctgattggkctggggacatggaagagtaaccctggccaggtgaaagcagccattaaatatgcccttagtgtakgctaccgccacattgattgtgctgctgtctatggcaacgagattgaaattggagaggccctgaaggaaaatgtgggaccaggcaaggcagtgcctcsagaggagctgtttgtgacatccaagctgtggaacactaagcaccaccctgaggatgtakaagctgccctccsgragacactggctgatctccarctggagtatctggacctctacttgatgcactggccttatgcctttgagaggggagacaatccatttcccaagaatgacgatggaaccatccgctatgactcaacccactacaakgagacctggaaggctctggaggcactggtggcaaargggctggtgaaagccttgggcttgtccaacttcaacagtcgacagattgatgatatcctcagtgtggcctctgtgcgcccagctgtcttgcaggtggaatgccatccatacctggctcaaaatgagctcattgctcattgtcaagcacgaggcttggaggtgactgcttatagccccttgggctcctcagatcgtgcgtggcgccatcctgatgagccagtcttgcttgaggaaccagtggtcttggcactagctgagaagcatggccg

SEQ ID NO: 508 - DNA, 1450 bp, Cricetulus griseus
  misc_feature (620)..(646): n is a, c, g, or t
tctaaagcggtccccgcggaccccgctgccccggcggcgcggccatgaagctgaagctgaagaacgtgtttcttgcctacttcctggtgtcgatcgccggcctcctctacgctctggtgcagcttggccagccatgtgactgcctccctccgcttcgagctgcagctgagcagcttcgacagaaggacctgaggatttcccagttgcaagctgatctccgtcgaccaccccctgtcccagcccagccccctgagcccgaggctctgcccactatctatgtcattacccccacctatgccaggctggtacagaaggcagagctggttcggctgtcccagaccctgagcctggtgccccgtctacactggctgctggtggaggacgctgagagccctaccccgctggtctcggggctgctggctgcctctggtctcctcttcacacacctggctgtcctaacccccaaggctcagcggcttakggaaggcgagccargatgggttcggccccgaggagtakaacagcgcaacaaggccctggactggctccgakgcaaagggggtgctgttggcggkgagaaagacccaccaccaccagggacccaggragtggtgtatttnnnnnnnnnnnnnnnnnnnnnnnnnnnggagctctttaaggagatgcgttggactcgtggtgtctcagtgtggcctgtggggctggtgggcggcctgcgatttgagggtcctcgggtacaggatggccgggttgtgggtttccacacagcatgggaacccaacaggccctttcccctggacatggcgggatttgctgttgccctgcccttgctgttggctaagcccaatgcccagtttgatgcaactgcaccccggggccacttggagagtagtctcctgagccatcttgtggatcccaaggacctagagccacgggctgccaactgtactcaggtactagtgtggcacacacggacagagaaacctaagatgaagcaggaggagcagctgcagcggcagggccagggctcagacccagccattgaggtgtgatggcagcctcaccctgacttctaccttattttaggcacataccttgtgggactgggctccaggccagtccaggatgtggttttttaaaaagacctgacccctcagaaccagaggcagcccctccaaccacagggtgtggcccagctgcttccctcccttcccccagcctgccatgtggcactgcccacaggctggggacaagcagttgttgtattgagccaggtcagccccatctggggtggagcaggacagatggactcaggagggagggtggctgagggaactgggtaacttattggggacaagcatgcactggggggctagaggagctgggctggaccctccccacctgagcatgcggatcctcttcctacctctagaataaagaatctcaacct

SEQ ID NO: 509 - DNA, 2755 bp, Cricetulus griseus
  misc_feature (711)..(736): n is a, c, g, or t
  misc_feature (2479)..(2493): n is a, c, g, or t
gcggccccgccagcaccgcccctcggccccccgcggccggccggcaactataaagtcagacgcgctgcgcgccgcccgcgtcccgtcccgtccgcgcccggtgctccgtgccccttgccccgtgggtgctcgtgctccctgcgctctgctggccttgctatggctcccacccgcgccaggcccacgccacccctgctcctcgccctggtggccgttgtgattccagggcctggtagtgctcaagtatccatccaccccaaagaagccttcctgcctcggggtgcatccatgcaggtgaactgctcttcctcctgcagcgagaacctcagcctgggcttggagactcagtggcccaaagtagagctggatcatggacacaattggaagctgtttgaactgagtgacattggagacgacagcaagccactgtgctttgagaactgtggccctatccagtcctcagcctctgccaccattgtcttgtactcattcccggagcgagtggagctggaccgtctgcccacctggcaacctgtgggcaagaacctcaccctgcgctgcctggtggatggtgggacaccacggagccaactctccgtcaagctgctccgaggtggggaggtgctgcaccaggagccagtgggtgtggactccaggaaccccaaggaggtcacagtcacggtgctggcaagcagagatgaccacggagcnnnnnnnnnnnnnnnnnnnnnnnnnnacctcaggccacaagggctagcactgttcccgaatgtctctgtgattaggcagctctggacttttgaccttcctgtgaccgagccgaagcttgacaccccagacctcctggaggtgggcacggtgcagaaagtgatgtgctccctcggaggcctgtttcctgccgctgaagcccggataactctggagctgggaggccacacactgacctccaagagcacaaaccacagagacttggtgtcagccaccgccttggtgactgcggagatggagggaactcagcagctgcgctgtgtcttggagctggcagaccagatcctgaaggcagagaggactttgagcatctacaatttttcagctccggtcctgaccctgagccagcaagaggtctcagaagggagccaggtgactgtgaagtgtgaagctcaaggaggggcccaggtgcggctgagtggtgctccgcccgggcaggtccagttcacgctgaatgccagctctgaggatcacgagcgaatcttcacttgctctgcggccctgagggtggctgggcaggagctgttaaaaaatcagaccctgaaactccacgtgctgtatggsccccggctggatgagaacgactgcccggggaactggacctggcccgaggggtctcagcagaatctgagttgccaggcttttgggaacccaccccccaagctaacctgcagccggaaaacagatggagccctgctgcccatcggggaagtgaagactgtcacatgggccatgaacggtacctacgtgtgccatgccgtgagctcccatggaaatatcaccagggaagtgttcctgaaagtgcttccaaaatctccgatatggcccatcatcatcattgtggtaatactggctactgtggtctttgtgggggtcctgaccatttacatttataaccgccagagaaagatcaggatatacaagctacagagggcccaggaagaggccatgaaactcaaggtcccgcctcactgagccacaagaacaccaacacctccctgggcgtcccctgcgggcagcagctagtgctgcttttgaacagaaaggtagacaaacagtgtttaccctcaccacctcaggctgtgacaagacaagatgtggcctggggatgcacccaatcagacctccttggcctcacacttgtggcctcaggactgtgaggagaggacctgacaagatcaagggtgtgtttctgtgaactggacacacccacagcctgtgggcctccagtcaggaaatgctgacctcattacctattgcccatgctggagcctctgcctaakgaggagygatatccaatakatacatagcaaagttggaacacaagagtatacttcctctgactcakgaacgctgggacattgyccccaactctycatgatgatgtatttattaaagttttacctggaggttggggatgtagctcagtggtagagcccttagcaaggccctggggttggtcctcagctccaaaaagagaaaaaaagttttacctgctatttattgagtaccttgatactagagcagcaagcaggttcttgtcaggatagtgttgcagggactggatatacaacagagcccggagagaggttcacatagggctaggggtgcctctgttggtcaggatgcttttcccaaaagagccatcacaagaatactaagtgatctaacagtggctccctgctcgtaggcctctcttggagtcctgacnnnnnnnnnnnnnnnagtaaccacttccccacctacatacattcctacctttgctccccgtgtcaaccaccatacccaaatatggatgcccacccttggcagctaaacaggggagtctcatgctcatgaaatcgtggtcaatccctgcctggttccacctcaaacaaagcctgcaagaagatgctgcaactacttaggagggtcctgcaagctggggggtggggggtacaacactcccagctcagaagactttcatttgagtcaataaagtgttatg

SEQ ID NO: 510 - DNA, 812 bp, Cricetinae gen. sp.
cggcacgrgtggtgaacgmggctccggcaccatgtctggttygtctggcccactatsytggcctggccctcgcccgtgtgcgttgctctttctgytcctgctcggccccagctcggtgctcgccatctccttccatctgcccgtgaactctcgcaagtgcctccgcgaggagatccacaaggacctgctrgtgacgggcgcgtacgakatcaccgaccagtccgggggcgcaggcggcctgcgcacccatctcaagatcacagattctgcrggccatattctgtatgccaaggargatgcmactaaggggaartttgcyttcaccacggaagactatgacatgtttgaagtgtgttttgagagcaagggaacagggcggatacctgaccaactcgtgattctagacatgaagcatggagtagaggcgaaaaattatgaagagattgcaaaagttgagaaactcaaaccattggargtggagttacgacgcctagaggacctttcagartcaatcgttaatgaytttgcctacatgaagaagcgggaagaggagatgcgygacaccaatgagtccacraacaccagagtcttgtacttcagcatcttttccatgctctgcctcattggactagccacctggcaggtgttctacctgcgtcgcttcttcaaggccaagaagttgatagagtaatgaggctcagtcttctgtcccctggtatctcagccagcagaacatcgctgggacgtgcctggcctggctcaaggccatcctactaacagtaccatcaaggcacagtggagctttcttgcca

SEQ ID NO: 511 - DNA, 700 bp, Cricetulus griseus
  misc_feature (672)..(672): n is a, c, g, or t
agaatcctacctataagttctttgagcagatgcagaactagacaaccgccacagcagcagcctccgaacttggacagcaaaaccattgcttcactacccatcggtgttcatttataaaataacgtggaaagaaacaagcccttctggtttattatttactcatmatcgccttttgacagccgtgctgtaacacaagtakatgcctgaacttgaattaatatacaaatcagtaatgtattctctctttctctctttatattctggtctctacactacattattaatgggttttgygtactgtaaaaaaaaaattasctgyatcaaactagygcatgawtagattctctcckgatwattkatyacacacatagccccatakcccgtkgtatattattmttgtggwtwgwgacacaatywactcctacttgaaatacgctttaaaaatcgatgggggatgcttcgtgtgaacstgggcatttagctgcttctctgkctaagtgtkmttttcmcgatcactatgcattttaaacattgttgagtattccaaatgatttaggaaaatttttccatgattgcatttactgtacagattgctgcctctgctctgtttgtggcatagggtgcgaggatacacattgatttctttgtgcctgttttatgtgcacacattangcattgagaatttgaacttttttttttt

SEQ ID NO: 512 - DNA, 2403 bp, Cricetulus sp.
gggggggggccggctccgcggcaggacggggagaagggccatggcgtcgtgcgtggggagccggacgctgagcaaggacgacgtgaactacaggatgcatttccgcatgatcaacgagcagcaagtggaggacatcaccatagacttcttctaccggccgcacacgatcaccctgctcagcttcaccatcgtcagcctcatgtacttcgccttcaccagggatgactctgttcctgaagacaacatctggagaggcatcctctcagttattttcttctttctcatcatcagcgtgctggcgttccccaacggtccatttaccagacctcatccagccttgtggcgaatggtttttggcctcagtgtgctgtacttcctcttcttggtatttctccttttcctgaacttcgagcaggttaaatccctaatgtattggctagatcccaatcttcgatatgccaccagagaagcagatatcatggagtatgctgtgaactgccatgtgatcacctgggagaggatcgtcagccattttgatatatttgcatttgggcatttctggggctgggccatgaaggccttgttgatccgtagttatggactctgctggacaatcagcatcacctgggagctgacagagctgttcttcatgcatctgctgcccaactttgccgagtgctggtgggaccaggtcattctggacatcctgttatgcaatggtggtggcatctggctgggcatggttgtttgccgatttttggagatgaggacttaccactgggcaagcttcaaggacatccataccaccacagggaagatcaaacgtgctgtgttacagttcacccctgctagctggacttacgtcaggtggkkkgaccctaagtcttcctttcagagagtggctggggtataccttttcatgatcatctggcagttgactgagctgaataccttcttcttgaagcacatctttgttttccaagccagccaccccttaagctggtgtagaattctcttcatcggctgcattacagctcctacagtgagacagtactatgcttacctcaccgacacacagtgtaagcgcgttgggacacagtgctgggtgtttggggtcattggctttctggaagctattgtttgcataaaattcggacawgatcttttctctaagacccakatactctacgttgtattttggcttctttgtgtggccttcaccacgttcctgtgtctgtacsgcatgagttkggttgcasagcactatggtcaccgggaaaagacctattcagagtgtgragatggcactccagagatctcctggcatcatgggaaaggctcaaaaggttctgaagacagccctcccaagcattcaagcaacaacgaaagccattcttccagaagaaggaaccggcattccaagtccaaagtcaccaatggagttggaaagaaatgaaggagcctcattaatttcagatgttccagagagtgcctagacctgagagggcaacagaacacattgggaccttcctatgtggagatcaaaatgtacagaacacacagaaggaacagagggggctttggggatcatgattggagagtgtaagtcttgtctcccatagctctgaacatacattaggctgaccatgacttggggtcctttgccaacaggaggtgtctcctaacttcagcatgaggcctgtggtttctggtagctatacagtgtgctggaaggacaggatagctgtttgctcctggttgccagcaatggctctgtgcccatgtgtctcgtggacgctgtaggactatcttcattcagatgtcaacttcaccaactggttaatgaattgttcactgggttttatttttatgaatctgcctttccatttgactgattgttttaagttcagtttgtttttccatcttttcctttgtgttttcaagttagaatgcttaaaaacttccagaatccactgctgaaattggggttccttctagagaagaaatgggtggggggagtttttttgtgtccctgcttagcatactcagtccctagccacatgacagatgaccagcagcctgagtttgaaggaggctggctgtttgcactggagcctgagcttcagactggaacctgttgtattccattccaaacgctgtttgtcccaactgagtgcacacaagtgaccctgctagaggatctggggcactgcggctcctctcctgccaggtgcctttcccatatgcttggttttccttctgtggtatgttgcctactttgtctttctgtctcatgtgaggtgctagtgagtattaagtttcatctgtgccatgctctcctagaacattttcccaccctggatccttgttttaaataaatcaattcacatgaaaaactcctca

SEQ ID NO: 513 - DNA, 1403 bp, Cricetinae gen. sp.
  misc_feature (696)..(750): n is a, c, g, or t
ggcggccgcgcgagatcctgagtckcccaacggcgcyrcggactcrggtggcwgygctgagtccgtmcgtcccagcgcggccctcatggcgctgctccgacgcccgacggtgtccagtgatttgaagamtattgacacaggagttaatcctaaagctaagagccatgtgacyatycggcgggcagttttagaagaaattggaaataaagttagaascmgagcagcyccagtggctaagaaacctcagaacaccaaaataccagttcagcccaccaaagtgacamatgtcaacaaacagccraaacctacagcctctgtgaaacckgtacaratggagacmctggctccmaaggatccttctcctgcccctgaggatgtctccatgaaggaagagaacctctgccaagctttctctgatgctttgctctgcaagatygaggatatagataacgaagactgggagaaccctcagctctgcagygactacgtgaaggacatctaccagtatctcaggcagcttgaggttttgcagtcyatcaacccacayttcttagatggaagagatataaatggacgtatgcgtgccatcctggtggactggctggtccaagtycattccaarkttaggcttytgcargaaactctttacatgtgcattgccatcatggaccggttcctacaggcgcagccggtctnnnnnnnnnnnnnnnnnnnnnnnnnnnnnnnnnnnnnnnnnnnnnnnnnnnnnnncgaggagatgttttctccaaatatcgaagactttgtttatatcacagacaatgcttacaccagttcccaaatccgagaaatggagactctgattttgaaagagctaaaatttgagttgggtcggcctttgccgctccacttcttaaggcgagcctcaaaggctggggaggtggacgtggaacaacacacgctagccaagtatctgatggagctaacgctcatcgactatgacatggtgcactatcacccttctcaggtcgcagcggctgcttcctgcctttctcagaaggtgctgggccagggcaaatggaatttaaagcagcagtattacaccggatacatggagactgaagtactggaagtcatgcagcacatggccaagaacgtggtgaaagtcaacgaaaacctcaccaagttcatcgctgtcaagaacaagtatgccagcagcagactcctgaagatcagcacgatcccacagctgaactccaaaaccatcaaagaccttgcctcccctctgatgggcaggctctaggtggctggctcccgccatgcacatctgattttgtacatactcctgtagtttacttcacaaaacctcttctcagactaatctcctaattgtgtattgaggaaaaaataaagctattgcggcc

SEQ ID NO: 514 - DNA, 962 bp, Cricetulus griseus
gtcgacccacgcgtgggggaaggcttaacccccaccgtsagcacccaaagctgaaattcttattaaactacttcttgtacatcaacttctagtacataaatttatctagtccataatacattaatgtatatcgtgcattacattatattcccctagcatataagcatgtratacttaattaatgtaataagacatcttatgtaaaatccacataaattatctacaacatgtattttcatctatactatatattaatgtaattccacatatctgcgttatcttacatacaccattttagtcatatccctgctttgccatatgtctatccccgtccccattkggtctaacacatctaccatcctccgagaaaccagcaacccrsscacctctgcccctcttctmgctccsggcccattacaacttgggggtgactaacctgaaactyyaccaggcatctggttctttcttyavggccatgaaatgcatcatcskccmtacgttccccttaaataagacatctcgatggtacgggtctaatcagcccatgcccaacataactgtggkctcgtgcctttggtatcttttatttttcggtatgctgtgactcaccatagccgtcaaggsrkgaaskycaacttattcgtgtagctggacttctctattcaagtgtcatttatccacatatacaatccccaaagacatactattcaatgctttcttcggacatatctttaatttacactagattttcaagccaaacccccctcccccactgataattactaactctgacaaaccccaaaaccagagatttcaataccaggtctctccaccattctagtaatccgccaaacataacttgaatttcaataagtgtaaaatttaccctatcgctttaaaattcctattgacacctagactagttttaatatacaagtgggtgacgggcataaacacgttaa

SEQ ID NO: 515 - DNA, 6134 bp, Cricetinae gen. sp.
  misc_feature (3005)..(3041): n is a, c, g, or t
  misc_feature (3426)..(3518): n is a, c, g, or t
  misc_feature (3565)..(3601): n is a, c, g, or t
  misc_feature (3629)..(3683): n is a, c, g, or t
  misc_feature (3710)..(3724): n is a, c, g, or t
  misc_feature (3726)..(3750): n is a, c, g, or t
  misc_feature (3848)..(3880): n is a, c, g, or t
  misc_feature (3886)..(3916): n is a, c, g, or t
  misc_feature (3925)..(3992): n is a, c, g, or t
  misc_feature (5196)..(5221): n is a, c, g, or t
  misc_feature (5545)..(5559): n is a, c, g, or t
ggatccaacttctaagtccgttttttattgatctaaaaggccttttgcgaatcatcttgaaggcaatcgcgttctgagccacctcagctttggcacacagcgcggggactgtcgcgaggggtttagggcccaagcaggacacaccccgaaatctccgcagccacccccaccccacgcccccggctcttgagggttaaatcgcaggcgcaggttctcgcacgcgcacatcatcccgcaggcgagccccagcacccagcccagggtgcgcgcgcgccgtcacgtgacacgcccaaccggcgtcgccgtataaaagcgcgggcgttgacgtcagcggtctcttccgccgcagccgccgccatcgtcggcgcccctcgctcttctcctgtgcccgtgagaatccgtcgccatccgccactatggtgagtgaccccggagcggcggtgctcggggccggagacggtacctcggggctgcgggacgtgtcggtggcggtccgcggaggccggcctgggaggagacatggctgccggggcggcgggacgtggacggacggggcggctggcgccatgtctgcgcgtcgggctgtggcctcggcacggcggccgttgtcccctcggcggacggtgctgatttggcagtgggcacagccaggcctctggccgccctcgggcgtgggatcgctggtcccgtccccggcggagggccagcgtccctttacgaggtgacagccgggtgggcggtcttccgtttgcacatccgcgtcccctgtggccggcctccgcgcgtcacgtcgctgctgtaggaccccctcctgaacggtgacgtgctccctgctaaccaaatggattccgaaggtagcctgggcaagggctctcgcatcccgccatgtggaacccgctggctttgggtggcgcaaagcgtgtcccatgccgagcgtctggaggttctgtgcctccacacgtgtggacccatcgagttgtcatgagtagtgtcctgctgaggttcccacgcacttctaggcactgcttgcttggctgtgaagctggggtggcaggcgcagttttgttgcctgtggatgcgttggaagattgggggcctttggttattgcggtggtgactgtctttgagatagggtttcacgtagcccaggcttgctcaggtggttagttcagggtttgtttagttagggctggacttctgacgtgctggctgtggactcttgatctgtatgctaacgaggtgcttgggcttgcaggctcgagtcaccgcggactcactgttccttatgaatgacaaccgaggctccatcttgggctgacggtcgtggttgtagtggctgtgtgcgcactggagtgttgtgtgggcaggccacggccacgcgtgggaaacgacatgctgctgcctgcagtttgctcagctgcccctcccccatcccaggtgaacttcacggtagaccagatccgtgccattatggacaaagaagccaacatccggaacatgtcagtcatcgctcacgtggaccacggcaagtccacactgacggactccctggtgtgcaaggcgggtatcatcgcctctgcaagagccggtgagacacgcttcacagacacccgcaaggacgaacaggagcgctgcatcactatcaagtccacgtaagtggcgatgctcagccgtcactgggggcacctttgctgggagtctccatccagcatctggggaggggtgccagcaggtgccctatggccgctgtagtgcctgctccacagtagactgaggagtgtaaggcagagcctctgccggcctgatccctgtctccttctccagggccatctccctcttctatgagctctctgagaatgacctgaacttcatcaagcagagcaaggatggatctggctttctcatcaacctcatcgactctccaggccatgtggatttctcctcagaggtgacagctgcacttcgtgtcaccgatggagctcttgtggtggtggactgtgtgtctggtaagcagatggtggcccatagagtgaaactgaggcatacagggcactttgctttatgtgtatttagatacatagcagcagggagagtgagattcttgaacttaacagcagggaggcgggggtctccagtttaaggacagccagggctacatagtgggactcttgtctcaaaaatccacgaacacaaagggacaggaaagcccagtgttgtgctctggctgatgacatttcagctataccttctagaaactttggtcccctgtacacattcccacacagagatgtgcttttctggggactagtgtctggttccaggcattctctgctagccccaagtggcacatgctcacatacatcactttaaaaatacatctacaaaccccatgtcctcccccccaggtgtgtgcgtgcagactgagaccgtgctgcggcaggccattgccgagcgcatcaagcctgtcctgatgatgaataagatggaccgtgccctgcttgagctgcagctggagcctgaggaactataccagaccttccagcgcattgtggagaatgtcaacgtcatcatttccacctatggcgagggcgagagtggacccatgggaaatattatggttcggagcccaccttgtggggtgggtctgtgaccatgctctgtaggaacccttctggcagaccacacatgatgactgaaattcttcactttgacctgatgtctgttgaagaaactctgtgtctgagcctgtggggatcttggctgggtgggcttctaatggatgttcttggctcagcgctgctctccttcttcagattgaccccgtcctgggcactgtgggctttggctctggcctgcatggctgggccttcactctgaagcagtttgcggagatgtatgtggctaagtttgcagcaaagggtgagggccagctggggcctgctgagcgggccaagaaagtggaggacatgatgaagaagttgtggggagatcggtaagtttagctnnnnnnnnnnnnnnnnnnnnnnnnnnnnnnnnnnnnnaatagccctgtggaatgtggcataacttgatctctccctctgtaaggtattttgatcccgccaatggcaaattcagcaagtccgctaacagccctgatgggaagaaactgccacgcaccttttgccagctcatcctggaccccatcttcaaggtgggttgggttagctgtgtccctggcctcagcgcaagccctcagagcacccttgccctggaagcagctctccagtgcccgcctgagcccacttgcctctggtacaggtgtttgacsccatcatgaacttcagaaaggaggagacggccaagctgattgagaagctggatatcaagctggacagcgaggacaaagacaaggagggcaagcccctgctgaaggctgtgatgcgnnnnnnnnnnnnnnnnnnnnnnnnnnnnnnnnnnnnnnnnnnnnnnnnnnnnnnnnnnnnnnnnnnnnnnnnnnnnnnnnnnnnnnnnnnnnntctacgaggggccacctgatgatgaggcggccatgggcattaaaagnnnnnnnnnnnnnnnnnnnnnnnnnnnnnnnnnnnnnaagatggtgccaacctccgacaaaggcnnnnnnnnnnnnnnnnnnnnnnnnnnnnnnnnnnnnnnnnnnnnnnnnnnnnnnngtccgcatcatgggccccaactacacnnnnnnnnnnnnnnnannnnnnnnnnnnnnnnnnnnnnnnnggtgggcgcagtcccktgcctgtccacaccttctgcytgarccctggctgcctcccatggtgcccctgttgacactccattgtccctccctctagaannnnnnnnnnnnnnnnnnnnnnnnnnnnnnnnnttgagnnnnnnnnnnnnnnnnnnnnnnnnnnnnnnnttggtgtannnnnnnnnnnnnnnnnnnnnnnnnnnnnnnnnnnnnnnnnnnnnnnnnnnnnnnnnnnnnnnnnnnngttcagcgtcagccctgtcgtcagagtggctgtggaggccaagaacccagctgacctgcccaaactggtggagggcctgaagcggctggcaaaatctgaccctatggtgcaggtgtgccttaggcagagggtaggggcactttctgccacagactcagtggtgtgccatggttagagggcaacttggtaggaggaggcggtgccttcctgggtggtggcagggttctcaccactgttcccatagtgcatcattgaggagtctggggagcacatcattgctggagcaggtgagctgcacctggaaatctgcctcaaggacctggaggaggaccacgcctgcatccccatcaaggtgggcaccctcctgggttcctgtgaggagccagggccccttttacccctgctgatgcctggaagktcwwsccagcswysrcagyctkmwtccycmtsmaraaatctgaccctgttgtctcataccgggagacagtgagcgaggagtcaaatgtgctgtgcctgtccaagtcgcccaacaagcacaaccgattgtwtatgaaggcccggcccttccctgatggcctggccgaggacatcgacaagggtgaagtgtctgctcgccaggagctcaaggcacgcscacgctatctagctgaaaagtacraatgggatgttgctgaascccgcaaratctggtgctttgggcctgatggcactggccccaacattyttaccgatatcaccaagggtgtgcagtacctgaatgaaatcaaggacagtgtggtggctggcttccagtgggccactaaggaggtgagtggctggggcctgggtgttccttctctggagaccaatgctttcttgactttcagtaggtgttggagtgtggctgggtctgactaaccagctttcctagggcgctctctgtgaggagaacatgcgtggtgtgcgcttcgatgtccatgatgtgaccctacatgctgatgccatccaccgaagaggtggtcagatcattcccacagctcgtcgttgtctgtatgccagtgtgttgactgcacagccccgcctcatggagcctatctacctggtggagattcaggtaagaaaaaaaaaacatgcctgcctgtgtggcgcccattcacccttctgtgatgatgcagttctcactggtgctctctgtccttcagtgtcctgaacaggtcgtgggtgnnnnnnnnnnnnnnnnnnnnnnnnnncgtggccatgtgtttgaagagtcccaggtggctggcacccccatgtttgtagtcaaggcctatcttccagtcaacgagtcctttggtgagtgtcatggcttccccttggtgttcccagccctctgcactctagggtggctgcctcattgggtcaaaagcaaagtggtctgtgtatccagatggtggtgggcagggagccaggaaatgtggaaacccttcctgagtgggaagaccaggcagggggaagcacaaaccgaggggctaggctcttgctgagcctcttgcctttatccaggttttacagctgacctgcgctccaacacnnnnnnnnnnnnnnncccccagtgtgtgttcgaccactggcagattctgcccggggacccgttcgacaacagcagccgtggcagccaagtggtggctgagacccgcaagcgcaaaggtctaaaggagggcatcccagcactggacaacttcctggacaaactgtaggcaggcttgcacagccacacactgcacagtgcccacccatcagaagacaccttgagactgtccccataatgctgctctggaggtggctggggccaccctgccattgagcactaacacttgatgccgattctatttatttcggaatttccgaggcagtggagtcgccctctgcaggctggactggctggcgggccatggggtgggcaggacacagctctttatcattttcagagggaaaaatgctcagatatcaaacatctaaataaatgcattcagaggtttatggggttcattcatggactggagttgcccaggggatgcagatttgtggctcctgggaggtgggtgatctatcggccctgtctggccctttgcagtaataaaactgctgtggttgaccttcctggactttgccaatctggca

SEQ ID NO: 516 - DNA, 950 bp, Cricetulus griseus
  misc_feature (95)..(115): n is a, c, g, or t
ttccagccaccttctgcactccagactccagctacactcctgcccaacgccatggccccagccacccgttcactcctccgtgcccctctgctgtnnnnnnnnnnnnnnnnnnnnnccagccgcttggctacaggggctcctgttgccaacgagctgcgctgtcagtgcctgcagaccatgacaggggttcacctcaagaacatccagagcttgaaggtgacacccccaggaccccactgcacccaaaccgaagtcatagccactctcaagaatggkcaggaagcttgccttaaccctgaagcccccatggttcagaagattgtccaaaagatgctaaagagcggaatccgtaagtaacagagaaagaagtaagattgctttggtggcgcatctgtgatcgctgacttctgacaacactggcttaacacattttacagkttcttacaagaaccctatttatttatgtatttatttatttcacaaagcttgtgtattttatttttacattaatatttaacattgtggatgtgttttatcaatggtagttcagttctgattgttcagtttgaagatggtaggcttaaaatatctcagtaaactaatatttattgggagaccattaagtgtcaaccactgtaagagaagcatgtggggttgggaaaaaagcagagagatgagagcatatgatcatgtttgtattagggtgagggaacgtgtgggaatctatgtttgaatgttttggaaagaatgtcagttatttattgaatgtcattttttatattaatggtcaacattgacatgttgaagtttcccttggacattttatgtctactttgtagggcatagtgccctgttatattctttaaccaatgtttctctttgtcttgtgacagagaagttcaaaggactcttacaaatgagataaaaataaaaagttttagcaaaaaaaa

SEQ ID NO: 517 - DNA, 1623 bp, Cricetulus griseus
  misc_feature (295)..(314): n is a, c, g, or t
cctcggaggcacgcgtccgtgctcctcgttggccatggcggactacctgattagcggaggcacatcttacgtgcccgacgacgggctcacagcgcagcagctcttcaactgcggggatggcctcacctacaacgattttctcattcttcctgggtatatcgacttcactgccgaccaagtggatttgacctctgctctaactaagaagatcaccctgaagaccccactggtttcctcacctatggacactgtcacagaggctggaatggccattgcaatggcgcttacaggaggnnnnnnnnnnnnnnnnnnnnactgtacacctgaattccaggccaatgaagttcggaaagtaaagaaatatgaacagggattcataactgatcctgtagtccttagccccaaggatcgtgtgagggatgtttytgaagccaaagccaggcatggcttctgtggtatccccatcacagatacaggccggatggggagtcgactggtgggcatcatttcttcaagggatattgattttctcaaggaggaagagcatgaccgtttcttggaggagatcatgacaaagagggaagatttggtggtggcccctgcaggcatcactctgaaggaggcaaatgaaattctgcagcgcagtaaaaagggaaagttgcccattgtgaatgaaaatgatgagctggtagccatcattgctcggacagacctgaagaagaatcgtgattacccattggcttccaaagatgccaaaaagcagctactatgtggggcagccattggtactcatgaggatgacaagtataggctggacttactggctcttgctggtgtggatgtagtggttttggactcttcccagggaaactccattttccaaatcaatatgatcaaatacatgaaagagaaataccccaatctccaagtcattggaggcaatgtagtcactgctgctcaagccaagaacctcatagacgcaggtgtggatgctctgcgagttggcatggggtgtggttccatctgcattactcaggaagtgttggcctgtggtcggccccaagcaacagcagtgtacaaggtttctgagtatgctcggcgctttggtgttcctgttattgctgatggaggaatccaaaatgtgggtcatattgccaaagctttggctcttggagcttctacagtcatgatgggctccctcttggctgccaccaccgaagcccctggtgagtacttcttctcagatgggatccggctaaaaaagtaccgtggtatgggttctcttgatgccatggacaagcatctcagcagccagaaccgatatttcagtgaagctgacaaaatcaaagtggcccaaggagtttcaggagctgtgcaggacaaagggtctatccacaagttcgtcccttatttgattgctggcatccagcattcctgtcaggacattggtgccaagagtttaacccaagtcagagccatgatgtactctggggaactcaagtttgagaagagaacatcctcagctcaggtggaaggtggtgtccacagccttcattcgtatgagaagcggcttttctgaaaagagatccagtatatgccttgaatttttcaataaaagttttg

SEQ ID NO: 518 - DNA, 5098 bp, Cricetinae gen. sp.
  misc_feature (3009)..(3032): n is a, c, g, or t
  misc_feature (3083)..(3113): n is a, c, g, or t
ggcgcaataacgttacaaattataacactgtggtagaagcaaattccgattctgacgatgaagacaaactccacattgtggaagaagaaagcatcgctgatgcaggtgactgtgaaggtggcatgcccgaggatgagctgccggctgaccagacagtcttaccaggaggcagtgacagggaaggcggtgccaagaactgctggcaagatgacgtaaaagatgatgagtgtgactcagatgcagaaaatgagcaaaaccatgaccctaatgtggaagagttcctgcaacagcaagacaccgccatcatttaccccgaggcacccgaggaggaccagcggcagggcacgccagaggccagtggtcaggacgaaaacggagcagcagatgcattttcccaattgctaacctgcccatattgcgatagaggctacaagcgctttacctctttgaaagagcacattaagtaccgccatgaaaagaacgaagacaatttcagctgctcmctgtgcagttacacctttgcatacagaacccagcttgaacgccacatgacatcacataagtcaggaagagagcaaagacatgtgacgcagtctgggggcaaycgtaaattcaagtgcactgagtgtggaaaagcyttcaaatayaaacaccacctraaagagcacttacgaatycacagtggagagaagccatatgaatgcccaaactgcaagaaacgtttttcccattctggttcctatagctcacacataagcagtaagaagtgtattagcttgatgcctgtgaatgggaggccyagatcaggactcaagacatcrcagtgtycctcaccatctctttcggcatcaccaggcagtcccackcgcccacagatacggcagaagatagagaataaaccccttcaagaaccgctttctgtaaaccaaatcaaaactgaacctgtggattatgagttcaaacccatagtggttgcttcaggaatcaactgttcaacccctttacaaaacggggtttttagcggtggtggccaattgcaggcaaccagttctcctcagggtgtggtgcaagctgttgttctgccaacagtcggtttggtatctcccataagtatcaatttaagtgacattcagaatgtacttaaagtggcactagacggtaacgtaatacggcaagttttggaaaataatcaagccagtcttgcatccaaagagcaagaagcagttaatgcttcatccatccagcagggtggtcattctgttatttctgccatcagtcttcctttagttgatcaagatggaacaaccaaaatcatcatcaactacagtcttgagcagcccagccaacttcaggttgttcctcagaatttaaagatagaaaacccagcccctacaaatagctgcaaaagtgagaagttaccagaagaccttactgttaaatcagaaaaggacaaaggctttgatggggctgtggatggtagcacttgccttctgtatgatgattgcccaggagacctcaatgcacttccagaactaaaaaagcactatgacccagagcaccctgcccagcctccaccccctgcccccgaagccgagaagcccgaggcctctgcttcatcagccagggatggcgatttgtctcccagtcagccacctttaaagaacctcctatcgctcttaaaagcctactatgctctgaacgcacagccaaactcagaagagctctcaaagattgccgactctgtgaacctacccctggatgtagttaaaaagtggtttgaaaagatgcaagctggacagattccagggcagtctcctgagccaccgtctccagaaacgggcacagtaaacatccctgcaaagagcgatgaacagcctcaacctgcagatggaagtgagccccaggaagacagcgcaagtggacagagtcctctcaagatgactagctccccggttttaccagtaggatcagccatcaatggttccagaagttgcacatcacccccatcacctctaaacctttcctcggccaggagcctgcagggttacttttgtgtggcagacggtgcccaggaggagccccaagtagaacctcttgatctctcactaccaaagcaacagggagagttactggaaaggtcgactatcagcagtgtttaccagaacagtgtttattctgtccaggaagaacccttgaacttgtcttgtgtaaaaaaggagccacaagaggacagctgtgttacagactcagaaccagttgtaaatgtaatcccaccaagtgccaaccccataaatattgctattcctacagtcactgcccagttacccaccatcgtggccattgctgaccagaacagtgttccctgcttacgtgcactggctgccaacaagcagactattctgattccccaggtggcttatacatacgctactacagtcagccctgcaatgcaggaaccaccggtgaaggtaatccagccaaatggaaaccaggatgaaaggcaagacactagctcagaaggagtctccacagtggaggaccagaacgactctgactctacaccacccaaaaagaaaactcggaagacagagaatggaatgtatgcatgtgacctatgtgacaagatatttcagaagagcagctcactgctgagacacaagtatgaacacacaggtaaaagaccccatgagtgtggaatctgtaaaaaggcatttaaacacaaacatcatttgattgaacacatgagattacactctggagaaaagccctatcaatgtgacaagtgtggcaagcgcttctcacactcgggatcttattctcagcacatgaatcaccgctactcctactgcaagagagaagcagaagaaagagatggcacggagcaggagcaggaagaggctgggctggaagccctgatgaatgagcatgtgggtgcgcgggcatctccctcacaggctgactcggatgagagagaaagtttgacaagggaggaggatgaagacagtgaannnnnnnnnnnnnnnnnnnnnnnnaaagagatggaagaattgcaggaagaaaaggaatgtgggaatgcacaggcnnnnnnnnnnnnnnnnnnnnnnnnnnnnnnnatggatggagccaaggatgaggcagcagccaagactgatggtgccgtggagaatggggctgctccgcaggcaggcagcttagagcagaaggcaagcgagagcagcgagcaactgtcagaggagacgacaaatgaagcctaggagctcttctagaaggaaattctacttggtaatgaaatttgctctatattacccacgcttttcatggaaacacggcccctgtgccgtggttcctgctcactactgtgtaatgtcagaactgaaaaaaaaatacaaaaaaaaaaatccgggtgtgcctgaacctcagacctagtaatttttcatgcagttttcagagttaggaacacatatgtaacatgaagcagaatagaaaacttcagagactgagaagcaggtttcttagcaggttacagggagctggatgggcatctggcatggttatcagtattatcactcttacgttggttcattcttaagctgtacaatgggagaaattttataatttttattggtaaacatatgctaaagccgcttcagtattttattatgtttttttaaaatgtgagaacttctgcactacagaattcccttcacagagcagtagaaagcagttccaaccgtgctgactacctgttaccaagtcagtcaggaggtaggacctctacgttagacgccatgttgtcatttaacatgtattgctagccttaaggaagcagccgagagaagaactgaagtttcttactcatgtgattttaaatggagttcaaaggttgtcgttgagttctgactgcagggacgaacagtattgatgtggtgaggacgacagagtctgcagaatcagtgttcgtgattgtgtttgcgtacgtggtagcaactatgaaggatctataggaagcgttatgtctcctttggccttaagcaagacctgtgtgctgtaagtgccattctcagtatttcaaggctctaactgccttcattcagtgtgtggcctacaataactagcatttgttgatttgtttgatgtttcaaaattcccaaacaaaactcaaaaccactgactctgtcagagaagctgaagcactgggacatctcataccttggttcctcagtattcattttacgttgattgactttcggaaatctctacagaaacaaaagggaaattctctaaactacttaatccatgtactttcgtgtcagacatggataagccattagtatttggcttacaaccatttccaaatgttagttattacggacccagttgatgaacaacattagctgatttttacctatcagtattattttatttcttttagtttatagatctgtgcaacatttttgtactgtatgtcttcaagcctggcagtattaatacccttcttactgacacgtacttttagttttagaaaacttttatatttatgtgtcttatttttatatttctttatttattacacagtgtagtgtataatactgtagtttgtattaatacaataatatattttagtatgaaattttggaaagttgataagatttaaagtagagatgcaattggttctcgtgcattgagatttgatttaacagtgttctgttaacatttatactcgccttgggctgtagagcagagtttaaatgggaatgtattagttttacaactacaatcaagtcattctccctttacccagtttttaatatgaaactcttcactttgaaactcactgtgtgactcatagcatgatgctctgcagttcttctgttaagagttggcccagccataacccattcccttagcaagccaaattagaattgccttctgtaaacagtgttgggaacaatgtttaacatgttgtgccaatttgttcctgtatccatgtatgtaagctaccaatccgactcttccttttaagttccttgttacaccatggtcattttctagttttttaccagactccccagctcacaataaaatgcatcaacaagcc

SEQ ID NO: 519 - DNA, 1422 bp, Cricetulus griseus
agctttctcggtgctcttgtcggtggtcacctgcgctgtcgccttccccggggctgtgacggtgttccttagctttgccggccaggtcgactcctgccctgcggatcatgatgtgcttccgcctctctccggtttcgggctcggggctcgtcctgtcttgtctcctcctgggagctgttcagtcctatgcattcgaacttaatttgccagattcaaaagctacttgcctttttgccaaatggaagatgaatttcacaatatcctatgaaactacaacaaacaaaacccttaaaactgtaaccatttcagaacctcacaatgtgacatataatggaagcagctgtggtgatgaccagggtgtggctaaaatagctgtgcaatttggatccactgtttcttggaatgtgacttttactaaggaagaatctcattatgttattggcagcatctggctcgtgtacaacactagtgataacacaacatttcctggtgctatccctaaaggaagkgctactgttatcagttctcagagcatcgaaattccattggatgacatctttaggtgcaatagtttactaactttcaagacgggtaatgtggtccagaactattgggatattcacctgcaagcttttgttcaaaatggcacagtgagtaaagaagaattygtgygtgaggaagacaaatctgtcaccactgtaagacccatcattcacactactgtgccacctcctactackacacccactccactgcctccaaaggttggaaactattccgttagtaatggcaatgcyacctgkctgctggstaccatgggactgcagctgaatgtcactgaggagaaggtgcctttcatttttaacatcaaccccagtacaactaacttcaccggcagctgtcatcctcaaactgctcaacttaggctgaacaacagccaaattaagtatcttgactttatctttgctgtgaaaagtgaaagccatttctatctgaaggaagttaacgtcagcatgtatatggctaatggctcagttttcagtgttgcaaataacaaccttagcttctgggatgcccctcttggaagttcttatatgtgcaacaaagagcaggttgtttcagtgtctagaacgtttcagataaacacctttaacctaaaggtgcaaccttttaatgtgacgaaaggaaagtatgccacagctcaagactgcagtgcagatgaagacaacttccttgtgcccatagcggtgggagcagctctggcaggagtacttgctctagtgttgctggcttattttattggcctcaagcgccatcatactggatatgagcagttttaggacctgcaatccaattgattatattataaaatacattcaaagaacgaggttttcttgcctgtcagtgctccttaaaacacac

SEQ ID NO: 520 - DNA, 4730 bp, Cricetulus griseus
  misc_feature (2002)..(2019): n is a, c, g, or t
  misc_feature (2741)..(2792): n is a, c, g, or t
cccgaacgcggagaacactgctctcattggtccgctgtgaatccacccgcctcccttcgtcggcttccttccgctccctcccgcacgcgctgactgggcgcgcatgcgtacaggctgccgagtccctcccctcccccgccagccgtgagtgacagaggactcccgcgcgcgggctctcggcgccccgccctcccctttcccccgggccgttcggagagcgggggcgagcatgaaagttccagaacgctgcggacgtgcgtcatcgccaggtggggcggggcgagggcgggacctaggagagcgtctcgggcgttcattggtgctgttcgaaaagccccatcgtccattggctaaggagccatgataggcagcgggacggggcgggatccttctggaaggttctgagacagggtataagagacagtgaggcgggcggaaaccggtctcattgaacgcggaggcagcttgtgaggttttgtgtggtctcgtcgccagcacagccgggcctacaggcaaggtgaggcctggggcttgggtggtggcgggtggcctgctttactgcagcagagcggcggggcactgaggcggcgggcgggggcttaggccgcggcctccggggacccggagctgcagctgaggaggatgggcttaggtagggcggcgccgccatggccttgaggctcgtcgcggcgggggaggggtgccgcagccgcccgcgccgctccctttcacccgtctgcggattaaacgagagggtttctgaccgcggcccaagggcgagctgcttggaatatttcagcaggcgagtctggcgccgcaatgcgcggtcctggcggctggaaggggggaggggttgggttctccgagttgaggccacgtgctcaaccattgtcgcagaccgtcaggacagatggttcttcagccaggggcgggctctgccagggttggcacggctaccggactgcagcagtgccgccctgagccttttgcgtggcctcaggtgataggtctgggctgatgagtacatacggattgcgggtctggaagctggggaatagctgcttagccgttttcgtgtttggttttctttcagcaaccatgtctaagggacctgcagttggtattgatcttggcaccacctactcctgtgtgggtgtcttccagcatggaaaggtggagataattgccaatgaccagggtaaccgaaccacgccaagctatgttgcttttactgacacagaacgattaattggggatgccgcgaagaatcaggttgcaatgaaccccaccaacacagtttttggtaagtagccagcttttacgtgggatagaagctctctagattactgtagtttaagagaagtaacgtaactgataaaacccgggcagtatttttggtattaaatacgggccactcctttcctgacccggagcttagcctcgcctagcccgtatgtccgcttttccttccggccctcgtttttggtagggaccactccctttagtgtacaatttacttcacaactctcagcctcggatttaattggtggagtttaatgagatacacacttattttgcagatgccaaacgtctgatcggacgtaggtttgatgatgctgttgttcagtctgatatgaagcactggcccttcatggtggtgaacgatgcaggcaggcccaaggtccaagtagaatacaaaggagaggcaaaaagtttctacccagaggaggtgtcctctatggttctgaccaagatgaaggaaattgcagaagcctatctcgggaaggtgggttttaactgctgtcaatatggggtggctattcaagcattcttctgttcagcgcgcaatttgctaaggtaacaattgtgtgattgtattttctagactgttaccaatgctgtggtcacagtgccagcctacttcaatgattctcagcgacaggctacaaaagatgctggaactattgctggcctgaatgtcctgcgaattatcaatgaaccnnnnnnnnnnnnnnnnnnttatgggctagataagaaggtatgtgtttcaagcacatgttttgcttaagattaatttgcacaccagagatgtgagctaaaagtttkksytwsatawgaaggttggagctgaaaggaatgtgctcatttttgacttgggaggtggtacttttgatgtgtctatcctcactattgaggatggaatttttgaagtcaaatcaacagctggagacacccacttgggtggagaagactttgataacagratggtcaaccatttcattgctgagtttaagcgaaagcacaagaaggacatcagcgagaacaagagagctgtcaggcgtctgcgtactgcctgtgaacgggcaaagcgcaccctctcctccagcacccaggccagtattgagattgattctctctatgagggaattgatttctatacctccattacccgtgctcgattcgaagaattgaatgctgacctgttccgaggcactctggaccctgtagagaaggcccttcgagatgctaaactagacaagtcacagatccatgacattgtcttggtgggtggttccaccagaatccccaagattcagaagcttctgcaagacttcttcaatggaaaagaactgaataagagcattaaccccgatgaagctgttgcttatggtgcaggtaagaccactacatagttgtctttacagtcctagcaagtccctctttaaagagtgtcctaaatnnnnnnnnnnnnnnnnnnnnnnnnnnnnnnnnnnnnnnnnnnnnnnnnnnnngttggctagttccttccttggatgtctgagcgactgaactgcattgaagtgtggttggacttgggtggtgagttttctaacatttcttccacttttacagctgtccaggcggccattctatctggagacaagtctgagaatgttcaggatttgttgctcttggatgtcactcctctttcccttggcattgaaactgctggtggagtcatgactgtcctcatcaagcgcaataccaccatccctaccaagcagacgcagactttcactacctattctgacaatcagcctggtgtgctcattcaggtattttagaattttgtttgattttctagaaatcccagggaatgaagtctcgctgtgatgatggattcctaaaccattcgtagtttccaccagaaattctgtgttggctagttccttccttggatgtctgagcgagaattctttcccctaattgagcttaaattctacagaactgtttttctaagtctgatgacttatttctgtgttccttcaaggtctatgaaggcgaaagggccatgaccaaggataacaacctgcttggaaagtttgaacttacaggcatccctccagcaccccgtggtgttcctcagattgaagttacttttgacattgatgccaatggcatcctcaatgtctctgctgtagataagagcacaggcaaggagaacaagatcactatcaccaacgacaagggtaagtatggacataactctcgtctgatgtggcttctgcttacaagtattatgactttttagtttgattttagtttatgacttatgattttgtgacttaacaggccgcttgagcaaggaggatattgaacgcatggtccaggaagctgagaagtacaaagctgaagatgagaagcagagagataaggtttcctccaagaattcactggagtcctatgctttcaacatgaaagcaacagttgaagacgagaaacttcaaggcaagatcaatgatgaggacaaacagaagattctagacaagtgtaatgaaatcatcagttggctggataagaatcaggtaggtgtcctgttgccaataaggggaaggtagtagactagactgggctaaagtataggggtcactgtgatgaatggtccaaacattctcggtttccaccagaatgtaaagcagtgttggcaattaccttccttggatgtctgagtgactctaaagctaacggaagtaggttcctgttagttacataggcttaatttgcagccttacagaagttaactgtttgtggaccatttacgtaatgtttttttttcctactcagactgcagagaaggaagaatttgaacaccagcagaaagaactggagaaggtctgcaaccccatcattaccaagctgtaccagagtgctggtggcatgcctggaggaatgcccgggggcttccctggtggtggagctcctccatctggtggtgcttcttcagggcctaccattgaagaggtggattaagtcagtccaagtagaggtgtagcattgttccacagggaaacatttgaaggacccaaatttgcaaagtttcatggcagtttttaaatttaaactgttaacaataaattactgggcattctcaatacttgaacatggaacatgtacacaggaaataaaacattgcactttataagcactgtatcctaagtggaaaacgcaatgtctaatatggtggaaaatggaatgtctaaataaaactatttaaattggcaccatacagttgtcctgactaactttggaattaagggtggcttttgtcaaggaacaaattaacaaatgcaggaatgagagatactaccctaacacaattctagtaccctccagtgggtttttcagcttagccttaggctaagaaccaacatgagttcaaagctgaaggtgctgggtaaattctctgaaaa

SEQ ID NO: 521 - DNA, 613 bp, Cricetulus griseus
agtggatccccgtcaccaagctgggccgtctggttaaggacatgaagatcaagtccctggaggagatctacctgttctccctgcccattaaggaatccgagattattgatttcttcctgggcgcatccctaaaggatgaggttctaaagatcatgccagtgcagaagcagactcgggctggccagcggaccaggttcaaggcttttgtcgctattggggactacaacggtcatgttggtcttggtgttaagtgctccaaggaggtagccactgccatccgaggggccatcatcctggccaagctttccattgtccctgtgcgaagaggctactgggggaacaagattggcaagccccacactgttccatgtaaagtgacaggccgctgtggctctgtgttggtgcgtctcatccctgcccccagaggcactggcatcgtctctgctcctgtgcctaagaagctactgatgatggctggtattgatgactgctacacgtcagccakgggctgcactgccaccctgggcaactttgccaaggccacctttgatgccatctccaagacctacagctacctaacccccgacctctggaaagagactgtgttcaccaa

SEQ ID NO: 522 - DNA, 2805 bp, Cricetinae gen. sp.
  misc_feature (219)..(238): n is a, c, g, or t
cgtcgttagttgggagctggtggtccagagaaagattgacaccaggcagaagcctactctgtccgctgtcccagacaccacaattttcagtcctctgaagatttttctcggcatccaagagccagcatgccaggacacttgctacaagaagagatgacctcttcatataccaccactaccaccaccatcacagaacctccctctgaaagcctgcagaannnnnnnnnnnnnnnnnnnnaggaagacatccgccctgaaatgaaagaagacatatatgaccccagctaccaggatgaggaggggcccccacccaagctggagtacgtctggaggaacatcatcctcatggcactgctgcacttgggggccttgtatgggcttgtgctggttccctcaagcaaggtctacaccttgctctgggcgtttgtctactatgtgatcagtattgaaggcattggagctggrgyycaccgcctgtggagccaccgaacytacaargctcggctgcccctgcgkmtcttcctcatcatygccaacaccatggctttccagaatgacgtgtatgaatgggcccgagaccaccgygcccaccacaarttctcagaaacryacgctgaccctcacrattcccgccgtggctttttcttctctcacgtgggctggctgcttgtgcgcaaacacccrgctgtcaaagagaagggtggaaaactggacatgtctgacctaaaagccgagaagctggtcatgttccagaggmggtactacaagcccgsymtcctrytgatgtgtttcatcctgcccacgytkgtgccctggtattkctggggtgaagctttcgtgaacagcttgtgtgttagcaccttcttgcgatayrctktggtgctcaatgccacctggctggtgaacagygcygcccacctctatggrtatcgcccctacgacaagaacattagmtcycgggagaayrycctggtttcrmtgggakststrggcgagggcttccacaactaccaccaygccttcccctatgactactckgccagtgagtaccgctggcacatcaacttcaccacattcttcatcgactgcatggctgccctgggcctggcgtatgaccggaagaaagtgtctaaggccgctgtcttggccaggattaagagaactggagatgggagctgcaagagtggctgagtctggcgttgtctttgtttctattcccaaagccatctgaacagagatttaatgatgttgcttaaatcctgaaaaataccatctatgttctaaagtgtctcatttcaagactgtattcttgtaaaatattctaatgttaaataaaaggcaaatctctcttttatacaaaccgagaagagcaagcagaaaaaggatttggacaatatggaaaattcggaagtgataaagaccatgcaaaaaaaagctgcagatggagataagattactacagttattcagcatgtgttccagggccttattttgggaagtaaaaccaactgggcagaggattctggcctcagggaaattgtgctgcagctggagaaggatctcaccacaatctaataagaatcctgctctggcatgggagcctgtttgtgcccactctgcctttgaaatagcagagtttgtgggaatgcaagaagtggttcggaaccattctgatgcttcgattccagggcttgggttgatgataggacatgaaatctcttgtctgaaatacgatcactaaagtgactggcatactctgcgggagtctaaacactgtagccttggaaagaaggcatctggtccagctgcggtcgagtgtgcacatcttcacaacaacacaaccatttcctttcagtgtgctctcatgcatctgtgcattggtttgtcaaccaacacattggaaaagcatccaaagggtaagggtagtgattgtttaagtacagttgtgggttgtgactttttcttccgttctctgtttagcatgtattttacttttataagtttatgaataaaaagggatttcagattgaggagaccatagaccgagagacttcagggaacttggagcagttgctcctggctgtggtgaagtctattcggagcatacctgcctaccttgcagagaccctttactatgctatgaagggtgctgggaccgacgatcacaccctcatcagagtcgtggtgtcgaggagcgagattgatctgtttaacatcaggaaggagtttaggaagaacttcgctacctctctgtattctatgatcaagggtgacacatctggagactataagaaaaccctgctgctgctctgtggaggagaagatgactgagggattggctgtctggagtactctgcctgccgcctccagcagcttccttcagcaaatgcagccatgcttatatttctcatgcctgactggatgccttactcacactagtatgctaatgaccaaatgtgttgccttactgcactagtatgttaacaactaaatgtgtcatagatgacattagtggcacatccttctgatcttcctgttgacattagtgcttaccttcacttgtctctaagtctaatgtctgaattatcaatactgtctataaagaggtcagattgctttttataacattttttttaaagcttcatttatattaagttaataaccatattaccttgattggaaccttagccatgaaattgtgaactcctggaaatactgtcaatcaagcttactgctctatcagacctgtaaagttatgatagttgtatcaaaaatgatgaatgacaaataaacattcccttcccg

SEQ ID NO: 523 - DNA, 1655 bp, Cricetulus griseus
  misc_feature (594)..(599): n is a, c, g, or t
caggttctcttacatcgaccgcctaagagtcgcgctgtaakaascrwsaccysctyctcgcytyygycaacctycgsgcwkcyrmmhmgyagcwaccatgcgtgagtgcatctccatccacgttggccaggctggtgtccagatcggcaatgcctgctgggagctctactgcctggaacatggcatccagcctgayggccagatgccaagtgacaagaccatcgggggaggagatgactccttcaacaccttcttcaktgagacaggcgctggcaagcatgtgccccgggcygtgttcgtagacctggaacccacagtcatcgatgaagttcgcactggtacctaccgccagctcttccaccctgagcagctcatcacaggcaaggaagatgctgccaataactatgcccgtggccactacaccatcggcaaggagatcattgatcttgtcttggacagaattcgyaagctggctgaccagtgcacaggtcttcagggcttcttggttttccacagctttggtgggggaactggctctgggttcacctccctgctgatggagcggctctctgtcgattatggaaagaagtccannnnnnagttctccatctacccagccccccmggtttccactgctgtggttgagccctacaactccatcctyaccacccacaccaccctggagcactctgattgtgccttcatggkagacaacgaggccatctatgacatctgtcgtagaaacctcgacattgagcgccccacctacactaacctwaaymgsytsatwrgycarattgtgtcttccatcactgcttccctcagatttgatggagccctgaatgttgacctgacagaattccagaccaacctggtaccctaccctcgcatccatttccctctggccacatatgcccctgtcatctctgctgagaaagcctaccatgagcagctttctgtagcagagatcaccaatgcctgctttgagccagccaatcagatggtgaaatgtgaccctcgccatggtaaatacatggcttgctgcctgctgtaccgtggggatgtggttcccaaagatgtcaatgctgccattgccaccatcaagaccaagcgyascatccagtttgtggactggtgtcccactggcttcarggttggcattaattaccagcctcccactgtggtacctggtggagacctggctaaggtccagagagctgtgtgcatgctgagcaacaccacagccattgctgaggcctgggctcgcctagatcacaagtttgatctgatgtatgccaagcgtgcctttgtgcactggtacgtgggtgagggcatggaggagggggagttctctgaggcccgtgaggacatggctgccctagagaaggattatgaggaggtgggtgtggattctgttgaaggagaaggtgaggaagaaggagaggaatactaaattaattgtcacaaaggtgctgcttttacagggaagtttattctgttccaacaaagaaagctgtggtctgatcagttaatttgtatgtggcaatgtgtgctttcatacagttactgacttatggttgaaaatatgaatgacttgtcatagacccaagccgtccatttcactgatgggttttaaataaaatattccctgtctt

SEQ ID NO: 524 - DNA, 2232 bp, Cricetulus griseus
  misc_feature (239)..(251): n is a, c, g, or t
  misc_feature (327)..(344): n is a, c, g, or t
  misc_feature (481)..(522): n is a, c, g, or t
  misc_feature (525)..(540): n is a, c, g, or t
  misc_feature (619)..(634): n is a, c, g, or t
  misc_feature (642)..(664): n is a, c, g, or t
  misc_feature (681)..(701): n is a, c, g, or t
  misc_feature (1343)..(1352): n is a, c, g, or t
  misc_feature (1978)..(2003): n is a, c, g, or t
  misc_feature (2167)..(2187): n is a, c, g, or t
gaagaagatgacagcagtggagaagaggttgtcatccctcagaaaaaaggaaagaaggctacagcaactccagcaaagaaggtggttgtttcacaaacaaaaaaagttgcagttcccacaccagctaagaaagctgctgttactccaggtaaaaaggcagcagccacaccagccaagaaggcagttacaccagccaaagcagttgcaacacctggaaagaagggagccacacaagcaannnnnnnnnnnnnaacccctggtaaaaagggagctgtcactccagccaagggggctaagaatggtaagaatgctaagaaggaagacagnnnnnnnnnnnnnnnnnncgacgatgatgaagacgacagtgatgaggatgaagaggatgaggaagaggatgaatttgagccaccagtagtgaaaggaaaacaaggaaaggtagctgctgctgctcctgcctcagaggatgaagacgaggaagagnnnnnnnnnnnnnnnnnnnnnnnnnnnnnnnnnnnnnnnnnnctnnnnnnnnnnnnnnnntatggagatcacacctgccaaaggaaagaaagctcctgcaaaagttgttcctgtgaaagccaagaatgtggctgaggannnnnnnnnnnnnnnngaagaggnnnnnnnnnnnnnnnnnnnnnnnagaagargargaagaannnnnnnnnnnnnnnnnnnnngaagaggaagagcctgttaaaccagcacctggaaaacggaagaaggaaatgaccaaacagaaagaagttcctgaagcaaagaaacagaaagtggaaggttcagaatcaactacacctttcaatctgttcattggaaaccttaacccaaacaagtctgttgcttgaattaaaagttgccatcagtgaacyttttgctaaaaatgatcttgctgytgtggatgtcagawctggtacaaataggaaatttggttatgtggactttgagtcagctgaagacctagaaaaggccttggagctcaccggtttgaaagtgtttggcaatgaaattaaactagaaaaaccaaaaggaagagatagtaaaaaagttcgagctgcaaggacacttttagcaaaaaatctttctttcaacatcactgaggatgaattaaaagaagtgtttgaagatgccttggagatcagattggttagccaggatgggaagagtaaagggattgcttatattgaatttaagtctgaagctgatgcagagaaaaacttggaagaaaagcaaggagcagaaattgatgggcgttctgtttcactytactatactggggagaagggacaaaggcaagaaagaactggaaagaatagcacttggannnnnnnnnnaaaaactttggttttaagtaacctttcctacagtgcaacagaagaaactcttcaggaagtgttwgagaaagcaacttttatcaaagtgccccagaaccaacakggcaaatctaaagggtatgcgtytatagaayytgcyycatttgaagatgctaaasaagctttaaattcykgtwacaaaakgsaamttgasggcagawcaaycaggttggagttacaaggacccagggggtcacctaatgcgagaagtcagccatccaaaacactgtttgtcaagggtctgtctgaggataccactgaagagaccttaaaagaatcatttgagggctctgttcgtgcaagaatagtcactgatcgggaaactggttcctctaaagggtttggttttgtagacttcaacagtgaggaagatgccaaagctgccaaggaggccatggaagatggagagattgatgggaataaagttactttggactgggccaaacctaagggtgaaggtggctttggtggccgaggtggaggcagaggaggttttgggggccgaggtggtggaagaggaggaggccgaggtggatttggcggcagaggccggggcggctttggaggtagaggaggcttccgaggtnnnnnnnnnnnnnnnnnnnnnnnnnnagacttcaagccacaaggaaagaagacgaagtttgaataattccttcccaatctttcccacttcgttttaaagaaaggactctggggttttacactgttacctgttaaatgacggagccttttaaggacatttcaagagattttttttcctacaaatattttgnnnnnnnnnnnnnnnnnnnnncgttgggggttgtaaaagaatgtttatcatgttttttttagctaa

SEQ ID NO: 525 - DNA, 2337 bp, Cricetulus griseus
  misc_feature (104)..(155): n is a, c, g, or t
  misc_feature (169)..(192): n is a, c, g, or t
  misc_feature (199)..(235): n is a, c, g, or t
  misc_feature (242)..(280): n is a, c, g, or t
  misc_feature (282)..(295): n is a, c, g, or t
  misc_feature (323)..(395): n is a, c, g, or t
  misc_feature (440)..(463): n is a, c, g, or t
  misc_feature (1673)..(1700): n is a, c, g, or t
gacactggccaagacaacagtgaccggaggacctssctttgcggctccgagagatcggaacgccgccgcgctccgggactacagcctgttgctggacttcgagnnnnnnnnnnnnnnnnnnnnnnnnnnnnnnnnnnnnnnnnnnnnnnnnnnnnagttccctatgggnnnnnnnnnnnnnnnnnnnnnnnncgcggtnnnnnnnnnnnnnnnnnnnnnnnnnnnnnnnnnnnnnacggtgnnnnnnnnnnnnnnnnnnnnnnnnnnnnnnnnnnnnnnnannnnnnnnnnnnnnycgcgtggagatcatagccaacgatcannnnnnnnnnnnnnnnnnnnnnnnnnnnnnnnnnnnnnnnnnnnnnnnnnnnnnnnnnnnnnnnnnnnnnnnngaaccagctcacctccaatyccgaraacacggkcttcgacgccannnnnnnnnnnnnnnnnnnnnnnnatgacccttcagtgcagcaggacatcaagttcttgcstktsaaggtggttgaaaagaaaactaaaccatacattcaagttgatattggaggtgggcaaaccaaaacatttgccccagaagaaattkctgccatggttctcactaaaatgaaagaaactgctgaagcatatttgggaaagaaggttacccatgcagttgttactgtgccggcttacttcaatgatgcccagcgccaagcaaccaaagatgctggcaccattgctggactgaatgtcatgcggatcatcaatgagcccacagcagctgctattgcgtatggcctggataagagagagggcgasaagaacatcctcgtttttgacctgggcggwggaaccttcgatgtgtctcttctgaccattgacaatggtgtctttgaagtggtggccacgaatggagacactcatctcggtggggaagactttgatcagcgggttatggaacacttcatcaagctgtacaaaaagaaaactgggaaagacgttagaaaagacaacagagctgtgcagaaacttcgtcgtgaggtggaaaaggctaagcgagccctgtcttctcagcatcaagcaagaattgagatakagtccttctttgaaggagaagacttctctgagaccytgacwygggccaaatttgaagagttgaacatggacctgttccgatctaccatgaagcmmgtccagaaagtgttggaagactctgatctgaagaaatcagacattgatgaaattgttcttgtcggtgggtctactcggattcccaagattcagcagctggtgaaagagttcttcaatggcaaggagccatcccgtggcataaacccagatgaggctgtagcatacggtgctgctgtccaggctggtgtcctctctggkgatcaagatacaggtgatctggtactgcktgrtgtatgtcctcttacacttggtattgraacagtgggaggkgtcatgaccaaactgrttccmaggwacactgkggkacccaccmagaagkctcagatcytttccmcagcttctgataatcagscaactgtaacaatcaaggkctwtgaaggkgamcgaccccwaacaaaagacaaccatcttctgggtacatttgatctgactggaattcctcctgctcctcgtggggtaccccagattgaagtcacctttgagatagatgttaatgnnnnnnnnnnnnnnnnnnnnnnnnnnnnaggtacagggaacaaaaacaaaatcacaattaccaatgaccaaaatcgcctgacacctgaagaaattgaaaggatggttaatgatgcagagaagtttgctgaggaagacaaaaagctcaaagagcgcattgataccaggaacgagttggaaagctatgcttactctctcaagaaccagattggagataaagaaaagctgggcggtaaactttcctctgaagataaagaaaccatggagaaagctgtagaggaaaagattgaatggctggaaagccaccaggatgcagacattgaagactttaaagctaaaaagaaggaactagaggaaattgttcagcctattattagcaaactctatggaagtgcaggccctcccccaactggtgaagaggatacatcagaaaaagatgagttgtaggtgtactgatctgctagggctgtaatattgtaaatattggactcaggaactttcgttaggagaaaattgagagaacttaagtctcgaatgtaattggaatcttcacctcagagtggagttgaaaatgctatagcccaagtggctgtttactgcttttcattagcagttgctcacatgtcttggggttggggaaaggaggaattggcaatttttaaaatt

SEQ ID NO: 526 - DNA, 2211 bp, Cricetulus griseus
ggcctgcttcgcctcgtgccctcccgccgccgccccgcagaaatgcttcgactacccacagtccttcgccagatgagaccagtgtcccgggcgctggctcctcatctcactcgggcctatgccaaagatgtaaaatttggtgcagatgctcgagccttaatgcttcaaggtgtagaccttttagcggatgctgtagctgttacaatggggccaawgggaagaacagtgattattgaacagagttggggaagtcccaaagtaacaaaagatggggtcactgttgcaaaggcaattgatctaaaggataaatacaaaaatatcggagctaaacttgktcaagatgttgccaataacacaaatgaagakgctggggatggcrctaccactgctactgytctggcacgttctattgccaaggaaggctttgagaagatcagcaaaggggctaatccagtagaaatccggagaggtgtgatgttggctgttgatgctgtaattgctgaactgaaaaaacaatctaaacctgtgacaacccctgaagaaattgctcaggttgctacaatttctgcgaatggagacaaagacattggaaacatcatctctgatgcaatgaaaaaggttggaaggaaaggcgtcatcacagtgaaggatggaaaaaccctgaatgatgagttagaaattattgaaggcatgaagtttgacagaggatatatttccccgtattttattaacacatcaaaaggtcaaaaatgtgaattccaagatgcctatgttctgttgagtgaaaagaaaatttctagtgtccagtccattgtacctgctcttgaaattgctaatgctcatcgtaagcccttggtcattattgctgaagatgttgatggagaagctctaagcacactggttttgaacaggctaaaagttggtcttcaggtggtagcagtcaaagctccaggttttggggacaataggaagaatcagcttaaagatatggctattgctactggtggtgcggtgtttggagaagaggggctaaatctaaatcttgaagatgttcaagctcatgacttgggaaaagttggagaggtcattgtcaccaaagatgacgccatgcttttgaaaggaaagggtgagaaagctcagattgagaaacgaattcaagaaatcactgagcagctagaaatcacaactagtgaatatgaaaaggaaaaactaaacgaaagactcgctaaactttcagatggagtagcagtgttgaaggttggaggaacaagtgatgttgaagtgaatgagaagaaagacagagttacagatgctctcaatgctacaagagcagctgttgaagaaggcattgttttaggagggggctgtgctctgcttcgatgcatcccagccttggattccttaaagccttctaatgaagatcagaaaataggtatagaaattattaaaagagcactcaaaattcctgcaatgacaattgctaagaatgcaggtgttgaaggatctttgatagttgagaaaattctgcagagttcctcggaaattggttatgatgctatgctcggagattttgtgaacatggtggaaaagggaatcattgatccaacaaaggttgtaagaactgctttactggatgctgctggggtggcctccttgctaactacagcagaagctgtagtgaccgaaattcctaaagaagagaaggaccctggaatgggcgcaatgggtggaatgggagggggtatgggaggtggcatgttctaattcctagaatagtgctttgcccttatcaatgaactgtgacaggaagctcaatgcaggttcctcggtgataacttaagagaagtcacctgaagaaaatgaagagaaggctggctgatcactataaccatcagttactggttcccattgacaatacataatggtttactgctgtcattgtccatgcctacagataatttattttgtatttttgaataaagacatttgtacattcctgatactgggtgcaagagccatataccagtgtcctgctttcaacttaaatcattgaggcagttctactattctgttacagtcaggattctagtgcttgcgtgaccagatgagttcagaagcagcctttctgtggagagtgagaataattgtgtacaaagtagagaagtatccaattatgtgacaacttttgtgtaataaaattttgtttaaaag

SEQ ID NO: 527 - DNA, 1249 bp, Cricetinae gen. sp.
tccgtccatcaccatggcagcatgcactgggggcccggggtcctggagtgaaaatatactggattattttcttagaaacagtcagatcacgacagaagatggtgctgagatcatctggtatcatgcagccaaccacaagtcccagatgcaggaggcattgaggagtgctgcccacatgatagaggctgatgtccttcttcctagtgatggatcagagcatggccagccaatcatggcccatcctcctgagatgaacagtgataacactctgcargartggctggctgargkcatgaarartaacaagggcatcaagttggatttcaagartctggcagctgccaragcatccatgctgktcctggacaatgtgaarcarcacctgcagtgtcctgtgtggatgaatgcggatrttcttcctggaccaaatggaagcagcaaagttgtggatgccaaagcctttctagacaccgtgacatccttcttcccagatgtgaccttttccctgggttggacaacaggatggcatccggagaaagtcaatgaaggctatagttggacaatggtgaaagagatggactacatatgcagtggactaacccagcccgtcacgtttcctgtcagggcagctttggtcaggcagtcctgttctcagttactctggctattgaagaagtctaacaggtacagcctgactgtttggactggaaaggatgacagttatcccactgaagatttactttatattcgagactactttaataaaacccaagttttctatgatattttggaaccacaaagccatgaatttaaacaagccattgggatctgagtcactctaagaatacaagaagacattttctaatcattttctctcttggcttcaccatcattctctgctttgtctgaattcattgctgtattaattgtgattattggtttgtactaaattatccaatcaaaatgcttgttgtatacctactcttcctttatcatgtcttcatggctgcacacatctgaaagattttatgaactgcaataaaattgtataaaattatagtaaaaatgctcaagctaggtgtggtggcacatgcttataaccctagacttgggggactgaggcaggaagatcaagagttcaaggctagcctggactacattgtgataccctatctcaaatttgtaacttctcaataataatcagacattaattttataaaaactttttgaattaataaagtttttgatg

SEQ ID NO: 528 - DNA, 2244 bp, Cricetulus griseus
  misc_feature (578)..(595): n is a, c, g, or t
gttttgtgtggtctcgtcgccagcacagccgggcctacaggcaagcaaccatgtctaagggacctgcagttggtattgatcttggcaccacctactcctgtgtgggtgtcttccascatggaaaggtggagataattgccaatgaccagggtaaccgaaccacgccaagctatgtkgcttttactgacacakaacgattaattggggatgccgcgaagaatcargttgcaatgaaccccaccaacacagtttttgatgccaaacgtctgatcggacgtargtttgatgatgctgttgttcagtctgatatgaagcactggcccttcatggtggtgaacgatgcakgcaggcccaaggtccaagtagaatacaaaggagaggcaaaaagtttctacccagaggaggtgtcctctatggttctgaccaakatgaaggaaattgcagaagcctatctcgggaagactgttaccaatgctgtggtcacagtgccagcctacttcaatgattctcagcgacaggctacaaaagatgctggaactattgctggcctgaatgtcctgcgaattatcaatgaaccnnnnnnnnnnnnnnnnnnttatgggctagataagaaggttggagctgaaaggaatgtgctcatttttgacttgggaggtggtacttttgatgtgtctatcctcactattgaggatggaatttttgaagtcaaatcaacagccggagacacccacttgggtggagaagactttgataacagaatggtcaaccatttcattgctgagtttaagcgaaacgacaagaaggacatcagcgagaacaagagagctgtcaggcgtctgcgtactgcctgtgaacgggcaaagcgcaccctctcctccagcacccaggccagtattgagattgattctctctatgagggaattgatttctatacctccattacccgtgctcgattcgaagaattgaatgctgacctgttccgaggcactctggaccctgtagagaaggcccttcgagatgctaaactagacaagtcacagatccatgacattgtcttggtgggtggttccaccagaatccccaagattcagaagcttctgcaagacttcttcaatggaaaagaactgaataagagcattaaccccgatgaagctgttgcttatggtgcagctgtccaggcggccattctatctggagacaagtctgagaatgttcaggatttgttgctcttggatgtcactcctctttcccttggcattgaaactgctggtggagtcatgactgtsctcatcaagcgcaataccaccatccctaccaagcagacgcagactttcactacctattctgacaatcagcctggtgtgctcattcaggtctatgaaggcgaaagggccatgaccaaggataacaacctgcttggaaagtttgaacttacaggcatccctccagcaccccgtggtgttcctcagattgaagttacttttgacattgatgccaatggcatcctcaatgtctctgctgtagataagagcacaggcaaggagaacaagatcactatcaccaacgacaagggccgcttgagcaaggaggatattgaacgcatggtccaggaagctgagaagtacawagctgaagatgagaagcagagagataaggtttcctccaagaattcactggagtcctatgctttcaacatgaaagcaacagttgaagacgagaaacttcaaggcaagatcaatgatgaggacaaacagaagattctagacaagtgtaatgaaatcatcagttggctggataagaatcagactgcagagaaggaagaatttgaacaccagcagaaagaactggagaaagtctgcaaccccatcattaccaagctgtaccagagtgctggtggcatgcctggaggaatgcccgggggcttccctggtggtggagctcctccatctggtggtgcttcttcagggcctaccattgaagaggtggattaagtcagtccaagtagaggtgtagcattgttccacagggaaacatttgaaggacccaaatttgcaaagtttcatggcagtttttaaatttaaactgttaacaataaattactgggcattctcaatacttgaacatggaacatgtacacaggaaataaaacattgctctttataagcactgtatcctaagtggaaaactcaatgtctaatatggtggaaaatggaatgtctaaataaaactatttaaattggcacc

SEQ ID NO: 529 - DNA, 2084 bp, Cricetulus griseus
aaaaagaaagctgggcctcgcttttcccatctttgagggcattgagggagagtgtatgcatgcacccatggagtataatcagataaaagaattggcagaatcagtcaggaaatatggagtcacagccaactttactcttacacaattggatagacttgccctaaatgccttgacgccatctgactggcagatggtcacaaaagctgcgcttgtcagcatgggccaatacatggagtggaaagcactctggcatgaggccgcccaagagcaggccagagctaacgcgacggccttaactcctgagcaacaactatggacattcgacctgttaacgggccagggtcgttttgcagctgatcaaacaaattatcattggggcgcttatccacaaatcgacaacgcggccattagggcctgaaaggtgctctccaagaaaggaggggttgacaatcagcttactaaaatcattcaaggaacccaggagactttctccgattttgtagcaaggatgacagaggcagcgggatggatctttggcgatcctgagcaggccgcacctcttgttgagcaacttatctttgaacaggcctcccaagaatgtcgcgcagctatagccccgagaaaaaacaaaggattacaagattggcttagggtctgtagagaacttgggggaccccttactaatgcagggttagctactgccatcctacagtctcaaaagcgcccccttaaggggccagataaaagaacttgctttakatgtggaacaattggacatattatggcagatggcccaactaggctgtgagcagaagctccccggcctatatgtcacctccatccaatatgaaaattttaccaaagcagctaatttgtctaaaagcctttctcagttcatgttacagaattggacctccaaatttgagcaaacgcttcgggagttgagagccgctattatccagattaactccacgcgccttgacctgtccttgacggagggattgtcatcatggatcgcttcrrctgtctcctattttaaggaatgggtgggggtgggattgtttggtgcakccgtttgctgcggattggtgttgcttctatggctggtctgtaggctcagggctcaaactaagagagacaaggtggttatcgcccaagcgcttgtagctttggaacaaggggcttccactgacatttggttaacaatacttaagcaataggccgctggccagacagctcttgcacacccggagcctargctcattgcacagggtagagtgtctggcttgagcagcccatgagggatgtggagcaaggcatcgcacagaagagttgcccagtatgcaggcttctctgggaggcatgttgtcctgcataagggttgcctgccctagtctccctttcccagaaaaacggcagaggacaggtcgagagcgcttcgggtcaagctaacagcctaatggcgactctcgtacacagtcttaatgtttgattgggaaggtacaacctctgcctctatccctcaacatatgggtgacctatttgcttgtaaaaatatgaagccttatcattaattaataaaaaagggggagatgtagggagccgtccctgcattctctattacaagatggcgcctgcatccggcaggcaccgaatggtawacaagktaatgcgcargtgctgggtaactttccatcccttggtctctgcctctyccgtggcgtcatatggtccgatgagctgcagccagtcagggggtgacacgtccgaggcggtggttgccagcctatataagggatgggtttttgggagttcggggtctctgctctgtaagcttatgctctccctctcaagatgcattaaagctttactacagaaggatcctgaatgtcctgcgtcattcttgctggcgagacggtagcgcgggacagatggtgacagccggtgcagaaagtgtcaacctcagcttccttctccaggaagacttcagcctgggactgctcctctacagagccccctaccaagattatctaacctgcctgccttcttgttgagctgtgtgtaataaactcattgagtttccc

SEQ ID NO: 530 - DNA, 2182 bp, Cricetulus griseus
  misc_feature (743)..(760): n is a, c, g, or t
gcaataactccatataagggtaaaggccttgaagtctggatgaaagtctgtagggagttagggggtccgctgactaatgctggactagcagctgctgtgttgcaattaactaagaaaggtggaggttcaggagcttgctttaaatgcggcaagcaagggcatttgaaaaagcaatgccccgagggaggaaacactaaagtcaataaactttgctccgcgccctaagcaacctggcttatgtcctagatgtagaaaaggaaatcattgggctaaggattgtagatcagtaaaagacatcagtggacagcctcttgttcaggggtatggaggagcccgttcaaaaaacggacgacggggcccacgaccccagggcccacaaatatatggggccatggaggatcagaaccaggagcagagtcccgaaacctggccctctcttcgtcatccgagggaccgaggagagccactacaggctccgcggggctggacttacgctccaccaccagactcgtattaactcccagaatgggggtccagcttgttgacaccgattttaagggaccccttgagcctggcacagtaggtttgcttataggaagatcatctgcagcattgaaaggtttacgagtacatcctggagttatagatcctgattacatgggtgtagtaaagatcatggtagaatctcctagagggattacggccatttctcctggagacaggatagcacagttactgctttnnnnnnnnnnnnnnnnnnagtttccagcacaagccagagagagaggagagggaaactttggctccactggatcaaacttaactttcctagctttagaccttgatcaacgtccaacccttgagttaatagtgaatggtaagaaaatcttaggcttactagattctggagctgataagagcatcatagccactaaagattggccctctggctggcctatacaggtttcttctcaaagtttacaaggtttaggctatgctaaggctcctgatatgagtgctagacaattgccttggaaagatcaggaagggcattcagggaccatgcaaccttatgtgttagacttaccaatttcattatggggaagagatttgttaaaggatatgggttttaaactcacaaatgaatactcagaaacatctcaaggtatcatgaaacgaatgggatacagtcccaggccaggcctcgggaaacatctgcagggtcgtaccagtcctattaattccacaattgagaccaaagaatctaggtctgggtttttcctagggccactgaggaggtattcctattacctggaaaacagaggagccggtatgggttcctcagtggccactttcctctgagaaactggaagctgctaagactctagtgcgggagcagctggatctggggcatataaaatcctctgtatctccatggaatactcctatttttgtcattaagaaaaaatctggtaaatggagactgcttcacgatcttagagctattaatcaacagatgcaaattatgggccctgtacaacgtggtcttccacttttaacttctttacctgcatcatggcctatcatctctatagatattaaagattgcttcttttccatacctttgtgtgccaaggattcagggcgttttgcgtttacgctgccctcttgtaatcatgaacaacctgatttaaggtatgaatggatagtgttgccacaggggatggccaatagtcctactatgtgtcagttgtttgtagcagaagcaattgctcctttgagagtggactttccaaagattagatgtgttcattatatggatgatattttattggctgccaaagatgataaaacgcttaataaggcatatacaaaattggtaaaattgcttgagatgcataatttagtcatagcctcagaaaaggtacaaaaggacactgttgttaactatctaggggctaagattctccctcatacaattattccacaaaagatagagattagaaaagataatttaaaaactcttaatgattttcaaaagttgttgggagatataaattggataagatgttatttaaaattaccaaattatgagttgaagccattgtataatattctcaatggtgattcagcattagattcacctaggcagttaactgctgaagccagagaagctttaaag

SEQ ID NO: 531 - DNA, 2154 bp, Cricetinae gen. sp.
gaggggcgtgtccacctaggaggaggcgagatggcggcgtctgtgtgtcgtccgtatgttcgctcgctgcctggagtcatgccctggcggagcagctcctgccactatgaatatactgccatgcaccattttctggggtccttccagaagctgccttttgaaccctttaacacaggtgccagaaaaatccatactgctcctgtccgatccttgttcctgctgcgccctgtgcccatcctgttggcaacaggtggtgggtatgcagggtaccggcagtatgagaagtacagggatcagaagcttgagaagctgggattggagattccgcccaaacttgccagtcactgggaggtggccctgtacaagtcggtgccaacgcgtttgctgtcacgtgcctggggtcgcctgaaccaggtggaacttccttactggctgcggaggccagtctacagcctgtatatctggacctttggggtaaacatgacagaggctgctgtggaggatctgcaccactaccgaaacctcagcgagttcttccgacgcaagctgaagcctcaggcacggcctgtctgtggcttgcacagtgtgatcagcccatcagatggcaagatcctcacctttgggcaggtgaagaattgtgaggtggagcaagtaaaaggcgtaacctactccctggagtcattcctgggtcctcgaacctatacagaggatctgtccttccctccagcctcctcccgtgactccttcaggaaccagctggtcactcgggaagggaatgagctctaccactgtgtcatctacctggcccccggagactatcactgcttccactcccctactgactggactgtctcacatcggcgccacttcccaggttccttgatgtcagtgaaccctggcatggcccgatggatcaaagagctcttctgtcacaatgagcgtgtggtgctgagtggggactggaaacacgggttcttctcattgacggcagtgggcgccactaacgtgggctccatccgcatctactttgatcaagacctgcacacaaacagtcccagatacagcaagggttcctacaatgacttgagctttgtaacacatgccaacaaggagggcattcccatgcgcaagggcgagcacctgggtgaattcaacttgggctctactattgtgctcatctttgaggcccctaaggacttcaacttcaggctgaaggcagggcaaaagatccgctttggggaagcgctgggctctctctagtcgtcttggttgtggctgccaagggatctttccacgcagaagcatgagagtcttcagagacactcctgactgtcctggtgagaggactgtgggactggccaagtaggacctgaatgatttgttcccgcctgcccagaggtgcagagagaggttttggatttgtcaggacctagtgggtatgatttgaccctacatctcctggctgagcattgtgagaacagttatgcactaccacaccctctagttgctctccccagctgtctcagggcctttttctgtcagcccttctgttctttctgccttagcatctctgtctcccctcactgtgcacaggacgaggtgcttccttggcacagacctcttagaggaggccccatggccttcacaactgctttctgttcccagttcaaccctctgcttgctggaaaagtaaaatcatttatgttgttgaatgtgttgacctagattctgccagtgtcttctgaggtctgaccttccaaggctggctgagccctttttgctagggcaagaccaatcactgacttgcctggtagtgtccggagtggaggcccagccctgcaggaagtgtaggagacatgctgctattggtctaggggctgtgttggaggcagagggtgtggtggtcagtacttagaaaacctgttccaagtgactgcgggtattcaggccattaggatcccagtaatagggacaaggccagatttcatgttgatcttggggatgccatggatttctcctgcaggagaaattattgaactttgatttcaactgtatcagtagtacagtattttgtatgaaaagtaggagtcttctgaacagtaattcatttcattgcaagacattttgaaataaaaaagacaaaacaccattgta

SEQ ID NO: 532 - DNA, 4278 bp, Cricetulus sp.
  misc_feature (940)..(975): n is a, c, g, or t
  misc_feature (1844)..(1862): n is a, c, g, or t
  misc_feature (2722)..(2763): n is a, c, g, or t
  misc_feature (3030)..(3067): n is a, c, g, or t
  misc_feature (3329)..(3359): n is a, c, g, or t
  misc_feature (4183)..(4233): n is a, c, g, or t
gaattcccccggaccggcgcgagcgcagcgcgagcgggagctgcggcggactgcggggcggccccggtcccggccccctccgtccccggcctgccctgccctccggcacccctgctcgccgcctcccgggccatggggaacactgcgatcgccaagaaaggcagcgaggtggagagcgtgaaagaatttctagccaaagccaaagaagactttctgaggaaatgggagaaccctcccccgagtaatgctgggcttgaagattttgaaaggaaaaaaacccttggaacgggttctttcgggagagtcatgctggtgaagcataaagccactgagcagtactatgccatgaagatcttagacaagcagaaggtggttaagctgaagcaaatagaacatactttgaatgagaaaagaatactacaggcggtggagtttccgtttcttgtccgactggagtattcttttaaggataattctaatttatacatggttatggaatatgttcctgggggtgaaatgttttctcatctgagaagaattggaaggttcagtgagccacatgctcgattctacgcggctcagattgtgctcacgtttgagtacctccactccctggacctcatctacagagatctcaagcctgagaacctcttaattgaccaccagggttacatccaggtcacagacttcgggtttgccaagagagtgaagggcaggacctggacactgtgtggcaccccagagtacctggcccctgagatcatcctcagcaagggctacaataaggcagtggactggtgggcactgggagtgctcatctatgagatggccgctggctaccccccattctttgcagaccagcctattcagatttatgagaagatcgtttctggaaaggtccggttcccctcccacttcagctctgacctcaaggacctcnnnnnnnnnnnnnnnnnnnnnnnnnnnnnnnnnnnnttcggaaacctgaagaatggcgtgagtgacataaagacccacaagtggtttgccacgactgactggattgctatttaccagagaaaggttgaggctccattcataccaaagttcagaggctctggggataccagcaacttcgatgactatgaagaagaagaaatccgtgtctctataacagaaaaatgtggaaaagaattttgtgaattttagggagggaaaagatggcctcgagctcacactagtctttgcacgctgtggaggtggaaggtggagccgagccctgctcattgaagcagttaccaagttccttcattccagcaactgagtgaggtccgtatcgcatcatcagtgtgcactctgcaaccacctgtgtaccagggcaccgtccgcacgcattgtccgtgccatgacacagtgtgcaccactttcctactgttgagttgtttttctccaccctcctacattcttttcattatcttctctgaccagtactccactttattttctccgtgtttcaggtggcagtgttatggctgtgtgatatttaaaaggaaagctacgtgttgcttcttgtagttttgagcgatatttttgctgaccagtggcttgaagataaactctctaatgattatttttattttgagtagctcggactcagttttgccaaaactcttataatttttgaagatggaatgtcttatcaccaagggaatatgcataagtgaagataataacttttcaggagtcactgatgtggcaataaattcagagtggctagcctagcagtatggactcctggaccagaggcttcatttccctttgccttttaatattcttctctctgtgagaaattaagtgaccagacnnnnnnnnnnnnnnnnnnnagaagtgaggggcgtggctccttgcccggccgtctccctggtaccaacatctctgtgggttagaagggcattccgaggtttctaagccttcactcttccatgagggttttagccagtatttaggagacatgactctaaagctatgcaacgtgaaatgtctcagacagtcctcatcggcagtgtcttaagggaaacatgcgaactaaaggaacacagatttggatagatgctaagtcgagggaagccttgatccctgcttacagcgtagagctactgtcctttcagggaagtggtctgtttgctttggttcataacacgtaaggacaagaagttgctgttgcttactgttgtgacgtattaagatgagggcaccgtggcaacttcagattttatcccctgctttggcagagggggggggaggcaaagcttaagaaactgccacatttgtagtttaattttgaggtgtgatattatctttagatacatcggaatttctaacctctttttttctttgtagacagagtatatgatcatgcagatacagttttaatatttgtgtttccttaatttttttatactttttgccaattgacttcacaatgttgccatcatgaggaaatttcaagcactcttgcacatttagttcagtgttctttgtgaataaatggcttaacttttttaactattttttccattgcttttattttcctgtctcattttctctctgtttcagtgacctaccttaaatgatcaactcacccaaatggtttaaaatgttccattttgtgagcaatctacaagcatataaggttgttttaaatcaaacaagccctaatgtgtatatatatatgtgtgtgtgnnnnnnnnnnnnnnnnnnnnnnnnnnnnnnnnnnnnnnnnnnaaaccttgatctgcttccttactggtgcaggtaggtcattgacgccacccctgttcatatgcacccacccctcactaaacccttgaagacactgagaagtcctacaagagaccttctctccacctatctgcatgtcttttggttgtcaagtgtttctgcatggtagtgtccacaaagacaaatgatgatttcagttggtccacctgtatttaaaatgtgcaagaaaaattgaaatactctgctgtagcaagttttatgtaacaaagnnnnnnnnnnnnnnnnnnnnnnnnnnnnnnnnnnnnnntgtacaaaatactttagttttttgtatttcatttaaacccaagaacatgctaatcattgtgttttatgtatgctacaaattctctggtagaattgttgtatattattgtaaaattatttcaataaatcatggggatgacaatttgattattatactttagttttcaaaattgaacagatttctatgaatcctaaaaatatttttttctatgaaatcattagtacccagctagagtccgcccaggtatggcccctagacatannnnnnnnnnnnnnnnnnnnnnnnnnnnnnnatttcactgtctgtttgaagtacatgagcgaactgtcagatgtgtcaaaggggtctatttctgactaatcaagtgcactaaatcagaatattcttagcatactgagagttcccatttttagccacagggtagccaaaaggattttctttaaaacttaaaataataagtcagtggcaaaaaccagtgtttaactcaaattatattacacaaaacagaagaaattatgtttttgcccagaaaataaagaaacagcgtggtgcaggaaggagcctggatgacagtgaaacttactggagtgttgtcagttgcagacagcagaagagctggacaggcactttctgggtcctttccaattccccatgttaggtcaaggtcccctctttatctgatacccttaagggacaacatactctgaagtaagtttctgtacagtgatacatttctgtgcatccttcctcttacctcttacactatcctgaaaatcctttgactatcataagacccttgtctgtcccgttccatactcccccactgatgctaatatacacttgatatcaaactgtcagcctaccaaaaagatattgtggcttatgggtattgctgtcttgttcttggtatgttcctatactgattgcccctcagtctgaaaaaaaatgctcattgtaagcctaaaactagatgattttgctttcccactcactgttttttctttccttctgcttgttgtaagaatccaatgaaataatgtatgtaaaagcaccttgtaaactgtaagctttcggtgtaagatgtaaggtgtgttgttttttcattaattctttgtnnnnnnnnnnnnnnnnnnnnnnnnnnnnnnnnnnnnnnnnnnnnnnnnnnngttttttaattcatcaataaccgcaaaattaaagtatctttaaag

SEQ ID NO: 533 - DNA, 843 bp, Cricetulus griseus
gcgcggtttcctgcttcaacagtgcttgaacggaacccggcgctcgacccctccgaccccagccggccgctccgggacagaaccctttgcaacctcgtcgctccgccgctccagsstcgccaccgcgcccgccgccgccatgaccaccaccgccctgaccaccgcgtctccctcgcaggtgcgccagaactaccaccaggactcggaggctgccatcaaccgccagatcaacctggaactgtacgcctcctacgtctatctgtctatgtcttgctactttgaccgggatgatgtggctctgaagaactttgccaaatactttctccaccaatctcatgaggagagggaacacgctgagaaactgatgaagctgcagaaccarcgaggtggccgaatcttcctgcaggatatcaagaaaccagaccgtgatgactgggagagtgggctgaacgcaatggagtgtgcactgcacttggaaaagagtgtgaatcagtcactactggaactgcacaaactggctactgacaaaaatgacccccatttgtgtgacttcattgagacccattacctgaatgagcaggtgaaatccatcaaagagctgggtgaccacgtgaccaacttgcgcaagatgggagcccctgaagctggcatggcagaatatctctttgacaagcacaccctgggacatagtgagagctaagctgacttcccgaagccaccagtgatgtcatcagtcactgaggaagtgtatgcatgttggctgccgttaccttttctataagtcaccaaaacatctgcttaagttcttttaatttgtaccatttcttcaaataaaggattttg

SEQ ID NO: 534 - DNA, 1842 bp, Cricetulus sp.
  misc_feature (101)..(119): n is a, c, g, or t
  misc_feature (830)..(854): n is a, c, g, or t
ctgtatagtgcctgcaaactgtgtgaaaaccctttaaccattttaatccgatgtttatcaatctaatctcttattctaataaaaatactatggagttaaannnnnnnnnnnnnnnnnnntgcccaagaagaagccgacgcccatccagctgaacccgacccccgatggctcggcggttaacgggaccagctcggccgagaccaacctggaggccttgcagaagaagctggaggagctggagcttgaggagcagcagcgaaaccgtctggaggcctttctgacccagaagcagaaggtgggagaactgaaggatgatgactttgagaagatcagtgagctgggggccggcaacggtggagtggtattcaaggtctcccataagccgtctggcctagttatggccaggaagctaattcatctggagatcaaacccgcaatccggaaccagatcatccgggagctgcaggtgctgcatgagtgcaactccccatacatcgtgggcttctatggggttttctacagtgacggcgagatcagcatctgcatggaacacatggatggtgggtccttggatcaagttctgaagaaagctggaagaattcctgagcaaattttaggaaaagttagcattgctgtgataaaaggcctgacatatcttcgggagaagcacaagattatgcacagagatgtcaagccttccaatattctagtaaactcccgtggagaaatcaaactctgtgattttggggtcagcgggcaactaattgactccatggccaactcctttgtaggcacaagatcatacatgtcgcccgagagactccaggggnnnnnnnnnnnnnnnnnnnnnnnnntctggagcatggggctctctctggtggagatggcagttgggagataccccatccctcctcctgatgccaaggaactggagctgctgtttggatgccaggtggagggagatgcagccgaaacgccacccaggccgaggacccctgggaggccccttagctcatatggaatggacagccgacctcccatggcaatttttgagttgttggattatatagtcaatgagcctcctscaaaattgcccagtggagtattcagtctggagtttcaagattttgtgaataaatgcttaataaagaaccctgcagagagagcagatctaaagcagcttctggttcacgctttcatcaagagatctgatgccgaggaagtagacttcgcaggttggctctgctccaccattgggcttaaccagcccagcacaccaacccatgccgctagcatctgagcctttgggaagcagcaaagaggaaatcctctkcccagtggcatgccatgttgctttcamgcctctcccatgcttgtctctgttcagacgtgcatctcatctgtgacaaaggatgaagaacacagcatgtgccaaattgtacttgtgtgtgtcatttttaatatcactgtctttatcactatggttactcccctaagtgattggctttgtgcttggggctatatgtatgttgatcaaacacataccaggctgaactatagtgaaaccctggtgaccagggtggtcattcttattgatgtttgcactgctgttcatgttccgtgactcactggctggctgcctctattgtcaggattctcggacccttggtacttcactcttgctggtgacctctcagtctgaagagagggagcttggtgagacccttcacaggcagtgcatgggaagcatgctttgctgctactgaaatgagcatcagattgtgtacatcatgttatttttatgttttgcttttgatatagaactcagcaattcccatcaaa

SEQ ID NO: 535 - DNA, 1437 bp, Cricetinae gen. sp.
gtctactgatggtgctgaaggcacctcacagattccagcttcggaacaagagactctggttagaccaaaaccattgtttctgaagttgttaaagtctgtcggggcgcagaaagatacctatactatgaaagagattatattatcttggcagtatataatgactaaacgattatatgatgagaagcagcaacacattgtgtattgttcaaacgatcttctaggagatttgtttggagtgccgagcttctctgtgaaagaccacaggaaaatacatataatgatctacagaaacttggtggtcgtaagccagcaagagactcttcagtccggcacatcagtgagtgagagcagatgtcagcctgaaggaggcagtgaacagaaggatcctgtgcaggagccacaagaagagaagtcgtcttcagattcagtttctagaccatctacctcatctagaaggagaacaattagtgagacagaagaaaatgcagatgagctacctggtgatcgacagaggaagcgccacaggtccctttcctttgatgaaagcctggctttgtgtgtgttaagagagatatgctgtgagagaagcagcagcagcgagtccacagacaccccctcaaatcaggatcttgatgatggtgtaagtgaacactcgggcgattggctggatcaggattcagtttctgatcaattcagtgtagaatttgaagttgagtctcttgactcagaagattacagcctgagtgaaggagggcaggagctctcagatgaggatgacgaggtctatcgagtcacagtgtatcagtcaggagaaagtgatgtagattcctttgaaggagatccggaaatctccttagctgactattggaaatgtacctcctgcaatgaaatgaatcctccccttccacctcwctgcaacagatgttggacyctkcgtgagaaytggcttccrgaagataargrgaargataraggggacrysyctgaagargccaarctggaggcagaaggcttagatgtgtcctgatggggaaaaaagctacakcgartgattstaaggagtcctgcactgaggarartgatgataargaaatatatacctcccagtcrcaagagagtgaggactattcccagccstcaacktccagcagcattgtttatagcagccargaagaygtcaaagagtgggagaaggaagagacascagacaaagargagartgtggaatctggcttctctcttaatgccattgaaccatgtgtgatttgccaagggcggcctaaaaatggttgcattgttcatggcaaaactggacatctcatgtcatgtttcccatgtgcaaagaagctaaaaaaaaggaataagccctgcccagtgtgcagacaaccaatwcaaatgattgtgctaacttattttagctagctgacctgcccataa

SEQ ID NO: 536 - DNA, 4987 bp, Cricetulus griseus
  misc_feature (348)..(373): n is a, c, g, or t
  misc_feature (376)..(388): n is a, c, g, or t
  misc_feature (2549)..(2569): n is a, c, g, or t
ggtggagcccgggcgcagctcaaacatggcggcggctggcacgggccggtgaggcggtaccaggtgggggccgtcgggtgtcatgggcggtggcggcggcaccgcctccgcgtctccctgagccggacctcacgggggactcagcgccaagctgggcgatggacgagagcagcgagctgggcggtctggagaccatggacaccctcacggagctgggcgacgagctgactctgggggacatcgatgaaatgctacagttcgtcagcaatcaagtgggagagttccctgatttgttttcagagcagctatgcagctccttccctggtggtggtagcagtggcagtagtnnnnnnnnnnnnnnnnnnnnnnnnnntgnnnnnnnnnnnnnaggcaatggtggtgcagccacagatcctggagtgcagcggtcgttcagccaggtcccattacctaccttctccccctcaactgcctcccctcaggctctagccttgcaggtcaaagtctctcctaccccacccagggcaacccctgttctccagcctagaccccagccccagccgcagccccagccttcagctcagcttcagcaacagacggtaatgatcaccccgacattcagcactgctccacagacaaggatcatccagcagcctttgatataccagaacgcagcaaccagcttccaagtcctgcaggctcaagtccaaagcctggtgacatcctcgcaggtacagccagtcacgatccagcagcaggtgcaaactgtacaggctcagcgggtgttgacacaaacagccaatggcacgctgcagacccttgccccagcaacagtgcagacagttgctgcaccccaggtgcagcaggtcccggtcctggttcagcctcagatcattaagacagattcccttgttttgaccacactgaaaacagatggcagccctgttatggctgcagtccagaacccagccctcactgccctcaccacccccctccagacgggcgcccttcaagtaccaactctggtgggcagcaatgggaccattctgaccacaatgcctgtgatgatgggacaagagaaagttcctattaagcaagtacctggcggtgtaaagcagctagagccccccaaagaaggagagaggaggacaacacacaacatcattgaaaagcgatatcgatcctctatcaatgacaaaatcatagagttgaaggacttggtcatgggaacagatgccaagatgcacaaatctggcgttctgaggaaggccattgattacatcaaatatttgcagcaggtcaatcacaagcttcgtcaggagaacatggtactgaagctggcaaatcagaaaaacaagctcctgaagggcattgatttaggcagtctggtggacagtgatgtggacttgaagattgaagactttaatcagaatgtccttctgatgtctcccccggcctctgactcggggtcccaagcaggcttctctccctattctattgactctgagccaggaagtcctctgctggatgatgcaaaggttaaagatgaaccagactctcctcctgtggcactgggcatggtggaccgatctcgaattctgctgtgtgtcctcaccttcttgggcctctcctttagccccttgacttccttgctgcagtggggaggggcccacgacactgaccagcacccatactcaggctctggccgaagtgtactgtctctggagtcaggttctgggggctggtttgactggatgatgccaactctcctcctgtggctggtaaatggtgtgattgtcttgagcgtctttgtgaagctgttggtccatggggagccagttatccgtccacacacacgctcctcagtcaccttctggagacaccggaagcaggcggacctagaccttgccagaggtgactttgcagctgctgctgccaacctacaaacctgtttatcagttttgggccgggcactgcccacctctcgcctggacttggcctgtagcctctcctggaatgtgatccggtacagcctacagaagctgcgtctggtgcgctggatactcaaaaaagtcttccagcgctggcgggccaccccagccactgcagctggctttgaggacgaagctaagagcagtgcaagggatgcagccctggcctatcacaggctgcaccagctgcatatcacagggaagcttcctgcaggatctacctgttcggatgtccacatggctctatgtgctgtgaacctcgctgagtgtgctgaggagaaaatcccaccaagcacacttattgagatccatctgacagccgccatggggctcaagaccggatgtggaggcaagctgggcttcttggctagctacttccttaatcgtgcccagagtctgtgtggcccagagcatagcactgtccctgactccctgcgctggctctgccaccccttgggccagaagtttttcatggagcgaagctggtcaatcaagtcagcagccaaggagagtctgtactgtgcccagaggaacccagctgaccccattgcccaagtnnnnnnnnnnnnnnnnnnnnncctcctggaaagagctgtggagtctttggtgaaacctcagtctaagaagaagtcaggcgaccaggaggatgagagctgtgaattttccagtgccctagagtatttgagattacttcattcttttgtggactctgtgggatttgtgaccccaccattctccagcagctctgtgctcaagtcagcccttggtccggatatcatctgtaggtggtggacatccgcagtcactatggccatcagctggctccagggagatgatgcagctgtgcgctctcattttactgaagtagagcggatccccaaggccctggaagtgactgagagtcccttggtgaaggccgtcttctatgcctgtagagccatgcatgcctcactctctggaaaaggagatgggcaacagaattccttctgccattgtgagagggccagtggccacctatggaacagtctcaatgtcagtggagctacttctgatccttcacttaaccatgtggtccagttgctgacctgtgacctactactgtccctgaggacagcactctggcaaaagcaggcaggtgccagccagggcctgggtgagacctaccatgcatcaggcactgaactggctggcttccagcgggacctgggcagcctgcgtaggctagcccacakcttccgcccagcataccgcaaggtgttcctgcatgaacccactgtgcgcttgatggcaggagccarccccacccggacgcaccagctgctggagcatagcctacggcggcgtaccagtcagaacaccaagcatggagagatagacacctggcctggscaacgagagcgagctactgccatcctgctggcctgccgccatcttcccctctctttcctgtcttccccaggccagcgggcagtgctgctggctgaagctgcccgcaccctggagaargtgggtgaccgacgctcctgcaatgactgscarcagawgattgtcaagctgggtggkggcmctgccatygctgcctcctgaccacgtatggggcttggtctacctccttccacctttgtctctttctcccaggatcttccctctgtctctcagactgtctccccatctgtttttctcccttctccaagagttgtgaggatgaaggcaagactgactttctgagttgtcacctgccaaggcttttggatcatttcagcccagtaggaccatgggcaagtctccttaagactgctgtggtaaatgtccatggtctaagcccaagtgggctgagaagaaaagtggcctgagcaggaatggggtgatctcctcacttgaaagcaacatagggtgctgccaaagccccttccccagccctctggagacctgagtgtctcactttctgcctctttgttttttttgttatgttttgtttttatcaggctttctctgggaactaggtctctgtgcaccagagaacattttgcattctggacttatctggcatgcccccttttatacaaatgtttttatatgtgtgcttgggcctgtcacaatacagggcaaagttgctgtggcatctttatttctcctgggtctgcactccttccactgtgcctgactaagcctgttcattgttttctcatcatcacaagggacagccagggaaggaagggagcccagtcctggggaggtgggtgggaggcaagggcaggtcttgggatggatgaaataatgttggcattgttttttaattttttaaaaaataaatggtatcttacttaattgtcctgttccttcccactcctccaccccctgagagggcaacctgagctcagggtaggcccaaggggctggataggatgaagccacctttggacctaggatccaggggtcttcagcatgatttatttgttccttcctacccctagcctaactcctacctcccatagagtgtatttttatccttaattcctgcctgtgaataggccagggtgacagacactggtccaagccctccccagcagcaagcctctcttttttcagggtaggcagcaggaatcaggtctcctccttgagatgggggagtcctaggaagagagtggtcctgcttttctggactgcttggttcagggcttcctgggagacttgcgaggaaccttccttgtgcttctcatccctctaagctggttgaagcagagagtaggcaggggtggccccttcctgtgcttggtccccacctgtcctatcctgtctatcactgtaatttatggtcccgctgatggggcagcccagcccttgtgtctcgtgtatatactgtgccttttctctttgttgggggtgggagggtggtttttcactgaacaggggatatacctatgtcttccttgatgttgcaacattcaccatgtgctggacataggttactcaataaacacagattggtaccacct

SEQ ID NO: 537 - DNA, 1124 bp, Cricetulus griseus
aattcggcacgagctttttcctggtttccacccggcgccaggtgacacacacagagctgccactatggttcatcaagtgctctaccgggctctggtctccactaagtggctggcggagtcgattcggtctggcagcctggggcccggcctgcgggtgttggacgcatcatggtactctccgggsacccgccaggcccgcaaagagtaccaggaacgccacgtgcctggcgcgtccttctttgatatagaggagtgccgggacacgacttcgccttatgagatgatgctgcccagygaggcscacttygssgactacgtgggcagyctgggaatcagcaacgacacacacgttgtggtgtacgacggakacaacctgggtagtttctatgcacccagagtatggtggatgttccgtgtgtttggccatcgcacggtgtcagtgcttaatggtggcttccggaactggctgaaggagggccacccagtgacatctgagccctcacgtccagagccagccgttttcaaagctacactggaccgctcccttctcaaaacctatgagcaggtcctggagaacctccagtctaaaaggttccagctggtagactcccgtgcccaaggacggtacctgggcacagaaccggagccggatatcgtaggactggactcgggccacatccgaggttcagctaacatgcccttcatgaacttcctaaccgaagatggctttgagaagagcccagaggagctgcgtgccatattccaggacaaaaaggtggacctttcacagcccctcattgccacatgccgcaagggggtcactgcctgtcatattgccctggctgcctacctctgtggcaagcctgatgtggctgtttatgacggctcctggtcggagtggttccaccaggcacccccggagacccgcgtgtcccagggaaagagtgggaaggcctgagtgtgcacagcctcctctgcacaccaacttcagttagttcccttaagagaggccagtgtgatctgtcacagcttcacacctcttaggcaatgaagactgacaggattttagaattgctgtgagtgcctccttcctaccatactgaaataaagtgctttttctcaga

SEQ ID NO: 538 - DNA, 702 bp, Cricetulus griseus
  misc_feature (246)..(272): n is a, c, g, or t
gacgtgttggtgcttctggctgcgctgctggccacagcgtcgggctacttcgtcagcatcgacgcacacgcagaggagtgcttcttcgagcgggtcacctcgggcaccaagatgggcctcatcttcgaggtggcggagggcggtttcctggacatcgacgtggagatcacaggaccagataataaaggaatctataaaggagatcgagagtccagtgggaaatataccttcgcagcccacatggannnnnnnnnnnnnnnnnnnnnnnnnnntaggatgtccaccatgactccaaagatagtaatgttcaccattgacattggggaagctcccaaaggacaagacatggagacagaagctcatcagaacaagctagaagaaatgattaatgaactggcagtggcgatgacagctgtaaagcacgaacaggagtacatggaagttcgggagagaatacacagagccatcaatgacaacacaaacagcagagtggtcctttggtccttcttcgaagctcttgttctagttgccatgacattgggaymgaycyactmcstgaagagattttttgaagtccggagggttgtttaaaaggccttttcctgttgatcccaaattcacaattcasttgtttaccaaacaccttggycataataatgtcattmgttgatacatttttattttccgatcgttcatgactta

SEQ ID NO: 539 - DNA, 2392 bp, Cricetinae gen. sp.
acgagtcgtggagcttkyrgcggctcgttaagaaaagtgaccatgggagaacaaygaaacctcagtrgattccaaatccattaaaaattttgaagtaccatacatggaagcaaatcaatggaytctggaatrtatctggacartagttacaaaatggattatcctgaaatgggtgtgtgtataataattaayaataagaactttcataaaagcactggaatgacacctcgctctggtactgatgttgatgcagccaamctcagggagacattcatgsscytgaaataygaagtycggaataagaaygatcttactygtgragaaattgtggaaytgatgaaaaatgyttctaaagaagatcacagcaraagragcagtttcrtttgtgtgattctaagccatggtgawgaaggagtaatttttggaacagatgggcctrttgacctgaaaaaactaactasttacttcagaggggactattgccgaagtctaaytggaaagcccaaactcttcatcattcargcctgccgtggtacrgarctggactgtggcattgakacagacagkggaacygawgatgacatgrcatgccasaagataccagtggaagccgacttcctgtatgcctactccacagcacctggttactactcctggagaaatccaaaggacgggtcctggttcatccagtcactttgttccatgttgaaactgtatgcacacaagcttgagtttatgcacattcttactcgagttaaccggaaggtggcaacagaatttgagtccttttcccttgactccacgtttcatgcaaagaaacagattccatgtattgtgtccatgctcacaaaagaattgtacttttatcactaaggaaatgattgggagctttgtttctctctgttctttgttgatgccaatgaggaaatagtgtcagggagactttatttccttctcatttaattctgatgttccagatggtaccatgaaccatataccactgccctagcaatgcaaccacaatgcagctacctcaagttcaacatcaggtagttgaaacaaaatttaattaggaacaaatgtcaatgatattactacattatagaggaaattacaaatttgctctttttataattagcaagatttggtgatactgtacattttgaataattctgaagaagttaaactttgtggtgtaattttatactccctacatacattaagaatgccatactagcttttgttaaaatataggaatgatggtgtcaaatgataatgtcttagaacttgaatccgtgggcagagtcaaaggcttgaacctttattttggaagtgatgtatggaaatgaagcattggaccaccagtagcatccattgtagcttctggttttgtgatgtttggcctaagcatgtatttgttattaaaaaatcatgttttattattgaaaaaaagagaggaaaatgtgtgaaattggttgactctttgaaggctaccatacatccgtagtggacatgatggcaaggtgctaaatctaccagcatttgtttcttgttcttgtacaaatcagcttagttttacagaccagcaaaataactaaaggatggttatgtagcagcatcaaattgtggattattagaatgaaataaagaaattctgcaggaacttactaaaataccacctgttaaacagaatgtaaggaggggagaaatgaatctactgaaattggagagaggtggttcgagccaccgaggagatatggcagagccttgggcacagcttcagaaaggactgccttctggatccgcctcatgagtacccgttcgtgtggatgatgtccccaaggtccaagtcaccacatgagaaagtgagccagatcagaaacttcagagaaagggctttcccaaagtggtgagaatctccagaaagatccctgaactccatgtcctgagtctataagcatgctgacttttctgttgaagtttacaataaaaggaagccaacggtgatatttacattgtcaccagggattaaaggactgtggcacacaggtacttggagaacatccagcacaggccctgcagctacacgggaagctgcaggatggagtccagtcccatcagagaggctgtgctccaggctgcctcctcacttgtggaggcgctgagccgacgctggctatcctgatgtgttcagcgtttcacggaaacttcctttttgctcaaagaaaggaaggaactcacatgtataactgttacattcttgttttagactggatctattaactctaaccaaatgtagcatgtgatgatattttaaagtgtgttccatgtatcaattttataagagtttgtcacatttttctttcaaaacataaactcagatttaaaatta

SEQ ID NO: 540 - DNA, 1198 bp, Cricetulus griseus
gtttctaccgtgtgtacctgctcgcgtgcaatccgccgccatcgcgctttgggcgagcattgtaatgggtagtagagaggcggcagccgagcggaggccgacctggctttggcgatggtggcgcgcgctctggaggaccgatcggagaccagcgccmggaggcggctcactgatgtggaggtgacggaggagcttttggtgtgacctggcgccatgtgtgtgataccacacgakcttgaccgagcgtgccacgcaatcataattcagcgaaccttttgcttcgatgaggcatcgtgttggtgatgactrgaagacatacgtggcttggaagatgacgtgaaatacacaggaaaggaaagaagtaaaaggatgttttgcttaagagtatgccatttgcaaattcattcaataattyggagatttatataagggcctgttcagacagtggtgtttctgattcctgctaaggaaagtgctccacacaagcctgatgacctgagctaattcctgaggcccacagggtggaagatgagagttgactcctgaaagtatcttcaaaccacacatacacaataagaaaaaacaatatagtaaagctgaaacattagagtgttgctgttttattgaaatgtaaaatggtacaagtaattatggaacaaatgtattccataccttgtgacagttttgtgtaaaaccttaccctcttctaaatgagaaagggattaaagttgtcaaaagaatttaacttttaagtctttcattttcttttataaaggtttatttctgatggtatgttgtatgtttgtgtgccctcatacagctggagttacagacagttgtgagctgcctgaggtgggtactgtgagcaacatgctctcacaagtaccaagtcatctctccagcccaactttttgtgaatgaatttgaaagtttttgcattttggagaaaaagcaaaagggaggtgtgctgttgtaatgtggcagttgccaatcaaaatgaactgtaacttcttgtcagttgctgcctggtaagaggctagcccagacacaacctactagaagtgtccttattacatttcaggaaccatgccaaatagggtggctgcccaatacaaccaggtagtttgtcttcagatccaattgtactgctgtctgtccggttcatttgtagtatacttaataaacatagttttctact

SEQ ID NO: 541 - DNA, 1181 bp, Cricetulus griseus
  misc_feature (1096)..(1096): n is a, c, g, or t
ccggaactcaagatggctgcgctcttgctgagacacgttggccgtcattgcctccgagcccaccttaattctcagatctgtctcagaaatgctgttcctttgggaaccacagccaaggaagagatggagcggttctggaataagaacacgagttcaaaacgtcctgtttctccccacctcactatctacagatggtctcttcccatggtaatgtccatttgccaccgtggcactggtgtggccttaagtggaggggtctctctttttggcctgtcggcactgctgcttcctgggaactttgaatcttatttgatgtttatcaagtccctgtgtttggggccagcattgatccactcagctaagtttgtgcttgtcttccctctcatgtaccactcgttgaatgggatccgacacttgatatgggacctarggaaaggcctgtcgatctcccaggtctatcagtctggagtggctgtcttgatgcttgctgtgytgtcctctgtagggctggcagccatgtgaagagctgaaattcccatcatcgtcctatacattatcacactgatttatattcccatttatcactcttatccccagtcaccaaggttcccctgatttgtttagatgccatgtgcttcagatcccactggagctcaktagagaggcttgaagacctgtagtagtagaaaaaggtcattttccctgggcctggagccyttactcccaatccacatttgactttgatttgtgctgagggtcagctttcgactccttcttgctgaracagtggaaacaatggcagtcctgtggctgcccttggtgccactgcctgtgggctgctggcttaaaggacagttcggttcattggtcagctcagggcctttagcgcccacacagtgtgcctgagagaagagaggtggagggagggaatggctytgcccagctagagggagagaaagagcgagttggatytggggagctcatgcttgggaaaagatatagatggagcttttgatggatgaggaagatccaatgtgttttctgttctgtttttcacttctagtaaaacacamcyttaatgtcatgttttctaatntaaatttttgtaccatyttctttggaaatgattaaaatacttctcatttcatgtttcaaaaaaaaaaataaaataaggggcgccc

SEQ ID NO: 542 - DNA, 3899 bp, Cricetulus griseus
  misc_feature (290)..(359): n is a, c, g, or t
  misc_feature (1277)..(1314): n is a, c, g, or t
  misc_feature (1784)..(1818): n is a, c, g, or t
  misc_feature (2226)..(2317): n is a, c, g, or t
  misc_feature (2415)..(2460): n is a, c, g, or t
  misc_feature (2588)..(2613): n is a, c, g, or t
  misc_feature (2682)..(2732): n is a, c, g, or t
  misc_feature (3179)..(3223): n is a, c, g, or t
aggtgcgcagagtccggggccggctggtgcgcgagacgccgggagagggtcgcgatggcagccacagtgagaaggcagaggccaaggaggcttctctgttggaccttggtggctgtcctcttggcagacctgttggcactgagtgacacgttggctgtgatgtctgtggatctgggcagtgaatccatgaaggtggccattgtcaagcctggagtgcccatggagattgtgttgaacaaggaatctcggaggaaaacaccagtgactgtgaccttgaaagaaaatgaaannnnnnnnnnnnnnnnnnnnnnnnnnnnnnnnnnnnnnnnnnnnnnnnnnnnnnnnnnnnnnnnnnnnnncctcctaggaaagcaggcagataaccctcatgtggccctttatcgggaccgtttcccagaacatgagctaaatattgacccacagaggcagactgtgcgcttccagatcagtccgcagctgcagttctctcctgaggaggtgttgggcatggttctgaactactcccgttccttggctgaagattttgctgaacaacccattaaggatgctgtgatcaccgtgccagcctttttcaaccaggctgagcgccgagctgtgctgcaggctgctcgaatggctggtctcaaagtgctgcagctcatcaatgacaacactgccactgccctcagctatggtgtcttccgacggaaagatatcaattccactgcgcagaatgtcatgttctatgatatgggctcaggcacgaccgtgtgcaccattgtgacctaccaaacagtgaagactaaggaggctgggatgcaaccacaactgcagatccggggtgtggggtttgaccgaaccctggggggcttagagatggagcttcggctgagagaacacctggcgaagctcttcaatgagcaacgcaggggccagaaagccaaggatgttcgggaaaatccacgtgctatggccaagctgcttcgagaagccaatcgccttaaaaccgtcttgagcgctaatgctgatcacatggcacagattgagggcttgatggatgatgtggacttcaaggcgaaagtgactcgagtggagtccgaggagttgtgtgcagacttgtttgaaagagtgcctgggcctgttcagcaggccctccagagtgccgagatgagcttggatgagattgaacaggtgatcctggtgggtggggccactcgtgttcccaaagttcaagaggtgctgctaaaggctgtgggcaaggaggaactaggaaagannnnnnnnnnnnnnnnnnnnnnnnnnnnnnnnnnnnnntaccaggcagcagcactcagcaaagccttcaaggtgaagccgtttgttgtgcgggatgccgtcatctaccccatcctggtggagttcacaagggaagtggaggaggaacctggggttcgaagcctgaagcacaataaacgtgtgctcttctcccgaatggggccctaccctcagggcaaagtcatcacctttaaccgctacagccatgatttcaactttcacatcaactacggtgacctgggcttcctggggcctgaggatcttcgggtatttggctctcaaaatctgactacagtgaagctaaaaggtgttggagagagcttgaagaaatatcccgactatgagtccaaaggcatcaaggcccacttcaacctggatgagagtggggtgctcagtttagacagggtggagtctgtatttgagaccctggtggaggacagcccagaagaagaatctactcttaccaagcnnnnnnnnnnnnnnnnnnnnnnnnnnnnnnnnnnnacctcgtcagatgccaaagagaatggtactgatgctgtacaggaggaagaggaaagccctactgaggggagcaaggatgaacctggagagcagggggaccttaaggaggaaactgaagcccctgtggaagatacctctcagcctccaccccctgagcctaagggtgatgcagctcctgagggagaaaaacctgatgaaaaagaaagtgggggaaagtctgaagctcagaagcccgaagagaaggggcagtcagggcctgagggtgtccctccagctcctgaagaagaaaaaaagcagaaacctgcccggaagcagaaaatggtagaggagataggtgtggagctggctgtcttggacctgccagacttgccagaggatgagctggctcgttctgtgaagaaacttgannnnnnnnnnnnnnnnnnnnnnnnnnnnnnnnnnnnnnnnnnnnnnnnnnnnnnnnnnnnnnnnnnnnnnnnnnnnnnnnnnnnnnnnnnnnaccagcctgagtaccaggaagtgtccactgaagaacagcgggaggagatctctgggaaactcagcgccacttctacctggctggaggacgaggggttnnnnnnnnnnnnnnnnnnnnnnnnnnnnnnnnnnnnnnnnnnnnnnaaactgtgccaagggctgttttttcgggtggaagagcgcagaaaatggcctgaacggctttcagctctggataatctcctcaaccactccagcattttcctcaagggtgcccggctcatcccagagannnnnnnnnnnnnnnnnnnnnnnnnnatgacaacgttagagaaagtcatcaatgacacctgggcctggaagaatgcaactctggctgagcaggcnnnnnnnnnnnnnnnnnnnnnnnnnnnnnnnnnnnnnnnnnnnnnnnnnnncaagatgatggccctggaccgtgaggtacagtatctgctcaataaggccaagtttaccaagccccggccacgacccaaggacaagaatggcacccggacagaacctcccctcaatgctactgctggtgaccaagaggagaaggtcattccacctgcaggtcagcctgaagaggcaaagcccattttagaacctgacaaagaagagactactacggaaccaacagactctgagcctctggaattaggaggtcctggagcagaatctgaaccgaaagagcagacagcaggacagaagcggtcttcgaagaatgatgaactataacccccccctcctgtatccccactgtstsgcctscagccccttctcctaccacctctatttattatacatcagggttggggcaaggggtgggttttgcccttagggsstcaagttccttctctcannnnnnnnnnnnnnnnnnnnnnnnnnnnnnnnnnnnnnnnnnnnncatgagtgaaatgatctagttctgtccccagctccacgctctggtctcctactctctggccctgtgtttgggaaaaatcactattgtgtcttaattgtttgcctgtgggtaaatgagagaatggctgsccggttgttggagacctggtaatgggaaggatattttgggacactagagtgcccagtcttctctgagtatcatttcattctttgctgttccacaaaatcagtgtcctgtttgggccagtgtctacagagcctcatcaccacctttggcttcccagtgcctctttttctcttctgtgtcttctctttcccctgcccttcctccttggctcttctgtctgtctttgccttcccagtacagattgggcctcgtgcgaattcgccgacaccatcataaccaaagcaacatttaccaaaacatggaaataatgatagcagaaacagtcaatgagctaaatattttccttttccttttttttagatacggtctcgctctgttgcccaggctggcagtgaacttccgaggccttcggtccagatgatccatgtctacaagcttatgacactggaatttactttcaaatcaacaatcatgattgtgaaaaatcacgcattttatttttcaactcataataaaaatatgtattattagcagaatatatgtaagaaat

SEQ ID NO: 543 - DNA, 1248 bp, Cricetulus griseus
  misc_feature (1166)..(1180): n is a, c, g, or t
gcacacggacatttgctctctcaggaaggttttggcagcaaccatgtccactttcgtggagctcagtaccaaagccaagatgcccatcgtgggcctgggcacctggcagtctcccccaggccaagtcaaggaagctgtgaaggtggccattgatgctggataccgccacattgactgcgcctatgcgtattacaatgagcacgaagtgggagaggccattcaagagaagatcaaagagaaggctgtgagacgggaagacctcttcatcgtcagcaagttgtggcccacctgctttgagaggaaactgctaaaggaggcctttcagaagaccctcacggacctgaaactggactatctggacctgtatcttattcactggccacagggacttcagcccggaaaggagttatttcccaaagacgatcaaggcaacgtcctcaccagcaaaataacgttcttggatgcctgggaggtcatggaagaactggtggatgaagggttagtgaaagccctgggtgtctccaacttcaaccacttccagattgaaaggatcctgaacaaacctggattgaaacataagccagtgaccaaccaggtcgagtgtcacccatacctcactcaggaaaaactgatcgagtactgtcactccaagggcatcactgtcacagcctacagccctctgggttccccaaataggccttgggccaagccagaagacccttcactcctagaggaccccaagattaaagagattgctgcaaagcacaagawaacctcggcccaggttctgattcgattccacatccagaggaatgtggtggtgatccccaagtctgtgacaccagcacgtatacatgagaactttcaggtctttgacttccagttgagtgatcaggagatggccaccatccttggcttcaacagaaactggagggcctgcctgctgcctgagacagtaaacatggaagaatatccctacgatgcggagtattgaagctaactcgcctgatgaggcttccctctttgctgatgcacacctcaatcatttctggtgtgccatttgagccaagcctgcctgatgtcatgctctaggcaacgctgtacttaaaatcctgtgttcaaggaagtgtgactctgagaagtgaatgtgcatttctttcactgannnnnnnnnnnnnnntgtttgccaaaaatcaggaactctggtaactttggaggacataagaatagaacaataaaagccaagcc

SEQ ID NO: 544 - DNA, 2697 bp, Cricetulus griseus
  misc_feature (1228)..(1253): n is a, c, g, or t
  misc_feature (2512)..(2552): n is a, c, g, or t
  misc_feature (2664)..(2685): n is a, c, g, or t
atgataagcgccacgagagccgccgccgcgcgtctcgtgggcactgcagcctcccggacgcccgcggccgcccgccaccaggatggctggaatggccttagycatgaggcttttagatttgtttcaagaagggattatgcgtcagagrcaattaagggtgcagttgttggtattgatttgggtactaccaactcgtgtgtggcsgttatggagggcaaacaagcaaaggtcctggagaatgctgaaggtgccagaactaccccttctgttgttgcctttacagcagatggagaacgacttgttggcatgccakcaaagcgacaggctgtcaccaacccaaacaatacattctatgctacaaagcgtctaattggacgtcgatatgatgaccctgaagtacagaaagacactaagaacgttccctttaaaattgtccgtgcctctaatggtgatgcctgggttgaagctcatggaaaactgtattctccaagtcagataggagcatttgtgttgatgaakatgaaagagactgcagaaaattacttgggtcacacagcaaagaatgctgtgatcacagtccctgcttatttcaatgactcacaacgacaggctactaaggatgctggccagatatctgggctaaatgtacttcgagtgattaatgaacctacagctgctgccctggcctatggtctggacaaatctgaagataaaatcattgctgtgtatgatttaggtggtggaacctttgatatttctatcctggaaattcagaaaggagtgtttgaggtgaaatccaccaatggggacactttcttaggaggtgaagactttgaccaagctttgttgcggcacatcgtcaaggagttcaagagggagacgggggttgatttgaccaaagacaacatggcacttcagagagttcgtgaagctgctgagaaggctaagtgtgaactctcctcatctgtgcagactgacatcaatttgccatatctgacaatggatgcttctggacccaagcatttgaatatgaagctgactcgagctcagtttgaaggcattgtcacagacctaatcaagaggactattgctccatgccagaaagctatgcaagatgcagaagtcagcaagagtgacataggagaagtgattctggttggcggtatgacgagaatgcccaaggttcagcagactgtgcaagatctttttggcagagccccaagtaaannnnnnnnnnnnnnnnnnnnnnnnnncattggagctgccattcagggaggtgtgttggctggtgatgtcacagatgtgctactcctggatgtcactcccctctctctgggtattgagactctgggaggtgtttttaccaaacttattaataggaacaccactattccaaccaaaaagagccaggtattttctaccgctgctgatggacaaacgcaagtagagattaaagtgtgtcagggagagcgagagatggctggagacaacaaacttttaggacaatttactttgattggaattcctccagcccctcgtggagttcctcaaattgaagttacatttgaccttgatgccaatgggatagtacacgtttctgccaaagataaaggaacaggacgtgagcaacagattgtaatccagtcttctggcggattaagcaaagatgatattgaaaacatggtaaaaaatgcggagaagtatgctgaagaagacaggagaaagaaggaacgtgttgaagcagttaatatggctgaaggaattattcatgacacagaaaccaagatggaagaattcaaggatcagttacctgctgatgagtgcaacaagctaaaggaagagatttccaaaatgagagaactccttgctcgaaaggacagtgaaacaggagaaaacattagacaggcagcatcttcacttcagcaggcatccttgaaactctttgaaatggcatataaaaagatggcatctgaacgggaaggttctgggagttctggtactggggaacagaaggaagatcagaaagaggagaaacaataacagtggcagcacattgtcaagccagaagagcacaacataccatgaagcttgggagtaaagggacttcctgagcagaaaaggggcaaatttcagtctttttactgtgtttttgcagtattctatatataatttccttaatatataagtttagtgacaattagctaactcatttaatgggtggtaaattcagcagtagcaggttcatactgttctgtcactagcctgttattttttcagccgcatgaaaggggttgggtggggctgtataccaatcattattaaggtatatccggtttgtgctgaatggccatgttctaggtatgaaacccatcacatgcaataagactatctgtagatcctgttggccaagagtactgctataaagaatgacctatgtgtataggattggtccttcaactgaggccttgcatgacagctacctgtgccatggtttgtaggtgcaaagctaggnnnnnnnnnnnnnnnnnnnnnnnnnnnnnnnnnnnnnnnnnggggagagatgaagtctctcttggtcctaaggcatatctttctagctaccctcttggttggcctgtgtcaggaacctgtatccttgatgattgttcttttcatccattctgnnnnnnnnnnnnnnnnnnnnnnaaaattccaaaa

SEQ ID NO: 545 - DNA, 1843 bp, Cricetulus griseus
  misc_feature (1659)..(1697): n is a, c, g, or t
ctactcggagttagcaggattcgagccgtctcactgaccacaggccgtgtcgtgtcaccggttctgcaggcaccatgagccaggacaccgaagtggacatgaaagaggtggagctgaacgaactagaaccggagaagcagcctatgaatgcggcggccggggcggcggccggggagaagaacggtctggtgaagatcaaggtggccgaagacgaggcggaggcggaggccggggccaagttcacgggcttgtccaaggaggagctgttgaaggtagccggcagccccggctgggtgcgcacccgctgggcgctgctgctgctcttctggctcggctggcttggcatgctggcgggcgccgtggtcatcatcgtccgggctccgcgctgccgtgagctgccggtacagaggtggtggcacgagggcgccctctatcgcgtcggcgaccttcaggccttcgtaggtccgaacgcgggaggcatagctggtctgaaaaagcatctggagtacttgagcaccctgaaggtgaagggcctggtgttgggcccaattcacaagaaccagaaggatgacgtcaatggaaccgacttgaaacagattgaccccagtttaggctcccaggaagattttaaagaccttctgcaatctgccaagaaaaagagcattcacatcattttggacctcactcccaactaccggggccagagtgcatggttcctccctgctcaagctgactgggtggccaccaagatgaaggaagctctgagttcttggttgcaggaaggtgtggatgggttccaatttcgggatgtggaaaagctgatggatgcatccttgtacttggctgagtggcagaatatcaccaagaacttcagtgaggataggctcttgattgcagggactgactcctccgacctgcagcaaattgtgaccatactcgaatccaccagcgacctgctgttgaccagctcctatctatcaaattccagttttactggggagcatacaaaattgctagtcactcggtatttgaatgccactggcagtcactggtgcagctggagtgtgtctcargcagggctcctgacagcctccgtcccagctcagctcctccgactctaccagctgatgctcttcactctgccagggacccctgttttcagctatggggatgagatcggcttgcaggaagctgtcgttcctggacagcctgtggaggccccattcatgccatgggatgaatccagcctcccccaaactccgggacacataagcacgaacatgacagtgaagggccagaatgaagaccctggctccctccttacccagttycggtggctgagtgaccttcggggtaaggagcggggtaaggaacgctctctgttgcacggtgacttccgtgcactgacctcctcacctggcatcttctcctacgtccgctactgggaccagaatgagcgttacctggtggtgctcaactttcaggacgtggtcctgtcagccaggctagaggccgccaacctccctgctggtataagtctgccagccagcgctaacctattgtttagcaccaacagtacccggctaggccaagagcagggtacttctctgagtctggaaaacttgtacctgaatcctcatgagggcttgctgttacatnnnnnnnnnnnnnnnnnnnnnnnnnnnnnnnnnnnnnnncaccctcctctcttttcccctggccttttgaattatttttttctctcctttggtttgtttgtttggtttaactttttgcagattgcatatcaattctcacactgggtgtttttggcttcaaataaaaatcacccctgcctgataaa

SEQ ID NO: 546 - DNA, 1555 bp, Cricetinae gen. sp.
  misc_feature (668)..(686): n is a, c, g, or t
  misc_feature (1454)..(1454): n is a, c, g, or t
  misc_feature (1461)..(1461): n is a, c, g, or t
  misc_feature (1507)..(1507): n is a, c, g, or t
acttatgaatgatatcaaaccaatatggcagagaccatccaaggaggtagaagaagatgagtacaaagctttctacaaatcattttcaaaggaaagtgatgaccccatggcttatatccactttactgcagaaggggaagtcaccttcgaatcaatattatttgtgcccacatctgctcctcgtggtctgtttgatgagtatggatccaagaagagcgattatattaagctctatgtgcgccgagtattcatcaccgatgacttccatgatatgatgcccaagtaccttaattttgtcaaaggtgttgtggattcagatgatctcccccttaatgtttcccgtgagactcttcagcaacataaactgctcaaggtgataaggaagaagctcgtccgtaaaactctggacatgatcaagaagattgcagatgagaagtacaatgatactttctggaaagagtttggcaccaacatcaagcttggtgtgattgaggaccactcaaatcggacgcggcttgctaaacttcttaggttccagtcttctcatcactcaactgacattactagtktagaccagtatgtggaaagaatgaaggagaagcaggacaaaatctacttcatggctgggtcaagcaggaaagaggccgaatcttctccatttgttgagnnnnnnnnnnnnnnnnnnnatgaggttatttacctcacagagcctgtggatgaatactgcattcaggctcttcccgagtttgatgggaagaggttccagaatgttgccaaagaaggagtgaagtttgatgagagcgagaaaacgaaggaaaaccgggaagcaacagagaaggagtttgagcccctgctcaactggatgaaagacaaggcccttaaggacaagattgaaaaggctgtggtatctcagcgtctcacggaatctccttgtgctcttgtggccagccagtatggatggtctggcmacatggagaggattatgaaggcacaagcataccaaacgggcaaggacatctctacaaattactatgcaagtcagaagaaaacatttgaaattaatcccagacatccgctgatcagasacatgcttaggarggttaaggaagatgaagatgacaagactgtcttggatcttgctgtagttttgttwgaaacagcaacacttcggtcaggatatcttctaccagacaccawggcatatgsagatagaatakagagaatgcttcgcctcagcttaaacattgaccctgaagcacaggtagaagaagaaccggaagaagagcctgaagacaccacagaagacacagaacaagacgaggaggaagaagtggatgcaggcacagaagaagaagaagaagaggaacaggaaacagcaaaggaatctacagcagaaaaagatgagttataaattatcctctcaccacagatcctgtgtggagagggaatgtganattttanagtcgtttcttttcagagagacttgtttgggatgctccccagcctncttctcccctggactggtaaatgttggggattgggggttaccaggaag

SEQ ID NO: 547 - DNA, 723 bp, Cricetulus sp.
  misc_feature (615)..(630): n is a, c, g, or t
gctgtcccctgtcgcctcttcctgcagccatggtcaaccccaccgtgttcttcgacatctcggccgacggcgagcccttgggccgcgtctccttcgagctatttgcagacaaagttccaaagacagcagaaaactttcgmgctctgagcactggagagaaaggatttggatataagggttcctcctttcacagaattatcccaggattcatgtgccagggtggtgacttcacacgycataatggcactggcggcaggtccatctacggagagaartttgaggatgagaacttcatcctgaagcatacaggtcctggcatcttgtccatggcaaatgctggaccaaacacaaatggttcccagttttttatctgcaccgccaagactgagtggctggatggcaaacatgtggtctttgggaaggtgaaagaaggcatgaacattgtggaagccatggagcgtttcgggtccaggaatggcaaaaccagcaagaagatcaccatttccgactgtgggcaactctaattcttttgacttgcgggcttcttacctaccagaccattccttgtgtagctcargagagcattcccaccccatctgctcgaatgccctgtannnnnnnnnnnnnnnnaaattctttgggttccatattttcctcattcccctccaagtctagctggatggcagagttaagtttatgattgtgaaataaaaactaagtaag

SEQ ID NO: 548 - DNA, 1267 bp, Cricetulus griseus
gkcymycyrckcstacsctgttctakagacasccgcatctttscgtgcaktgccagcctcgctcckgadacgcawtggtgaakgtcggsgtgaacggatttggccgtattggacgcctggttaccagggctgccttcacttctggcaaagtggamrttgttgccatcaatgaccscttcattgacctcaactacatggtctacatgttccagtatgactctacccatggcaagttcaaaggcacagtcaaggctgagaayggraagcttgtcatcaacgggaaggccatcaccatcttccakgagcgagatcccrccaacatcaaatggggtgatgctggygccsagtatgttgtggartctactggcgtcttcaccascrtssrgaargctggggcccacttgaagggyggrgccaagagggtcatcatctycgcmccttytgctgatgcccccatgtttgtgatgggtgtgaaccawgacaagtatgayaactccctcaagattgtsagcaatgcrtsctgcaccaccamctgyttakyccccctggccaakgtcatccatgacaactttggcattgbgraargactcatgaccacrgtccatgccatcackgscacccakaaractgtsgwtggcccctccsgraakctgtggcgtgatggccgtggggctgcccavaacatcatccctgcatccactggygctgccaargctgtgggcaargtcatcccadagctkaacgggaagctsactggcatggccttycgtgttcctacccccaacgwgtccgtygtggatctsacatgtcgcctggagaaasctgccaagtrtgargacatcaasaaggtggtgaagcakgcatcygadggcccwyygwwrggyatcctgkgctacaccgakgaccasgttgtctcctgcgacttcaasagtgactcccactcttccacctttgatgctggggctggcattgctctcaatgacaacttygtaaagctcatytcctggkatgacaatgaattyggctwcagcaacagrgtggtggacctcatggcctacatggcctccaaggagtaagaagcccaccctggaccatccaccccascmaggactcsagcaagarggaggccctggctgctgagcagtccctgtccaataacccccacaccgatcatctccctcacagtttccatcccagacccccagaataaggaggggcttagggagccctactctcttgaataccatcaataaagttcactgcaccc

SEQ ID NO: 549 - DNA, 908 bp, Cricetulus sp.
  misc_feature (29)..(45): n is a, c, g, or t
aaagtcacagcttgtccaaagacccgggnnnnnnnnnnnnnnnnnagtctgagaagtccagcaccagcaccagcaccagcaccagcaccagcaccagcaccagcaccagcaccagcaccagcaccagcaccagcaccatgcctatgatactgggatactggaatgtccgcggtctgacaaaccccatccgcctgctcctggaatacacagactcaagctatgaggagaagaaatacaccatgggggacgctcctgactytgacagaagccagtggctgaatgagaagttcaagctgggcctggactttcccaatctgccctacttaattgatgggtcccacaagatcacccagagcaacgccatcctgcgctacattgcccgcaagcacaacctgtgtggagagacagaggaggagaggattcgtgtggacattgtggagaaccaggctatggacacccgcatgcagctcatcatgctctgttacaaccctgactttgagaagcagaagccagagttcttgaagaccatccctgagaagatgaagatgtactctgagttcctgggcaagcggccatggtttgcaggggacaaggtcaccttatgtggatttctcgcttatgatgtccttgatcagtatcaaatgtttgagcccaagtgcctggatcccttcccaaacctgaaggacttcttggcccgctttgagggcctgaagaagatctctgcctacatgaagaccagccgcttcctccggagacctatattttcaaagatggcacagtggagtaacaagtaggcccctgctacacgggctctcatatggaggacctgtgcacactggatcctcctggccctggggacagctggtcttctgcactgctgcctcaaggttctcacttctttctccttt

SEQ ID NO: 550 - DNA, 1608 bp, Cricetulus sp.
  misc_feature (189)..(202): n is a, c, g, or t
  misc_feature (204)..(220): n is a, c, g, or t
  misc_feature (306)..(325): n is a, c, g, or t
  misc_feature (419)..(432): n is a, c, g, or t
  misc_feature (434)..(450): n is a, c, g, or t
  misc_feature (461)..(477): n is a, c, g, or t
  misc_feature (536)..(564): n is a, c, g, or t
  misc_feature (582)..(595): n is a, c, g, or t
  misc_feature (597)..(634): n is a, c, g, or t
  misc_feature (648)..(661): n is a, c, g, or t
  misc_feature (663)..(679): n is a, c, g, or t
  misc_feature (690)..(718): n is a, c, g, or t
  misc_feature (766)..(800): n is a, c, g, or t
  misc_feature (826)..(863): n is a, c, g, or t
  misc_feature (919)..(937): n is a, c, g, or t
  misc_feature (994)..(1028): n is a, c, g, or t
  misc_feature (1054)..(1084): n is a, c, g, or t
  misc_feature (1147)..(1169): n is a, c, g, or t
  misc_feature (1222)..(1256): n is a, c, g, or t
  misc_feature (1285)..(1320): n is a, c, g, or t
  misc_feature (1426)..(1458): n is a, c, g, or t
tgcttagtttggtgttttgaaatgctttagcagcttggaaccatgacaaaacagatactgtgttgtgaaggaacgcgggggaggggctttcattagaggtattttgtgggaatcgaaatttttaccagacatttaaaattacaagtggcacttttacttttaaattcaaggtcaaaatgcaaatcttcnnnnnnnnnnnnnncnnnnnnnnnnnnnnnnnagaggtggagcccagtgacaccatcgaaaatgtcaaggccaagatccaggataaagagggcatcccccccgaccagcagcgactcnnnnnnnnnnnnnnnnnnnnttgtccacttcggagctcttkctkakgtgtttctacgcgcwcggcggtttgtggtctcatcacatccgttaacaggtcrrmatgcaratyttcnnnnnnnnnnnnnncnnnnnnnnnnnnnnnnnagaggtggaannnnnnnnnnnnnnnnnaaatgtcaaggccaagatccaggataargagggcatcccccccgaccagcagcgactcnnnnnnnnnnnnnnnnnnnnnnnnnnnnngccgcactctttctgatnnnnnnnnnnnnnnannnnnnnnnnnnnnnnnnnnnnnnnnnnnnnnnnnnnncatgcagatyttcnnnnnnnnnnnnnncnnnnnnnnnnnnnnnnnagaggtggaannnnnnnnnnnnnnnnnnnnnnnnnnnnncaagatccaggataaggagggcatcccccccgactcagcagcgactcnnnnnnnnnnnnnnnnnnnnnnnnnnnnnnnnnnntctttctgattacaacgtccagaaannnnnnnnnnnnnnnnnnnnnnnnnnnnnnnnnnnnnncatgcagatyttcgtgaagaccctgacyggcaagaccatcaccctagaggtggaannnnnnnnnnnnnnnnnnnttgtsaaggccaagatccaggataargagggcatcccccccgaccagcagcgactcnnnnnnnnnnnnnnnnnnnnnnnnnnnnnnnnnnntctttctgattacaacatccagaaannnnnnnnnnnnnnnnnnnnnnnnnnnnnnnagggtggcatgcmkawyttcgtgaagaccctgacyggcaagaccatcaccctagaggtggaannnnnnnnnnnnnnnnnnnnnnngaaggccaagatccaggataargagggcmtcccccccgaccagcagcgactcnnnnnnnnnnnnnnnnnnnnnnnnnnnnnnnnnnntctttctgattacaacatccagaaagagnnnnnnnnnnnnnnnnnnnnnnnnnnnnnnnnnnnnctattaattcttcagtctgcattcccagtgggcaatggatggcattaatctgcactatagccatttgccccaatttaagtttagaaaatccaagtttcagtaatannnnnnnnnnnnnnnnnnnnnnnnnnnnnnnnnttgttgcatggtaagcatacatggtgtcatttgtgaagtttctatggtggcttgggtgggggacttcccctactgtctttagagattggtatttaactaaaatttgcgtcacttatgtcttagctgagttgggaacttcgtttaaaagtt

SEQ ID NO: 551 - DNA, 1674 bp, Cricetulus griseus
  misc_feature (145)..(161): n is a, c, g, or t
atctcgctgctgcagcctccggggccacgttccatcccttcagcctgagaccagccaagggggaaaaaaraamcaattatcttttcttgctcggyacctaccttgaagccagcacaaatttattacagtaaaccktagccatgannnnnnnnnnnnnnnnncaggccggmcaatgtggcaaccaratcggtgctaagttctgggaggtgatcagcgatgaacacggcatcgaccccaccggyacctaccayggagacagcgacctgcagctggaccgaatctctgtgtactacaatgaasscacaggtggcaagtatgtccctcgggccatattggtggatctagaacccgggaccatggactccgttcgatcaggtcctttyggccagatcttcagaccagacaactttgttttcggtcagtctggggcaggcaacaactgggctaagggtcactacacsgagggagctgagctggttgactcygtcctggaygtggtkcggaaggaggcrgaragctgtgactgcctgcagggcttycagctgacccactcvctgggyggaggyaccggttcyrgtatgggcaccctggctcatcagcaagatccgmgaagaataycccgaccgratcatgamyaccttcagygtsgtaccytcwcccaaagtgtcygacaccgtggtggagccctacaaygccaccctgtcygtscatcagctggtggagaacaccgacragacctactgcatcgacaacgaggccctstacgacatcctgcttccgcackctmaagctcaccacgccsacctayggrgacctsaacmacctsgtctcggccaccatgagcggggtcaccacctgcctccgcttcccrggccagctcaaygcygacctccgraagytggcsgtcaacatggtscccttcccmcgtctccacttcttcatgccyggcttygcccctctcaccagccgygggagccagcagtaycgggccctcacygtgccygarctcacccagcaggtcttcgatgccaagaayatgatggcmgcctgtgacccccgccacggccgmtacctcaccgtggckgccgtcttccgygggcgsatgtccatgaaggaggtggacgagcagatgctsaacgtgcagaacaagaacagcagctacttygtmgagtggatccccaacaacgtcaagacsgcygtctgcgacatcccrccrcgsggcctcaagatggcmgtcaccttcatyggmaacagcacggccatccaggagctcttcaagcgyatctcsgagcagttcacsgccatgttccgccggaaggccttcctscactggtacacsggcgagggcatggacgagatggagttcactgaagccgagagcaacatgaacgacctcgtctccgagtaccagcagtaccaggaygccacygcggaagaggaagaggatttcggggaggaggcagaagaagaggcctaagscagasagagagagccctgcgtcttctcctcaggctrcttaagttccctcagctytcttcagctgcccgtttttctccttcagagttttctyttctgctgcctctgtcctgtttttttatttttttccatcggagggggggtaaacagtgcctggcacatagtaggcgctcaataaatatttgtttgtggaatgtc

SEQ ID NO: 552 - DNA, 1537 bp, Cricetulus griseus
gctgcttgttcttcctctgcagccgctccgcagtcgccgccgccatgagggagatcgtgcacctgcaggctgggcagtgcggcaaccagattggcgccaagttctgggaggtgatcagcgacgagcatggcattgatcccaccggsrcgtaccacggagatagcgacctccagctggagcgtatcaacgtgtactacaacgaggctaccggtggcaagtatgtgcctcgtgccgtgctcgtggacttggagcccggcaccatggactcagtgcgctccgggcccttcgggcagatcttcagaccagataacttcgtattcggtcagagtggggctgggaacaactgggccaaggggcactacacagaargcgcakagctggttgactcagtgttggacgttgtgaggaaggaagctgagagctgtgactgcctgcarggcttccakctgacccactccctgggtggggggactgggtctgggatgggtactctccttatcagcaagatccgagaggagtaccctgacagaatcatgaacaccttcagtgtggtaccttcccccaaggtgtcggacacagtggttgagccctacaatgccaccctttcagtacaccagcttgttgaaaacacagatgagacctattgcattgataacgaagcactctatgacatctgtttcagaaccctaaagctgaccacacccacttatggtgacctgaaccatctagtgtctgccaccatgagtggggtaaccacatgcctgcgattccctggccagctaaatgctgacctgagaaagctggctgtaaatatggtgcccttccctcgcttgcacttcttcatgcctggctttgctcccttgaccagccggggcagccagcagtaccgtgccctgacagttcctgagctcacccagcagatgtttgatgccaagaacatgatggctgcctgtgatccccgccatgggcgctacttgacagtggctgccgtgttccggggccgcatgtctatgaaggaggtggacgaacagatgcttaatgtccaaaacaagaacagcagctactttgttgagtggattcccaacaatgtgaaaacagctgtctgtgacattccaccycggggcctaaaaatgtctgccaccttcatcggcaacagcacggcaattcaggagctgttcaaacgcatctcagagcagttcacagccatgttccgacgcaaggccttcctgcactggtacacgggtgagggcatggatgagatggagttcaccgaggctgagagcaacatgaacgacctggtgtccgagtatcagcagtaccaagacgccacggctgaggaggagggagagtttgaggaggaggcagaagaggaggtggcctagagctgttttaagcagtctaaagcatgggagcagtgtgaactctttattcattcacagcctgtctgctagccatgtccactgtgcatttgctgtcctgtcctgacatcacttgtacagataccaccattaaagcaattcatagcaaaaaaaaaaaa

SEQ ID NO: 553 - DNA, 1777 bp, Cricetulus griseus
  misc_feature (70)..(85): n is a, c, g, or t
  misc_feature (1485)..(1513): n is a, c, g, or t
gagccagcgcccgagcgcagacgcgcccgccatgagggagattgtgcacattcaggcgggccagtgcggnnnnnnnnnnnnnnnnaagttttgggaagtgatcagcgatgagcacggcatcgaccaggccggaggctacgtgggcgactcagcgctgcatctggagcggatcagcgtctactacaatgagtcatcttctcagaagtatgtgcctagggctgcgctggtggacttggaacccggcactatggacagtgtgaggtctgggccttttgggcagctcttccggcctgacaacttsatcttcggacagacgggcgccgggaacaactgggccaagggycactacactgagggcgccgagctggtggactcagtgctggatgtgattcgcaaggagtgtgaacactgcgactgcctgcagggcttccagctcacccactcgttgggcggckgcacaggatcakgcatgggcaccctgctcatcagcaagatccgggaggagtacccggaccgcatcatgaacaccttcagcgtcrtgccgtcgcccawrgtctyakacaccgtggyggaaccttacaatgccacattgtcggtacaccagctggtagagaacactgacgagacctactgcatcgacaacgaggccctctacgacatctgcttccgcactctcaagctgaccacacccacgtacggggacctcaaccatctggtgtctgccaccatgagcggtgtcaccacatccctgcgttttcccggccagctcaacgctgacctgcgcaagttggctgtgaacatggtgcccttcccacgcctgcacttcttcatgcccggcttcgccccactcacagcccggggcagtcagcagtaccgtgccctgacagtgcccgagctcacacagcagatgttcgatgccaagaacatgatggctgcctgcgacccacgccacggccgctacctgaccgttgccaccgtctttaggggccccatgtccatgaaggaggtggacgagcagatgctggccatccagaacaagaatagcagctactttgtggagtggatccccaacaacgttaaagtggccgtgtgtgacatcccaccccggggcctgaagatggcttccaccttcattggcaatagcactgccatccaggagctattcaagcgcatctccgagcagttctcggccatgtttcgccgcaacgcttttctgcactggttcaccggcgagggcatggacgagatggagttcaccgaggctgagagtaacatgaacgacttggtgtctgagtaccagcagtatcaggacgccacggtcaacgacggggaagaagcttttgaagatgaggatgaagaagagatcaatgaatagggggcctttaagatgctatggtgcacacctgctcttagccctgatggtgtgagcacggtgccctggtctacacatcacaggcccctctcaaccaaatacacaccactgtnnnnnnnnnnnnnnnnnnnnnnnnnnnnnctttcctttaccagacaattgacagtcctaccagaccagggtgatttcatacaggaacactgaaagcaaagttagggggctgtaaaaggctgaagacagagaccaccttccgttaagtgcccagccatcagagttagcagggaagttagaataaagatttgtgtttcatccttggtgataaaatctaaagcaccgcattgttgccttaattgaatatacaatatggaactttgtgacaatccattcataataaaatgctaaacc

SEQ ID NO: 554 - DNA, 2206 bp, Cricetinae gen. sp.
  misc_feature (1853)..(1871): n is a, c, g, or t
gaattccgccggcttctcggcatggctcgccttgggttcggtctggtgagctgtaccttctttctggctgccagcggtctctattcctctagtgacgatgtcattgaattaacgccatcaaatttcaacagagaagttattcagagcaatagtctgtggcttgtagagttttatgctccatggtgtggtcattgccagaggttaacaccagaatggaagaaagcagccactgcattgaaagatgttgtcaaagtcggtgcagttgatgcagataagcatcagtccctgggaggtcagtatggtgtccagggattccctaccatcaagatattcggagctaacaaaaacaaaccagaagattatcagggtggcagaactggggaggccatcgtagatgctgccctcagtgctttgcgccagctcgtgaaggatcgccttagtgggcggagtggtgggtacagttctggaaaacagggcagaggtgatagttccagtaagaaggatgtgatagagctgactgacgacacctttgataagaatgtcctggatagtgacgatgtttggatggttgaattctatgctccatggtgtggacactgcaaaaacctggagccagaatgggccactgcagccacagaggtaaaggagcaaacgaaggggaaagtaaagctggcagccgtggacgctacggtgaaccaggtcctggccaaccggtatgggattagaggattccctacaatcaagatatttcagaaaggcgaggctcctgtggactatgatggtggacggacaagatcagacatagtgtcgagggccctggatctgttctcggataatgcccctcctccagagctgcttgagataatcaacgaagacgtggccaagaagatgtgtgaggagcaccagctctgtgtcgtggccgtgctgccccacatcctggacactggggccgcaggcaggaactcttacttggaaattcttctgaagctggctgacaaatacaagaagaagatgtgggggtggctgtggacagaagctggagctcaktctgagctggagaatgcactggggattggagggtttgggtaccctgccatggcasscatcaacgctcgcaaaatgaaatttgctcttctcaaagggtctttcagtgaacaaggcattaatgagtttctcagggaactgtcttttggacgtgcctccacagcacccgtgggaggtggttcctttcctgccatcactgccagggagccctgggatggtagagatggtgagcttcctgtggaggatgacattgacctcagcgatgtggaacttgatgacctggagaaggacgagttgtgaggccacagctcagccttccaatgtcttctcttgggagcgggcagttttccggcagtgaaggctctggtcagctgtctgcccttggcctttccgagcagcacttgctggctggccggccactaaaaacactgcagcagtgaacctcggcgtctcaagaaaacactgaagaattctatgaattgtagcagtgaattggattgcgttctttggtatattttgaagcaaggtgggttgttgaaacattttccctcctgactgctgcttgaatgttcttggaagctgtttcttatatatagggtttttaaaatgtgattcctttgtttgaatattaatggctttttccattaaagaataaaatgatattttggacaatgctgataaatgtatgaaattagtggcacatcataaaatcggagtctggtggttagcctgaaaactaaccctgtgcactgatgacaccacaccacggcttcctgtaaaagtgtttttaaatatgaagataagaccannnnnnnnnnnnnnnnnnnccattaaaggctagactcacaaccaaaaatgaagacagaccttttgacaagggtgtggttctgtgtggtaaacttggtaccgagggagaccacactcatgccccaaacaaagtcttggtcttcgggcttcaccagtgacaaggaggctcaggttttcaacattctcactgatttcccattaaacgtctcatgaagaccagagccccagtggattatccaagctattttcactttgtgtaaaacgctcaggagacagtttggagttatgttaggacaccagaaaagcctcagactgaggcattttattgtaacttaaaaaaataaatacactctaa

SEQ ID NO: 555 - DNA, 1527 bp, Cricetinae gen. sp.
  misc_feature (434)..(456): n is a, c, g, or t
  misc_feature (1121)..(1144): n is a, c, g, or t
tgggttcgggcctggctgtgggatgttagctgtgggggcgatggagggcccccggcagagcgcgtttctgctcagcagcccgcccctggccgccctgcacagcatggccgagatgaagaccccgctgtaccccgccacctacccccctctgcccaccgggcccccctcttcctcctcgtcctcctcgtcttcgtcgccctccccgcctttgggcgcccacaatccaggcggcttgaagcccccggccgcggggggcctctcgtcgctgagcagtcccccgcagcagctctcagccgccaccccgcacggcatcaacgacatcctgagtcggccctccatgccggtggcctcgggggccgccctcccttccgcctcgccctcggggtcgtcttcctcctcctcgtcgtccgcctccgccacctcggcctctgcgnnnnnnnnnnnnnnnnnnnnnnnggctgctgccgccgcctcgtcgcccgctgggctgctggccggcctgccccgcttcagcagcctgagcccgccgccaccgccgcccgggctctacttcagccccagcgctgcggccgtcgccgccgtgggccggtaccccaagcccctggccgagctgcctggccgggcgcccatcttctggcccggggtgatgcagagtccgccttggagggacgcacgcctggcctgtaccccccatcagggatccattttattggacaaagatgggaagagaaaacacacgagacccacgttctctggccaacagatcttcgccctggagaagaccttcgaacaaaccaagtacttggctgggccagagagagctcgcttagcctattctttggggatgacagagagtcaagtcaaggtctggttccagaaccgccggaccaagtggaggaagaagcacgcggctgagatggccaccgccaagaagaagcaggactcggagaccgagcggctcaaggggacttcggagaacgaggaggaggacgacgactacaacaagcccctggacccgaactctgacgacgagaaaatcacgcagctgctgaaaaagcacaagtcgagcagcggcggcctcctgctgcacgcgtccgaggccgagggctcgtcctgagcgnnnnnnnnnnnnnnnnnnnnnnnntgctgcgggatcccgggccgccccgaccgcgcccctcagccggtcacccccgggcccagcaccgcggctgctccccgggcctttactattttctaagatgtacatatctatttttttaacccagaaatcgtggcggggcctggggggataggacggcgcgttgacgagaaggaagggagcccgccgagtgcgccgcgttaaatgacgaacccgcatccccgcggctcccctggacccttcccacccgcggtgtcagtcaatccccacccccatccaggctcggtcccttgctctgtggtccctgagctccggggttcgtgtttgtgaagagtcgacagccagcgcctggtgggaatctccgagccacacagggcatctgccac

SEQ ID NO: 556 - DNA, 962 bp, Cricetinae gen. sp.
  misc_feature (95)..(109): n is a, c, g, or t
ctttttagaggsassagcttttaacaagagaaaccaagygrttgctgccatggcgggraagccagtccttcactacttygatggccggggmagannnnnnnnnnnnnnntggctcytggctgcagckggagtrgagtttgaagaraaatttctgaaaactcgggatgacttggsaaggttaagaaatgatgggagtttgrtgttccagcaagtgcccatggtggagattgacgggatgaagctggtgcagaccagagccattctcaactacattgcctccaaatacaacctctatgggaaggacatgaaggagagagccctcattgacatgtatgcrgaaggtatagcrgatctggatgaaatmgttctccatcaaccttatrttccccragaggagaaagaggcaaaccttgccaagatcaaggayaaagcaaggaaccgttacttccctgcctatgagaaggtgttraagrgccayggacaagattatctcgttggsaacaggctgagcagggctgatgtttacctggttgaacttctctaccatgtggaagagctggaycccagcgttttggccaacttccctctgctgaaggcactgagaaccagagtcagcaacctcccaacagtgaagaagtttcttcagcctggcagccagaggaaaccttacgaggacgagaaacgtgtagaatcagtaatgaagattttcagttaaatcaggcacagatagatggatagcagccaccaggtcaaccttcttaagcgtcgcaacaatgaagtgttttgattaaatgttgatcctgcttattgtgaggctaacatgttttctaagctttgagcattaattcaagtagtcatgacctgtgcagaattgctaggatgctattgtagtccaaattggaatcatgatcacttcctaggatgttcccttgaatttcaataaaatagaacaagcttcttag

SEQ ID NO: 557 - DNA, 1970 bp, Cricetulus sp.
  misc_feature (167)..(184): n is a, c, g, or t
  misc_feature (981)..(1038): n is a, c, g, or t
taagctgggcggtggggaagatggccacgctgcaggagtgtaaagtaaaagtggatggcgagccgaaactaagtaagaatgaactaaagagacgtctaaaagctgagaagaaattggcagagaaagaggccaagcagaaagagctcattgagaaacaactaagccannnnnnnnnnnnnnnnnncaccaaccacactgctgataatggcgtgggtgttgaggaggagactctggacccaaaccaatactacaagatccgtagtcaagcaatccaccagctgaaggtcagtggggaagacccttacccacacaagttccatgtggacatctcactcactcagttcatccaagaatacagtcaactgcaacctggggaccacctgactgacatcaccttaaaagtggcaggtcggatccatgctaagagagcgtctgggggaaagcttatcttctatgaccttcgaggagagggggtcaagttacaagttatggctaactcaaggaattataaatcagaggaagaatttgttcgtatcaataacaagctgcggcggggagatataattggagttcaagggaaccctgggaaaaccaagaagggtgagctgagcatcatcccctatgaaatcacgctcctgtctccctgcttgcatatgttgcctcatcttcactttggcctcaaagacaaggagacaaggtatcgtcagaggtacttggacttgatattgaatgactttgkgwsgcaraaawttattgtscgagctaagatcatcacatatataaraagtttcttggatgagctgggatttctagagattgaaactcccatgatgaacatcattccaggaggagctgtggccaagcctttcatcacctatsacaatgagttggacatgaacttatatatgagaatkgctccagaactctaccataagatgctggggggggggggcattgaccgagtttatgaaattggacgcnnnnnnnnnnnnnnnnnnnnnnnnnnnnnnnnnnnnnnnnnnnnnnnnnnnnnnnnnntctacatggcttatgcagactatcacgacctcatggagatcacagagaagatgctgtcaggaatggtgaaaagcattacaggtagktacaagatcacctaccacccagatgggccmgaaggtgaagcctatgagattgatttcaccccacctttccgaagaatcagcatggtagaagagcttgagaaagcactgggtgtgaagctgccagagaccagcctctttgaaactgaagaaactcgaaaaattcttgatgatatttgtgttgcaaaagctgttgaatgccccccacctcggaccacagccaggctccttgataagcttgttggtgagttcctcgaagtgacatgcatcaatcctacattcatctgcgatcacccacagattatgagccctctggccaaatggcaccgctccaaagagggtctaactgaacgctttgagctgtttgtcatgaagaaggaaatctgcaatgcctacactgagctgaatgatcccatgcggcagcgacagctgtttgaagaacaggccaaggccaaggctgctggtgatgatgaagccatgttcatagatgagaacttctgtactgccctggaatatggactgcccccaacagctggctggggcatgggtatcgaccgagtcaccatgtttctcacagattccaacaatatcaaggaagtacttctgtttcctgccatgaagcctgaagacaagaaggaaactgcagcagccactgaaacactagaaagcacaacagccggcccctctgtctagaagataaatgaaactctggcttctctgcatttcagcagacctggtctaagtgttgccatccctctggccactgcaattcaaccaccagaagagagaagaattaaaggatttctttttattccttattaccaaataaaccatttctctctttaccta

SEQ ID NO: 558 - DNA, 1049 bp, Cricetulus griseus
gtgtctcccaggaagagcactgtatactggcatagcgacatggcgcctccggctcccggcgcggcctctggcggctccggagaggtagacgagctgttcgatgtgaagaacgctttctacatcggcagctaccagcagtgcatcaacgaggcgcagcgagtgaagctgtccagtcccgacagggaagtggagagggatgtctttctgtatagagcatacatcgcacagaggaagtatggtgtggtcctggacgagatcaagccctcctcggccccagagctccaggctgtgcgcatgtttgctgactaccttgccactgagaaccggagggatgccatcgtggtggagctggaccgtgagatgagcaggagtgtggatgtgaccaataccactttcctgctcatggctgcctctgtctacttccatgaccaaaacccakatgcagccctgcgcaccctgcaccagggcgacagcctcgagtgcatggccatgacgattcagatcctcctcaagctggacaggctggacctagcccggaaggagctgaagaagatgcaggaccaagatgaggatgccactctcacccakctagccactgcctgggtcaacctggctgtgggtggtgagaagctgcaagaagcctactacatcttccaggagctggctgacaagtgctctcccacgctgctgctgctcaatggccaggcagcctgccactcagcgcaaggccgctgggagactgccgagggtgtgctgcaggakgcactggacaaggacagtggccaccccgagaccctcatcaacctcattgtactgtcacagcacctaggcaagccccctgaggtgacaaaccgatacctgtcacagctgaaggatgcacacaggacccatcccttcatcaaggagtatcaggccaaggagaacgactttgaccgccttgcactgcaatatgcgcccagcgcctgaggtggagatacccctggtgaccccagcttcgtgccagacgtcgtcctcacttccttgtctgtcaataaagtctgtccatcttc

SEQ ID NO: 559 - DNA, 1689 bp, Cricetulus sp.
  misc_feature (770)..(799): n is a, c, g, or t
  misc_feature (1581)..(1635): n is a, c, g, or t
ctcctcttcctcacatctgagcctcttgatcctaccgtgttgccaaaatgtcgctttctaacaagctgactttggacaagctggacgtgaaggggaagcgggtcgtgatgagggtggacttcaatgttcctatgaagaacaatcagataacaaataaccaaaggatcaaggctgctgtcccaagcatcaaattctgcttggacaatggagccaagtcagttgtccttatgagccacttgggccggcctgatggtgttcccatgcctgacaagtactccttagagccagttgctgcagaactcaaatctctgctgggcaaggatgttctgttcttgaaggactgtgtgggcccagaagtagagaatgcctgtgccaacccagcagctggcactgtcatcctgctggagaacctccgctttcatgtagaggargaagggaagggaaaagatgcttctggcaacaagattaaagctgagccagccaaaatcgatgctttcagagcctcactatccaaacttggggatgtctatgtcaatgatgcttttggaactgcacaccgagcccacagctccatggtgggtgtgaatctgccacagaaggctggtggatttttgatgaagaargagctgaactactttgccaaagctttggagagtcctgaacgccccttcctggctatcttgggaggagctaaagttgcagacaagatccagctgatcaataatatgctggacaaagtcaatgagatgatcattggtggtggaatggcnnnnnnnnnnnnnnnnnnnnnnnnnnnnnnggagattggaacttctctgtatgatgaagaaggggccaagattgtcaaagatctcatggccaaagccgagaaaaatggtgtgaagattaccttgcctgttgactttgtcactgctgacaaatttgatgagaatgccaagactggccaagctactgtggcctctggtatacctgctggctggatgggcttggactgtggtactgagagcagcaagaaatatgctgaggctgtggctcgagctaagcagattgtttggaatggacctgttggggtttttgaatgggaagcttttgcaaggggaaccaagtccctcatggatgaggtggtaaaagccacttctaggggttgcatcactatcataggtggtggagacactgccacttgctgtgccaaatggaatacagaggataaagtcagccatgtcagcactgggggtggtgccagtctagagctcctggaaggtaaagtccttcctggggtggatgctctcagcaatgtttagtattttcctgccttttggttcctgtgcacagccagcctctaagtcaacttagtgtgtttccacatctccatttggtgtcagctagtggcggagatgcagcaccaggaacccttaaacagttgcacagcatcttaggctcgtctttactgcatcgggatttgtctacattcttcaagatcccattttaatcccttagtggctaagtgcattctagagtgcatctatttatattctgcctgaaaagaaagtgagctataaaagcttagttctctttgagtannnnnnnnnnnnnnnnnnnnnnnnnnnnnnnnnnnnnnnnnnnnnnnnnnnnnnncagctgtaggtttggagaagttgatgctctattaataaagatgtccactgacaa

SEQ ID NO: 560 - DNA, 3775 bp, Mesocricetus auratus
  misc_feature (538)..(863): n is a, c, g, or t
  misc_feature (1165)..(1293): n is a, c, g, or t
  misc_feature (1559)..(1580): n is a, c, g, or t
  misc_feature (1789)..(1830): n is a, c, g, or t
  misc_feature (2371)..(2405): n is a, c, g, or t
  misc_feature (2787)..(3006): n is a, c, g, or t
  misc_feature (3149)..(3497): n is a, c, g, or t
aagcttgcttcttcaaacacggtattttacaagttgagaagtcaagaggaggatgccacggcagctcacccgctcccagcgccaaaaagtaccaaggagcagaaccacagatctccaactccgtggtggatagagagggtggagagagggggttggtctaaagcccttcctccccctccgtccgtgcggatgctacttacgtttttgtggtagggagacctttccttgccttgtctgtaggctcctaaatgcatttgtatgcatttgtccctgcggcaaagcactaacggaagcagaagccagctccgaactgctaaaagtgcaggtactgtccatgaaaaggggggaaagtcacatgaaaaccatcgtccgacccgtaaaatgggggggtggggcggggtaggaggatgaagcggtgtaggggtaggaagcggcacccagcggggaagagagctaagatgctccgtgcctttgctgtctcggggtcgcgctcccctgggtaccagaggtgagcgagacttcaccctgacagcggggnnnnnnnnnnnnnnnnnnnnnnnnnnnnnnnnnnnnnnnnnnnnnnnnnnnnnnnnnnnnnnnnnnnnnnnnnnnnnnnnnnnnnnnnnnnnnnnnnnnnnnnnnnnnnnnnnnnnnnnnnnnnnnnnnnnnnnnnnnnnnnnnnnnnnnnnnnnnnnnnnnnnnnnnnnnnnnnnnnnnnnnnnnnnnnnnnnnnnnnnnnnnnnnnnnnnnnnnnnnnnnnnnnnnnnnnnnnnnnnnnnnnnnnnnnnnnnnnnnnnnnnnnnnnnnnnnnnnnnnnnnnnnnnnnnnnnnnnnnnnnnnnnnnnnnnnnnnnnnnnnnnnnncttcatttggtgaccccgacgtgatagttagggaatagtggtcggccacagacggcgtggcgatcctgccctcatccgtctcgcttattcggggagcggacgatgaccctagtagagggggctgcggcttaggagggcagaagctgagtggcgtcggagggagctctactgcagggagcccagataccctaccgagaactcagagagtcgttggaagacgggaaggaagcccgacgactgagcagtccaccccaggcgtgattctggtcgcccggtggatcaagcatggaagccgtcataannnnnnnnnnnnnnnnnnnnnnnnnnnnnnnnnnnnnnnnnnnnnnnnnnnnnnnnnnnnnnnnnnnnnnnnnnnnnnnnnnnnnnnnnnnnnnnnnnnnnnnnnnnnnnnnnnnnnnnnnnnnnnnnntggagccacccgacagcacccaccacgggggattcccagcctcgcagacccccgacgagacagcagcccccgacgcacaccgcaaccccagccgctccttcgggaccgtggccaccgagcccaagctcttctggggcttcaacacttctgacaccgtcacgtcgccgcagcgtgccggggcactggctggcggcgtcaccactttcgtggctctctacgactacgagtcctggactgaaacggacttgtccttcaagaaaggagannnnnnnnnnnnnnnnnnnnnnacggaaggtgactggtggctggctcattccctcactacaggacagacgggctacatccccagtaactatgtcgcgccctcagactccatccaggctgaagagtggtactttgggaagatcactcgtcgggagtccgagcggctgctgcttaaccccgaaaacccccggggaaccttcttggtccggaagagcgagacggcaaagggtgnnnnnnnnnnnnnnnnnnnnnnnnnnnnnnnnnnnnnnnnnnccaatgtgaagcactacaagatctgcaagctgtacagcggcggcttctacatcacctcacgcacacagttcggcagcctacagcagctggtggcctactactccaaacatgctgatggcttgtgccaccgcctgaccaacgtctgccccacgtccaagccccagacccagggactcgccaaggacgcgtgggaaatcccccgggagtcgctacggctggaggcgaagctggggcagggctgctttggagaggtctggatggggacctggaacggcaccaccagagtggccataaagactctgaagcccggcaccatgtccccggaggccttcctacaggaagcccaagtgatgaagaagctccggcatgagaagctggttcagctgtacgcagtggtgtcggaagagcccatctacatcgtcattgagtacatgagcaaggggagcctcctggatttcctgaagggagagatgggcaagtacctgcggctgccacagctcgtcgatatggctgctcagattgcatccggcatggcctatgnnnnnnnnnnnnnnnnnnnnnnnnnnnnnnnnnnngcggccaacatcctggtgggggagaacctggtgtgcaaggtggctgacttcgggctggcacgcctcatcgaggacaacgagtacacagcacggcaaggtgccaagttccccatcaagtggacagcccccgaggcagccctctatggccggttcaccatcaagtcggatgtctggtccttcggcatcctgctgactgagctgaccaccaagggccgggtgccatacccagggatggtcaacagggaggtgctggaccaggtggagagggsgtaccgcatgccctgcccgcccgagtgccccgagtcgctgcatgacctcatgtgccagtgctggcggaaggaccctgaggagcggcccacctttaagtacctgcaggcccagnnnnnnnnnnnnnnnnnnnnnnnnnnnnnnnnnnnnnnnnnnnnnnnnnnnnnnnnnnnnnnnnnnnnnnnnnnnnnnnnnnnnnnnnnnnnnnnnnnnnnnnnnnnnnnnnnnnnnnnnnnnnnnnnnnnnnnnnnnnnnnnnnnnnnnnnnnnnnnnnnnnnnnnnnnnnnnnnnnnnnnnnnnnnnnnnnnnnnnnnnnnnnnnnnnnnnnnnnnnnattctgcttggaatatgatggcgtcttccctgttttgcccttagactattcaagttgcctctgtggattagggctggaggcagcacggatagtctgatggccaaataaggcaggcaagacagctatttgtaactgcgaaatannnnnnnnnnnnnnnnnnnnnnnnnnnnnnnnnnnnnnnnnnnnnnnnnnnnnnnnnnnnnnnnnnnnnnnnnnnnnnnnnnnnnnnnnnnnnnnnnnnnnnnnnnnnnnnnnnnnnnnnnnnnnnnnnnnnnnnnnnnnnnnnnnnnnnnnnnnnnnnnnnnnnnnnnnnnnnnnnnnnnnnnnnnnnnnnnnnnnnnnnnnnnnnnnnnnnnnnnnnnnnnnnnnnnnnnnnnnnnnnnnnnnnnnnnnnnnnnnnnnnnnnnnnnnnnnnnnnnnnnnnnnnnnnnnnnnnnnnnnnnnnnnnnnnnnnnnnnnnnnnnnnnnnnnnnnnnnnnnnnnnnnnnnnncttcagcggggccagcagcaacagcgagcaggtcggagcgcagccctggagttcacttgcggttcaaaggagactcagtgactcccgtggagcgctctgctttgggcctgggaggagaaaggcggggtggagggtggagggtgggggtgggaagaagggaggtgaaggagtaggggaggaagtccccaggagcagcctgcgcccaaacatttgtcaaacaagcacacacacccacttgggaaatcaagttggtgcgagggggctggtggccactgcag

SEQ ID NO: 561 - DNA, 5102 bp, Mesocricetus auratus
  misc_feature (758)..(792): n is a, c, g, or t
  misc_feature (3925)..(3979): n is a, c, g, or t
tccatacagcccacaaaatcctctggaagcatacaatctagactgggctctgagacccaaaaataactagaacataacagcttgtgctgacttgaaggctgaataagaatatctggaacttctcatctatcgaacaagctcgtctcggggataaaaattagatgctcaatgtgagcatcacctgctatagtcacatccagtctggggccaaagcctagaccctcaccgtgctgagctacaagaatgggatttataccaggccatgcttcaggaggttgttggagacctggggagtcataggcgtggcattcccagcagacatcagtacatataaggcattgttgttgttattgttgtgagttttactgtcccttgggcgtgttcaaatgaccattgcacagtcatgggaggttcccactctatgactaaggacattgggggttagggaggtaaaggacatgctttttagcaactctttgtgaccagccctgggcaggaccagggctcctaacccagtgctcagtttccagggttaaagctgtggctacaaatctagtgctctgtttctagggtttgcattccagaaggctcagtcctgtgagaggcgtatagagggcagggaaggtgaggagccacagaaatctgcatggagaaatacagatgcctttgggctcagtgagtgccctgtgctgagtgggagagaagggcaaacccacttcagggcttctctgttggggttctggagtgactgaagtttnnnnnnnnnnnnnnnnnnnnnnnnnnnnnnnnnnncttgcttggcacgtacatctcctcaggtgcctgggccccaatccccagaatctctctcctgtaccttgcttccctggttcatgcattcatcctcctctataaataccagctctggtattcgacttggcagctgttgctgccaggggatggctgggttgacacacagctcctgacaaaacacaaacccctggtgtgagtgggtgtgggcggtgtgagtagggggtgaatcagagaagggggcgagggagacagggcttgcaatgtcaggcgaaggcaatgttccccacggttgcaaacagtcaccagagtctttctggacattgtcttgctggttataaacttgagggaaaccagaggcctgcactccgccagagggaaattgaggttcagagctagagcccacttgtcagtggtacgcataagcagtcaggcactgaccaggctaactctctgcctaattcgtgtccccctaccctacaggtctgtctagagacctctttgatgagctagtagactcctgtctggtctttacctccagtggttggagacctcagcctcttctagcaacctttgcaagtaaaatacttgggagtttccttcttgttcattctaatgacctaaaaatctctccttgaagaagatagcggcctcaaactaatgaaaatctccagcctgctttccccaggataaggcaggattccaaatgtaaagaggccggtctggggtctcctgtcagctagctgcccatccagcaggcctgcttgtcttctgttcttgtggggcagcatggggcacaggcctcttgcaggggagctggcctccccgccccctcgctagcggccgccctttcctggcaggacagagggatcctgcagctgtcaggggaggggctgcggtggggggtgatgtcaggagggctacaaatagtgccgacggcaaagggactgtgtctcccctcttcgtatccactctccagccggctgcctgcccgctgcctcctctgtgcgtctgcccagcctcgtccacgccgccaccatgagtcaggcctactcttccagccagcgggtgtcctcctaccgccgcaccttcggtggtgccccgagcttctcgctgggctctccgttgagctctcccgtgtttcctcgagcaggcttcggcaccaagggctcctcgagctcagtgacatcccgcgtgtaccaggtgtcgcgcacgtcgggcggggccgggggtctggggtcgctgcgggccagccggctggggagcacccgcgcgccatcctatggcgcgggcgagcttctggacttctcgctggccgacgcggtgaaccaggagttcctggccacgcgcaccaacgagaaggtggagctgcaagagctcaatgaccgcttcgccaactacatcgagaaagtgcgcttcttggagcagcagaacgccgcgctcgccgctgaggtcaaccggctcaagggccgcgagccgacccgggtcgccgagctctatgaggaggagatgcgcgagctgcggcgccaggtggaggtgctcaccaaccagcgtgcccgtgtcgacgtggagcgcgacaacttgatcgacgacctccagaggctcaaggccaagtgagggcacggcgcctcctagatctttccccttcgccccctccccccctccccgcagggaacaaggcaccccctccgggatcccgtgaccctcctcaccccatgtttggaggtcattccccggtgttccctaagaagagatggtccccgaatctttttattgctctttctgtgttacactggagtagttttctttgggagatagagagaagaaacgggggaccttgggaggcctattgcacggtggccagccacttggaaaggatgctaattaagttgctgtagcggtggtgctgtgatgtgacagaggcagagcagagggctagagcaggtcagagcgtgaagagaggctggtggagcctggaaaactggatgcattgggaagtggaggaggaaggaaaccaaactgtaactaactttcagctcagctgtgatgaggcccgagggaggggtgaggtggggagcttggccccttggcctagctgaggtgtgctactgcactaggtaaaaggataggcttgagtaaagggggcagtggataaggcctgtggccctttgagagctcaagaagaccagcccattccaccatgacccaataagaaaaggctgagtaattccggtctgggggcacacccctgtattccagctcttgggaggacgattcaggaggactgctgtgagttctaggtaaacctgggatacagagcaagtaccaaggcagctgggcctacatagcaagacttgttttagacaattaaggaaaattaaaggcaggaaaagttttgtacattctcgaacctgtttctgtttaccctactgagcagagttaccttcttgtctccaaagtcacaaacatttatttagccgctacatgggtcaggctgggcctgagaacatacaagtgggtaaaataaaacacagtgcctaaccccggggaggtcaatctatttgggacatagacttcaagggtgcggctcagggttgagactcagccgcttcctaccccgccccccacccgtgggcgggacctttgctattttttttctgagcctcttgtttctacccagcaaccaggacttgtccctgtgtcctgagctggctccctgataggtccccagccagtggtttctattgatggctctgtagctcaccatttgtctgtctgtctgccctggctaggctacaggaggaaatccaactgagagaagaagcagagaacaacctggctgccttccgagcggtgagccttctttggtccccagcagtcatctctcttctctctcttggctccacttgaactgttccagaccctaacattgttgtttccccgtacccaggacgtagatgcagccactctggctcgcatcgacctagagcgcagaatcgaatcgctcaacgaggaaatcgcattcctgaagaaagtgcacgaagaggtaccagggcccttgggtgatggtgaaagcagctaggcaatgggctggctttgaaatgggggtgtgaaggtgctttgggagggtcttgannnnnnnnnnnnnnnnnnnnnnnnnnnnnnnnnnnnnnnnnnnnnnnnnnnnnnnttcaggaacagcaggtccaggtggagatggacatgtccaagccagacctcacagcggccctcagggacatccgggctcagtacgagaccattgcggctaagaacatctctgaagctgaggagtggtacaagtccaaggtaggtggtttagcctggggaccctggcacctgtcctctatctccacgagatgcttcctgtacctgcatccatggagtaggtgagcctgggatttccacactccctcgcccacactgaatcctgcttttccccatctcagagtccctttctctgccctcaggtttcagacttgacccaggcagccaataagaacaatgatgccctgcgccaggccaagcaggagatgatggagtaccgacaccagatccagtcctacacctgcgagattgatgccctcaagggcaccgtgagtccctccccatccccacggctcagcctctttctgcccacagcttagttccacaccttcactctgtgacactttgagcctattacagaccctctggggtctccatctcctcaaatgtacagggaggtaaaggcagattcctagttaggtactaaggaatcggaggactcctgggggtgtctccctatgtagggttggaggactagtgtagatgctccttattaggtggtttattgtgagtggccacatatgccttctctagagctcagggctccatgactaagaaagaagcacttgacgattcttctacctggccatgaccatgtggagttgcctccaacctccaacactgggtctctttctaccccaattctctggcgccctccttcctagatatgctctgggcctatccttgacttgggtcccctcatcccctgcagaatgactccctgatgaggcagatgagagagctggaggatcgctttgccagcgaggccagtggctatcaggataacattgcacgcctggaggaggagatccggcacctgaaggatgagatggcccgccacctgcgggagtaccaagacctgctcaatgtgaagatggccttggatgtggagattgccacctaccgcaagctgctggagggcgaggagagccggtgaggatttaggtatcgggtagggtgctgggatc

SEQ ID NO: 562 - DNA, 3155 bp, Cricetulus sp.
  misc_feature (771)..(823): n is a, c, g, or t
  misc_feature (3074)..(3091): n is a, c, g, or t
ttttcccttcagccaggtgcgcatactctacctgactcatgttcattcatcaatgaacactataacacccggtatggggatgtgtgaggaaaaggattagtaggacatctcttgctgcatgggctctggctctgtgatgctcacttggtctctctggctcttgttacagggcattgacttctgccccggtcagaatgtctcaggagtcacaacccatacccaggaagaacacacggagctacccctgatctttcacctgggacgtgacccaggggagagattcccactcaggtgaggcaggggtagggtctccatgctccagacactggccagacaggcaaaggtgagaaccagatctgagtggtctgtcttccatggagttactcctctggtctcagagggaatgtatgcctctttgaggacatgaactacacagagggatcccagaaacctccacctccaccttgggccatggttgctttgctctctggaagctctcttctcgctttcctttcctggttacttctcatctctgccccttctaggaccagtcccagcaatgggtcctatactctgagctaccttcagggcatgagtgagggatccaggcttaggatacatctatctgtactaactagccctgggactgacaggagggaaagattgagagtagaaatgttcaggacatgatcctagattctagagtaaagtgcttcaggtgacagccagcatcgtggagctgagggttgcctgctggtcccactggcagannnnnnnnnnnnnnnnnnnnnnnnnnnnnnnnnnnnnnnnnnnnnnnnnnnnntgagttaaatggccactgtagggttcaaagatacccctcctactttcccctattcacagtgaagatcacacgtcactgcacacacagtgactggaatcacatccaccaaactccaaatctactacggctcctcagccaactctggcccagttcactctggctctccctgggaggctaacacagctcccttagcaggatggtaggtgccttaggtcctggattacaagtcctgtgtcctatagcattcctgccaggttggaaaacacagccttctgctcagtgacaggccatggcttgctaatcagagattataaaacagaggactttaatacaccataaggatcactaaggctgttcctacatcttgtgtggtagttgtatgtctccagcacctcggaaggcaaccttttagaaattgggtcttgtagatattgttaaggtcaagatagcaatgaggttagcctggatagtggtggggcattattctgaaagaagaggggagagacatcaagggggaaagtctgcttaaggacaaggcagagataagccaaggggttggaccaggcagaaaggtacctctcaggttctctagagggagtgtggccctgtagtgtccaacttcaaccctctagcctccaaactgcggctgtgtggagcctcttttcctttctctcaagcagagactggtatttcctcaaggcccactagcggataaatgtcacaaaccacaaggagctctgttgataataagggagggtggagctgcagggttgtttggctctcctaaaagatatgtgtcttgattgatcaccactggcctcctgccctcaggatcaacccaagggccacagtgtcttacagtggtgcccctgcttcattttcccacatcaagtttatgctcagtttgggcccttgcgggaatttttcattctgagatgcttcttctcaaggcctgttcacttcctaaaggtaagccctacctaccagactcagtgaaggctgcacaattctaccacctgcagcagctgcccagccctgtcccaaagccacctcctggcccaagggcatgactctctcaagacagggcataaggaaagccagaggtgaattttggagagaatgtccccatggcagactctctatggttttacctgccttgctgcttttctgcattgagcctcttgaaaagcaagatgatagtcacagactgggagccttgggacaaagtccttagcactagctggccatgggacaacagatgtatttggccacagtacctgcagggattttggaatgcccaggacttggaattaacaacaagccatgaacagggcagcacacaagaagtatagggaggtaccatacaagggctggaggttatgggtataggcaagcctctgaagatccaaacccataaggaattcaccctgtggccctgtcatgttgtgtgtctcaagatactccatctgtgtggacagaaaactctgatgctagaagttggactagaacataactgagtcccaggagcctaagtcctcttcctaggaggcagctgtgctggaagaggccctgctatcatcagggagcagtcaaacccagtacaacgttggagtacagcctaagcctctgaagtccctcaggccccttggggtcacagtgatggttggggtacctgaagggtaggaagcatatggtcatcttctcaccagccatcctgagacattaagaaatatgaggacttgtttcacatgcagaattctctctgcccacagtttgtcaaagcttgagttacagatatctgagatttgtctgcaccctgcatgtacacagccctaggtctgcctctttactccatgtgggcatatcagtggtgtgtgttgtgtggagccattcatcacacagtgagtgtgctatggcttgcttcacactcagctaaaggctccctgacagtccagcagatggttatggcgcaggtgtttggatggaccttgtttgaatggtcaggtgagagggcaatgtacagaagggataggataagacacagactggatatatagctcagtgtagagtagttgcctagtgcttccatccctagcacctcccaaaaagaaaaataaatgtaattgatcttatctgggagggaaatttagcattacatttttatttatttattagagacagggtctcagtagtgtgccctgtcctggaactcatgatgtaaacaaggctggcctcaaactcacagagacannnnnnnnnnnnnnnnnnttggctataaaggtgtgtagccaccatgctcccccttcagcattaacctttgaggaaccaccag

SEQ ID NO: 563 - DNA, 1665 bp, Cricetinae gen. sp.
  misc_feature (693)..(712): n is a, c, g, or t
  misc_feature (1019)..(1037): n is a, c, g, or t
ggcacgagggcggcagcagctcccgcggctcctgctctgctccgcctcggccccggagcgaggggggagagcgcgcgcttgccttagtccgagccgccaccctccccgttccccgctttcccggcccgcccgaggccgcccgccccgtccccgccgccccgcagcccggccgcgccccgtcgccgccatgggctgcctcggcracagtaagaccgaggaccagcgcaacgaggagaaggcgcagcgcgaggccaacaaaaagatcgagaagcagctgcagaaggacaagcaggtctaccgggccacgcaccgcctgctgctgctgggtgctggagagtctggcaaaagcaccattgtgaagcagatgmggattctgcatgtwaatggktttaacggagagggcggcgaagaggacccgcaggcygcaaggagcaacagcgatggygagaaggccaccaargtgcaggacatcaaaaacaacctgaaggaggccattgaaaccatcgtggccgccatgagcaacctggtgccccctgtggagctggccaaccctgagaatcagttccgygtggactacattctgagcgtgatgaacgtgcccaacttygacttcccacctgaattctacgagcacgccaaggctctgtgggaggacgarggrgtgcgygcctgctaygarcgctccaatgagtnnnnnnnnnnnnnnnnnnnncagtacttcctggacaagattgacgtgatcaagcaggcygactaygtgccaagcgaccaggacctgcttcgctgccgcgtcctgacctctggratcttygagaccaagttccaggtggacaaagtcaacttccacatgttcgatgtgggcggccagcgcgatgarcgccgcaagtggatycartgcttcaatgaygtgactgccatcatcttcgtggtggccagcagcagctacaacatggtcattcgggaggacaaccagaccaaccgyctgcaggaggcyctgaacctcttcaagagcatctggnnnnnnnnnnnnnnnnnnnccatctctgtgatcctgttcctcaacaagcaggacctgcttgctgaraaagtcctcgctgggaaatcgaagattgaggactactttccagagttcgctcgctacacmactcctgargatgcgactcccgagcccggagaggacccacgcgtgacccgggccaagtacttcattcgagatgagtttctgagaatcagcactgcyagcggagacgggcgccactactgctaccctcacttyacctgtgccgtggacactgagaacatccgccgcgtcttcaacgactgccgtgacatcatccakcgcatgcacctccgccaatacgagctgctctaagaagggaacacccaaatttaattcagccttaagcacaatyaattaagagtgaaacgyrattgaaaagcrgttgatcacccaccatagggcatgatcaacaatgcaacctttccttcttctccccagtgattctgaaaaccccctcttccccttcagcttgctttgatgtttccaaatttagtaagcttaaggcggcctacaaaagaaaaaaaaagaataagaaataggccacaaaagttccctctcactttcagtaagtaaaataaaagcagcaacaaacagaaataaatgaa

SEQ ID NO: 564 - DNA, 1501 bp, Cricetinae gen. sp.
  misc_feature (942)..(962): n is a, c, g, or t
ttacctcaccgctttctcgtgcctcggcgcctcctctgcgggcttcctcctcacaccgctcttcgctcccgccagccgaccgattccgtcatggcgacccgcagccccagcgtcgtgattagtgatgatgaaccaggctatgacctagatttattttgtattcctaatcactatgtcgaggatttggrraaskygtytattcckcatgrwktkattwtkgwcaggactgaaagacttgcyygmgatgtcatgrwagagatgggaggccatcacattatggccctctgtgtgctgaaggggtgctataaattctttkctrryctgctggattacattaaagcactgaatagaaatwgtgatagatccaytcccatractgtagattttatcagactgaagagctactgtaabkatmmktcawcakrggaywtaaaarwtawkgrtsskrrtkwtvtmtswaytttwactggaaagaatgtcttgattgttgargryawaaytgacaytggtawracaatrcaaactytgctttccytkgtcaarcrgtacaaccycaaaatgkttaagrttgcaarcttgytggtgaaaaggacctctcgaagtgttggataycttgtttggtaggaaccagacaattctctaatgttgctcttacctctcagaatatatkwytmtaatgwgwrcttcwkkswtttgmakcatatttgtgtcattagtgaaactgggaaagccaaatacaaagcctaagatgagagttcaagttgaatctgcaaacacgaggagtcccattcatgttcccagtaaaattaccaagcattctagttctgcagccatctgcttagtacagctttttgcatgaaccttctaagaattttatggttttttatttttagaaatgtcagttgctgcattcttaaactttttatttgcactatgagcctnnnnnnnnnnnnnnnnnnnnntgtgagcaaagtaaatctcttaaattaccactattaaaaatgctgagattgtatctgtaagaaacatttaaagaggagatatattagttttttaattggtattttaatttttatatattcgggaaagaaagctgtgattgaatattgttaattataccaccatgtgtttagaacagtgtgaagcactcagtttcatgtcagtaaccatctaagaagttttgctcagtggaataaacatatgttttatcagtgttgcctatattttcccacttggattctttcagtgagtcattgtcaacagttcctttaaatgcaaataaattctaaaaatttaccacttttttgagttttttaatgtaaaatttcttaaacttaaggactgtctcttatagaactctgcatgccaatcatttccctataaattaacttggtaaccctcaccaaatatcgcaagtaatggttatctggtagaatggtttggcagaactaggaaggctcctgtctacttgagacagtactatttactacatttctctgtt

SEQ ID NO: 565 - DNA, 2933 bp, Cricetulus griseus
  misc_feature (864)..(1369): n is a, c, g, or t
  misc_feature (2576)..(2655): n is a, c, g, or t
acacacacagaaccatgcctgtcatttctgtggtcacagtaccatgttgtataatgcaacaattcagattttcttagatgtatttaagtgtgtttattagttattattacttatatttaagtaaactctttactaaacacatgcatcagtcctattccagatacagaagatagctagaaaaatggatgtatgtgaagatacacccacacagacatatatgtatttcactcataaattgtccttgtgggctaggcataataattaatatatgcctgtaatcttagcccttgggcggcaggaggaactgtagttcaaagccaatttggattatatacaaaaccatatctgaaaacaaccacaaaaatattgcttttgtctctgccagcagtggagctgggggcgtgggcctatatgagtagatttcagctgtagacaaatgttaaggccataccagacacaagggagtctctcaagaaaactctttaaagggaagctccatcaagagcaaaggtaggctgtgggattccaagccctgcacagctccccaggtctgaacttaattaaaacagggcctgacagcgaatctaaagttgctcaaaatcgggaacaatgcagtccttggataccacctaaaatgatcccactggagggaagacatctccagtttttaaaaccgctatcttggagtagagccgataggttaaggtgtgtgaccccagtcctgtacaatgtgcctagacttctccggagtggggaaatgaatgtgttaagatgagatgcgttggccctgttgctgtgtccaggaggaagagtcccaaggattgtgatgggacagagatagcaaatgaggacggggaaagtacnnnnnnnnnnnnnnnnnnnnnnnnnnnnnnnnnnnnnnnnnnnnnnnnnnnnnnnnnnnnnnnnnnnnnnnnnnnnnnnnnnnnnnnnnnnnnnnnnnnnnnnnnnnnnnnnnnnnnnnnnnnnnnnnnnnnnnnnnnnnnnnnnnnnnnnnnnnnnnnnnnnnnnnnnnnnnnnnnnnnnnnnnnnnnnnnnnnnnnnnnnnnnnnnnnnnnnnnnnnnnnnnnnnnnnnnnnnnnnnnnnnnnnnnnnnnnnnnnnnnnnnnnnnnnnnnnnnnnnnnnnnnnnnnnnnnnnnnnnnnnnnnnnnnnnnnnnnnnnnnnnnnnnnnnnnnnnnnnnnnnnnnnnnnnnnnnnnnnnnnnnnnnnnnnnnnnnnnnnnnnnnnnnnnnnnnnnnnnnnnnnnnnnnnnnnnnnnnnnnnnnnnnnnnnnnnnnnnnnnnnnnnnnnnnnnnnnnnnnnnnnnnnnnnnnnnnnnnnnnnnnnnnnnnnnnnnnnnnnnnnnnnnnagatctggaaatggaccccaactgctcctgctccaccggtaagagaatacccagttaggaccgcagagrcattcccgcagttgtagaggatgtagtgtagaatcttcgcgggaataatgccttcgttggggattcattctagttctttttagcgtccccctttgcaagcacctccatctattcttgcagtattaatattgtccgaacggatcctttgtcggggttgagggcagtatttaggcgcacaaatgtcccgctcctgatcamccaggtagtgaggacatctgggtcgagctccaggcactactaaacttttatgaattgcctagactaggagagaagtgagggacttctgtgtcttggaccaaagaccaagccctaccctaccccgtgagaagtgggggctaggcttcctggaatcctgagcaggatttagtgaactgagctcggcacgtgtgtgggcactgtgatcttgcaagtctctctactgtcttctttctcctccgcaggcagcacctgcacctgctccagttcctgtggctgcaaagactgcaagtgcacctcctgcaagaagagtgagtgtggagggatacctggggtggtggctaaggtttggcgggaacacccacagggcccgacagatcccagggccctcccttgtaacgtgtcaggccagagctgttctaagacacacacacccccgcttgttggggcaagaaacaggtcttccgtcaggtctgtgtgacaggtcttaggactccagctytgacctcttcctctccctgttctaggctgctgctcctgctgcccagtgggctgctccaagtgtgcccagggctgcgtctgcaaaggggcatcggacaagtgcacgtgctgtgcctaatgggaggacgatgccgcctcccacgtgtaaatagtgcccggagctctaccctgtttactaagtccccttttctacgaaatatgtgaataaaaaaccaatgtgattctaactytggttttctttgtgtgacttggaaataaggaagtggggtgacagattgacttaatgagattgcaaggatttggttctggasttgttggtccctttacctcttcaccctctgccccagaggagggggaagtgtcttagggaaagatcaattatgtcatgagcttcctcttaatggaagacgagcagctgtgtgccggatcagactctctctcnnnnnnnnnnnnnnnnnnnnnnnnnnnnnnnnnnnnnnnnnnnnnnnnnnnnnnnnnnnnnnnnnnnnnnnnnnnnnnnngccatgcgtgcgtgtgcagagctctagcaagtgctcacatttgcttgtgcatgtggaggctgagatggacattgggaatcttcctctttcactttctgccccccaccttgagacaggtttatctgtgtagctttggaggctgtcttgaaactgactctgtagaccagactggcctcagactcacagagatccgcttgcttctgccctacaaatgctgggattaaaggcttgcaccaccattgactgggcctctaatcttactttttgaaatgagatct

SEQ ID NO: 566 - DNA, 11062 bp, Cricetulus griseus
  misc_feature (175)..(197): n is a, c, g, or t
  misc_feature (359)..(388): n is a, c, g, or t
  misc_feature (906)..(935): n is a, c, g, or t
  misc_feature (942)..(996): n is a, c, g, or t
  misc_feature (1896)..(1921): n is a, c, g, or t
  misc_feature (1924)..(1951): n is a, c, g, or t
  misc_feature (2002)..(2024): n is a, c, g, or t
  misc_feature (2682)..(2702): n is a, c, g, or t
  misc_feature (2736)..(2772): n is a, c, g, or t
  misc_feature (4347)..(4407): n is a, c, g, or t
  misc_feature (5004)..(5030): n is a, c, g, or t
  misc_feature (5077)..(5102): n is a, c, g, or t
  misc_feature (6525)..(6559): n is a, c, g, or t
  misc_feature (7530)..(7551): n is a, c, g, or t
  misc_feature (7793)..(7821): n is a, c, g, or t
  misc_feature (9249)..(9293): n is a, c, g, or t
  misc_feature (9774)..(9796): n is a, c, g, or t
  misc_feature (10884)..(10928): n is a, c, g, or t
ctcacacattcactgacagtagcctcagcactaagtgtctgagtaagatcccttaagtttaattacttcagagatcagtgtcccaatttttttgaggaaaatgaagtataaaaattaaattttaagcatatgtccaaagagatacaaaacacaaaatttaaaaaaactaatattnnnnnnnnnnnnnnnnnnnnnnnggttaagagcaccaactgctcttccaaaggtcctgagttcaattcccagttcccagcaaccacatggtgctcacaaccatccgttataagatctggtgccctcttctggtgcgcagatgtacatggaagcagaatgttgtatacaaataaacaaataaaatnnnnnnnnnnnnnnnnnnnnnnnnnnnnnnctaatattagtcccagaaagaaattcgaaaatagctttataatgtaaaatatatattaccagaagtaagctggtatagtaattcagccctgatggagtcagtgtatcacagatacataacaagggtttctccctacacagtcagtgtgttttttctctaggagcaataacagttatgtgggttattaaaaggatgatgtggaataaaagcgtattgagaaggggaattgcatgtaagtagtaaggaggctgacaagtggcctggcttgttctgaatatggcagcagtggaatttacagtggtggaagggatgaggaacttgtgaagagtttcctcgggtacacactgtaggagcagcgtgtagcaggagtgcagtgaagatagtaaggtggttagtaagggctgtcttaggtacaaagaaaaccttttgctgagagctgggaggtacatcttagaagccaggggcaaagatgcaggtgggtctaagaatgaaattcagctgggtggtggtggccacgnnnnnnnnnnnnnnnnnnnnnnnnnnnnnncaggcannnnnnnnnnnnnnnnnnnnnnnnnnnnnnnnnnnnnnnnnnnnnnnnnnnnnnncccaaagctacagagaaaccctgtcccgaaaaaccaagataaataaataaacaagcaggtgggaaaatagaattaaaattcaagttagcataaagggataagccaattgtggtatatatctagagttttaacttagtcataaaaagaactaaatactagtaggtgctgtatcttagataaacctcagaaacactatactaagtaaaagaatccaaacataaaagttatataatgtttgggtccttttatatactatatctaaaataggcaatccttagaaaaaagaagcatattttgtgtttggggggggcatgttacttaatgattacaagagtatttttctcaaatgatgatattttgaaactaagatggtagtagttgtataatgaatgtcatgaatatactaaatgttctagagtaacatacttaaaaatggttaaatatatatttggtgaaatttccttataattatggggggcactgattgctcaatggtaaagatcactttttacagaggatgcagacttggttcctagtacccatatggtgagctataatcacctgtaactcaagttgtaggggatccartgccctcttctggtttctgtaggtacctacacatgaaattaaagaaaaaaaaaaaactttaccatttaaaaaaaaaaaaaaacttttacaattttacaaatgtttatatgggggcattgtttccctcctcctggccccatttctgagggtgcgagcactggsctcaccattagagcctttggtttccttttcagcatagaaagtacctcttagaccagagaagagatactggaggggtagttgaaaccttttgactttaggagwgttaaaaatgtcatctgagccaggcattggtggcgcacacctttatcnnnnnnnnnnnnnnnnnnnnnnnnnnggnnnnnnnnnnnnnnnnnnnnnnnnnnnnctccagagcgagtgccaggataggcaccaaagttacacagagaaactctgnnnnnnnnnnnnnnnnnnnnnnnaaaacmaaaatgtcatctgttcagagtaagggggtaggagaatttgatgtgtttatagaagatgaacatgttgaggacaggaaaagaaatcttgactagaaaggttgacattgatgttgagtggctcactacacatacacatgaaagatccttcagtatcacgctatcttgttgtgaacttgaagactgtttcccaccaactttgttctgaaacttgagcatgcctacagtcctgggttatcaggcattcagtatatgttcgtactggataaaaattcccttttctcttgtctgtccttttaaatttagaaactttctttcagatttcaagaaacatgctttaggcacctactaagtattcttcctttagttctttattctatgtgatattcttttatgagctcctctctctttcccagtctttatgcactgagttaatgcttcttgtcaagcttgatctcactgaaaatagcctttggtttatagaaacaaactgcatgttgctttatagtttaccctggataaaactggcagtttctaagtctgtcctaattaaagcttcccaagccaaaagatggtgtagagggtagagactagtgctaattataaatataaaaataaggcatactgttggtcttctcttgctcctactctaaannnnnnnnnnnnnnnnnnnnntagacttcacctcagtgtgttgttagttgtgcannnnnnnnnnnnnnnnnnnnnnnnnnnnnnnnnnnnnggaagtcatgtgtttgaaaccattccagggtggaaatgaccttgtggcaaaggatgttactaggctctgacttctttcccatctgctggtttgcctttgcctgtgcctctttaaaatgggaatgattctgaaatgaatgctttacctttttggaatccttatttcagattcactgcaaggggtaaaatgtgtcattttaagtagattcattctctagaaacagacccaactactcttctagttcttttgcatagtctagatttctttttcagctgaaaaaatctaaatgaagaggaagtgaaacttgttactttcctcattctctgtgtgtgatggttttattttaggtacagtggtagtctgttttcatgaaaattctaatgattatagaaaatcctaataacagtagaaatggaggaagaattctgtttgtaatcgattgtgttgtgtgcctttcttacgtaaatactgatgacctaacttagctgggtgcaggcagctgttacaacttgagctgacaatgttggttgtatgtttcaggttccaatacgtacgaagaggcagctgcttacattcagtgccagtttgaagatctgaaccgaagaaaagataccaaggagatctacactcacttcacctgtgccacagacaccaaaaatgtgcagtttgtttttgatgctgttacagatgtcatcattaaaaacaacttaaaggaatgtggactttattgagaggatggcattagtaaaaggtaaaactttagacagtttagttgcactgttatggtggggtgttttgcctttgtaaatgtttttctaattgacagtgttcttcttttttagttactgcaatgagtgttgagaccagacatcatctgctgtctcttgggtcagctacaagcatggcgggaccagggaatggcagcagcatgcagaatcttagcactctttagcacaatcttctgtattagggaatgtttagttggcatgagatgttcaaatcagacatcggaattggaacaactgtaaactgtggttgactcatcaaggcatcacttggattttatattctcaaatgtttagggcatattgaagtcgaggtgctgcattccagaacttaaatatgtagctcacttttttttcctttttaaacaaatcacccgtagttaatttctaaggtttttctcatcaagagaagaaaaactaaaaaatcgtgcttgtttgcaaaagaatcttgaaagaactcagtcttaactatgcacatgatgtgaccagacatcttgaaaatattcctcttagtaggaactgtttgttttttagctcttggtacggtcagacgcaatatttccataattaaaattcttcctggttattgggactacgttaatatagcttttctgactgaaatgtatgttactgttatgtttaacgtgccacgatggcttctaacagcaattacttggagagttctacagtatgcgtttagctctcatttctttaagcttatggttgaagattaaccttgtttatgctgattaccaaattactagtgaatactgacgtaatatgataaacnnnnnnnnnnnnnnnnnnnnnnnnnnnnnnnnnnnnnnnnnnnnnnnnnnnnnnnnnnnnnttgagaaccaatgacttgctgctacagatctactaaattgaccactttgagtcttgtctgtttgtctcagtcatagggaattttgtataaggtgcctcttgttttccatctctgtggcctttttggttgggagacatctcaagtgtattaacagtgtgtgcttttcttttgtaaatgtggtgccaaatccctgtttgccatcgtttttactgtagcaatgctaattgtagtagtgatccttagttagtatgttctttttctaaaacttgcattttggaacttttttccactttgtcatgtgtacagattttaatctgttacagctggcagcagtattaaaacagtgagtaaagagtccaggtttgctctgcttgtaactggtcctttctggaaatcctgtcttgtgtttccttttgcccctcttgagtatgctttggcctttgtctaagagtgggtttaggtagaagggggtctctgaaagtctagttcttcaatgtagtaatattatcaaatctaggactgagggctttatgtccagtctatgtacaagggatatgagtcataattagcttctgatttacattctgcttgtgctgnnnnnnnnnnnnnnnnnnnnnnnnnnntagcaaatgtcattaacactgagtggatcactgagggatggcaaacnnnnnnnnnnnnnnnnnnnnnnnnnntcagtagttggagcagtgccttttgaggtccagtcttttcagattggatccgtttcatcttttgatgttacctcctactcatttaaaaggttgatggtcagaactgctttggaaagcaagccacagtgaccagtgcctttgctggcagcttttaaaattttttaattctcacagaaaatcattattatgcagacagtataactattatctgacaagcatttctttagggctaggaaaataccatcggaaagaaagaaaagtgttgatttcagtcagcaatggacttaattcccacagtgtaggggttcctaagtcttactctgaatttgtcttttctttattgtattctgtaatataaaaacattgaaaacaagagctagtgaaatgttgttttcataacttttctatactttgggattagtgaaatggtgttgataattaaaataatagatatccaaatttaattttactttagaatgcattttgtattttcatttgaatctgtctattttttaaacctttctattaattaaaaatacaagttctccacttctttgcctctacataccacttttatttgctttctgtttacacgaagtcattctcatcatccaggtgccttcttttaggacagacgggaggcagttgaagttttcagcgatgacctgaaggggaaaaatcacctaaagctgtctgaagagcttcttagctgtgaactgttaaagtgtttctgttcagctaggctttgagatcactactttgtattttgaagaacatttcttaggcagagtcagaatgtgaaagttaaacatcttatgagcctggaggaaaaaagattgatgccaaacgttaggagtttcctctggaaaatgctggagttttgtgatggataatgttcattttgaggtggccagacctttggaccatctaagaagtcagctaagaaaattaatgttgaattaataaaacacgatcaatagactttatccttgggaggatggcaaccataacctttgttgttggcagccacattttctcctgagtggaaacttgagcagataggagatggtctctctttccttacctaatcagttcaggcaggtaatagactacaccttctgctgtgaaagtccccaaaccattacaggtccttatcacacagccacttacacacctaccccccaaacacacacagttactgtttccagctacttctgtgaaggacaacatactttagaattcgaattcgtcagggtagtacagttttgttttttccaccccataccatgcctgacttggcttggcgcttctcgggaattgagatgacactgggggtacatagttagtttatgcagattccctgactaaactgaactaaatcaaatctcacaaagacatcctgggaaaatgtgtgtgggggggnnnnnnnnnnnnnnnnnnnnnnnnnnnnnnnnnnnttgttttactaaatcccttaagcaacttgtgccaaaagttgagggcaacagaacagactaatattgacaagaacacttgaatccattacagaacatacataatctcaaagtcactagtgagtgacaggaactttgaatacttctgggtgttagggacatgactctgtggttaagagctctggctgctatttcagaggccttatttcagttcccagcactcacacggcaactcacaaccgtctatagctccatccctgggattgtgacaccctcttctgtggacaccaggtacaagtggtacacatacatatatacaggcaaaacactcatacacagaaaatagaaatgtcttaaatttttatatttttcacactttaaagtgcctttcacacaaacaattggtgtaaggattggtgggtcaaaaacatccctacatcttaggtgcagagtatttaatttttatataaaatttcaaaagacacttaagatacccaaacatatatttctacttcagttgtttatagtatttataagcagtgaaaggtttaaaaattccatgacaagtgactattaaatgtaataacagatgaatgtgcacttatggggatcacaaggtggcagaagtaataaataattagtgatacattattgcagtgtattaacattgattttgtgtggtctggcttatatcatttcctatctctaggcccacctcaatattcgttgggctactcagacattttaactgagaagtttgtttgtgagattccccacaagtaatacaagaaattacttttttctctttttatctttgctcatgtaggacaaaagtcctgagacctcttagaaatcttaggagcctgagaattacttggcgtactgagttctgctcttttctcggcttttcctaagccacgaacgtttgaacaggtcgctttcagtcttacattccttttgtgttgtccaaagannnnnnnnnnnnnnnnnnnnnnagacctttgttttgtatttcagccatccttattttctgttcacactggtatgttcccttctactatctcagtatgcctgtctgacctacaaaaacttcacgttgttaacaagcggcaaccccagaggcacttgctgtccctgctggaatctgtgctctgagggctgtgctgggtagaaagggcagggggaggtaagccctcttcccccttcacctccctcccagcattgctgctgtggcacnnnnnnnnnnnnnnnnnnnnnnnnnnnnngtagagactctgaaagtatgtgtgtctttcaccaaatgactgctgcttttgtgtctcattcctttatctgcagaaagtgcaccagcacgtcgctaatcattttttccttatttttattggcaggaaagaatacatgacaagaacatccaagtttaataattaagcataaagttgaatagcattaaccactattgtatttccatcacccccatccatctccaaaatttatttcttcccccaggtctctctgacttccaggcccatttttccatgttttaaatacctcagataagtggggttttacagtatttgtcctgtcatgtcatcatagtatttaaaaactcatcagatgtatgtgaaattttagtagtctgtgtttgtgttgtcaccaatcatgctgtgatagggaagtgcctcacagcctctcactgccgcctaagggtgtaaacatttctgtgagtttggggccaacatagtctacacagtgagacagtgtttcaaaaacaaataaataaataaaaacacaagcaagcaaacaaagcggaaacaggccatttatgtaaaagtaaaagttgtctctgtagctctgaagagtagagtggagggacagtgtcagcctgcctaggctgaactggagttaagatgcttgggggacaccaactggcattcctccatctcctcggaggtgagccctggccaagtttcaaagtacagatgagtgggtgactgactgggtgttaggcagtgtagccagtttgtataaccacatcctcatctcaattgaaaagcagctgggatacggccttaaggagtcactgtttctcctctgtctgccaagaaaataattttgtgagatgcaaggtacattatgtgaatttgtgagccagttaaacattaaaatatctgtcagaaaatggtagagaactaaaatgcaactcgggttttggcttgagaattttattgttctgccagaagtcctgttccattggctcttataatagagggcaagttttgtgtatcagtagccaaagagataaggagaagcaaagagtccagtccagtctggaggggaagctctcctatgaggagcaaatagggtaaaattgttttaaggcctgaatgcacaaccacactctgggttctgttttttgagacaggatctcatggcgatcctcttgcctctgcctcctgaatgcagtgctgaaattaaagctgtgtgacactactcctggctgtaactccaatttcttaagttgggtgttaaaagatccggtgtctacaaataaaattgcttaatttgcttgttttctttgtaattctgaattttatgcattttaaagcattttgaggggcagaatgatgcctcagtagtttaaaaacactggttgcagcctataatccacaaccccagagaagctagaacccccnnnnnnnnnnnnnnnnnnnnnnnnnnnnnnnnnnnnnnnnnnnnnacagtcgaagtgaggagggcgaaatatgacaagagtcagtcgtgatgggaactacagatcagctgacccaagctagtgagaatcattgactcaggtctgacaaatggggaacagcatagacaactggactccttaatacagatgacaatggtgtggctgggacaatattgaggccactggcagtgggtccatgatctaacactaatgcacaaactgacttagtggacccattctatatggagagataccatgcccagcctagacataggggtgtgggaagtggagaggtgccttggtcctgcctcaatgagatgatgggacagacttagtagacttccttggggcggccataccctctctgtggagcagatgggaggagcaggaagaaaggaggtgggggggggactgggattgaaatgtaaaaaataataaataaataacaaaaccactggttgctcttccagaggacctgggttctatnnnnnnnnnnnnnnnnnnnnnnnccaaatcatgtgactagttccaggttctgatgtcagtggacaactagcataccagcatccaagtggttcacagacataatcaggcaaaacactcatacacacaaaataagaatcttaacaaaaccttctgagatgggagtgttggtgcgtgcctgtagtcctcttccctggactgaagcaaatggatctcttgaactcacaaactcaagcagttttggcaatacaatgagaccccatctcataaaaacagaaaaagcaaacagaatcactctgaagagagatccatagcctctctcatcctgctgtaggagttcgtgatctaagacactcagaatcattgtatgcttagagtggacagattgctgatggcttgtattgcctttctacaaagtgctttgcccaggtgggatttgtttattatttatttttgtttgaaggggtctttgttgatgttactagccatacctagagtagttcctagggtgattctggcaggttggggtgtgtgtgtatgtatgcatgtgtgttcatttacttgttcagaatattaagtgaatcctcatttcagtggtcgcagatcagttctttggtgccttttttcaagctcgtgaggctggctggctctctagtattaatattgctggaagcagctaagtgtgaatgggtgtttctggcaaggagcagattttcattttaattgacactttcttttatgcattaaaccatggatgccaagtgctttcctcactagtagttgtaaatgctaaatctatacatggcgttcaccacctcctgtcaagataaatgccaagcttcatttcccctcagagcagttcaaaggaataatttacccctggtttgcttgggaagatgtttgcagccagcctcacgtggacccagctgcaaaaattcccagtgcctaaagcaagctcagcagtggtgtttgttcttgtgaaacatacagcagctggaatgagaattcagattgcttgcttgttcaaatcctacagaagtggcggtggtaacgtcttaagtggggggtatgctgatgccctcaagttcagccagacactacttaacagtatagnnnnnnnnnnnnnnnnnnnnnnnnnnnnnnnnnnnnnnnnnnnnngagtgggataataaagacggtcatttctgaatgaatgccctaagaaatgaggcaggactcacatgctttctccagtgatgcgggtctctgagcagaggcatattgatctgctagtaaaaacccagggggcaggg

SEQ ID NO: 567 - DNA, 2854 bp, Cricetulus griseus
  misc_feature (187)..(211): n is a, c, g, or t
  misc_feature (1534)..(1572): n is a, c, g, or t
  misc_feature (1834)..(1854): n is a, c, g, or t
  misc_feature (2835)..(2849): n is a, c, g, or t
gagctcgcccaaaagacckatttaccggaagacacgattcacatatggtttcagaacagaagagcacgccaccgtgccgcctgcacgggtagagttccgagtccagattccctttcctcgcctgagcccaatgaggcagtgcacggcagcgagactgagcgtgcacaggacagcttgttgccactgnnnnnnnnnnnnnnnnnnnnnnnnngcactttgaccatgacttgcccatcaacctcctaccgaatgtcctggcctgcagagacggcacagccctctccaccagacgtcccagagacacacaccgttgcatggaacacctgcgctgggcagctctttcttgatgcagtgatgaaagagatccaagatgaccaagatctccgacccctgcaggactctctggatccctacgatcaatgggagcagatgcagccaacccttgagccccctctggacgaagaagtctatcaagctctactggatgacctctgtgacacacactgcaaggcttcatcgtctcatcacggatgccgtcctcttccagaaagcaagacccttacaccaaaccccaacacaggacaaaatggacctccaacgcccctgcccctgttccggagcccatggacaggaatcccctgaccctaagcaactgggaaaaatcaccagaaacaggaagtcgggtgtggaaggccatcccaggaggccgaggactagaaaattccctggcaggaggcgtttgctggagactagagggaaatttccccagtcatacacaggaagacatctctccaatgaagtggcctgagaacccctcagtagactccacagacaagatactgcctgaagtggacccccaccaggtctcmctccctgcctccwggtctctacamtctattggccactgtggaaygctyrggccagataagcacattttcytrgagatgcgasyctgcytttcktgtcaatgcctagtagtggctaccaggatcmatwggtawcaggtcrttyaatgtataatcagarggacktccamttycttctttcctttctatagattgaatgattgattgcattgattttctagtttccttttcatgctgggrcatcystttgagcaaaggwgtgaaaggggaataatggaccagaattgcaaggaacacagggaggtcttgaggaatgggggacaccasagycagkagaaggacattctctggtgscwasgasctgaggactsraaagwtggawaggggttcagaatggktgytttagaatggcaattsraataaaaatctacmaaagaaagaaccgggaattggactaaatggaataaatggrataaaytcattttkgkttcatgttaagactttctttcttacatccgttctctttcttctaatcttgcaatttttatttttkwywcatattgtggagatttggkkttttggagcatttctctttraaaatagwtttcaatttacayaaaccgctaaatyycctcattagccacckamaaacwcacacaacacaaatnnnnnnnnnnnnnnnnnnnnnnnnnnnnnnnnnnnnnnnaacacagacacacacatgggtacacraagkggattgtgtctgagrgcaagctgtaagcatctaggcttcctcctcagtytasaagtytgatatctgtactgtgaaagtgaggcttttstgtttggttstgatgtatgcagacaggtttmcwacaaacactggggagatcccctagatcagcttctgcrggwcttgagatgaagggtgtggccgaactgcaagccgctcaagctgattctcccacttcgggataataaacacnnnnnnnnnnnnnnnnnnnnncccccttgtcgcaacctgtgctgccctgattcctcacttgcacccygwgatcacttmttgtcwcccarcagggatryagttcttygactgggttctcccatcstgcccaaargtgccwggctttaggaagggaagctgccaagctaagcttcggcttccayattctccattcascggttgagcttgayakgaggtgggccyttccttcctcsagttccctattcttcytggmgaaytgtcgtgsggtggcaggtaaagaagwctgctaccttctgrtccgtttcmcwgccggcctacsyraagrttcrrctcaaggaggcaaggtcagyggtagctgtggagatraggscaratctcttggsaggsgccrgmckyggcagcagtccaagagagcargcrgggagagtgggcgggscmtccacccagcggtagataaaaggccagggtgtagcacgctgaggcccwgacaagcaaaggacttgcttgctctttcctcctggggcggwggtctgktttggtagtggcaagtgaargaagtagctcctggcaagtcttccttcgttgcttggcaggatggaaggtcgcagccgtgtgggaaaaatcagggtggcccgggaatcccggcgcccaaagacccttttgaaaggcatgcagaaggaggcccttctaagtcgtttcgccaagagcccttccccaagcttccgggccagggagcaactagccagggaaatcgggctgcctgagtcccgagtgcgggtgtggtttcagaaccgccgaagtcgttcggsgatggtgaggcgaggcccagaatcctcagcgagccgaagcgtcctggagtccccgaagcsgcctgaaatgtctgatgccagggcacaaggtagaaggagcagcccrtcgggacgtaggaggcctcgcactcgactcagctcgacacagttggccatcctgctccaggcttttgagaggacggtacccgggcannnnnnnnnnnnnnnagctc

SEQ ID NO: 568 - DNA, 3646 bp, Mesocricetus auratus
  misc_feature (965)..(985): n is a, c, g, or t
  misc_feature (1026)..(1066): n is a, c, g, or t
  misc_feature (1893)..(1917): n is a, c, g, or t
  misc_feature (2407)..(2432): n is a, c, g, or t
  misc_feature (2837)..(3020): n is a, c, g, or t
gcggattgcaacacatgccgcggcctggagagagggagccggtgtcctacgtcagagccgccgccgccgccgcgagccgccgccggggaggagccgccgctgccgcccagcactgggcccttagggaggaggaggcgagaagatggcggacgaccccagcgctgccgacaggaacgtggagatctggaagatcaagaagctcatcaagagcttggaggcggcccgcggcaatggcacgagcatgatatcgctgatcattcctcccaaagaccagatttcacgagtggcaaaaatgttagcagatgagtttggaactgcgtctaacattaagtcacgagtaaaccgcctttcagtcctgggagccatcacatctgtacaacagagactcaaactttataacaaagtacctccaaatggtctggttgtttactgcggaacaattgtaacagaagaaggaaaggaaaagaaagtcaacattgactttgaacctttcaaaccaattaatacatcattatatttgtgcgacaacaagtttcataccgaggctcttacggcattactttcagatgacagcaagtttggttttattgtaatagacggaagtggtgctctttttggcacgctccaaggaaacaccagagaagtcctgcacaaattcactgtggatctcccaaagaaacacggcagaggaggtcagtcagccttgcgttttgcccgtttaagaatggaaaagcgacataactacgttcggaaagtagcagagactgctgtgcagctctttatttctggagacaaagtgaatgtggctggcctggtattagctgggtcagctgactttaaaactgaactaagtcagtctgacatgtttgatcagaggttgcaatcaaaagttttaaaattagttgatatatcctatggtggtgaaaatggattcaaccaagccattgaattatctactgaagttnnnnnnnnnnnnnnnnnnnnncaagagaagaaattaatagggcgatactttgatgagattannnnnnnnnnnnnnnnnnnnnnnnnnnnnnnnnnnnnnnnnctgaaggctttggaaatgggagctgtagagattctaatagtctatgaaaatctggatataatgagatatgttcttcattgccaaggcacagaagaggagaaaattctctatttaactccagaacaagagaaggataaatctcacttcacagacaaagagactggacaggaacatgaactgattgagagcatgcccctcttggaatggtttgctaacaactacaaaaaatttggagctacactagaaattgttactgataaatcacaagaaggatcacagtttgtaaaagggtttggtggaattggaggtatcttgcggtaccgtgtagatttccagggaatggaataccaaggaggagacgatgaattttttgaccttgatgactactaggtagtcgacatgggtccggcaaaatgtgcctcaccctccagcattcaacccaaggagcatacccgtggtggaatccaaacagatccctgccttacaattggaacatttccagaacttaatccgtgagcattggatactgaaaaggaaagcgaaacaaaaccagacccaaccctacactttggtttgtcatggagtcagcacagcagcctacaactaagttcctaaatgccacttcggactaatttaacaaagaatcccagtttttacttttacttgatggtaaaattggttgctcttgtattttatgaaaaaaaaatgatttttttaaccttcatacatagaagcaaaaatactttaactgctgtaaaccttcaaaaattagtagaagtgagatcatactggtttgtttcttattttgatgggagaataagtaaatnnnnnnnnnnnnnnnnnnnnnnnnnacatggcattctcagcttagactgcacaagaagaaatatatgtggtgaaatattggaactgtttctctcttggtctctgtttaatgttgaaaggtgagctaataggcgatgtcagcttcactccctgacacccccactcccagactgtttcaaaggtgcagggtgcatggtaaagtcaggtgagtgctgttaacaactgggccagcgccctctggcttccatctattcgaaccaagcattgggggcctttgtgtcgctaacacaaagctccctgtaatctcaacctcctagaaaccagtttggggtggacatgatggggcttctgtgctattgctgggattgggaggaataaaacatgcaatttaagtggaaccaaaaaaaagaaagctcagaggtgattttgatttcgcttggatctgttcttggtaacaaagggaggtggtcgtgtttccttgtgtggatggcatgagattatgtgaatgttttggannnnnnnnnnnnnnnnnnnnnnnnnncaaatgaactgcaaaaattttcgcaggaacaacagaacaacatgtatgactgtgcatgtttctcaaaccctgatggggctggagcatctgttttgaaagtgggacttagaagcacctctcagatgagaaagtatgggaggagggtggggagggccggggtggggagggatgggacacagcttctggcaccatggattaaaccatgttagatccaaacgttggccaaaatcctgaagcaaacgcttcaagctgggctgtgagttggatttgaacccagttaagtacaaggtcatggtgtgctcgaggtggtgacagtgagcaaagcgtaggatgtgcccggtgtcggccgcggaggagaggtgccaggtggactttgaaggaccaaaggctttgaagtcagttggnnnnnnnnnnnnnnnnnnnnnnnnnnnnnnnnnnnnnnnnnnnnnnnnnnnnnnnnnnnnnnnnnnnnnnnnnnnnnnnnnnnnnnnnnnnnnnnnnnnnnnnnnnnnnnnnnnnnnnnnnnnnnnnnnnnnnnnnnnnnnnnnnnnnnnnnnnnnnnnnnnnnnnnnnnnnnnnnnnnnnnnntgaagggagtgtgtcttacatgtaaagctttggttctcacactgtactctgaggtccaaatgactgtctgtcgtgtaacctgatgtctcaacccccagggagaagaagagtcaatctttggtgttcaccaacatgggaagcttcaccagaacaggcttttgctttgggctctgctgttggtttgcagatcacccaagagcaagccaacatgcgcttcccagcagtaccttagggttttgccattgtaaatgggtctaatgtgatatgacaagaccagagaaattggatgtaaattgacatttttggaaatgcttgttgtttcacatgatacatttagggtatgcagctccttttgtagtttttatttttactatttaagtttggaaatgatgccaaatttttgtatttctttaatcaatgtgttctccttggtgatatatattgcattatatattgatgtgtgtatcaatatatactgatatgtgttacacttacgcatacaaacacacataagtgaggggtggaaccgtagcctgcactccctagcctctgcagagagaccctaagagcagaatctcggtgttgtgatgtacagaaatggagaagagtattaaaccatatttaag

SEQ ID NO: 569 - DNA, 5149 bp, Cricetulus longicaudatus
  misc_feature (4090)..(4108): n is a, c, g, or t
  misc_feature (4110)..(4125): n is a, c, g, or t
atggccaagtccagcctcgcgggtgctgatggggcgctgacctgggtgaacaatgctgcaaaaaaggaagagttggaaacctcaaacaaaaatgattcttcaaagaagttgtctgttgagagagtgtaccagaagaagacccagcttgaacatattctccttcgtcctgatacatacattggatcagtagaaccattgacccagttaatgtgggtgtatgatgaagatgtaggaatgaactgcagagaggttacctttgttccaggcttatacaagatctttgatgaaattttggtcaatgctgctgacaataagcagagggacaagaacatgacctgtattaaggtttctattgatcctgaatctaatattataagcatttggaataatgggaaaggcattccagtagtagaacacaaagtagagaaagtttatgttcctgctttaatctttggacagcttttaacatcgagtaattatgatgatgatgagaaaaaagttacagggggccgtaatggctatggtgcaaaactttgtaatatttttagtacaaagtttacagtagaaacggcttgcaaagaatacaaacatagttttaagcagacatggatgaataatatgatgaagacttctgaagccaaaattaaacattttgatggtgaagattatacatgtataacattccaaccagatctagccaagtttaagatggaaaaacttgataaggatattgtggccctcatgactagaagagcatatgatttggctggttcatgtaaaggggtcaaggtcatgtttaatggaaagaagttgcctgtaaatggatttcgcagctatgtagacctttatgtaaaagacaaattagatgaaactggagtagccctcaaagttattcatgaacttgcaaatgaaagatgggatgtttgtctcaccttgagtgagaaagggttccagcagatcagctttgtgaatagtattgcaaccacaaaaggtggacggcatgtggattatgtagtagatcaagttgttggtaaactgatcgaagtagttaagaaaaagaacaaagctggtgtatcagtgaagccatttcaagttaaaaaccatatatgggtttttattaattgtcttattgagaatccaacctttgattctcaaactaaggaaaacatgactctgcagcccaaaagttttgggtccaaatgccaactgtcagaaaaattttttaaagcagcctctaattgtggcattgtagaaagcatattgaactgggtgaaatttaaggctcagactcagctgaataagaagtgttcatcagtaaagtacagtaagatcaaaggcattcccaaactggatgatgccaatgatgctggtggcaaacattccctggagtgtacattgatattaacagagggagactctgccaaatcgctagctgtatctggattaggtgtgattggcagggacagatacggagtcttcccactgaggggtaaaattctcaatgttcgagaagcgtctcataaacagattatggaaaatgcggaaataaacaatattattaaaatagttggtttacagtataagaaaagttatgatgatgcagaatctttgaaaaccttacgttatggaaagattatgattatgactgatcaggatcaagatggttctcacatcaaaggccttctaatcaattttattcatcacaattgrccatcacttctgaagcatggttttcttgaagaattcattactcccattgtaaaggcaagcaaaaataagcaggaactttccttttatagtattcctgaatttgatgaatggaaaaaacatatagaaaaccagaaagcctggaaaataaaatactacaaaggattgggtaccagtacagctaaagaagcaaaggaatattttgctgatatggaaaggcatcgtattttgtttagatatgctggtcctgaagatgatgctgccattaccttggcatttagtaagaagaagattgatgacagaaaagaatggttaacaaactttatggaggatcggagacagcgtaggttacatggcctaccagagcaatttttatatggcacagcaacaaaacatttgacatacaatgatttcatcaacaaggaattgattctcttctcaaattcagacaatgagagatctataccatctcttgtggatggcttcaaaccaggccaacgaaaagttttgtttacctgtttcaagaggaatgataaacgtgaagtaaaagtcgcccagctggctggatctgttgctgaaatgtctgcctatcatcatggagaacaagcattgatgatgactattgtaaatttggctcagaattttgtgggcagtaacaacattaacttgcttcagcccattggtcagtttggaactcggcttcatggtggcaaagatgctgcaagccctcgttatattttcacaatgttaagctctctggcaagactgctttttccagctgtggatgataacttgcttaagttcctttatgatgataatcagcgtgtagagcccgagtggtatatccccataatccctatggttttgattaatggtgcggagggcattggtactggatgggcttgtaaactgcctaactatgatgctagagaaattgtgaacaatgtcagacggatgctagacggtttggaccctcatcccatgcttccaaactacaaaaacttcaaaggcaccatccaggaacttggtcagaaccagtatgctgtcagtggggagatatttgtggtggatagaaacactgtagagattacagaacttccagttagaacttggactcaggtatacaaggagcaggtcctagaacctatgcttaacggaacagataaaacaccagcactaatttctgattacaaagaatatcatactgatacaactgtgaaatttgtagtgaaaatgacagaagaaaaacttgcacaagcagaagctgctggactgcataaagtttttaaacttcaaactactcttacttgcaattccatggtactctttgatcatatgggatgtctgaagaagtatgaaactgtgcaagacattctgaaggaattctttgatttacgattaagttattatggtttacgaaaggagtggcttgtaggaatgttgggagcagaatctacaaagcttaataatcaagcccgtttcattttagagaagatacaagggaaaattactattgagaataggtcaaagaaagatttgattcaaatgttagtccagagaggttatgaatctgacccagtgagagcgtggaaagaagcacaagaaaaggcagcagaagaggaagacacacaaaaccaacatgacgatagttcctctgactcaggaactccttcaggccctgattttaattatattttaaatatgtctctatggtctcttactaaagaaaaagttgaagaactcattaagcagagagatacaaaagggcgagaagttaatgatctcaaaaggaagtctccttcagatctttggaaagaagatttagcagcatttgttgaagaactggataaagtagaagcacaagaacgagaagatattctggcaggaatgtctggaaaagcaataaaaggtaaagttggcaaaccgaaggtaaagaaacttcagctggaggagacgatgccctcaccttatgggagaagaattgttcctgaaattactgctatgaaagcagatgccagtagaaaattgctgaagaagaagaagggtgatcctgataccccagtagtgaaagtagaatttgatgaagaatttagtggaacaccagtagaaggtacaggagaagagacattgaccccatcagctcctgtaaataaaggtcccaaacccaaaagggagaaaaaggagcctggtaccagggttagaaaaacacccacatcagctggtaaaccgaatgcaaagaaagtgaagaaacggaacccttggtcagatgatgagtccaagtcagagagtgacttggaagaaacagaacctgtggttattccaagagattctctgctccggagagcagctgctgaaagacctaagtacacctttgatttctcannnnnnnnnnnnnnnnnnncnnnnnnnnnnnnnnnnaataatgatttagaagaactgaaagttaaggcatctcccataacaaatgatggggaagatgaatttgttccttcagatggcttagataaagatgagtatgctttttctccaggcaaatcaaaagctactccagaaaaatcatcacatgacaaaaaaagtcaggattttgggaatctcttttcatttccttcatattctcagaagtcagaagatgattcagctaaatttgatagtaatgaggaagatactgcttctgtttttacaccatcatttggtctgaagcaaacagataaagttccaagtaaaacagttgctgctaaaaagggtaaaccaccttcagatacagcccctaaggccaagagagcacctaaacagaagaaagttgtagagactgtaaactctgactcagattctgaatttggcattccaaagaagactacaacaccaaaaggtaaaggccgaggggccaagaaaaggaaagcatcaggctcagaaaatgaaggtgattataaccctgggaggaaaccatctaaaacagccagcaagaaaccgaagaaaacatcttttgatcaggattcagatgtagacatctttccctcagacttcacttctgaaccacctgctctgccacggactggtcgggctaggaaagaagtaaaatattttgcagaatctgatgaagaagaagatgttgattttgcaatgtttaattaagtgcccaaagagcacgaacatttttcaaaaatatcttgtgttgtcctttgtcttttctgtctcagaattttgtacatctggcttattttaatgtgatgatgtaattgatggttttttattattgtggtaggccttttaacattttgttcttacacatacagttttatgctcttttttactcattgaaatgtcatgtgttgtctgattggcttgtagaattgttatagattaccgtgcattagcacagattttaattgtcatgattgcagactacagacctgctttttgaaatgaaatttaaacattaaaa

SEQ ID NO: 570 - DNA, 1303 bp, Cricetinae gen. sp.
caagagctgcgctccgctgccggggcgaggagagccatggaggagcagggwrttcagtgcgcccctccacctccygccgcctcccagayaggggtacctcttgtcaacctctcccacaactgcagcgccgagagccacatttaccaggactccatcgccctgccctggaaagtcctgctggttgcattgctggctctcatcaccttggccaccacgctctccaatgcctttgtgatcgccacggtgtatcggacccggaagctgcacaccccggctaactatctgattgcctctctggcagtcactgacctgctcgtgtccatcctggttatgcccgtcagcaccatgtacacggtcactgggcgctggacactaggccaggtggtctgtgacttctggctgtcgtcggatatcacctgttgcactgcttccatcatgcatctctgtgtcatagccctggaccgctactgggccatcactgatgccgtggagtatkccgctaaaaggactcccaaaagggcggccatcatgatagcgctggtgtgggtcttctccatctctatttcgctgccacccttcttttggcgtcaagccaaagctgaggaggaggtgctgrmctgyttkgtgaacacggaccacgtcctctatacagtctactccacggggggcgctttctatttacccaccctgctcctcatcgccctctatggccgtatctacgtggaagcccgctctcggattttgaaacagacacccaacaagaccggcaagcgcttgacccgagcccagctgataacagactcgcctggttccacgacctcggtcacctccattaactcccgggctccagacstgcccagcgagtccgggtctccagtgtatgtgaaccaagtcaaagtaagagtctcagacgccctgctggagaagaagaaactcatggccgctagggagcgcaaagccaccaagaccctagggatcattttaggagcctttattgtgtgctggttgcccttcttcatcatctccytggtgatgcctatctgcaaggatgcctgctggtttcacatggccactcttcgacttcttcaattggctaggctatcttaattccctcatcaaccccatcatctacaccatgtccaatgaggacttcaaacaagcattccataaactgatacgctttaagtgcrcaggttgacttgtcaatggcagtggggtcgcctaggcgactttggggaccaagttgggtcttttcacaggtaggtcaaatcttctttccctgttactgggtggaagcaaggcc

SEQ ID NO: 571 - DNA, 602 bp, Cricetinae gen. sp.
agtttgcaggagatggattactacagaaaatatgcrgctgtcattctggtcrtgttgtccrtgttcctgcacattcttcattctcttcctgatggagactttatgatkcagggttgyccwgartgtaarctaaargaaaataartacttctccaagctgggygcccccatctatcagtgcatgggytgctgcttctccagggcataccmcacwccagcaagrtccaagaagacratgctggtyccaaagaatatcacctcrgaggccacatgctgtgtggccaaagcatttactaaggccacrgtratgggaaatgccagagtggagaaccacacggagtgccactgcagtacttgttactatcacaagtcttagcttttrrcaaggggctgkgctggyrattgctggtctgygggayrgmactgtgtgatgccrcctccytccttaccagacttttgatgtacttcagyyrtacactgyagctttatttcmcwmtaccttacmccastgtaatcagcagyctctttttattaggsaaatagatgstatttagcrtgaycatraaagytgkttccatcagaaataaagccytttaaaycatc

SEQ ID NO: 572 - DNA, 1770 bp, Mesocricetus auratus
  misc_feature (1058)..(1088): n is a, c, g, or t
tgagtgaaagaccaggaatgctgttcaggaaattcttcaggcatgggccgggacttggctgcagttgtgcggttggaaaatgtgactgtggcagctcctgagtgcaggcagggcctgctcacatgggcgggctaagtggccgcctccttcagaacctctcagctttccccaggaccacggggactctcatccgccactytgtgaaacagaggagagatgcctcaggaacagtactctcaccacaggagcaccatgcccagctcagaggggccacacatttacaaagtggggatttatggctggaggaaaagatgcctgtatttctttgtcctgctcctcatgattttaatcctggtgaacttggccatgaccatctggattctcaaagtcatgaacttcacaattgatggaatggggaacttaagaatcacagaaaagggtctgaagctagaaggagactcagaattcttacaacctctgtacgccaaagaaatccagtcccgaccaggtaatgccctatacttcaaatctgccaggaatgtgacagtgaacattctcaatgaccagacaaaagtgctgactcggctggtgacaggtccgaaagctgtggaagcatatggcaaaaagtttgaagtaaaaactgtttctggaaaattgctcttttctgcggatgacaatgaagtggtcgtgggagctgagagattgcgagtcttaggagctgaaggcacagtctttcccaaatccatagaaacacctaatgtcagagcagaccccttcaaggaattaaggttggagtccccaacacgatctctagtgatggaagccccaaaaggggtagaaataaatgcagaagcaggcaatatggaagccacctgcagaagtgagctgagactggaatccaaggatggagagattaagttagatgctgcgaaaatcaaactacctagactgcctcgaggatcctacacacccacaggaacaaggcagaaggtcttcgaggtctgcatctgtgccaatgggaggttattcctgtcccaggcaggaactggttccacctnnnnnnnnnnnnnnnnnnnnnnnnnnnnnnngactatccacagtggacaattgttggcagcatcgaggccctttttggcttgagacattggctgccaattatttttattagaacacagaaagcctatcaaagaccttgtgtgtgtgtgtatgagtgtgtgtatgagtgggttgtgcgtgtgagtgaatataaatatatataaatacatataaataaatatatatatcctctgtataaaatgaggtttcagtacaaaaggaaccatgggtgaccctgtgacatcatccactgtcgtttttccatcccatccccatcacccacatgacagaatcttccccaggcaatttcaaatcacacagtgaataaagcacttacagaatatccattgacattttcaagtaatcccctagccttctctcttagagtcattagaggcattagtgatggcgggaatctctggggtcactctcaagcaatgatcaacatttaatgcatttgtaatcacaacaccaggcaagttgtggtgatggaggccaacctgggttacatagtgaggctgtcttaaacatatggacatttggtttccctttcttagcttcagctaagctcttcaaggtaaagatagggtatacccatagaaattagtcacaagaaatcaaaataccactctatctttgtagaccatactattagttgtatggctaaatgaatag

SEQ ID NO: 573 - DNA, 481 bp, Mesocricetus auratus
gaataaacctaccacaagacccagcaactccactcttaggcatatattcaaaagatgtccattcatacaacaaggatgtctgttccactatgttcatagcagcattatttgtaatagtcagaacttggaagcaacctagatgtccctcacccgaagagtggatagagaaaatgtggtacatttacacaatggagtactattcagcagaaaaaaacaatggaatcctgagattcgcaggcaaatggatgacactagaagwaaccatcctgagtgaggtaacccagtcacaaaaagataaacatgacttagaagaaaagacttagaagaaatctccatcctcaggaatttggagacagctgcactggaagctgtgtggaagttaaggagactgttgctgtagtggggacctgagaacattatatcaatcccaatgttgccctgacatttgtacctaagattcaagaggattaagactaaaaag

SEQ ID NO: 574 - DNA, 3547 bp, Mesocricetus auratus
  misc_feature (408)..(428): n is a, c, g, or t
  misc_feature (1014)..(1028): n is a, c, g, or t
tctagatgagtcatctcatctccctaggcttgggtttctctatgtaagatgaaggttggggacaatttgtattggacactctctaagttctctgactctataattactgtacagtgacctcagatgtatgggtgtgtctaaccacttatgcctgaatacacaccacaccatcatgatttgatgctaacccctgacctcagtgaatcctaatatttacagcagccccctctggtacataaaaacagttgtaatatccggcaagaaaatgggaagacaaaaacaaaggaaggagggagtaaaggaaaaatggaaagagagggaaaaagaatgttgcatattcatgtgatttatgctaatgccaagatgaagagggaaaaggaagaaaagaaaaagaagaggagggggaannnnnnnnnnnnnnnnnnnnnagaaaaaaaacgaagaaacaaagaacaaacaaaaaaaaccccaaaaacctcacaccaaatgctcctttttaacttgttttgtgcaatattagcttgagaactttactttggcttattagatataggtagcctccatttggaagcttgtattttttaaggtttttctactgttttatgataggaaagagaaaatgtcaaaggtagaccccagaacacagcaggagatacccagaacatcctgagggaatgctacctaggaaaacaaacattacagctgcactgatgcagggtgcattctggtctcagcttctccctcattcctgtcaccttaacgcagttgtcacagcatgtaaaatgccacagtcagtgccatcttacctgcactgctttagagcaaaaagtatcccaagagtctgagaaaaataattgtattatttttagttgctgcagaatcaggtggaacggacaacaacttggaagaacagaactggaaatgctaaaaatactacttcccccagcaacttaaattttaagaaaaagttaggaagagcctgagagggaggtggtattagaattcatatctctnnnnnnnnnnnnnnntattwatcaagaccaggsagggcagagcacagagggacagtgggggattccacttggaacaggcaaggtacatagagaccacattgaactgggagagaaaagtaaaacgtgacttgtctattgcatccagtacccagagcaaagcctgtgtggagaatggctggaaaatccaagtcgtatcgagaaacagccttctttctttctttctgtgagtgtgagcccagcagacgccatgagcgcagtagcgaggaagcaaggctgtgttttgacacacgtgtttcccattgatatctggagacagcccagtagctgggcttgacaaaaccggatcgaagcagaggcagagtagggtttcaaagcaggcagtgaaagaccaggaatgctgttcaggaaattcttcaggcatgggcagggacttggctgcagttgtgcggttggaaaatgtgactggggcagctcctgagtgcaggcagggcctgctcacatgggcgggctaagtggccgcctccttcagaacctctcagctttccccaggaccacggggactctcatccgccactctgtgaaacagaggagaggtagggaacttgcagctcttgcctttccagcctaacttcctgagccctgtctggtgtttgttcacaaacactgggggggcgggggggtggggtgagataggggtcgcgtgtgtatgtgttaattaacacatttcagctccttcacctctgcagagggagccggtggttctcatctttgttttccccacaaaggccctggaggtctgagtttcaacagtgcccaggcacttttgaaagttaggacactacagctaacaccaccgggaagggagagtgtgtggattcctcctgttgtcactctgttccagcggtctggaagtttccctttctgcttcacaggatacttcattgacagcaaagacaatctctgatgaaaaatgttcccgttcttaatgcttcaagggttttaagacggtgttccaagcagggaagagtgctctgttttcggagggaatcagagtttgaagtttttactttggaacacattttgttttctttttttttggagagggtaggaacaaatgtgtgtgtaagggttcctggtgtcttttattttcatatatgattttggctttcttatgtgagttttgaagagcagtaacatatttttacccaacgtgtgctgggctgttattctgctttggtaaacaattccctttttactcagtggcaggaataacctgcaggtaaaaaatacagataatatagccacagcagaaagcggtaatttattttttttatcattgttaaaaatagagactaatgatgtgaatgttttatcgaccacttcattttattttcacctaactaaaaatagtgcattaaaatattgaataattttagtgtggcagggagaccttggctttcctggtcaattttaattctcttttatacatataggctgtattgcaatgcatgtagtagccctcctaggactttggcattgctcctttctgtgttcatagttagaagacaagctccacattgccactgtctttaagataagtctggactaaagctcatccatcctgctgtaggtttccttgcaatagagtccatggcaagaggaactccccagaggggacttgggcaaaagcctgcctggggaaaatagataaaagggtggagtccttgcctactagttctgtagcaaagagccactagacctcatgagtgcttctcttggaaaatgggttgagcttaattcctgaaccccctaacaagcagcttgtcagtactcgatgagatggggctgaatgaagagtaaatgctggaatgcctcagtttccccatcttaagatgggtaggcagaagtcactctggtagtaaagttttcagattctcaactagcactttctttccccttagtttagttgttggaggatagaatctgtatgtgactgacagctagctggctttcttagtcttgagtaatggctcacacctgttttccttgttcatctcatctgagtgtcaagagggatagaggtggatggagtagggcagggtggggcagcttaaagaattccaggactccctacaggctagggaggacagttagaagtcaagatggaccatgactctctttttaaatggccaggcagattaggagctggcatgaacaacagccaagcacccattgccaggggcagagacagaaagagatctggaatgtcatcgcctctaaatttaggtcatgtcaagctttctgcagaaaggcgtgacatagcaactccaggttgcaagattgtgcagagtagtgcccaaactgggaagaaactctgagttcctattttttttttcgttagtttttttttttaattttaaatagcttgttttacatgtcaatcccagttccctctccctcccctcctcccgcactccccttccaccctccctcccaccctattgccacatacttccacataggggatgtctaga

SEQ ID NO: 575 - DNA, 7326 bp, Cricetulus griseus
  misc_feature (1020)..(1037): n is a, c, g, or t
  misc_feature (2261)..(2317): n is a, c, g, or t
  misc_feature (2782)..(2796): n is a, c, g, or t
  misc_feature (3579)..(3605): n is a, c, g, or t
  misc_feature (3786)..(3832): n is a, c, g, or t
  misc_feature (3874)..(3893): n is a, c, g, or t
  misc_feature (5769)..(5840): n is a, c, g, or t
  misc_feature (5884)..(5941): n is a, c, g, or t
  misc_feature (6045)..(6064): n is a, c, g, or t
  misc_feature (6435)..(6459): n is a, c, g, or t
tctagaaaagaacactagctatctcatgtaatcaaattggtgactatcctaattattatgagagagcttccgtccagtaagtgctagaagtagatgagagtaccacagacaagcactgagccaagctccaggagtcctgttgaaaagagagaggaaggattgtaggagccaaagagtcaagagcatgacagggaaacccacagagacagctgacctgggcttgtgggtgggagctcatggactcttgaccaacaattagggaactgcatgaggccaacctaggaactctgcatgtgtgtgacagttgtatagcatggtctgtttgtgaggcttttagcagtgggacagggcctgtccttggcgcttgagtggcttttgggaactgttcgcatgctggattacaaccagcttgatgctgggaagcattgtctgctaatgatgcgcttgcattgttggatctcatggaggactgcccttctgaaagacaggagaagtgaataggggaggggattgggaggagaggaaggagaggaaactgtgatagggatgtaaaataaattaaaaaattaattaattaaaaaagaacacttgtactggtagattggctaaaatgaaacaaagataaaagtacacaggaaaaagagaggagaaacctggggaggggggctccaaagagaggtgagggggggatgggaatggcagcttagtggaggaaggaagacatgacctacacgaatcgagctgtagtttttatctggagcatagggtaaagatgtttgaggagaaggaggaacacatgcttgtaaaacaggtcttcagaaccagcaacaatcatacagatgtgtccagggcgtccatgggcagcatgaagcgacagacccaacacatatttaacagtccatacagtgtcctatatgtggtattgtaaagtgatgagtaaattgtcactaggggactgttaatttagctgtaaaggacttgtctggcatgtgggtattcttgggttccctccttagcacnnnnnnnnnnnnnnnnnncacacacacacacacatatattctagtgttttgtagaaaggattcaagaaagcatgatttctcttgataatcagataatgtaataagacacacagtggttgatttcagcaatcaagtacaccttgcctgtctgtttgttgtatgggatggttgggtggttgtttgtttggtttgtaagatgggttggtgggttggtgggtggttgcttggttgggtagttggttgggtgattgggtgggtgggttggttgggtgggtgggttggttggtcgtttggttgggtggggtgggttttgttttgagacgagggatttactctatatctcagtttgtctcaaactcactatgtccacatgagtatgtgatgatgagattatctaagaccatagtgtctgtgttcatggaatgctctctctagcttagagaatttaaaaaatggccatgtagggaacacccctcagaaaaggagtttctatggcctccaagaataagaatggatcctcctagctcggagtcagcaaggaactgaagcccttaattttatagacacaaaggaayccattgtgtggctccttcccagccaagtytcagatgagtcacagacctgcatggcaccttatgcagtcttttgaggtcccaagaataggatgcagataagccatgccagaatcccaacacacaaagccttagtsatatagtaaatatgtattgtgtctaggctgctgcatttctggttatgctactgtgcagtaatacacaactaatacagatgtgatggttaatattatgtgacaacttgagtggggcacagaggtacagacacttggtaaaccattmtrggtgcacgtaaggatagttttggatgacataaacatttagattagtatgctgggtaaaatacattgtccatcccaatgggcatgggctttgtccaactagatgacagctggaatagaaaagtctgcctctctcatagttctcaggcctttgagctcagactagacagaactcacaggttctctgagctttccagcttgatgaatgtccatggcagtcttcacacttaacacctgacagacttaatgatcatatgaaccaattcaaatctgaccatcactcgggtcattcttttgattctgtcactttggagaactaataccgaggacataaaatgccatcacatcgttattttcttcctgtctgtgaatatttttcttttttttcnnnnnnnnnnnnnnnnnnnnnnnnnnnnnnnnnnnnnnnnnnnnnnnnnnnnnnnnntttggagcctaatcctggcacttgctctggagaccaggctgacctgaactctcagagawcctcctggccttggcctcccgagtctggggattaaaggcgtgtaccaccaacgctcggcctgtctgtgaatatttaaaatgaaaactttggaaatgttctgaaaccagctggtgtcagatagtcagagaactttcgtaaggtaggtgtgggttatagcataatcccacacaagaggctgaagcaggaggattttgtgtttgagggcagctagagccacatggtgagtccctgcctcaaaacacaaaagcaagacaaaaacaagctccaaataagattcactkggscctttctttccttccttctcagtgagtccacttsytttaaaatcaggtcttaaagacgcactagatgctgaacttaacagtaataataaatatcttctcttacagtacagattatgctctnnnnnnnnnnnnnnnataaagttcagccttaacctttgttctgtaaatgtttcctagtttttctactgccgtattataagacaaatgtcagcatgaaggcaggtttttcagaaaacacagcagctccacagatggcctctaatccataatcattaaagacaagactgcaactttttcaactgggaaatcattcaaggatgtttttctgaagtccctaccaggrcacamgccaccykggttgctgtgtgacatcagttaggtagactctgaactggcttcccaagaaattatacaaaagcaaggtgtcacctagtattagcataacttctgataactactgtcttagctggggtttctattgctgtgaagagacaccatgaccacagaaactcttataaaggaaagcaattattgggtccagcttacagttcagaggtttaatccattgtcatgattgcaggaagtatggtgssccacagssagacatggtgctggagaagtagatgagagttctatatcagattgacacacttcttccaacaaggccacacctccactcactctgagcctatggggccattttcattcaaaccaccaaagctacaaggtagcttataccccagcttgctatttctgatgagacttagtaaatagtcttaaaagcccataaaatgactcaaaactagtttttttattattattattagttcaaattaggaagaagcttgctttacatgtcaatcccttctccctctccctcatcaaaactagttttttgttttttaggttttttttcannnnnnnnnnnnnnnnnnnnnnnnnnngagcctatccwggcactcgctctggagaccaggcctcgaaatcacagtgatctgcctgcctttgcctcccgagtcctgggattaaaggcatgcaccaycaacacctggccaaaattagttttaagtccagttctaggagctccaatgccctcttttggcttccatgggaaccaggaacacnnnnnnnnnnnnnnnnnnnnnnnnnnnnnnnnnnnnnnnnnnnnnnntcaggcaaatatttatgcatataaaaataaaataaatctttnnnnnnnnnnnnnnnnnnnnagtgacattgtcttggaatttttgtggctgctstgcccttatgtgtaactggacactaccagcatctaaacactggcctgaaaccagccaaagaaaacctttgtgccaggtcctgtgtcaaagtattatgttccttttaggatatcctatatcstaaaggatttattttactgatagcatcttaacttcctttgaaaggttggtcttctcaagcagtcctcgtggagctgsctcctcagctaatgccaggggacaataatgatcccctcccaaaaccaaacaraaaaccatggcaactctggtttccttgggcagcacctgctttaagaatgagcaaatgaccaatcagctcatgaaactaaatactctattattactaaaatatttttttgagacagggcatggaattcatcacatagttcaggttggccttgaactcagagagactcacttacctttgcctcccacgtgctggaattaaaggcatgaaccaccacaccaaacataacacttgaattttgkaagagtccttcttccaatagatttgaggttttgaaaatgtggcacagaaaatatgaattcaaatataatsaaaacaagasataactttcaactaagtttctataggttcttgctaggaatcyyaagcttgtctgaaactctagagcttctgtttctagtcttctgagtgttagtattgtaggtatgtgccctgcctcagtgtgatgtttttgataatcttaaagaaatcaaagaaattttataaaagactagactgtgctacacaaaaagaatattcagatgccaagaaagagttcttagaaattaagaaatatgctactagtataaatcctttataaagtggaatgacaaatctgatgaaatcttactaaaagtagaaaaacataaacatcaaagacatgaataataagaaaatcatattgtgcatatsattaacctaaaacattaacttgcaaaaatagaatagtccaaaaagtaaacaaaataaataaatcaccaagacatgatacaaggacaattcctagaatgataaaacaagaatattcattataaaaggccctatcactaaagcacaacagaaacagactcaaaagataaatcttcattgtcactggagagaagtcatactatcatagcactcagaaggaaataaaaatcaaaatgtcaaaaaggacctcagcctctgaaacacaaatacaaaatatgtccgccttcttgacasgcattactcttcaattaacattttaagaaaactataaagagagcttagtattttaagaaatctgtagctatttcttttataagcatgacaactaagtttcctgatttaaacagacctaaaaaaccggtgaagtgagtggagaaaggggatacgaagacagcatcccacatgactgctcccagtaaaggcaaggtcttcatccattttatcctgaactctgggaaatttataaagaacagaaatgtatttctctcagttctggagcctcagtccaggacactaagtctaggtactacactctcacatggtggaaastagaaagcaagctcacttgtcactcactacctgatgcctctttcatcaatcccattgataaggaagagacctggcatctcagtttcctaaggactcagctcttactaacattagctgtcatttctgggtcactgcaacagaaagcctgacagaagcaacccaggggaagaaggatgtattttggctcactgtctctgaggatttcaacttatcccagcaataaagggataaaggcattgcagcaggaatatgtgtggcagaagctgtttatgtcacaataaacaaataaacacacgctagcgcgcgcgcacacacacnnnnnnnnnnnnnnnnnnnnnnnnnnnnnnnnnnnnnnnnnnnnnnnnnnnnnnnnnnnnnnnnnnnnnnnnggggggggcagacagacagacagagagggagagaggcagagagnnnnnnnnnnnnnnnnnnnnnnnnnnnnnnnnnnnnnnnnnnnnnnnnnnnnnnnnnnaatcaaaggcccacctccatcagactggtcccatatcccaaatttctagaacctcctaaaacaacaccatcaactgagggagacatttttggattgaaagcatnnnnnnnnnnnnnnnnnnnnatctgcctgtctgggggagtcacatttaagccatggtatcaattgacctcatgtaatttcagaatactacataaaactatcagatatttttcatgatgaatttctaaagcttgaaattccctttgaataaaggaccaactacagaattttgctgagtctacaattacatacatgaaaatgtaactacgaagtggccagccacaatgaaaattaaagtgtttgggtggtctgtctctattgatgctcttctttgccctgtttttttttaatattgttgatggtttgtttttcttttaagatacttggccccaagaaaaaaaatgacagccttaattaattttgtttactctcctgacagttttaaaagacannnnnnnnnnnnnnnnnnnnnnnnntgtagtattagaaagatgtaaaattaagggttgcttaagctgcgtgtagaattgaagagcacagcatttgagtgacagggtacaattagagatcatcagggatgtggcacaaaggtgtactcaacctcaccttttcctgcttagcagagaacagggtgcctcggtgagataggaaattaatcaaatagaagaagaaatagtaattttagaaggatcaaattttctggttagaatgatcaaaactacaagactgtaactaaaatatagtcaaacccattttcaactggaatctgtgctatttcatgtatagattaactagaatctaatttttaaattttcatcttacttccaaaaatatttgtccaaatactctgtgaatgcattagtttcttatgggaaaacatcatatcttttgatcaatgtgtttcttagcttgaggttctctccaaacaggaccaagacgaggccaggaccaatgtgatacaacccatagtcctcaagaaatagttgtcatttcttattccaattgcatcccaaggtctcatctcattttgcgtgtgcctttgacaccccatacccacataaactaaggtggtgttattttttgaggccctgaaggtatcttcaggaatccataagtgagccttaagctgcatctggatataggaatctgaaagtgtcccttctctgcatgatctcttctttcagtttttcaagtcagtgtgccacaggaatcaggaacgataaatggagaggggaagtgcagttgcttggtatagacaccccagaggctatttgcatcctgtccttcaaaatctctctgagccttcctgcctaagccttgttttgagttgggtttgtggtacc

SEQ ID NO: 576 - DNA, 5996 bp, Cricetulus sp.
  misc_feature (3496)..(3513): n is a, c, g, or t
  misc_feature (5161)..(5175): n is a, c, g, or t
gaattcccattcctctagctgcctacataaggactaagggaggatttctgtaattttaacgaatctgagataaagaaagaacatccgtttctacatcattttattcaggcggagagctgagaagagctgaggaaacggctttgcacttgcaaaacgccttctctcctcagagttttcggatcacatgggcctttctcattggccagatttcctgtaagtctctgctacaggaatagactattggtctatcctgaagactctcccgcctcctttacctaattggttcattcgaacaggccgccttttcaatgggtatgaataaaagaccgtccacgattggttactctaaacagagctaatgagagcgactcggtgattggttcctctgatttgggcgggctcggcgaaggttcaaatgaaactagggaagccatcctaaccgacgtgcgtctgtggaggagcgctctggtcgcgggtcgcctcgcgtttcccactgatttagtcgctttcgggactcacgagcccctacaggaccgtcaccatggagttgtcgccgctgcagsctryarmtgmrratrkgcmmrkgarswaraagaaaaatgaagatgccaagaaaaggctgtctatygaaagaatctatcagaaaaaaacacaattggaacatatattgctccgcccagatacctacattggctctgtggaattagttacccagcaaatgtgggtttacgatgaagatgttggcattaactacagggaagtaacttttgttcctggtttgtataaaatctttgatgagattctagttaatgctgcagacaacaaacaaagggacccaaaaatgtcttgtattagagtcacaattgatccagaaaataatttrattagtatatggaataatggaaaaggaattcctgttgttgaacacaaagttgagaaaatgtatgtcccagctctcatatttggacagctcttaacctctagtaactatgatgatgatgaaaagaaagtaacaggtggtcgaaatggttatggagccaaactgtgtaacatattcagcaccagatttactgtggaaactgccagtaaagaatacaagaaaatgttcaaacagacatggatggataacatggggagagctggtgacatggaactcaagccctttaatggagaagattatacatgtattaccttccagcctgatttatcaaagtttaagatgcaaagccttgacaaagatattgttgcactgatggttagaagggcatatgatattgctggttccactaaagatgtcaaagttttccttaatggaaataagctgccagtaaaagggttccgcagctatgtggatatgtatttgaaggataaattagatgaaactggtaacgcactgaaagtagtacatgaacaagtaaacccaaggtgggaagtgtgcttaacaatgagtgaaaaaggctttcaacaaattagctttgtcaatagcattgctacttctaagggtggcagacatgttgattatgtagctgatcagattgtgagtaaacttgttgatgtggtgaagaagaagaacaagggtggtgttgcagtgaaagcccaccaggtgaaaaatcacatgtggatttttgtaaatgccttgattgaaaacccaasctttgactctcagacaaaagaaaacatgactttacaggccaagagctttggatcaacatgtcaattaagtgaaaaattcatcaaagctgcaattggctgtggtattgtcgaaagcatactaaactgggtgaagtttaaggcccaaatccagttaaacaagaaatgttcagctgtaaaacataacagaatcaagggaatccccaaacttgatgatgccaacgatgcagggagtcgaaactccactgaatgtacacttatcctaactgagggagactcagccaaaacactggcagtttcaggtcttggtgttgttggaagagataaatatggggtatttcctcttrgaggaaaaatactcaatgtgcgagaagcttctcataaacagatcatggaaaatgctgaaattaacaatatcatcaagattgtgggtcttcagtataagaaaaactatgaagatgaagattcattgaaaactcttcgttatgggaagataatgattatgacagatcaggatcaagatggttcccatatcaaaggcttgctgatcaattttatccatcacaactggccctctcttctgcgtcatcgttttctagaggaatttattactcccattgtaaaggtgtctaaaaacaagcaagaattggcattctatagtcttcctgagtttgaagaatggaagagttctactccaaatcataaaaaatggaaagtcaaatattacaaaggtttgggcaccagcacatcaaaggaagctaaagaatattttgcagatatgaaaagacatcgtattcagttcaaatactctggacctgaagatgatgctgcaatcagcctggcctttagtaagaaacaggtcgatgatcgaaaggaatggttgactcatttcatggaagatagacggcagcggaagttacttggccttcctgaggattatttgtatggacaaaccactacttacctgacgtataatgacttcataaacaaggaacttattctgttctcaaattctgataatgaaagatctatcccatctatggtagatggtttgaaaccaggtcagagaaaggttttgtttacttgtttcaaacggaatgacaagcgagaagtgaaggttgcccagttagctgggtcagtggsagaaatgtcctcttatcaccatggtgagatgtcactgatgatgaccattatcaatttggctcagaattttgtgggtagtaataatttgaaccttttgcagcccattggtcagtttggtaccaggctgcatggtggcaaggattcagctagtcctcgatacatctttactatgctcagccctttgactcggttgttatttccaccaaaagatgatcacacattaaagtttttatatgatgacaatcagcgtgttgaacctgaatggtacattcctattattcccatggtgctgataaatggcgctgagggaattggtaccgggtggtcctgcaaaayccccaactttgatatccgtgaagtcgtaaataatatcagacgactgttggatggagaagagcctctgcccatgctcccaagttacaaaaatttcaaaggtactattgaagagctggcttctaatcagtatgtgattaatggagaagtagctattctaaattccacaaccattgaaatctcagagcttcccatcagaacgtggactcagacttacaaagaacaggttctagaacccatgttgaatggtactgagaagacaccccctcttataacagactatagggaataycacacagacaccactgtcaagtttgtcataaagatgactgaagaaaaattagcagaggcagagagagtgggactacannnnnnnnnnnnnnnnnngactagtctcacttgcaactctatggtgctttttgaccatgtaggttgcttaaagaaatatgacactgtgttggatattctaaaagacttctttgagctyaggcttaaatattatggattaagaaaagaatggcttctgggaatgcttggtgcagaatctgctaaactgaataatcaagctcgttttatattagagaaaatagatggcaaaataatcattgaaaataaacctaaaaaagagctaattaaagttctaattcagagaggatatgattcagatcctgtaaaagcctggaaagaagctcagcaaaaggtcccagatgaagaagaaaatgaagaaagtgacaatgaaaacagtgactctgtagcagaatctggaccgactttcaattaccttcttgatatgcccctttggtatctaaccaaagaaaagaaagatgaactgtgcaaacaaagaaatgaaaaggaacaagagctcaacacattaaagaacaagagtccatcagatttgtggaaggaggatttggcagtttttattgaagaactggaggttgttgaagccaaggaaaagcaagatgaacaagtaggacttcctggaaaaggggggaaagcaaaagggaagaaagcacaaatgtctgaagtcttgccttctcctcayggaaaaagagttattccccaagtgaccatggagatgaaagcagaagcagagaagaaaattaggaagaaaattaagagtgaaaacgttgagggcactcctactgagaatggtctggaactaggaagcttaaaacaaagaatagagaagaagcagaagaaagagccaggtgccatgacaaagaagcagactacattggcttttaagccaatcaaaaaagggaaaaagagaaacccctggtctgattctgaatcagatatgagcagtaatgaaagtaatgttgatgtccctccacgagaaaaggayccacgaagagctgcaacaaaagccaaattcacgatggatttggattcagatgaagatttctcaggttctgatggaaaggatgaagatgaagattttttcccactagatactactccacctaagaccaaaattccccaaaaaaatactaagaaagcactgaagccacaaaagagtgccatgtctggtgaccctgaaagtgatgaaaaggacagtgtgccagcttctccaggccctcctgctgctgacttgccagctgacactgaacagttaaagccatcttccaaacagactgtggcagtgaagaagacagccaccaaaagccagtcttcaacatccactgctggtaccaaaaagagagctgtaccaaaaggaagcaaatcrgattcagccttgaatgctcatggccctgaaaagcctgtgcctgccaaagccaagaacagccgcaaaaggaagcagtcctcttctgatgattctgactctgattttgagaaagtagtctccaaagttgctgcaagcaagaaatccaagggagagaatcaggatttccgagtggacttagatgaaactatggttcctcgagcaaaatctggacgagcaaagaagcctatcaaatacctggaggagtcagatgatgatgatcttttctgatggggagagtattgttttagcaatggttttactgagccnnnnnnnnnnnnnnnttatttgaagttcttctctaaccccctctgaatttagtttggggaagactttttataagactatcctacgtggccatcagctttatattctatatactgtctcagtgatgaccatctcatgacactgttttcttctctgatttatctatgttttgtgtctatttctttggtctctaaaatcttgcttgagattcttttggattccacataattatatgctcacttcagcatgacagaatttattgatcatatgttaagctaaaatgggtatgttttcaaaagtgtgcctctacctcctttcctatgtctactaagatatgaatgaggtagcaaggtgtttctttttcagttgtgtaggtagaattccatcacatagaactagacagttctagtatggatacagtgttcaacctatgatttgatgcatttttgtttcagccataaaaaattactcataactcttttaaacatcatcagagkctgaagaaagtcatcttgactgtgtctccatgatctcagtacatgtagcaagaaaaagagagttagtctggttatgtggcatcctgactttccttatgatacctttcgaacatgagatcacagggaggagacagaagtgctcagacttacatctgcatgctcaattgtgaaatgtggtccattgcaagtgtacagagttccaacttgtgaacgccaaaagcattctgtgctrttgtatgttacttaagtgctgttatcaatgtgttttgtaaatatttaatatgtctttctatrtagcttattccaacaattttgtacattaataaatatttaaacattgt

SEQ ID NO: 577 - DNA, 3626 bp, Cricetulus griseus
  misc_feature (2665)..(2707): n is a, c, g, or t
gtcgccgtctgctcgtgcctctcgggaactccgtccgcctgctcaggccgccccgaccgtccgtgtctcccccgcgctgcctctgagcccgtagcgttcgcccgccggccgacatgagcggggaccatctccacaacgactctcagattgaagcggatttccgattgaatgattctcacaaacacaaagataaacataaagatcgagaacaccggcataaagagcacaagaaggataaggaaaaggaccgggaaaagtcaaagcatagcaacagtgaacataaagattctgaaaagaaacataaagagaaagagaaaaccaaacacaaagatggaagctcagaaaaacataaagacaaacataaagacagagacaaggaaaaacgaaaggaggaaaagattagagcctccggggatgcaaaaataaagaaggagaaggaaaatggcttctctagtccaccacgaattaaagatgaacctgatgatgatggctatttcgctcccccaaaagaggatataaagccactgaaaagacctcgagatgaggacgatgctgattataaacccaagaaaattaagacagaagatatcaagaaggagaagaaaagaaagctagaagaggaggaggatggcaaattgaaaaaaaccaagaataaagataaagataaaaagggtgccgagtcagataacaagaaaaagaagccgaaaaaggaagaggaacagaagtggaaatggtgggaagaagaacgctatcctgaaggcatcaagtggaaattcctagaacataaaggacccgtgtttgctccaccatatgagcctcttccggagggtgtcaagttttattatgacggtaaagttatgaagctgagtcccaaagcagaagaagtagctacattctttgcaaaaatgcttgaccatgaatatactactaaggaaatattcaggaaaaatttctttaaagattggagaaaggaaatgactaatgatgagaaaaatgtgattaccaacctaagcaaatgcgacttcacacagatgagccagtatttcaaagaccaatcagaggctcggaagcagatgagcaaggaagaaaaattgaaaattaaagaagaaaatgaaaaattattgaaagaatatgggttttgtgtcatggataatcatagagagcggattgccaacttcaagatagagcctccagggcttttccgtggccgaggtaaccacccgaagatgggtatgttgaagagaaggatcatgcctgaggacatcattatcaactgtagcaaagatgccaaggttccttctcctcctccaggacataaatggaaagaagttcgacacgataacaaggttacttggctagtctcctggacagagaacatccaaggttctattaaatacatcatgctgaatcccagttctcgaatcaaaggtgagaaagactggcaaaaatacgagactgctcggcggctgaagaagtgtgtggacaagatccgaaatcagtatcgggaagactggaagtccaaagagatgaaagttcggcagagagctgtagctctgtacttcattgataagcttgctctgagagcaggcaatgagaaggaggaaggagaaacggcagacactgtgrgttgctgttctcttagagtggaacatatcaatctacacccagaattggatggtcaggagtatgtcgtggaatttgactttcctggaaaggactcaatcagatactataataaagtcccagttgagaaacgggtttttaagaacttacaactatttatggagaacaagcagccggaggatgatctttttgatcggctgaatactggcattctaaataaacatcttcaggatctcatggagggattaactgccaaggtgttccgtacgtacaatgcctccatcacgctacagcagcagcttaaagagctcacagcccctgatgagaatgtaccagcaaagattctgtcttacaatcgggccaatcgagctgttgcaattctatgtaaccaccagagggcaccaccaaagacctttgagaagtcaatgatgaacttgcagtctaagattgatgccaagaaagaccagctagcagatgctcgaagggacctgaaaagtgctaaggctgatgccaaagtcatgaaggatgcaaagaccaagaaggtagtagaatcaaaaaagaaggctgtacagagactagaagagcagctgatgaagctggaagttcaagctacagatcgagaggaaaataaacaaatagccttgggaacctctaaacttaattatctggaccctaggatcacagtggcttggtgtaagaagtggggggtcccaattgagaagatttacaacaaaacccagagggagaagtttgcttgggccattgatatgaccgacgaggactacgagttttgaccagtcttgccaggggttctatgaaaagggacagtgtggtttgaggaagatggataaactgagcctcacttgccctcacacctgagggagaggccacaagtcttaacaaaccaacatctttgcaaaaagatagacctggagatgttataagggagagctgagccagttgtcctatggacaacttatttaaaaatatttcagatatcaaaattctagctgtatgatttgttttgaattttgtttttatnnnnnnnnnnnnnnnnnnnnnnnnnnnnnnnnnnnnnnnnnnnggcaaattcagttttgctgcaatgtttggattctctcagctactgtatgcaaagtctgattatattggtgcgtttttacagttagggttttgcaataacttctatattttaatagaaacgaattcctaaactccctcctctccccatttcaggaatttaaaattaagtagaacaaaagaaaaacccagcgcacctatttagagttgtcactctatcgtcacgggaatcagttttcattaaacttgaagcagttatgacatcggcagtgttttggttcagacacctattcacagaaaagcatgatgagaaaatatttcctgacttgagtgttcctttttaaatgtgaatttttatttctttttaattattttaaaatatttaagccttcttcttgatcttaaagatcgtgtagcttggggttggggagggatgaagggtgagtgagtctaaggataatgaaataatcagtgactgaaaccattttcccatcatcctttgttctaagcattcttgtaacctttaagagatccatctttttctttggaaaccccagtctttcatttgaaagattttattgtatcaaaacttccacaggtcagtaaatttagaggaaaatgagcatttggtccaagaaaaaaaccaaaaccccaaaaaacaaaaaaggaaaaataatcaagattttagggcttttattttttcttttgtaattgtgtaaaaaatgggaaaaaaaagaccataaaaagcagaattttaatgtgaagacattttttgctataatcattagttttagaggcattgttagtttagtgtgtgtgcagagtccattccctcatctttcctcaagtatcttctatttttatcatgaattcccttttaatcaactgtaggttatttaaaataaactcctacaacttaacgg

SEQ ID NO: 578 - DNA, 282 bp, Mesocricetus auratus
  misc_feature (175)..(177): n is a, c, g, or t
  misc_feature (219)..(219): n is a, c, g, or t
  misc_feature (229)..(229): n is a, c, g, or t
  misc_feature (236)..(236): n is a, c, g, or t
  misc_feature (246)..(246): n is a, c, g, or t
  misc_feature (259)..(259): n is a, c, g, or t
  misc_feature (264)..(265): n is a, c, g, or t
  misc_feature (270)..(271): n is a, c, g, or t
  misc_feature (277)..(277): n is a, c, g, or t
tccctgtaaagggggggtgcagagagaacttctgaagtttttatttattttttatatttatatttatttattattcatttatttatgagaatctgctttggtgccaggtctggctaggtactgggaaataaatgggatataaggtggactaagttcccactatcatttagtcccnnnctctaggaccagcctctcatataagaagttatcacataaatnttgagatatnttgattnaccctatatnccatcctagaacnctcanncagtnnctgatngagga

SEQ ID NO: 579 - DNA, 1062 bp, Mesocricetus sp.
  misc_feature (226)..(240): n is a, c, g, or t
  misc_feature (1020)..(1034): n is a, c, g, or t
gacccggacgccgccgtcgtgggaccaatgagaactccgctgctgccgcgggcgctgccggtgctgtcgctgctgctgattttaggctcaggccattatgcagctgggttggatctgaacggcaccacctctgggaaaagtcaagcattttctgggcacmacaatgccactgaacttgtggtttctgtgggaagagaggtctctaccataagtgaaatgccctctnnnnnnnnnnnnnnnacaggggactatgactactcagaggaatatgataatgaaccacaaatatctggctacgttatagatgattcagtcagagttgaacaggtaattaagcccaagaaaaacaaggcggaaggggacaagacttcagacaaacccaaaagaaggaaaaagggtggcaaaagtgggaaaggtagaagaaataaaaagaggaagaagaacccatgtgatacggagttccagaacttctgcattcatggtgaatgcaaatacatcgagaacctggaggcagtgacatgcaattgtcatcttgactactttggtgaacggtgtggagaaaaatctatgaagactcacagcggtgatgacaatgacctatccaagattgcattagcagccataactgtcttcgtctctgctgtaaccttgatagctgttggcatcgttgtcatagtcctgcttcgcaaacggcacctcaaggaatatgaagaagaagcagaagagcgaaagaagcttcgtcaagaaactggaaatgtgcctgtcatagcctagttgaagacaattcaggttaacagtcatgtcactgccaagtagaagcaaaaatacccacattggtcctcttctctatgaaggaagtggagcctcctgatggttccagtctctcggttgtcacttttcatgacggtcttatttctgtacataatgagatgtgtggagataaagtattttttcatgttgtaaataatctatttatatttaagtcgttatttatcttatagcttcattaaactttttttnnnnnnnnnnnnnnnacaggggactaattatctacacattcat

SEQ ID NO: 580 - DNA, 375 bp, Mesocricetus auratus
  misc_feature (191)..(193): n is a, c, g, or t
  misc_feature (201)..(201): n is a, c, g, or t
  misc_feature (205)..(208): n is a, c, g, or t
  misc_feature (255)..(255): n is a, c, g, or t
  misc_feature (270)..(270): n is a, c, g, or t
  misc_feature (280)..(280): n is a, c, g, or t
  misc_feature (307)..(345): n is a, c, g, or t
  misc_feature (360)..(361): n is a, c, g, or t
taagtyaaactcacagaatgtgtggtacgtgcccggcctttgctggcagggtcacaccgattatagcatttaatctccactgccaccccacacagtaagaactgttatcactgtcatttcgcagataggaaaattgaagctggaaagagttaggtaatatctcaaagtacgttgtcagaagttagaatttnnntacagacncccnnnnctctggtgaccatgatatctgttgtctcccaaatcactaataaggangctgtattatagatngctaccaagntgccttrgttctattmtaawyagaatnnnnnnnnnnnnnnnnnnnnnnnnnnnnnnnnnnnnnnngtcaggtacgattgnnctatgtgcgtctat

SEQ ID NO: 581 - DNA, 561 bp, Cricetulus griseus; identical to SEQ ID NO: 101
  misc_feature (2)..(16): n is a, c, g, or t
  misc_feature (90)..(120): n is a, c, g, or t

SEQ ID NO: 582 - DNA, 264 bp, Cricetulus griseus
  misc_feature (142)..(208): n is a, c, g, or t
  misc_feature (219)..(252): n is a, c, g, or t
  misc_feature (259)..(259): n is a, c, g, or t
gagaggatatgatctaaaagtactaatttacccagtaaaatccaatttccctggagggataacttcttctggaatgatattttccccaaggacccacactggctgaggctcaatagttaaggaacaaaaacaaaaaaaatannnnnnnnnnnnnnnnnnnnnnnnnnnnnnnnnnnnnnnnnnnnnnnnnnnnnnnnnnnnnnnnnnncgcttggcgtnnnnnnnnnnnnnnnnnnnnnnnnnnnnnnnnnnttatccngctca

SEQ ID NO: 583 - DNA, 574 bp, Cricetulus griseus
acatgcagcggcacactgggcaggtgccggacttctgaagccagatggacacacatggcttatggaaatagtggtggcacgggagctcagttgccacctcacccttcacatattcactgcagcagatgggacagcacatttcttggcccactgcaccatgatcttcaktgaccaggatctcaggaagcgcatcaatgctctccttgcttgcaggtgggttagccacctcgacatcaacggcgagagactccaggtgcgcaagggcagtctccatcgcctgggccaggcgctcttcgagagccatgtaggtgaggaactgaggatccacataggagatggcttctgccactcccaacccatctgcaaagccatcaaataggctccagtccacttctaggtcttcgctcacactggagtcatcttccaggttgttgtttccatccagcacgaacatcccaggctgcatcatctcatggccggactcattatccgcttcactgctgctttcattctcattgtaccggagccaaggaatttctccttcttccagggaggcctgctcttcctgaaggac

SEQ ID NO: 584 - DNA, 581 bp, Cricetulus griseus
atgctctctctctcaagatgcattaaagctttactgcagamgkrkscgagtgtcctgtgttgttcttgctggcgagacgatcgcgcgggacatctggtgccgaaacccgggaacttgttaacatcgccggcactgcggagacccctcggacggggcggattcagaactgcagggtggatgaagagaatcccctgtggatcccggaaagactcaccctaagagccccttcggaccctcaaaagtcggaactccaccctctccccgggagttgagagccgctattatccagattaactccatgcaccttgacctgtccttgacggagggattgtcatcatggatcgcttcagctgtctcctattttaaggaatgggtgggggtgggacatttggcacaattctctgcagtggtgtggtgtttatgcttgggactgtgtgtagactcaaaacccaaacaaaawaagataaggtrgtggttgcacagacactcgctgccctagagaatggaatctcccccggcatttggctaagcatgttgaggcaataggtcgccgactgctcagctcctgcacctccggaggc

SEQ ID NO: 585 - DNA, 569 bp, Cricetulus griseus
  misc_feature (204)..(220): n is a, c, g, or t
  misc_feature (259)..(284): n is a, c, g, or t
tagttacscaktaattatgtccccatgactgtcagccaggactaggctgttccaagagtcctgcttggagctggcctgtgatgtctgagtgacaggagatgcatatcctggkggggagagcttcaragccgacagcactggatgaatggagggcccatggccggacacagaactgacagaraatgcctgggatatggaggtgcnnnnnnnnnnnnnnnnngacaacccaggctctgtcttgatgggacgcatctyttcnnnnnnnnnnnnnnnnnnnnnnnnnncattgctggagttgctggaggcactgctgctgggagggaggctctcaccaggaggacctgctgatgtcttaratttattcaggttcttgggctttcgtttcctggtttgaatcccctccttccgcattgcaagargcctargtaccccatggagcttcatgtaraggccgcasgcattgcacacaggctcgccctcggcattgcggcgccacagtgtagtggtggtggtctggcagttggcacaggagaggcctacccggcgggaagcggacagtcggcgctgag

SEQ ID NO: 586 - DNA, 514 bp, Cricetulus griseus
actacctccattcctcttgagaacttcaaaataaaaacagccagtctgcctggctccagatcttcttctagggtatcgcttcacctccaggggctatagttctgatgtgacatgacgatccagcgcctgcctctgggggctacatcacatgattgcacarcatgagttttgtttccgggcakttttatagaacgctttcgactgtgttcccagtacttctgatttggataccaagtcatcaagcttctcgcctcgctctaacaaagattccatggkgttatgcagaatgattttggtctcgtccasttcggcttgtactttgctcattggatcagcttctcgggggttctggtatctactaaggtgaccatccagggctgtgtactcrattgtagcargwgatcctactggccagtctatcctatccacctgtttggagaattcatctagtaccttctccagcaaggtaaaggccactctggaaggatattcgctgtcagcaatgaccacacct

SEQ ID NO: 587 - DNA, 574 bp, Cricetulus griseus; identical to SEQ ID NO: 295

SEQ ID NO: 588 - DNA, 579 bp, Cricetulus griseus; identical to SEQ ID NO: 341

SEQ ID NO: 589 - DNA, 262 bp, Cricetulus griseus
  misc_feature (153)..(207): n is a, c, g, or t
agggcaggcagagtatatacaggatacgcttaaattaaaacacaaataataattaagacacacagagtgaaggaagggctaaggcagaaggtggggagggggcctcctggcccactgcagaagagggtgaggcctcctgtgggcacattaggnnnnnnnnnnnnnnnnnnnnnnnnnnnnnnnnnnnnnnnnnnnnnnnnnnnnnnntcgtctgcctccgtttgcgaccctgagaggttccgggtccacsggkktstcctca

SEQ ID NO: 590 - DNA, 5626 bp, Mesocricetus auratus
  misc_feature (4664)..(4684): n is a, c, g, or t
  misc_feature (4875)..(4894): n is a, c, g, or t
ggatcccctatcgcccgcgagggcggcgtccttgctggcgcccctcacggctcagggaccaataagaaggtcgtgatgctggaactcgaccagctattggttggctcggccgtggtgagagatggtgcggtgcccgttctccgcccgggtgcgagcagtgggcggttgttaaggcgaccgttcgtgacgtaggccgtcaggctgagcagccgcccggtgattggctaggcgatcggacgatcctttcttattggcggccctgagcgtgcgtaagctcagttccttccgcccgaggctccgttggctggagaccgcggctgggccggctttggggcctccattgagatccggaggtgagcggacagactctggggactggccgccagtggccgcggggctggcgggcggcggagcccgtgctccgccagggcccacgaggtggctgtggaccgaggggaccgcgaggaggcgtccttgaggcccggcggcagggcgggggcctcgggatccgtgggccggctaggccggagggccagcagcatcagggcgttcgtgggtccagttcagagggctccgtgctgaccgggcggtcatgttcatcccggtagaatgagtgtcaggcaggggggacagcgggagcggatgttcgtgttcccctaggggacaagtgttcacgcccaggcgttgctttgaagcaggacctttctttaaagtgatggagaaggtcctggtgtaggttgcagattgacccaaagccagaatccgcgtggatacggcaggttatgcctctcctagtgggccgggaggatgcgaggtcagttcaggcaaagctagcccccaaaagtctgtcgctctgcctgtatgtcttgtctttctcctaaggggcgtaggctcattgataactcatgtcctcaccttgcactccttttggaattatttggtttgagtgaagaagaccggaccttcgaggttcgcaacttaaacaatagacttgtgaggwwssaggrrsykartgkmtacaatgttgtcamgacttttccgtatgcatggcctctttgtggcctcccayccctgggaagttattgtggggacggtgacacttaccatctgtatgatgtcmatgaacatgttcactggcaacaacaagatctgtggttggaattacgagtgcccaaaatttgargaggaygtattgagcagtgacatcatcatcctcaccataacacggtgcatcgccatcctgtacatttacttccagttccagaacttacgtcagcttgggtcgaartatattttaggtattgctggcctgttcacaattttctcaagttttgtctttagtacagtcgtcattcacttcttagacaaagaactgacrggcttaaatgaagctttgccctttttcctgcttttgattgacctttctagagcgagtgcactagcaaagtttgccctaagttcaaactctcaggatgaagtaagggaaaatatagctcgyggaatggcaattctgggccccacattyacccttgatgctcttgtggaatgtcttgtaattggagttggcaccatgtcaggggtgcgycagctkgaratcatgtgctgctttggctgcatgtctgtgcttgccaactacttcgtgttcatgacrttyttcccagcgtgtgtgtccctggtcctwgagctttctcgggaaagycgagagggtcgtccaatttggcagctyagccattttgccmgagttttggaagaagaagaraataaaccraaccctgtaacccaaagggtcaagatgattatgtctttaggyttggttcttgttcatgctcacagtcgmtggatagctgatccttcccctcagaayagcacaacagaacattctaaagtytccttgggactrgatgaagatgtgtccaagagaattgaaccaagtgtttctctctggcagttttatctctccaagatgatcagcatggacattgaacaagtggttaccctgagcttagctttyctgttggctgtcaagtacattttctttgaacaagcagagacagartcyacrctgtctttaaaaaatcctatcacgtctcctgtygygaccccaaagaaagctccagacaactgttgyagacgggagcctstgctykygagaaggarygagaagctttcrtcrgttgaggaggagcctggggtgarccaagatagaaaagttgaggttataaaaccattagtggyrgaaactgagagyrcaagcagagctacattygtgcttggcgcctctgggrscwgcyctccagtggcasygrggacacaggagcctgaaattgaactycccagtgagcctcgrcctaatgaagaatgtctgcagatactggagagtgccgagaaaggtgcaaagttcctkagcgatgcagagatcatccagttggtcaatgccaagcacatcccrgcctacaaattggaaacyytaatggaaactcatgaacgtggtgtatctattcgccggcagctcctctccacaaagcttccagagccttcttctctrcagtwsctscmttayagwgayyaymwktrttycstggtgatgggagcttgctgtgagaatgtgatcggatatatgcccatccctgtcggagtrgcagggcctctgtgcctggatggkaaagagtaccaggttccaatggcaacaacggaaggctgtctggtggccagcaccaacagaggctgcagggcaataggtstwgktggakktgycwrcwkycrrgtmywwgcakmtgggatgacccgrggcccagtggtgcgtcttcctcgtgcttgtgattctgcagaagtgaaggcctggcttgaaacacccgaagggtttgcrgtgataaaggacgccttcgatagcacyagcagattygcacgtctacagaagcttcatgtgacyatggcagggcgcaacctgtacatccgtttccagtccaagacrggggatgccatggggatgaacatgatttccaagggcactgagaaagcacttstgaagcttcaggagttctttcctgaaatgcarattctggcagttagyggtaactactgcactgacaagaaacctgcygccrtaaactggatcgarggaagaggaaagacagttgtgtgtgaagctgtyattccagccarggtggtgagagaagtattaaagacractacggaagctatgattgacgtaaacattaacaagaatctkgtgggttctgccatggctgggagcataggaggctacaatgcccatgcagcaaacatcgtcactgcyatctacattgcatgtggccaggatgcagcacagaatgtggggagttcaaactgtattactttaatggaagcaagtggtcccacgaatgaagacttgtatatcagctgcaccatgccatctatagagataggaacygtgggtggtgggaccaacctcctaccrcagcaggcctgtctgcagatgctaggtgttcaaggagcgtgcaaagacaatcctggagaaaatgcacggcarcttgcccgaattgtgtgtggtactgtaatggctggggagttgtccttgatggcagcattggcagcaggacatcttgtyagaagtcacatggttcayaacagatcgaagataaatttacaagatctgcaaggaacrtgcaccaagaagkcagcttgagcagcctgacagtattgaactgaaacacgggcattgggttctcaaggactaacatgaaatctgtgaattaaaaatctcaatgcagtgtcttgtggaagatgaatgaacgtgatcagtgagacgcctgcttggtttctggctctttcagagacgtctgaggtcctttgctcggagactcctcagatctggaaacagtgtggtccttcccatgctgtattctgaaaagatctcatatggatgttgtgctctgagcaccacagatgtgatctgcagctcgtttctgaaatgatggagttcatggtgatcagtgtgagactggcctctcccagcaggttaaaaatggagttttaaattatactgtagctgacagtacttctgattttatatttatttagtctgagttgtagaactttgcaatctaagtttattttttgtaacctaataattcatttggtgctggtctattgatttttgggggtaaacaatattattcttcagaaggggacctacttcttcatgggaagaattacttttattctcaaactacagaacaatgtgctaagcagtgctaaattgttctcatgaagaaaacagtcactgcatttatctctgtaggccttttttcagagaggccttgtctagatttttgccagctaggctactgcatgtcttagtgtcaggccttaggaaagtgccacgctctgcactaaagatatcagagctcttggtgttacttagacaagagtatgagcaagtcggacctctcagagtgtgggaacacagttttgaaagaaaaaccatttctctaagccaattttctttaaagacattttaacttatttagctgagttctagatttttcgggtaaactatcaaatctgtatatgttgtaataaagtgtcttatgctaggagtttattcaaagtgtttaagtaataaaaggactcaaatttacactgataaaatactctagcttggnnnnnnnnnnnnnnnnnnnnntagcgttgtccaggaaaccctgcttgcttgccaagcctaatgaagggaaagtcagctttcagagccaatgatggaggccacatgaatggccctggagctgtgtgccttgttctgtggccaggagcttggtgactgaatcatttacgggctcctttgatggacccataaaagctcttagcttcctcaggggnnnnnnnnnnnnnnnnnnnnttaattttttttttaatgtaccagttttgtataaataataataaagagctccttattttgtattctatctaatgcttcgagttcagtcttgggaagctgacatctcatgtagaagatggactctgaaagacattccaagagtgcagcggcatcatgggagcctcttagtgattgtgtgtcagtattattgtggaagattgactttgcttttgtatgtgaagtttcagattgctcctcttgtgactttttagccagtaacattttatttacctgagcttgtcatggaagtggcagtgaaaagtattgagtattcatgctggtgactgtaaccaatgtcatcttgctaaaaactcatgttttgtacaattactaaattgtatacattttgttatagaatactttttccagttgagtaaattatgaaaggaagttaacattaacaggtgtaagcggtggcttttttaaaatgaaggattaaccctaagcccgagacccagaagctagcaaagtctggcagagtggtaaactgtcctgctggggccatccaatcatctctctccattacactttctaactttgcagcattggtgctggccagtgtattgtttcattgatcttccttacgcttagagggtttgattggttcagatctataatctcagccacattgtcttggtatcagctggagagagttaagaggaagggaaaataaagttcagatagccaaaacac

SEQ ID NO: 591 - DNA, 2641 bp, Mesocricetus auratus
  misc_feature (61)..(127): n is a, c, g, or t
  misc_feature (771)..(785): n is a, c, g, or t
  misc_feature (1653)..(1692): n is a, c, g, or t
  misc_feature (1713)..(1799): n is a, c, g, or t
  misc_feature (2092)..(2135): n is a, c, g, or t
  misc_feature (2413)..(2442): n is a, c, g, or t
cttgagcccctcccccaccaccaccacctcccgatgggcttctattgttttggaataggannnnnnnnnnnnnnnnnnnnnnnnnnnnnnnnnnnnnnnnnnnnnnnnnnnnnnnnnnnnnnnnnnngggatcctggactgtccctgagaacaggtgtcagtgccccgcccctggagctggctgacgatggcggaagggccaggtccacttagtctagcaggcatctgtccctgtccatgaaggcttacagtgttctatggctggaaaagatactccgtaagcctgcagcaacttcgtcctgtaggccaggttcgcctaccaacatatctagccctgtctgccttaagagcaacagccacagaggcgggggggaatgcagatagcccctgactggtagtggacaagcagacagattcttactcctcctcctccgtttctcttttatccctctctggtcctcagagagtccgtcctccccaactgtcttccccctggtctcctgcgagagccccctgtctgatgagaatttggtggccatgggctgcctggcacgggacttcctgcccagctccatttccttctcctggaactaccagaacaagtctgaagtcaaccagggtgtcagaaccttcccaacactgaggatgggagagaagtatgcagccacctctcaggtgttcctgcctcccaagagtgtcctcgagggttcagatgaatacctggtgtgcaaagtgcaccatggcaacaccaacaaagatctacgcgtgccnnnnnnnnnnnnnnnccagccagtgggggcagaggcccaggcatggcccagaggaggccgggggctgcagcttagagcaatctgagctcacaccttgtcctttcactccagtcgtcacagagatgaaccccaacgtgagtgtgttcgttccatcccgggacgccttctctggccctgccccacgaaagtccagactcttctgcgaagcctctaacttcagtcccaaacaaatcacagtgtcctggctacgtgacgggaagcctgtgaagtctggcttcaccacagagccagtgactcctgaagacagaggttccggaccccgaacctacaaggtcataagcacactcacgatcaccgaaagcgactggctgaacctgagtgtgtacacctgccgtgtggatcacaggggtctcaccttctggaagaatgtgtcctccacatgtgctgccagtgagtgccctgtcctagcccagtggctatccctcccagatcagggccaccctcttacaagtaaggctaatgccaccctgacatggccatttgctccttgagccttggtttcaagggccaagaccagtgtcttcccttaagcagaacctcggaggttcagtaaatcagttggtactatttggggatagagacttaagcttttctccgacttcacaacttgacagccactgacacaatgttttcttgactgcaggcccatccacagacatccaagccttccctatccccccctcctttgttggcatcttcctcaacaagtctgccacgctgacctgcctggtcacaaacctggcaacctacgacaccctgaacatctcctggtcttcccgaagtggtgagccactggaaaccaaaactaaactcactgaaagcnnnnnnnnnnnnnnnnnnnnnnnnnnnnnnnnnnnnnnnntttgtgtggaagactgggatnnnnnnnnnnnnnnnnnnnnnnnnnnnnnnnnnnnnnnnnnnnnnnnnnnnnnnnnnnnnnnnnnnnnnnnnnnnnnnnnnnnnnnnttcccatttccttgtcctctggtcagctccagggttcttcctctgtgtcacagggatggcaggtccccttctgccaccatatcctcaccactgtctctacttgcagagatgaacaagaccccccctgctgtgtaccagcagccactagcccgagaacaactgatcctgagggagtcagccacagtcacctgcctggtgaagggtttctcccccgcagacatctttgtgcagtggcttcagagggggcaacccttgtcccaagacaagtatgtgaccagcgccccaatgcgggnnnnnnnnnnnnnnnnnnnnnnnnnnnnnnnnnnnnnnnnnnnngtgacagaggaggaatggaactccggggagacctacacctgtgtggtaggccacgaggccctgccacacatggtgaccgagaggaccgtggacaggtccaccggtaaacccacactgtacaatgtatcgctgatcatgtctgatgcaggtggcacctgctactgaccatgctagcccccaaccaggcaggctctggggggccagttgcactgtttacacaaactaaccatgtcagagtgagatgttgcatcttataaaaactagaaataaaaaaaaannnnnnnnnnnnnnnnnnnnnnnnnnnnnntgcaatgcttttggctgccgaggcaacggctgtgttgtgtttgccttgcacgcaccctgcagatttgcctctgccctgacccttcctctgtctgcacagttgcctccttctgtgtgaactcacagagtgtaaggatgccatccctccagctgcttccagatacagggctggaagcgtggctaccctggtgcaggcagaa

SEQ ID NO: 592 - DNA, 3959 bp, Mesocricetus auratus
  misc_feature (40)..(57): n is a, c, g, or t
  misc_feature (442)..(565): n is a, c, g, or t
  misc_feature (3891)..(3908): n is a, c, g, or t
  misc_feature (3930)..(3950): n is a, c, g, or t
aaaagctgaaactgggacttgctttgtttttaggacaggnnnnnnnnnnnnnnnnnntgtatgtttttctctgtgcaaagaaacaggtgagatgcacctcagggttagccatcatgttcccattctccttctcatattacatttcttcccaccaggcaccaaggtttgagactctgctatgtcacttcccaagattttacccacttcgcaatggatgcacacatgaaaacatccctggcgtaccacaaatacactgaattttcatttctccaccatagaggatatttgaattgggagctttctcctcatactgacccatttttcagtttccctggtcattgatttctagcttcactcattatggcaagaaatgatctttgtatagttccaacactttcggatgcattgtatcctgttctatgaacttgcttgaagtaaagtnnnnnnnnnnnnnnnnnnnnnnnnnnnnnnnnnnnnnnnnnnnnnnnnnnnnnnnnnnnnnnnnnnnnnnnnnnnnnnnnnnnnnnnnnnnnnnnnnnnnnnnnnnnnnnnnnnnnnnnnnnnncactgcttctggcagcatatttgcatgacatgcaggttgcttgttaatgcagaaacacattagcccgagataaaggcaccatgagaggagagggcagctcttagcaggtagaccagagcaccagggctgcaggactctttctcagggtcctttcttgtccctgactctggatcaagaggaaacacttcaggaagggttggtaatgacatctcacccaaaatcccaaagctgtgcagtgctttaggccaaggaccctttggaagggactgtgagtctgccaaaaggcagtcacgacaggctccttctgccaaggttcacagctgtgttgcaatttaccagcacagggatcttcctggatttgtttattcaacacagagtgtgtgccatgcagtgtcacgcaaacacgcaaagctgaatttcagtcccaaaggcctaaagaagtcaatggtcctctgggttggagatgtcatagttgtaaaggcttcacaaaattaatgatgacgatgatagcctttgggaagtaagtgtttgttcagctcttattggacagctgtgaaagagtgatcagtgggtctctagtctggacatcatctctcacagacaccatttccaactctgcagaaagaggtaggggactcacccccagagtttcccccagttgtctgcatttggcatccctgagctcagccgtggggccctggacagttcctgctgctcagatgctgaacttgccgcaggtgagaccacctgtcgggtcctgaacaataagcttcactcagctctgggcaccaggcttgaggcacaggatggacagccatgggcactgcccatgagcactcgcagaggaagtggaataggaaatgccaagcgttgggaacagatgagagaaacacagggcatccgagacagagaggaggcaggagtggagggaaaggaggacagacaggagtgaggacagaaaggggagacctctgatccctacgtacagcgtctcttggtgtctccattcggccgtcccactctctcatgcttgactctccagccctgtgtgtcaattaatgtctaccagcggtggcctctgtccacgcccctgcttccctctattgctcttgtggcatcgtctactgcttatcgtcagtctttatctgtctccatattacctgagctgtgcatcttggtgttggctccttgggaatttcgaatatgtttgtcttatttattcttttgtcccagactcctcctggatccacctcagctcacgcccattcagccttgtgttctcttttagcacttttatccaatcattttatacgtgtgagcactttggctgcaagtataatatgtccaccatgcacattcctggctcccactgacgtcgggaaaaggagttggatcccctgggaggggagttgcagacagttgtgagctgccgtgtggacaccaagggtgggactcaggtccccttcaagggcaacaagtgtcctcaacatctaagccatcctcttgcgcttggtgcttccggtactctcttggatgaatgggtgctccctgaagcacggtcgacctatgagagccaccctaaaggaaacagttctccctttcccagaagctgtcggttgccaatatcccctcagctttgcatcctgtgagctggtgtaaaagctgtacatggtttcatgacgactattcctgtcactcctgtcactcctatcctgtgttcaccgcacttaccaccgtggtcttccatttctctctcccccctttcccacacctgctagccttcttcctgcctctcagattccttcctgattccttccagtcttccctgctgtcttcctgtctgtccgtggggaaggaaagctccctgccctcagctcagagaggtggcctgggcctcatgagtaaggccgaggagtgtgtccaccttgaaacactcctcgtctcctgtctcccctccaaagagagactttgggagagttgattagaggaggtgaaagccaggggagaccatgaagaaaagccctgccagcttcacactgataaactccactagccacaaaattgaaacagctgccgtttgctgagcacatctgttgttggtaacctttgtgacttcaatggttcgtgcctcattgaaatagcctgaaagaggatgttgtcactggtcccatgaggctcaaacaatcacatcaacttttcgtggtcacaccacaacatctggataagattaagatcctaaccctagcctcagtcatggtctttgccatccatccaataatgacaatccagccactgggaccctgaggccagcaaagagaagggatttcctgagttcacaagcatggctgttagagatttgtttaggactggcattccatctcctttccaccacccagaccaattgagtgtctctacagcaagacacccttggactctttcctaaaaccctaactgcatgtctgtgaagcgctttctcccttgagaccctcaaccctcgatgtgggtgtttccagatgtttcctaacccacactcccattccattgcacaatcctggcatgccttcttctgccttggaatccgctacatgaaaaccagcccagaggtgagccctcctccgtccttgcagctggtgtcataaacaaggcagttgtatgtcagggcaatagttaggaggaaaaatgaggtaattattaagcagaagccaaagccacccctccagcctagagtataaaggcacactgtccccgtcatcatctacctgtgctgtccttcccactgccaccatgctggtgtccgggatgctcctcgtggttgtgctgacctgcctcagcgtcatgatcataatgtctgtgtggaggcagaggagactgttgaggaagatgcctccaggacccaccccactgccctttattgggaactttctggagctggacacagagaagttttatgactgcctttcaaaggtagtaccgggcagggagatgggtgagtttgacaagtggtgtctgggagtccgaggcgggagtgtgaggcagaagccggaccaggtcagaatgtggacataggatgggggcctaggggtctgcatccaagtccctgacattgggacaatggccgtcctaagagtggcttctctaactcctggcgtctcccctcagatgagggagcggtatggccctgtgttcaccatccacctggggcctcgccctgctgtgatgctgtggggttacgatgctgtgaaggaggctctcattgaccaggctgaggagctcagtgaccgaggagagcaagctttcttcgactggttcttcaaaggctatggtgnnnnnnnnnnnnnnnnnncctggctgttctggaactcacnnnnnnnnnnnnnnnnnnnnnagactcata

SEQ ID NO: 593 - DNA, 3295 bp, Cricetulus griseus
  misc_feature (54)..(82): n is a, c, g, or t
  misc_feature (88)..(138): n is a, c, g, or t
  misc_feature (141)..(153): n is a, c, g, or t
  misc_feature (183)..(222): n is a, c, g, or t
  misc_feature (244)..(314): n is a, c, g, or t
  misc_feature (322)..(366): n is a, c, g, or t
  misc_feature (369)..(395): n is a, c, g, or t
  misc_feature (411)..(450): n is a, c, g, or t
  misc_feature (482)..(595): n is a, c, g, or t
  misc_feature (598)..(624): n is a, c, g, or t
  misc_feature (643)..(680): n is a, c, g, or t
  misc_feature (687)..(700): n is a, c, g, or t
  misc_feature (702)..(824): n is a, c, g, or t
  misc_feature (827)..(853): n is a, c, g, or t
  misc_feature (869)..(909): n is a, c, g, or t
  misc_feature (916)..(929): n is a, c, g, or t
  misc_feature (931)..(965): n is a, c, g, or t
  misc_feature (970)..(1046): n is a, c, g, or t
  misc_feature (1058)..(1084): n is a, c, g, or t
  misc_feature (1100)..(1139): n is a, c, g, or t
  misc_feature (1146)..(1159): n is a, c, g, or t
  misc_feature (1161)..(1198): n is a, c, g, or t
  misc_feature (1207)..(1283): n is a, c, g, or t
  misc_feature (1287)..(1313): n is a, c, g, or t
  misc_feature (1329)..(1368): n is a, c, g, or t
  misc_feature (1376)..(1389): n is a, c, g, or t
  misc_feature (1391)..(1514): n is a, c, g, or t
  misc_feature (1517)..(1544): n is a, c, g, or t
  misc_feature (1560)..(1599): n is a, c, g, or t
  misc_feature (1621)..(1688): n is a, c, g, or t
  misc_feature (1693)..(1744): n is a, c, g, or t
  misc_feature (1747)..(1771): n is a, c, g, or t
  misc_feature (1789)..(1829): n is a, c, g, or t
  misc_feature (1857)..(1975): n is a, c, g, or t
  misc_feature (1978)..(2004): n is a, c, g, or t
  misc_feature (2020)..(2060): n is a, c, g, or t
  misc_feature (2067)..(2080): n is a, c, g, or t
  misc_feature (2082)..(2205): n is a, c, g, or t
  misc_feature (2208)..(2234): n is a, c, g, or t
  misc_feature (2257)..(2290): n is a, c, g, or t
  misc_feature (2297)..(2310): n is a, c, g, or t
  misc_feature (2312)..(2435): n is a, c, g, or t
  misc_feature (2438)..(2464): n is a, c, g, or t
  misc_feature (2480)..(2520): n is a, c, g, or t
  misc_feature (2527)..(2540): n is a, c, g, or t
  misc_feature (2542)..(2659): n is a, c, g, or t
  misc_feature (2667)..(2693): n is a, c, g, or t
  misc_feature (2709)..(2739): n is a, c, g, or t
  misc_feature (2755)..(2768): n is a, c, g, or t
  misc_feature (2770)..(2807): n is a, c, g, or t
  misc_feature (2820)..(2840): n is a, c, g, or t
  misc_feature (2842)..(2893): n is a, c, g, or t
  misc_feature (2938)..(2978): n is a, c, g, or t
  misc_feature (3006)..(3062): n is a, c, g, or t
  misc_feature (3067)..(3089): n is a, c, g, or t
ccacgaatatttgtcattcctgacctgttttttgtttgtgtgtgtgacagacannnnnnnnnnnnnnnnnnnnnnnnnnnnngcaaannnnnnnnnnnnnnnnnnnnnnnnnnnnnnnnnnnnnnnnnnnnnnnnnnnaannnnnnnnnnnnngagggcatcccccctgaccagcagaggctnnnnnnnnnnnnnnnnnnnnnnnnnnnnnnnnnnnnnnnntccgactacaacatccagaagnnnnnnnnnnnnnnnnnnnnnnnnnnnnnnnnnnnnnnnnnnnnnnnnnnnnnnnnnnnnnnnnnnnnnnngaccatcnnnnnnnnnnnnnnnnnnnnnnnnnnnnnnnnnnnnnnnnnnnnnaannnnnnnnnnnnnnnnnnnnnnnnnnntgaccagcagaggttnnnnnnnnnnnnnnnnnnnnnnnnnnnnnnnnnnnnnnnntccgactacaacatccagaaggagtctacccnnnnnnnnnnnnnnnnnnnnnnnnnnnnnnnnnnnnnnnnnnnnnnnnnnnnnnnnnnnnnnnnnnnnnnnnnnnnnnnnnnnnnnnnnnnnnnnnnnnnnnnnnnnnnnnnnnaannnnnnnnnnnnnnnnnnnnnnnnnnntgaccagcagaggttgatnnnnnnnnnnnnnnnnnnnnnnnnnnnnnnnnnnnnnntccgacnnnnnnnnnnnnnngnnnnnnnnnnnnnnnnnnnnnnnnnnnnnnnnnnnnnnnnnnnnnnnnnnnnnnnnnnnnnnnnnnnnnnnnnnnnnnnnnnnnnnnnnnnnnnnnnnnnnnnnnnnnnnnnnnnnnnnnnnnaannnnnnnnnnnnnnnnnnnnnnnnnnntgaccagcagaggttnnnnnnnnnnnnnnnnnnnnnnnnnnnnnnnnnnnnnnnnntccgacnnnnnnnnnnnnnngnnnnnnnnnnnnnnnnnnnnnnnnnnnnnnnnnnngtggnnnnnnnnnnnnnnnnnnnnnnnnnnnnnnnnnnnnnnnnnnnnnnnnnnnnnnnnnnnnnnnnnnnnnnnnnnnnngtcaaggcaaannnnnnnnnnnnnnnnnnnnnnnnnnntgaccagcagaggttnnnnnnnnnnnnnnnnnnnnnnnnnnnnnnnnnnnnnnnntccgacnnnnnnnnnnnnnngnnnnnnnnnnnnnnnnnnnnnnnnnnnnnnnnnnnnnngatgcagannnnnnnnnnnnnnnnnnnnnnnnnnnnnnnnnnnnnnnnnnnnnnnnnnnnnnnnnnnnnnnnnnnnnnnnnnnnnaagnnnnnnnnnnnnnnnnnnnnnnnnnnntgaccagcagaggttnnnnnnnnnnnnnnnnnnnnnnnnnnnnnnnnnnnnnnnngtccgacnnnnnnnnnnnnnngnnnnnnnnnnnnnnnnnnnnnnnnnnnnnnnnnnnnnnnnnnnnnnnnnnnnnnnnnnnnnnnnnnnnnnnnnnnnnnnnnnnnnnnnnnnnnnnnnnnnnnnnnnnnnnnnnnnnnnnnnnnnaannnnnnnnnnnnnnnnnnnnnnnnnnnntgaccagcagaggttnnnnnnnnnnnnnnnnnnnnnnnnnnnnnnnnnnnnnnnntccgactacaacatccagaagnnnnnnnnnnnnnnnnnnnnnnnnnnnnnnnnnnnnnnnnnnnnnnnnnnnnnnnnnnnnnnnnnnnncaaannnnnnnnnnnnnnnnnnnnnnnnnnnnnnnnnnnnnnnnnnnnnnnnnnnnaannnnnnnnnnnnnnnnnnnnnnnnncctgaccagcagaggttnnnnnnnnnnnnnnnnnnnnnnnnnnnnnnnnnnnnnnnnntccgactacaacgtccagaaggagtctnnnnnnnnnnnnnnnnnnnnnnnnnnnnnnnnnnnnnnnnnnnnnnnnnnnnnnnnnnnnnnnnnnnnnnnnnnnnnnnnnnnnnnnnnnnnnnnnnnnnnnnnnnnnnnnnnnnnnnnaannnnnnnnnnnnnnnnnnnnnnnnnnntgaccagcagaggttnnnnnnnnnnnnnnnnnnnnnnnnnnnnnnnnnnnnnnnnntccgacnnnnnnnnnnnnnngnnnnnnnnnnnnnnnnnnnnnnnnnnnnnnnnnnnnnnnnnnnnnnnnnnnnnnnnnnnnnnnnnnnnnnnnnnnnnnnnnnnnnnnnnnnnnnnnnnnnnnnnnnnnnnnnnnnnnnnnnnnnaannnnnnnnnnnnnnnnnnnnnnnnnnntgaccagcagaggttgatctttnnnnnnnnnnnnnnnnnnnnnnnnnnnnnnnnnntccgacnnnnnnnnnnnnnngnnnnnnnnnnnnnnnnnnnnnnnnnnnnnnnnnnnnnnnnnnnnnnnnnnnnnnnnnnnnnnnnnnnnnnnnnnnnnnnnnnnnnnnnnnnnnnnnnnnnnnnnnnnnnnnnnnnnnnnnnnnnaannnnnnnnnnnnnnnnnnnnnnnnnnntgaccagcagaggttnnnnnnnnnnnnnnnnnnnnnnnnnnnnnnnnnnnnnnnnntccgacnnnnnnnnnnnnnngnnnnnnnnnnnnnnnnnnnnnnnnnnnnnnnnnnnnnnnnnnnnnnnnnnnnnnnnnnnnnnnnnnnnnnnnnnnnnnnnnnnnnnnnnnnnnnnnnnnnnnnnnnnnnnnnnnnnnnaggcaaannnnnnnnnnnnnnnnnnnnnnnnnnntgaccagcagaggttnnnnnnnnnnnnnnnnnnnnnnnnnnnnnnncgcaccctgtccgacnnnnnnnnnnnnnngnnnnnnnnnnnnnnnnnnnnnnnnnnnnnnnnnnnnnngatgcagatcttnnnnnnnnnnnnnnnnnnnnnannnnnnnnnnnnnnnnnnnnnnnnnnnnnnnnnnnnnnnnnnnnnnnnnnnnaagatccaggacaaggagggcatcccccctgaccagcagaggttnnnnnnnnnnnnnnnnnnnnnnnnnnnnnnnnnnnnnnnnntccgactacaacatccagaaggagtctnnnnnnnnnnnnnnnnnnnnnnnnnnnnnnnnnnnnnnnnnnnnnnnnnnnnnnnnngacannnnnnnnnnnnnnnnnnnnnnntgagcccagtaacaccatcaagaaaagcaaacaggaagatggacgcacctttctcactacactgtctagaaagagcacaccttgtgcttgttcttgggcttgaggggaggtgttttaatttaccccatcttttaagttgttaacaagtttcattgcactttgaataaagttcttgcattcccaaaggtgttggatctcgttttagc

SEQ ID NO: 594 - DNA, 2200 bp, Cricetulus griseus
  misc_feature (2181)..(2200): n is a, c, g, or t
ccccgccccactcccgcggagaccccgccgggcggcagcgcgacccctgcccgccgcccgcagcctggcgggcagcgcaggctgggcgccatgcggagggccgagcgcagagtcgccggaggctcgggatccgggtcgccgctgctcgagggccgtcgcagcaccgagtccgaggtctacgacgatggcaccaacacctttttttggcgtgcccacaccttaactgtgctgttcatcctcacctgttcactgggctatgtgactctcctggaagaaacccctcaggatacagcctacaacactaagagaggtattgtggccagtattttggttttcttatgttttggagtcacacaagccaaagacgggccgttttccagacctcatccagcttactggcggttttggctgtgtgttagtgtggtctacgagttgtttctcatcttcatcctcttccagacagtccaggatggccggcagtttctgaagtatgtggatcccaggctgggagtcccgttgccagagagggactacgggggcaactgcctcatctatgatgctgacaacaagactgaccccttccacaacatctgggacaagctggatggctttgttcctgcacacttcattggctggtatctgaagaccctcatgatccgcgactggtggatgtgcatgatcatcagtgtgatgttcgagttcctggagtacagcctggagcaccagctgcccaacttcagcgagtgctggtgggatcattggatcatggacgtactcatctgcaacgggctgggcatctactgtggcatgaagaccctcgagtggctgtccctgaagacatataagtggcagggcctctggaacattccaacctacaagggcaagatgaagaggattgcttttcagttcacgccctacagctgggtacgctttgagtggaagccagcctccagcctgcaccgctggctggccgtgtgtggcatcatcttggtgttcctgctggccgagctgaacacattctacctgaagtttgtgctgtggatgccccctgaacactacctggtcctcctgcgcctggtcttcttcgtgaacgtgggtggtgtggccatgcgtgagatctatgacttcatggatgaactgaagccccacaggaagctgggccagcaggcctggctggtggcggccatcacagtcacagagctgctcatcgtggtgaagtatgacccgcacacactcaccttgtcactgcccttctacatctcccagtgctggactcttggctccatcctggtgcttacgtggactgtctggcgcttcttcctgcgggacatcaccatgaggtacaaggagacccggcgacagaagcagcagagtcaccagggcagagccatcaacaatggggatgggcacccagggccggatgatgacctgctagggactgggactgcagaggaagaggggagcaccaatgacagtgtacctgctgaaaaggagggggcctcagccgcctcatgatcctctccctctttactggccttatgcctgccatagggctgtcccatttctcccgtccttatgctccctgcttcagaggaggtggggggcccattcccaactccaccaggggcacctgagtgtacatgtttgtgtgcaggtaggtgtgtgcacatattggctcctgacacgtctccagggctgtgagctcctcagtgagcctggagcttgctctagagcaagggtcctgccctgtccttctacctggtcagccaaggcactggcccatggtctctcctgtgttcagtctcagcacaggccaggagaggcatgtcagtactctttctctaccctctgtggggcaaacagaagccccatgcaccctgtggcctcacccaacttgcagcagcagaagtgaaggatgttacaacaccaagatggtctcaaagtggtgggtctggagtcagtactgagctgtggcctttggagccttctttaaccaggactctaagctgagggtgtgtaatggagggggtcaccagatgggcctcttgagggatatcaagtcagagagtccaacttggagacctgtataccacaggtgctagggttgtgttgtcaccatggctcccagagtttatagtcatattcttgagcaaacagaacaaataaagtgatgatgaaggnnnnnnnnnnnnnnnnnnnn

SEQ ID NO: 595 - DNA, 1076 bp, Mesocricetus auratus
  misc_feature (846)..(923): n is a, c, g, or t
cgccaggagaggcccaagatgagagccctgggagctgttgtcactctcctgctctggggacagctttttgctgtggacttgagcaatgatgccatggatactgcagatgacagctgcccaaagccaccagagatcgaaaatggctacgtggagcacttggttcgctatcgctgccaacactacagactacggactgaaggcgacggagtgtataccctaaacagtgagaagcagtgggtgaacacagctgctggagagagactccccgagtgtgaggcagtgtgtgggaagccgaagcatcccgtggaccaggtgcagcgcatcataggtggttctctggatgccaagggcagctttccttggcaggccaagatggtctcccgccacgaactcatcacaggggccacactgatcagtgaccagtggctgctgaccacggccaaaaacctcttcctgaatcacagcgaggatgcgacatccaaggacattgcccctaccttaaaactctacgtgggaaaaatgcagccggtggagattgagaaggtggttatccaccccaaccgctctgtggtggacattggggtcatcaagctcagacagaaggtgcctgtcaacgagagagtgatgcccatctgcctgccttccaaagactacatagcaccaggccgcatgggctatgtgtctggctgggggcggaatgccaacttcaggtttactgatcgtctcaagtacgtcatgctgcccgtggctgaccaggacagctgtatgcttcactatgagggtagcacagtgcccgagaaagaaggctccaagagttctgttggggtacagcccatcttgaatgannnnnnnnnnnnnnnnnnnnnnnnnnnnnnnnnnnnnnnnnnnnnnnnnnnnnnnnnnnnnnnnnnnnnnnnnnnnnncgacctggagcaggacacctggtatgcagctgggatcctgagctttgataagagctgttctgtagctgagtatggcgtgtacgtgaaggtgaactccttcctggactggattcaggaaaccatggccaagaactagtgcatactgactggagg

SEQ ID NO: 596 - DNA, 1099 bp, Mesocricetus auratus
gaattctttagaaaatggctctcagggtgtccttcccttcaaaaacatgtgtgggtgccttatactcacactagtaaaaagggttgcttcaaataagggaacgaattgtgcaccggggagagccaattttgtccagtagaaacagacttttagagttgtcagaaaggtgggaatgtacagccagcagccggctgaatctcttcatcagttgattcccctgttttttgctttcctctcacagcggtttaatgcttctctgtgcctggtttgtttcagatgcctcaggaacagtactctcaccacaggagcaccatgcccagctcagaggggccacacatttacaaagtggggatttatggctggaggaaaagatgcctgtatttctttgtcctgctcctcatgattttaatcctggtgaacttggccatgaccatctggattctcaaagtcatgaacttcacaattgtaagtgaaactatataaatgtgttaactctcagtgaaggaaagggaagcatggagcaagagagcgaaaggatgtgggaaagtggtgtcccatgacctggcatttgagctcaaactaattcctgttcaggttggatatgaatagcaacttctgtctaacctcagtccttcttgggctgagaggccaaatttagaggcattgctgtcacctaaggtatcttgtatgccttcccttgatcatgataatgttgtagtctttgaccacttaaggaaatccctcagcagaaaatgaagaataaagtgaatgtatttgttttccccaattttaatagcaatgatgaatcctttcatcaggcaagagttggaatgtgtaagtacagttgagctccgagaaccatataaggacgctagcaggcaaattacacctgtttgtcattgttgtggctcactgaaaatctctagtttggggacagaagtgttttctaccattgcctgtgtcagatggaattgagaggaaaccagctgtatttccttgttttattattcctctaaagagatatatatgttttgataaaaatctcttgtttctggtgctcagagtattgtatagatcaaacattgacttgttggaattc

SEQ ID NO: 597 - DNA, 4798 bp, Mesocricetus auratus
  misc_feature (3723)..(3745): n is a, c, g, or t
gaattctgcctcccccagcaagtattcactgacagtaactcctccatacgggttggatctggagatgatctacccacctatggcaggtttagctgtttgaccttctgtaggcttgtacaggaaccacagctgcttcaagaccatgagtgtacagtcactccatccaaagcaacctttcacggtgctccctcaatcccacactctctcgcctcctcttccacagtgttccctggggtggttgggagtgaagaggtaatacagatgtccgtgtagggcgagcacttagtctctcaccctctcatttgacaagtcacacatctctgccttgactgccacccactgcagagagaagcttcctgatcaaggaggatagcagctcagctccatgggcataaacgcaaatgtttagaggaaattttgacaacgctaccatctagcaaaataacagcaggttctaccctgagatcttccataggcttttggcttttggtcagtgttacagcagcaggtgtttgtctcaaatccaatcagaaagcagttattcaccccaataacagccataccattatggcactagtggacacattttacctggcagatcagtgctgcagtatacaagttccagagctaggtaagactactgatgccttttctcccccaacagcctacatagtaccttccagaactgtgaaaggtggccatcaggtaagaagtttccaggtgagtttgagactggttttctatttctcatagccaatatgtgtgtatcttcagcaataaggctttaccacgaagttatggtgagtaaccaaaggcaatggcaatagtttgtgttgttttagaaaccagtaactcacagggaagcatcctgtgcctagtattataattttcatttttaaaaaaccatgttttccagtattaacattggctatccatgcacagtatttctgcccaaactacctaattagcttattaattagtgaatctccttaaggttttttatacatctttagttcgggataacctacccagttttccttttctcccccatccttttgccccatctctgattaatactccatgctttgtctgactggcatattgtgcatgtttgcctgctcatatacgtgtctatacatgtgatgtccgttgagtctttctgcaaaacgcatttgctactgcggctatagtaatcactgcctgtgtgctccctggatgcccagtgccaagattaccctcaacccaagttcctaggacccaaggtgtcctaactagaaaaggtaagatccctccgcattctgtcccggcatccttagcccacacaggcgcacagtaaaggacccatatgagtgtctgggacctgaaagtctggacgtcaatttcacgtccagtagaatcatcattcgggaggaacgtccactcatgaagacagccaggttgaagaagaaagcgtgaccaacagttcctgtggtaacagctctgccactcccctgcctgctgggagtaagaagtcctaagacccaaagataaagcttgcactggctgagagcagtccctctgagaggatgcttcttcctgccctccgtctgctgctctttctcctgggctccagcgccgaggctggtgagtaccagggtccttccgtctcaaatctgcagggtcagctcctaaggcaacaaagtttagtctgacttttgggagtctaaaacagatctcacagctcttctcaagagcctcagagtgaagtctccttttggaacacacccgcccgttgtttaaagtcacggtggtccccaggaacacggaagcttgtgttgactcgggtggggggactaaccctaaagcaagttggggggtagagggaggccccaggaaaacaggcgcattctccttgtctttggagcttaaggcaaaagaccaccctctggttttgctgatctgtgcctgcaagggagcaggacagggggaaccagggccagggcagagtgcgggaaatcagaaggggaaactgcatagacccaaggcaggattggctgctgtgccttgagaaagaagtgactatttgtgagttgtgagtgagaaaaactcatcaagacacctgagagagcggtgggcagcatttaggccaaggagatcaaggcaaccttctccaactgtgtcctctagagagagcgtccgcatccgtgtcaggccctggggttctctgttctaggcaagatcatcggaggcacagagtgcagaccacatgcccgcccctacatggcctatctggaaattgtcactcccgagaatcacctgtcagcttgcagtggcttcctgataagacgaaactttgtgatgactgctgcgcactgtgcaggaaggtgatatgggtgctgtttatctctaaacatgaagtaaaccatcagggtagcatccagggcaaacccaggtggtacctgaagcaggatcctgagtctaggactgaccagaaagagatgtcattaaacagatgccctgggcttcaatcactgtaaatgcagctcccctcagaggcaaggacatctctccaaaagtatcccctccataccccctcaacagagagacactcacggctcgcttgtcagtactactcagtagttttctgggctgtatctccttgacattttcaagtacactggctgtcagtttccagggtccagagcttattatttctttttctttgtttgtttatgtggttggttggttggtttggtttggttggtttggttttgctttataaattataattttttaatttttttttgagctcgtcatttctaagaaagacagaacaacatccacaggacacaactacctcctgcttttctcttagctcttgctatagaaggcatagaaagtccatccaaactggggagtactaaccctaccccctaggtcttccatttcttgcatgccccagaaattccaggggacccaagcttagaaattgcagccagcactctttcttgaagcttctcctgaaagctgactcgagcccaagatctgccttcaggcccaagagcagatgccgccatgttgctctcctggttaaaaactgagccatccaaaatcacgagtagcccagggagagggcaggaagaaacgatggggagaacccagcatcccagggagcagttccagccttttctccaaatacgttcatctctgcagccatggacgtcttctgcttgccctttctttttgttgttgctgttgttggttttgtttgtgttttgtttttgaagcacagtctcaggtaacttgggctggcctcaaactcactatgtagctaagaatgaccttgagctcctgatcctcctgcctctactgcccatgtccagagattattggccagcaccaccatgccagttatacagcactgtgggtcaaacccagaacttcacagatgctaggcaagcactctccatcctcagaccccatccttcctcaccacaggtctataacagtcctcctaggagcccacaacaaaaaggtaaaagaagacacgtggcagaagcttgaggttgaaaagcaattccctcatccaaaatatgatgaccgtttggttctcaatgacatcatgctactgaaggtaacaagtttctccctccattccgctcccttgcatttttccttcaggtccccattgctctgagctttccccgccctgcttcaggaaggcactcccttcttatccccccnnnnnnnnnnnnnnnnnnnnnnnctcacacacatgcacgcacgcacgcgcacgcacacacatgcacacacacgctcacacacgcgttcacacatgcaccattggacttggtatcttgccctttccctccctgatcgtctggagctgcctcctactccacggccctcactaagagccccttgttcccttcacagttgaaggagaaagccaacctaaccctaggcgtgggaaccctcccaatctcagccaaatcaaactccatcccacctgggagggtgtgccgggcagttggctggggccgaacaaatgtgaatgaaccaccctcggacactctgcaagaggtgaagatgagaatcttggatccccaagcctgcaaacacttcgaggattttcaccaggaaccccagctgtgtgtgggcaatcccaagaagattcgaaatgtatacaaggtgatgctcttactagtttttttttttcaaaaaccgctgctgggggcattgagtgtagaaggaggcggggcagaagattgtcagttaatcacagtttagggatcacaggcgctaggaaacaaagtatccatcttccattagctgtgcagagaatgtgggttatgtgaggtagctaccccaggaaagaaagatgcagtatcaggctcctcctctgactctagacctaattgcaactccaaggagaaatgggcgggagaggtagaggcattcatgcatttcctctctgtgcctccctaacagggagactctggaggacctctcctgtgtgctgggatagcccaaggcatcgcatcctatgtacttcggaatgcaaagcccccttctgtcttcaccagaatctcccattaccggccctggatcaataagatcttgagggagaattaactctggagcttggagcctgtgattaaatctgaagctggaattgagcaggtcttttgaccatgtgcttgggcctgtcttagttcctgcggaagccctgccagctccctgatctctctgaaggttcttacttgtctcagaaggttcctaaaggtcaataaacctcaataaagacccagattctaga

SEQ ID NO: 598 - DNA, 3035 bp, Cricetulus griseus
  misc_feature (503)..(527): n is a, c, g, or t
  misc_feature (942)..(1013): n is a, c, g, or t
agctgtagagccagatccacgactctcgactctgcgactttatatctttacatggatgagatggcaaccactcagatttccaaagatgaacttgatgaactcaaagaggcctttgcaaaagttgatctcaacagcaatggatacatttgtgactatgaacttcatgagcttttcaaggaagccaatatgccactgccgggatataaagtgagagaaattattcaaaagctcatgctggatggtgacagaaacaaagatgggaagataagtttcaatgaatttgtttatattttccaagaggtaaagagcagtgatattgctaaaaccttccgcaaagccatcaacaggaaagaaggcatttgtgctctgggaggaacttcagagttgtccagtgaaggaacacagcattcgtactcagaggaagaaaaatatgctttcgttaactggataaacaaagctttggaaaatgatcccgattgcagacacgttatacccatgaaccnnnnnnnnnnnnnnnnnnnnnnnnnagttggcgatggaattgtgctctgcaaaatgatcaacctttcagttcctgacacaattgatgagagagcaatcaacaagaagaagcttacacccttcatcattcaggaaaacttgaacttggcactgaactctgcttctgccattgggtgtcatgttgtgaacattggtgccgaagatttgcgggctgggaaaccccatctggttttgggactgctctggcagattattaagattggcttgtttgctgatattgaattaagcaggaatgaagcactggcggctttgcttcgagatggggagactttggaggagcttatgaaattgtctccagaggagcttctgctaagatgggccaactttcatctggaaaactcgggctggcaaaagatcaacaacttcagtgctgacatcaannnnnnnnnnnnnnnnnnnnnnnnnnnnnnnnnnnnnnnnnnnnnnnnnnnnnnnnnnnnnnnnnnnnnnnnagacattaacatgtcaggcttcaatgaaacagatgatttgaagagagccgaaagtatgcttcaacaagcagataaattaggttgcagacagttcgttacccctgctgatgtcgtcagtggaaatcccaaactgaacttagcctttgtagctaacctctttaataaatatccagcactcactaaacctgaaaaccaggacattgactggactctgctagaaggagaaactcgggaagaaaggacctttcgtaactggatgaactctcttggtgtcaaccctcacgtaaaccatctctatgctgacctgcaggatgccctggtcatcttacagctatatgaacgaattaaagttccagtggactggagtaaagttaacaagcctccatacccaaagctgggagccaacatgaaaaagttagaaaactgcaactatgcagttgaattagggaagcatccagctaaattctccctggttggcattggaggacaagacctgaatgatgggaatccaaccttgaccttggctgtagtatggcagctgatgagaagatatactcttaatgttctggaagatcttggagaaggtcagaaagcaaatgatgacatcattgtaaactgggtgaacagaacattgagtgaagctggaaagtcaacttccattcagagttttaaggacaagacgatcagctccagtctggcagttgtggatttaattgatgccatccagccaggctgcattaactatgaccttgttaagagcgggaatcttacagaagatgacaagcacaataatgccaagtatgcagtgtcaatggctagaagaattggagccagagtatatgctctccccgaagaccttgtggaagtaaaacccaagatggtcatgaccgtgtttgcatgtttgatgggcagggggatgaagagagtgtaaaataaccaatctgaatagaaccatccttactcacaggtgcatgattggcaagtcagctattcccaggtgaagtgctcatggcttaaagaattctcagtcatttaaaggacttttagttttgattaacaagactagctcatcatgacagccttcggggaaagacttttagaaacaagcaactcctttcccttccagttggatctgttcagcacacctgaacatgctcacagccggccatctgctctctcctcctagaatactgcccttgacatttcctgatgcttgtgtattacctctctgtgtatcttttcctcttaggctgtccatctcttgagacttgcttagatcggtagatagccatagtattaacttgccattttgctttccaagttcttactggagaactgtggtcagatactatgtggagatgtgagtgtccttgcttactttgtagtgctgaaaatctgctcatgttactggctgtgcagaatatactagaagcttttctcattcttttattcttaaaagcagtatctttttacagtattctttctacatgattatttttttgtacatttaagaatattttgattacggtcaacaagtctgctgatttgttacttttttaaaggggacttcaagtaagtaaaagaaaaagcataaactatagggggaggaaaatggaccctaagtttgttgtatttccccctcacacccaggatcaaatcaaatgaaatactttgtcttcaatgaatcagttcgacacatgcttctttgttttgaacactttatcacaaaactctcatttgatctaaaatgctgttgaatatgacacctttgaggagagagtgggctcagaatttagatgggactcaataagcaaagtatgctaagtgtacaatagatttttaaatttaacgcatctaacaaggagatgtggtcacgaaaaggggaaagtatgtatgtcggacttgatgttctcttcctttgtcaagctttttgctgtagttctcaagatcatatgttaatctaactctgaaaagtgatgtaatctggtagcaacatagtactccaaataaaggcatttgcat

SEQ ID NO: 599 - DNA, 462 bp, Cricetinae gen. sp.
atgggaattggtctttctgctcaaggtgtgaacatgaatagactaccaggttgggataaacattcatatggttaccatggggatgatggacattcattttgttcttctggaactggacaaccatatggaccaacttttacaactggtgatgtcattggctgttgtgttaatcttatcaacaatacctgcttttacacgaagaatggacatagtttaggtattgctttcaccgacttaccgccaaatttgtatcctactgtggggctgcagacaccaggagaagtggttgatgccaattttgggcaacatccttttgtatttgatatagaagactacatgcgggaatggagaaccaaaatacaggcccagatagaccggtttcccattggggatcgagaaggagaatggcagaccatgatacaaaaaatggtttcatcttatttagtccaccatgggtactgt

SEQ ID NO: 600 - DNA, 1588 bp, Cricetulus griseus
cagaaacaggaacgtgcaaccccacaccgttcttctccaggcacctggcacaagtggctggtgagatgcgtgtggtcgtgattggagcgggagtcatcggactgtccactgccctctgcattcatgagcgtttcagccctgtgcagccactgcacatgaagatctacgcagaccgctttaccccattcaccactagtgacgtggctgcgggcttttggcagccctatctctcagaccccaggaaccctcaggaagtggagtggaatcagcaaaccttcgactacctgctgagccatatccattctccaaatgctgaaaaaatgggcttgtccctaatctcaggctacaatctcttcaaagaagaagttccggaccctttctggaggaacacagttctgggatttcggaagctgacccccagagagatggacatattccctgattatggctacggctggttcaacacaagcctgactttagaggggaagagctacctgccatggctgactgagaggttgacagagaggggagtgaagctcttccatcggaaggtggaatcttttgaagaggtggcaagaggaggcgcggatgtgattatcaactgcactggggtgtgggctggagcgctgcaagcagacacctccctgcagcccggccggggccagatcattcaggtggaggccccttggatgaagcattttatcctcacccatgacccacgccttggcatctacaactccccatacatcatcccagggtccaagacagttactctcggaggtgtcttccagctggggaactggaatgaattaaacagtgtccatgaccacaacaccatttggaaaagctgctgtaaactggagcccaccctgaaaaatgcaaaaatcgttggggaactcactggcttccggccggtccggcatcaggttcggctaaaaaaaaagcagcttcattttggatcttcgagtgttgaggtcatccataactatggtcatggaggctacgggctcacaattcactggggttgtgcaatggaggcagccaacctctttgggaaaattctagaagaaaagaagttgtccaggatgcctgcatcccacctctaaggactctagtgaccatcacttgccccttgaggacatcccagtaccctacagccaattaagtgatagtctccttgctgattcttcactccccgctccctggcttccttgggcaaaggtgtgaggtgaggaaatcctggcactctgctcatccgtcacggcctgtccttcccacacatccatctggcaaagcatctgtaggatggatcctggctggtcctaagcccatctatatgagacaggcagcatctaggaccatgtagcaatcctgttctcacaacaggatgactgtactaaagctggttgtactgggtggcagggtctgggctcagttccctaagaggtggtccagaaacttttgcttagaactctgaagagtgattcacgacacacttgctgtctaccagtagtgacgggaggaggggggactcctgccctcagcactccattggtcaatactattaaaacactcttgggatatccct

SEQ ID NO: 601 - DNA, 2208 bp, Cricetulus griseus
cgggtctccatggcggcgccggcagcgggcccggtgttctggaggcggctgctgggcctgctgcctggccggcccgggctggccgcgctcctgggccggctgtccgaccgcctgggcaggagccgggagcgccggcgccggaggtcaccatggctgttactggctcccttgctgtccccaactgttcctcaggtcacctccccaccttgctgcctatgtcccgagggagtgcacaggttccagtggatcagaaacctggtcccagaatttggagtctccagctctcacgtcagggtgctctcctctcctgcagagttcttcgagctcttgaaggggcagataaaaatggccaagaggcgagtcgtgatggcatccctttacctggggacaggacctttggagcaggaactggtggattgtctggaaagttctctggagaagtcactacagtcgaagtttccttccgacctcaaggtctctatcctcctggacttcacccggggctcaagaggtaggaagaactctcgcaccatgctgctcccgctgctgcagaggttcccagagcacgtgcgtgtctccctcttccacacgccaaacctgcgagggctcctccgtctcctcatcccagagcgcttcaacgagaccatcgggctgcagcacatcaaggtgtacctctttgacaacaacgtcgtcttgagtggtgcaaacttgagtgactcctacttcaccaaccgccaggaccgctacgtgttcttacaagactgtgctgagattgcagacttcttcacagagctggtggatgcagtgggggatgtgtccctgcagttgcagggggatgacacggtggacgttgtggatggcatggtgcacccttacaaaggtgaccgggctgcatactgcagagcggctaataagcgggtcatggacgtgatccactcagccaggacccggcaacagttgctgcatgcgcagaccttccacagtgactctctgctgagtcaggaagaggctgcagctgctggagaccggagaccagcacctgacacctggatttaccccctcatccagatgaagccctttgagatacagatagatgagatagtcaccgagaccctgctgacggaagctgagcgaggagctaaggtcttcctcaccactggctacttcaacttgacccaggcctacatggacctggtgctaggcactcgagccgagtatcagatcctcctcgcctcccctgaggtcaatggcttctttggagcgaagggagtggccggcgccatccctgctgcctatgtgcacattgagcggcagttctacggtgaagtgtgtggcctggggcagcaggatcgggtccagcttcaggaatactggcgcacgggatggacctttcatgccaaaggcctctggctgtacctggcagggagcagcctgccctgcctcacgctgattggctctcctaattttgggtacaggtcagttcaccgggacctggaagcccagattgccatcgtgacggagagccgagccctgcagcagcagctccatcaggagcaagagcagctctacttgcgatccagcgtggtgacctctgcgacctttgagcagccaggtcggcaggtgaagctgtgggtgaagatggtaaccccactgatcaagaacttcttctgaggacaggaatggccttgatgaagatgacaggcatggctggtgtgagatccttcagccgtgcttctgcaatgactccggtctgggtgtcccagcgagctcctgtggggacaatgtaactgacggtctgggtgacctacgggaggctgaggcgatgttgggcgtgctgaccatgaataagggagccaccagcagggaggaaggcctggcctccaacctccccaggcttttcagagatgggccagtgaagggggagccccgaagtgttcaggccaggtgccaggggccgaaaatgccaaacatggggtatgaaccaaggactcagaggtgaccgcatgtcgtaatggctctgaggccgcgtctcttcagaggcccatctcagccttctgaatgtcagcggcagaaaactgacggaggctgaagattccagcattgccccttcccgatcgttcccgtgtaatgaatatctaccctgtgtacatagggaataagttatatatataatgtatgtatatgcctatataaacactatctgccctt

SEQ ID NO: 602 - DNA, 234 bp, Cricetulus griseus
ctgccatgggcttcttgctcctggtccttggacttaagatatcctccagcctcgttctcactactcactgtggccagcctcagatccctttaactataagctggggatagtccttcctgctatgggggtggggaagtgagcccatgatatcccatctagcaaatcccatccaaggtcttgttggggtccttgacttgatccatgccctggagctgtggatgcagttacatgagg

SEQ ID NO: 603 - DNA, 2858 bp, Cricetulus griseus
ctagaattcagcggccgctgaattctagccggaagggctcccatggaccggggcatatcggccgttcgcaaagcaatggcgccactgctggagtacgagaggcagctggtgctggaactgctcgacagcgacgggctagtggtgtgcgcccgcgggcttggtgccgaccggctcctctaccatttcctgcggctgcactgccacccggcctgcctggtgctggtgctcaacacgcagccggctgaggaggaatattttatcaatcagttgaagatagaaggagttgaacacctcccccgacgtgtgacaaatgaaatcacaagtaacagtcgctatgaagtgtatacacaaggtggtattatattcgcaacaagtagaatacttgtggttgatttcttgactgatagaataccttcagatttaataaccggcatcctggtgtacagagcacacaggatcatcgagtcctgccaagaagccttcatcctgcgtctcttccgccagaaaaacaagcgtggcttcatcaaagctttcacagacaacgctgtggcttttgacactggtttttgtcatgtggaaagagtgatgaggaacctttttgtgaggaagctctacctgtggccaaggttccatgtagcagtcaactcgttcttggaacaacacaagcctgaagtcgtagagattcacgtgtctatgactcctgccatgctttccatccagacagccatactagacatcttaaatgcgtgtctgaaggaactgaagtgccacaacccatcactagaagtggaagacttgtcactagaaaatgctcttgggaagccgtttgacaagacaatccgccattacttggaccctttatggcaccagcttggagccaagactaaatccttggtacaggatctgaagatactaagaaccctactgcagtatctctctcagtatgattgtgttacatttcttaatcttctggaatctctgagagcaacagagaaggtctttggtcagaattcaggttggcttttcctggatgctagcacctccatgttcgtgaatgctcgtgcacgagtttatcgtgttcccgatgtcaaactgaacaaaaaggccaaaatgtctgagagtgcagaagggcaagaaacaaaaaaggaactggtcctagaaagcaacccaaagtgggaggcattaagtgaagtcctgaaagaaatcgaagcagaaaataaggagagtgaagcccttggtggcccaggccaggtgctgatctgtgcaagcgatgaccggacttgctgccagctgagagactacctgaccgcaggagcagaagccttcctgctgcggctctacaggaaaacctttgagaaggacagcaaagccgaagaagtgtgggtgaatcttagaaagggggacggtccaaagagaaccatgaaatctgacaaaagacccaaagacaccaaaaacaaagagcgtgcctctaccaaaaagggggctcctaaaaggaagaagcgagagctaactctgacgcaagtgatggggactgctgaggagccaccagaggaaggggctgcagaggaagaccagcagagacaagccaccagtagtccagaaggctgcgggggagagattcagcatgaagcttttgatttaaatttgtcatctgactcggcctatggcatcctgaaagagcccctgaccatcatccatccgcttgtggggtgcagcgacccctatgccttgacgcgggtactgcatgaggtggagcccagatacgtggttctgtatgatgcagagctcacctttgtacggcagctggagatctacagggccagcaggccagggaaaccactgagggtttactttcttatatatggaggctccacggaagaacagcgttacctgaccgctcttcgaaaggaaaaggaggcatttgaaaagctcataagggaaaaggctagcatggttgtccctgaagaacgggaaggcagagatgaaaccaacctggacttagcaagaggcacagtgtccacagatgctcccgctgacactcgaaaagctggtggccaggagcataacggcacacaacccagcattgtggtggacatgcgggagtttcggagtgagctaccatccctgatccatcggaggggcatcgacatcgagccagtgactctggaggtgggtgattacatcctgacgcctgagctgtgtgtggagcgcaaaagcgtgagtgacctcatcggctcgctaaatagtggccgcctgtacagccagtgcctagccatgtcacgctactaccggcggccagtactgctcatcgagttcgatgctggtaagcccttctccttggcgccacgcggttccttcttccaggagatgagtagcagcgacgtgagctccaagctcacgctcctcaccctgcacttcccgcgcctgcggctgctctggtgcccctcgcctcatgccacagccgagctgttcgaggagctgaagcagaacaagccacaacctgatgcagccacggccatggccatcactgcagactcggaaacgctgccagagtcggacaagtataaccccggcccccaagacttcgtgctaaagatgcctgggatcaatgccaagaactgtcactccctgatgaatcacgtgaagaacatagcagagctggcctccctgtcccaggagcggctcacgagcatcctggggcatgcgggaaatgccaagcagctgtacgacttcctccacactgcctatgcagacgtggtgtccggaggcagagtgagaaaatgaccgaactcagatcgctgttcattagtatttgcagagcagttcattctttcccagggcttttagggatgggcatt

SEQ ID NO: 604 - DNA, 650 bp, Mesocricetus auratus
cagtaaggtaatgactgccttggttgtgccatgcctaggagtcagtagttcacagctcttctccctgtttcccagttcttagagtctttcctccccttattccttagtgagccctgatccttagggtgatagaagtgtctcatttagctttagcactgaactctcactaatagattccctgagattccataatgtttaaatcaagcaatttcatttgactataagaccctgtgaagttattatcttccactatgaatgggttttgatttttctgacattttctccaactcatttcctctgagaagtgtgtcctcaatccatgcagagtagcctaacttatcttctggagagcatgcctagaagcataaataatactgaactctgttcacgctgtgctcttttctacataggtatacccatgataaagtttaatatgcaatgggaatagcaagatattcacaataacaaagtgtaggtagagtcaggcagatctctgagtttgagcccagcctggtttacagaaagagttccaggacagcctcaaaaacaatacagagaaatcctatcttgaaaagccaaaaaaaattcaatgaataatatacttcaataaaccttagtgctttgaaatttcatcctggttctcagagcta

SEQ ID NO: 605 - DNA, 650 bp, Mesocricetus auratus; identical to SEQ ID NO: 604

SEQ ID NO: 606 - DNA, 361 bp, Mesocricetus auratus
tttcctctgagaagtgtgtcctcaatccatgcagagtagcctaacttatcttctggagagcatgcctagaagcataaataatactgaactctgttcacgctgtgctcttttctacataggtatacccatgataaagtttaatatgcaatgggaatagcaagatattcacaataacaaagtgtaggtagagtcaggcagatctctgagtttgagcccagcctctattgtactttatacttgagaaacagattatgttaagtctactgcatttgtttgtgaacaggtgaacactgaaaataaccttgtgaacgtgtggtgtaatgctttggatttaagccttcctggcactagctcatttgag

SEQ ID NO: 607 - DNA, 360 bp, Mesocricetus auratus
cttatggtcaacctgccctgcagtaccttctggaagtaatcagaaagcacattttgtaagaatagcactacccagagggctcagatttcctaagcagatgagaacaggctcttggggccttattttagcccatatttgttccttgcagaactattcctgcgggagcattgagtgaagggaccaggtggacatgagcaagtcacttctgagatgaagctattccaggctctgctaaacctattttataaaaacaaagttttgaaagagaagaccatgctatatatgcttttttaaaaataggtaagcaatgttatttttttcttcagagatacaggactgatagaagattgtgatgtaata

SEQ ID NO: 608 - DNA, 1701 bp, Cricetulus griseus
  misc_feature (257)..(282): n is a, c, g, or t
  misc_feature (490)..(518): n is a, c, g, or t
  misc_feature (584)..(609): n is a, c, g, or t
  misc_feature (1166)..(1242): n is a, c, g, or t
  misc_feature (1311)..(1333): n is a, c, g, or t
gcccacgcgtccggagatggcgtctcagccgccgccgcccccgaaaccctgggagacccgccgaattcccggggccggctcgggcccggggacgggccccggccccgctttccaatctgctgatttgggccctactttattgacaagacctggacaaccaacacttaccagagtgcccccacctattcttcccaggccatcccagcagacggggagcagcagtgtaaacacttttaggcctgcttacagttcatttnnnnnnnnnnnnnnnnnnnnnnnnnnttcattttatgggagctatagcccttacagttatggatacaatggtctgggctttaaccgcctccgtgtcgatgaccttccacccagcagatttgtccagcaagctgaagaaagcagcagaggtgcatttcagtccattgagagcattgtgcatgcattcgcgtctgtcagcatgatgatggacgccaccttttcagctgtctataannnnnnnnnnnnnnnnnnnnnnnnnnnnnatcacttttcccgcttaaaaatacactttacaaaggttttttccgccttcgcattagttaggactnnnnnnnnnnnnnnnnnnnnnnnnnngtggatgatgggcttaagaagaggctctgagagcgaggacctatgggaggaaagtgaaagaactgtggcctgccttggtgccgaggaccaagcagctaactctgcaaaatcctggccaatattcctgttctttgctgttatccttggtggtccttatctcatctggaaacttctgtctacacacagtgatgaagtaacagacaacatcaactgggcaaatggtgaggacgaccatgtagttgctagagcagagtatgattttaatgccgtgtctgatgaagaaatttctttccgtgctggggatatgctaaatctagctctcaaagaacaacagcccaaagtgcgtggttggcttctggctagtcttgatggtcaaacaacaggactgatacctgcaaattatgtcaaaattctgggtaaaagaagaggcagaaaaacaatagaatcgagtaaaatacccaagcagcaacaatcttttaccaacccaacgttaattaaaggagtcactactgccaactctttggatgaacaggaagctgcctttgaatctgtttttnnnnnnnnnnnnnnnnnnnnnnnnnnnnnnnnnnnnnnnnnnnnnnnnnnnnnnnnnnnnnnnnnnnnnnnnnnnnnatgtttgcttgcaggtgaataatactttagagtacttttaaaaattatttcttacagaaaaattaattnnnnnnnnnnnnnnnnnnnnnnntcatggccgtccaaggcattttgctgctaaaattatttagtcacactagtatgctggtctagtaatctggctacacttgaccatttattggaccatgaggacatttgtttcacctagctttagattatggagattgttgtcagtttcatcttatctaaatccctaagcttattggaacagtaaatttgatgaacactagaatacacaagttgcctcagaagggatcattaatgctttttaaagttctgagttaattgatttgaagtcttcaaaaattgagtgataacatctacttacaagaacaggcaaaaaggctgaatttttataatcctttaagtaaactaaataataaagattttttgatctgt

SEQ ID NO: 609 - DNA, 930 bp, Mesocricetus auratus
gctgtggatggggagcggctgaaacacctgatcgtgaccccctcaggctgtggggagcagaacatgattggcatgacacccacagtcattgcggtacactacctagaccagacagaacagtgggagaagtttggcctgcagaagaggcaagaatccctggagctcatcaagaaagggtacacccagcagctggccttcaaacagcccagctttgcctacgctgccttcaacaaccgaccacccagcacctggctgacagcctacgtggtcaaggtcttctctctggctgccaacctcatcgccatcgactctcaggtcctttgtggggctgtcaaatggctgattctcgagaagcagaagccggacggtgtctttcaggaggatggacccgtgattcaccaagaaatgattggtggattccggaacgccaaagaggccgacgtgtccctcacagccttcgtcctcatcgcactgcaggaagccagggaaatctgtgaggggcagatcaacagccttcccgggagcattaacaaggcaggggagtacatcgaagccagttacctgaacctgcagagaccatacacggtggccattgctgcgtatgccctggccctgatgggaaaactggaggagccttacctcagcaagtttctgaaaacagccacagagcggaaccgctgggaggagcctggccagaagctctacaatgtggaggccacgtcctatgccctcctggccctgctgctgctgaaagacttcgactctgtgcctcctgtggtccgctggctcaatgagcagagatactacggaggcggctacggctccacacaggccaccttcatggtattccaagccttggcccaatatcaaacagacgtccccgaccacaaggacttgaacatggacgtgtccttccacctccccagccgc

SEQ ID NO: 610 - DNA, 4296 bp, Mesocricetus auratus
atggatgtgaccaagaaaaacaagcgagatggcactgaggtcaccgagagaattgtcacggaaatcgtaactacaagactcacatccttaccaccaaaagggagcaccagcaatggatatgctaagacaggctctctcggcggaggaagtcggctagagaaacaaagcctgactcatggcagcagcggctacatcaactcaagtgggagcatccggggcaacgcttccacctccagttacaggagagctcactcaccggcctccaccctgcccaactctccaggctccaccttcgaaaggaaaactcacatgacccgccatggaacctacgaagggagctccagcggcaactcctcccctgagtacccacggaaggaactcgcatcttctgcaaccagagggcgaagccaaacacgagaaagcgaaattcgagttcgactgcagagtgcgtctccatccaccagatggacagaactcgatgaagtcaaacgcttgcttaaggggagccgatctgcaagtgcgagtcccaccaggaacacctccagcacactccccatccccaagaaaggcaccgtggagaccaaaatggtgacagcaagctcccactcagtatcaggaacctatgacacgacagcactggacaccaaccttccctcccacatgtggtcctccaccttgcctgcagggtcctccatggggacctatcacaacaacatgacaacccagagctcatccctcctcaacaccaatgcctactcagcagggtcagtcttcggaatgccaaataacatggcgtcctgctctcccaccctgctccccggactcagcagctgctcctcggtgtttggcatgcaaaacaacctggcccccagctcttcggtcccagcccacggcacaaccaccgctcccacagcatatggcgtgaagaaaaacgtgccacagccacccactgtcaccagcaccggtgtgtccacttctgccacctgcaccaccagcgtccagagtgacgatctcttgcataaagactgcaagttcctgattctggagaaagacaatgtaccctccaagaaggagatggaactcttgatcatgaccaaggacagcgggaaggtcttcactgcctcccctgccagtgtctctacaacttccttttcagaagacaccctgaaaaaggaaaagcaggctgcatatgccgctgacgcatgcctaaaggcagatataaatggagacctaaatactgtgtccacaaagggcaaggccacctccgtagaaaaccataactatgaccgaggcggcggcagtggcggtggagccagaggcggcggtggcagcggtggtggaggcggtggcggaggaacctggggcgctgcgcctgcctggtgcccctgcggctcctgctgcagctggtggaaatggctgctgggcctgctgctcacctggctgctgctgctgggtctgctgtttggcctcattgctctggcggaggaggtgaggaagctgaaagcgcgagtggacgagctggagaggaccagggtgcagtattttgaagacaagacggagagaagtagcaaggaccgtctcctgggtgacatgcccggcgtggggcccggattaggcaaagcagagctggatggccacagccaggaggcgatctggctgtttgtgaggaacaagctgatgacagaacaggaaaacggaaatctccgaggaaaccctggtccaaaaggtgacatgggaagtcaaggccctaaaggagaccgaggccttcctgggaccgcaggaattcctgggcccctgggccaccccggcccagaaggaccaaagggacaaaaaggcagcattggagatcctggcatggaaggacccataggccagagaggactagaaggccccatgggacctcgtggtgaacctgggcctcctgggtctggagagaagggagacagagggattgctggagaacaaggtcctcgaggcctccctggtgtcccaggttctgtgggtcccagaggtcccaatggctctcctggtccacagggacccccaggctctacgggtccccaagggctccgaggtgaagtgggactccctggtgtcaaaggtgacaaaggacttgcggggcccccaggacccaaaggtgaccagggcgagaaaggacccagaggcctcacaggggagcctggcgtgcggggtctacctggagctgtgggtgaacctggagccaaaggcgcaatgggtcccgccggccctgatggacagcaaggccccagaggtgagcaaggcctgacagggatgcctggaacccgaggcctaccaggaccctctggagacccaggaaagccaggtgtcacagggccccaaggaccacagggacttcctggtagccctggccgaccggggactaaaggtgaacctggcgctccaggcagagtcatgactgcagagggatcatcgacaatcactgtccccggacctcctgggcctcccggtgccatgggacccccaggaccttcaggaaccccaggtcctgctggccctgctggtcttccaggacaaacaaaggcccaacgaggagagccgggacttgctggtgactcattcataagcagtggcagctccatctccgaggtcctcgctgcccaaggagttgacttgcggggtcccctcggcccacctggcccacgagggccaccagggccttccatcccaggcccaccaggacccagaggccctccaggggaaggcgtgccaggcccaccgggcctaccaggatctttcctgaccgactcggaaaccttcttctcgggccctccgggtccacctggccccccaggtcccaagggagaccaaggtgatcctggtgtcccaggtactcctggcatccctggcggtcactctcatggagaatcatccagcactacatacaggcagggcccacctggccctccagggccccctgggcctccaggctccttcagcagctctggccaggatatccaacgctacatcgcagagtacatgcagagtgacagcatcaggacctacctctctggagttcagggtcccccaggcccaccaggtcctccagggcctgtcatcaccatcacaggagagactttcgactactcccagctggcaagccaggtggtcagctacttgcggacatcgggctacggtgtcagcctgtcctctgcctcctcagaagatatcctggccatgctgcgacggaatgatgtgtggcagttcctgcgtcagcacctggtgggtcccccaggcccccctgggccaccaggagttggtggagatgggtccctcctgtccttggactatggagagctgagcagacacattctcaactatatgtcaagttctggaatcagctttgggcatcctggcccaccagggccccctggcctgccaggaacatcctatgaggagctgctcaccatgctccgagggtctgactacagggacatcattggacctccaggaccgcctggacccccaggtcctcgaggacccccaggtgtctcagcagccttggccacctatgcagctgaaaacagcgacaacttccgcagcgagctgattggttacctcacaagtcctgatgtccgtagcttcatcattggcccgccaggccccccggggccccagggaccacctggagacagtcacttaagggacaactacagctggggtagcagctcctcagccagacggggcactgcctacagctcttccgtgggcatggggggagccaatggaggctccctgggcgaaggcagaacctttggtacaggagatgggggtccctatggcactgacatcggcccaggaggaggttatggggcagcagccggtggcatatatggcaccgatggcgactcattccgggctggcttcactggagacctggattacaacaagctggcagtgagggtgtctgagagcatgcagcgtcaaggcctactacaagggatggcctacaccgtccagggcccaccaggtgtgcctgggccccagggccctcctggcatcagcaaggttttctctgcctacagcaacgtgacacaggacctcatggacttcttccggacacatggagctattccaggcccacctgggcaaaagggagaggcgggcaccccaggacccaaaggtgacaggggccttgctggacaacgaggtcctcctgggccacctggccctcgagggcagaaaggagacaaaggagacaagggcgaccaagtctacactgggagaaggaggaggagtattgccatcaagccataa

SEQ ID NO: 611 - DNA, 516 bp, Mesocricetus auratus
agtcagaaatccttctacgatgcaagctatgggtcactccatgagaactgcacagataaatttgtatctctgagaacctctgaaacctcaaagatgtccagcttaacctttgaagagagcctagtgatggtggcagcaacatccgacaaagggaagattctgaagaagagacgactgggtttcaatcaggcctttgccgaagatgacctggagaccataacccgcaatttagaagagaccatccaatcagattcagcaccttacgtcttccagagcaatatgagatacaaactgataaggcgagtcatgcaggagttcgtcctgaatgattccctcaatcaaaatatctacctggatgcagaccaagtgcatctcaaagcagcttcgttaaatgacctgcaacatgaagtaaaatttgacatgtatgtctactcgtcagaagacgactctaaatatcctgttactctaaaaatctcgaatactcagctgtttgtgagtgctcagggtgaagaccag

SEQ ID NO: 612 - DNA, 440 bp, Mesocricetus auratus
aggacctcaacaagagcttccggcaggtggtgtcagtcattgtggctgtggagaagctgtggaacacccctgtcccttgcccgtggaccttccaggatgaggacctgagaaccttcttttccttcatctttgaagaagagcccatcttctgtgactcctgggatggtgagctgatcgtggctgatgctcccattcgacagctgcactgcaggctccgagatgaacaacagaaatgcctcgtgctgtctgacccctgtgagctgaaagctctccatctcaacggacagaacataaaccaacaagtggtgttctccatgagctttgtacagggagaaacaagcaacaacaagatacctgtggccctgggcctaaagggaaagaacctgtacctgtcctgtgtcatgaaaggtgacacgcccaccctgcagctggagagtgtg

SEQ ID NO: 613 - DNA, 265 bp, Mesocricetus auratus
ttgctaaccttcaccagctctgctacagctggaccggagaccctctgcggggccgagctggtggacgctcttcaattcgtgtgtggaccgaggggtttttacttcaacaagcccacaggctatggctccagcattcggagggcgcctcagacaggcattgtagatgagtgctgcttccggagctgtgatctgagaaggctggagatgtactgtgcccccctcaagcctacaaaatcagcccgctctatccgtgcccagcgccaca

SEQ ID NO: 614 - DNA, 477 bp, Mesocricetus auratus
ctggtcagcgctgagggggaccccattccagaggaactctatgaaatgctcagtgaccactccatccgctcctttgatgaccttcagcgtctgctgcatggagactccgtagatgaaaatggggctgagctggacctgaacatgacccaagcacactctggaggcaagccagaaagctcatctcgagggaggagaagcctaggttccctggcagccgcagagcccgctgtaatcgctgagtgcaagactcgcacagaggtgttccagatctcgcggaacctcatcgatcgcaccaatgccaacttcctggtgtggccgccatgcgtggaggtgcagcgctgctcgggctgctgcaacaaccgcaacgtgcagtgccgggcctcgcaggtgcagatgcggccggtgcaggtaaggaagattgagattgtgcggaagaagcccgtcttcaagaaggccaccgtgaccctggaggaccac

SEQ ID NO: 615 - DNA, 782 bp, Cricetulus griseus
atgcacgtggataccatctatgatcgcccctctaataccaccactgagatttggaccttgccgaaggtcctgggtgagagatacagtgccgacaaagatgtggtagtcctcaccagtggacgaactgggggcgtggctgaggacatcgcctacatcctcaagcagatgcgcagggccatcgtggtgggagagcggacggagggtggggccctggacctccagaagctgagaataggccagtccaacttcttcctcacagtgcccgtttccaggtccctggggcccctgggtggaggtggccagacatgggaaggcagtggagtgctgccctgcgtggggacacctgcagaacaggccctagaaaaggccttggccattctcaccctgcgccgtgccctgccaggggttgtccttcgactacagaaagccctgcaggactattacactctggtggaccgagtgccgggcctgctacaccacctggctagtatggactactcagccgtggtctctgaggaggacctcgtgacaaagctcaatgctggcttgcaggctgtatccgaggatcctaggctcctggtgagagccactggacccaaagaaagctcatctaggcctgagactgggcctaatgaccccccagaagccactcctgaggtacccaaggaagaagctgcccggagggccctagtagactctgtgtttcaggtatccgtgctgccaggaaatgtgggctacctgcgctttgacagatttgcagacgcctctgtgctgagggcact

SEQ ID NO: 616 - DNA, 1536 bp, Mesocricetus auratus
  misc_feature (388)..(388): n is a, c, g, or t
  misc_feature (426)..(427): n is a, c, g, or t
  misc_feature (685)..(685): n is a, c, g, or t
  misc_feature (702)..(702): n is a, c, g, or t
  misc_feature (995)..(995): n is a, c, g, or t
gtataacctgtcctcaaggctctgtagcctatgggtcctattgctattcactgattttgataccacagacctggtctaatgcagaagtgagtagtgacactcaggattgggaacaatagaaacaagaacttccgggtcaagagtggtgttggattccaatctctgtggtttatttgactgaggtgaacccaatccctcacctacactctaccacttcccagtgggggtttaatattgtttccattctgtccttcaaacagctatcctgccagatgcatttctcaggacacctggcatttcttctcagtactggtgaaattaccttcgtgtcctcccttgtgaagaacagtttgacggcctaccagtacatctggattggactccatgntccctcacatgtgcgatcctatctttgtcttgcttttnnctcatagtgccttttatccctgtggaagattccctgtgacaccccagaaaaagcaaatgggtcatagatctccaatgctggatggcattagagagagggaaatatcagctgtagagataagttctgtggaaatctcagagttcagttgaagtctgtatgcctatggctgacttctaagttttcatgtgagatattggaagatattatcatcagtcttagggagtctgcaaatacaagtgtcagtaaatgctgaacaangaaatcttttgtgtttntcctttatagaatagatttttgttcagtggtttctggagaaacctcaaaagtaccaccatttgtatttatcaggaactgataaaatccagtaaatcccaatttcattccatagtttctgggggtttgtaaataggactgaggtattctgggataatattacaccagaaggctcttggcaactgggtatgaccataccaagtttggtaaagctaggcatgggaccaaatgtttcagtgaaggtatcatgtaatctgtaccacccaatcctttgcactctacagggtacactacncaacggaagtggatggaagtggagcagttccaatgtgctgaccttctataactgggagaggaacccctctattgctgctgaccgtggttattgtgcagttttgtctcagaaatcaggtaagacagagaagaaccacctgtgattaacccatcttcccacatccagtatgacaacctgggcatgacacaggtttgagacatacagtgtggacgtgtggtttgtcatcttctctcatggttgcctatatgtctccttgcaacagtgattatcatgcagaagagatgtcttaagtcaagagcagacactgagtcattctttgtttgagttcacagattcacctgccgcattccctttacctcctatctctctgtaggttttcagaagtggagagattttaattgtgaaaatgagcttccctatatctgcaaattcaaggtctagggcagttctaatttcaacagcttgaaaatattatgaagctcacacggacaaggaagcaagtatgaggattcactcaggaagagcaagctctgcctacaca

SEQ ID NO: 617 - DNA, 2026 bp, Cricetulus longicaudatus
  misc_feature (1420)..(1420): n is a, c, g, or t
  misc_feature (1470)..(1470): n is a, c, g, or t
  misc_feature (1477)..(1477): n is a, c, g, or t
  misc_feature (1714)..(1714): n is a, c, g, or t
  misc_feature (1884)..(1884): n is a, c, g, or t
  misc_feature (1987)..(2026): n is a, c, g, or t
ctctgcgcaaagaagcgtttgtggtttccgaaaagcacggagccctgccaacgcgctcctgccggaggtccggcccaggtggacgaagactcggtttcctggtgagccagcccctctcccctaggcaacccacacacccagagtctgaagatgctgagatcaatgtggaattttctgaaacgtcacaaaaagaaatgcatctttctgggcacagttcttggaggagtatatatcctaggaaaatatggacagaaaaaaattagagaaatacaagaaagagaagctgcagaatacattgcccaagctcggcgacagtaccattttgaaagtaaccagaggacttgcaacatgacagtgctgtccatgctgccaacactaagagaggctttaatgcagcaactcaattctgagagtctaacagctttgttgaaaaacaggccttcaaacaagctggaaatatgggaggacctaaagataataagtttcacaagaagtattgtagctgtatatagcacgtgtatgctggtcgttcttttgcgagtccagttaaacataattggtggatatatttacctggataatgcaacagttggaaaaaatggcactacagttcttgctccaccagatgtacagcagcagtatttgtcaagtattcaacacctccttggagatggcctaacagagttagtcactgtcattaaacaagctgtacagaggattttaggaagtgtttctcttaaacattctttgtcccttttggacttggagcaaaaactaaaagaaattagaattcttgtggagcagcataggtctccttcttggattgataaagatgtatccaagtcttctctgtgccaatacatgatgccagatgaagaaacgccattagcagctcaggcctatgggctttctccaagagatattaccactattaaacttctcaatgagacaagagacatgttggaaagtccagattttagtacagttttgaatacctgtttaaacagaggcttcagtcggctactagacaacatggcagaattctttcggcccactgaacaggatctgcaacatggtaactccataaatagtctgtccagtgtcagcctgcctttagctaagataattcccatagtaaacggacagatccattcagtttgcagtgacacacctagtcattttgtgcaggatcttttgatgatggagcaagtaaaagactttgctgctaacgtgtacgaagcttttagtaccccccaacaactggagaaatgactttcttccttcaagaagagctaggatccatctacattaaaatcatctatacctagagtgacaattgcaaccaaaatgcctaataaaatatattcttaagcaaagtcttatttcataatgaagtagattcatttggcaccttattggnatttttaattcatcagcagtctacttcatcaggtgtatctaactggtgcncaaattncaacatcgggatcattcatgatctgtttcagcctggatagctgatccaaaccaagtagataattttatccatacatgtaatggaatgtgatgtcctttcacacatatctgtcttgaaaagtagatctaggatgtgtggactctgaagatatgtttaatcatgaagtttgctggactctgaagtgagagcaagccggattctctccagtcacgtgatttgtctcacacaccttgacanagggcttatcctctagaaatcagtgcattttgaaacctctgatcagctatttttttcctttgctatttttcttcaatatttatttgcagcattttctaaagctttcttagcaaccctcagaagttgcatatagaattatagtctaatgttatgttcatgttgtttactcncaattattaattacagagtttcatttgtgtataaataattttaataactttgtattgattttgagtacaacaaataacttgttgcaataaactattttcatannnnnnnnnnnnnnnnnnnnnnnnnnnnnnnnnnnnnnnn

SEQ ID NO: 618 - DNA, 2798 bp, Cricetulus longicaudatus
  misc_feature (282)..(302): n is a, c, g, or t
  misc_feature (1735)..(1752): n is a, c, g, or t
  misc_feature (1795)..(1816): n is a, c, g, or t
  misc_feature (2759)..(2798): n is a, c, g, or t
cccttcacaggtggcgtcacgggtcctctgcgccgcgcccgaggtcagcaagcaaggacaggcgcctcccagcctgcagccggagccgggcctcgcagcagctcggggactgcagctcaagccacacgttccttggcccacacctgcctccgagtcacgctctgccctgtgaggtgcagcatttgacaagtcattccccagcccccacaagccacgttcccagcttcggagctaacaatccttagctttgagactccctcccttctgcctccatacataagnnnnnnnnnnnnnnnnnnnnncttaccatagttgattttctcttgtgtaaaattaaatttggagttccgggtgccgtgcagaaagattaagactcagcacccgtttgattcaaaacaagttcatgcttattagtctgttggaaaagtgaatcccagcacacacaggatactatggctgaacacggggctcatatcacaactgcttcggtggtggacgaccagccatctatctttgaggtggtagcacaggacagtttaatgacagcagtgagacccgctcttcagcatgtggtcaaggttcttgcagaatcaaatcctgcacactatggcttcttctggaggtggtttgatgaaatcttcactctgctagactttctgctccagcagcattatctttctagaaccagtgcctcattttctgaacatttttatggcttaaagcggattgtagcagggagctcacagcagcctcagagaccagccagtgctggtcttcccaaggagcacctctggaaatccaccatgttccttgttcttctaccctatctgaaagtaaagctggagaagctggcttccagcttgagagaagaggatgaatactctattcaccccccttcctctcactggaaacgattctacagagccttcctggcggcctacccatttgttaacatggcctgggaaggttggtttcttacacaacaacttcgatacatcctaggaaaagctgagcatcactctcccctgctgaaactggctggagttcggctaggtcgactgacagctcaggacatacaagctatagagcatagactgtctgaagccagtgtgatgcaggaccctgtcagaagcgttggtgagaagataaagttagctctgaagaaagctgtgggaggcatcgccttatccctctccaccggcctttctgtgggtgtcttcttcctgcagttccttgattggtggtactcttctgagaaccaggaaaccatcaaatcactgactgctctgcctaccccaccgccacctgtacacctagactacaactctgattctcccctgctacccaaaatgaagacagtgtgccctctgtgtcgtaaaactcgggtgaatgatacagttcttgccacctctggctatgtgttttgttaccgctgtgtgtttaattatgtgaggagtcatcaagcctgtcccatcacaggctatccgacagaagtccagcatctgattaaactctactctccagagaactgaaagaaattagcctattatcacacagctcaagttctgtactgtaaggccacaagactgctgtggtatggcaaacattgatacttccctaattcacaactacagtaattttcagtaactatggattcctttaaaagtatatagccactcggagcgttggtggcacccgtctttaatcccagcaccctggaagcagaagcaggctnnnnnnnnnnnnnnnnnnaccagtctggtctacagagcgagtgccaggataggctccaaannnnnnnnnnnnnnnnnnnnnngggggagggggagaaggatatagccacttgatcctaatgttttgatttgctctctagcaagctggttaagcaggagaattgggattgcaggtggtgtgagggccagtgtggaggtggattaaagaagaccactaagtgttgcttgtcctcaagagtggggttttcagctgaatgtggtcgtgtcatatctgcactcaggaagcaggattttgagttcaaggacagcttaggccaccatagggagcctgtcaaaaaagtaaaaagataaaagtaaaaagaaagtgagagactatgattaagagggataaaaagctcacaggaaaacccaggtcagaccttatacaacaggtggtttgagaaataggccttctctttaaaaaatatttctttacctgtgaagtgtagaggctttgtcagatggcatacactatgaaatgacttcctctttctagaaatatttagggacattttagagaaacaaccccttccatataccagacttactaacatttgattatcaaattaacaaatgctaattgtcagcatttggagattccttcatgagccatacctgtctctcttgggaaacaggttaaagaaaaatagggtttgttaatggggatgagtctggaaatttcaatgtgaatgaaagctagcaagcaatgatgagatgtacgaaaatacttatctaatgtttaccaaatgcttatctaatgaacatttaatgaggagcaaaagctttctacttgctcttatgagttttctcaattgacagtttgctcaattgacatgaatcacccagggtattatgaaagtttctatgaaacatttaagtaaattttaacaatacatgattctgggaaagaactgttcatgctggcacgattatgtggaaactcaaaagattactccaggggtttaaaataaattttcagatcacctnnnnnnnnnnnnnnnnnnnnnnnnnnnnnnnnnnnnnnnn

SEQ ID NO: 619 - DNA, 882 bp, Mesocricetus auratus
agtccatcttgccccggcagtatctggctgggccaccatggacctggggcttgcaggtcggcgggcgctggtcaccggagcaggcaaaggcatcgggcgcagcactgtgctggcgctgcaggcggctggtgcacatgttgtggccgtgagccggacacaagcggaccttgacagcctggttagcgagtgtcctggcgtggagactgtgtgtgtggacctggccgactgggaggccacagagcaggccctaagcagtgtgggaccggtggacctgctggtaaacaatgccgccgtggccctgttgcagcccttcctggaggtcaccaaggaggcctttgacatgtccttcaatgtgaatcttcgggctgtcatccaggtgtctcagattgtggccaggggcatgatagctcggggagctccgggggccatcgtgaacgtctccagccaggcctcccagcgtgcactggccaaccacagcgtctactgttccaccaagggtgctctggacatgctgaccaagatgatggcccttgagctggggccccacaagatccgcgtgaatgcagtaaaccccacagtagtgatgacgtctatgggccggaccaactggagtgacccccacaaggccaaggttatgctggatcgaatcccacttggcaagtttgctgaggtggagaacgtggtggacgccatcctcttcctgctgagccaccgaagtaacatgaccactggctccactttgcccgtggatgggggcttcctggttacctgagcccccctccgttaactctgcccagccataggctcagaacattgcgcatccaccccacccccccagtccctccaataaacatctgtccagcctatgtgctgactcttcag

SEQ ID NO: 620 - DNA, 832 bp, Mesocricetus auratus
  misc_feature (357)..(381): n is a, c, g, or t
cacgcaagaggcttactcctctgtccctgtcagcaacatgaactccggcctgggctccatgaactccatgaacacttacatgaccatgaacaccatgaccacgagcgggaatatgaccccggcttccttcaacatgtcctacgccaacccgggcctaggggccggcctgagtccgggtgctgtggccggcatgcccgggggctccgcaggcgccatgaacagcatgacggcggcaggtgtcacggccatgggtgcagcgttgagcccgggaggcatgggctccatgggcgcgcagcccgcagcctctatgaacggcctggggccctacgcggccgccatgaacccgtgcatgagccnnnnnnnnnnnnnnnnnnnnnnnnngggccgcagccgcgctgggggcggcggcgacgccaagacgttcaagcgcagctacccgcacgccaagccaccctactcctacatctcgctcatcaccatggccatccagcaggcgcccagcaagatgctcacgctgagcgagatctaccagtggatcatggacctcttcccctattaccgtcaaaaccagcagcgctggcagaactccatccgccactcgctgtctttcaacgactgtttcgtcaaggtggcgcgatccccggacaagcccggcaagggctcctactggacgctgcacccggactccggcaacatgttcgagaacggatgctacttgcgccgccaaaagcgcttcaagtgtgagaagcagccgggggccgtaggcggaagcgggggcaccggctccaagggtggccccgaaagtcgcaaggacccctcgggaacaggtaac

SEQ ID NO: 621 - DNA, 521 bp, Mesocricetus auratus
tcggtaccagggacccgatctttgtaggtgcgagcgtctttgtgcggcggacaaatggggagaggacgaggaggtgggcactccggcgacgtaagatccacatcagctcaactgcaactcgctttcgcacaggccgcccgctcacttcccgcggaggcgctgccgggcgccgcgcttcgcggccgcctcctgtccccggcgctgccccctcccgccgcgccgccgccaccgccaccgccgcgcacgccgcgccccgcagcgcccggcttcctcctcgctggggtggcgctgggccctcgagcgctcgggtgaccgcagcggccccgcgcccctcccccgctgccgcgcgcagcgcacccgcccgtcgctccgcacagggttggatggttgtgccgggcagggtgggttcaggatgttagggactgtgaagatggaagggcatgagagcagcgactggaacaggtactacgccgacacgcaagaggcctactcctctgtccctgtcagcaacatgaactccg

SEQ ID NO: 622 - DNA, 2441 bp, Mesocricetus auratus
  misc_feature (1102)..(1178): n is a, c, g, or t
  misc_feature (2051)..(2068): n is a, c, g, or t
tcggagaataggatgcaggtccacgtcgggctgacgttgctgctctgcgcggtgctcctgagctcggcgaccgcgtcctccgatgacgaaagtaaccaggacgaatccatagattccaagagttctttgccagccgatgagtcggtgaaggaccactccaccacaggcagagtggttgctggccagatatttgttgattctgaggacccagaggtggagtcccctcttcaggaagaggaagagagctccaagactgaggaggaagtcagtgtcggtgaagaaatcagctttgtagaatctccaagtctaagcagcaagagctatgaagaagcaaagagagcccggaaaccagttttgaccgccattgagggtacggcgcacggagagccctgccacttccctttccttttcctggataaggagtatgacgagtgcacgtcagacgggaggcaagacggcaggctgtggtgtgccacaacctatgactacaagacagatgagaagtggggcttctgcgaaactgaagaagatgctgcaaaaagacggcagatgcaggaagcagaaatgatttaccaggctgggatgaagatactgaatgggagcaacagaaagagccaaaagagagaagcatatcggtatcttcaaaaggcagcaggcatgaatcacaccaaagccctggagagagtatcctacgctctcttatttggtgattacctcacacagaatatccaggcggctaaagagatgtttgagaaactgaccgaggaaggttctcccaaaggacaaactgctcttggctttctctacgtctctggactcggtgttaattcaagtcaggcaaaggctcttgtatattatacttttggagcccttggaggcaatctgatagcccatatggttttgggttaccggtactgggctggcatcggagtcctccagagttgtgagtcggtactgacccattatcgtcttgttgccaaccatgttgctagcgatatctccctgaccggaggctcagtagtccagagaatacggctgcctgatgaagtggaaaacccagggatgaacagtgggatgctggaagaggatttgattcagtatnnnnnnnnnnnnnnnnnnnnnnnnnnnnnnnnnnnnnnnnnnnnnnnnnnnnnnnnnnnnnnnnnnnnnnnnnnnnnagtagaacagaatcaccagagagcatttgactacttcaacttagcagcaaatgctggcaattcacatgcgatggccttcctgggaaagatgtattctgaaggaagcgacatcgtccctcagagtaatgagacagcacttcactacttcaagaaagccgcggacatgggcaaccccgtgggacagagcgggcttggaatggcctacctctatggaaggggaattcaagttaattatgacctggcactcaagtatttccagaaagctgctgagcaaggctgggtggatgggcagctgcagcttggctctatgtactacaatggcattggagtcaagagagattataagcaggccttgaagtattttaatttagcatctcaaggaggccatatcctggctttctataacctggcacagatgcacgccagcggcacaggggtgatgaggtcctgtcacactgcggtggagttgtttaagaacgtgtgtgagcgaggccgctggtcggagaggctcatgactgcctacaacagctataaagacggggactacaatgctgcagtggtccagtacctcctgctggccgaacagggctacgaagtggcacagagcaacgcagccttcatccttgaccagagagaagcaaccattgtaggtgagaatgagacttaccccagagctttgctgcattggaacagggccgcctctcaaggttataccgtggctagaattaaacttggagactaccatttctatgggtttggcactgatgtggattacgagactgcttttattcattaccgactggcttcggagcaacaacacagtgcccaagctatgtttaacctgggctacatgcatgagaagggcctaggcannnnnnnnnnnnnnnnnnttgcaaaacgcttttatgacatggcagccgaggctagcccagatgcacaagttcctgtcttccttgcactctgcaaattgggtgtcgtctatttcttacagtacatacgggaagcaaatatccgagacatattcacccaactggatatggaccagcttctgggacccgagtgggacctttacctcatgaccatcatcgcgctcctgttgggtacggtcatagcttacagacagagacagcaccaggatgtgccggtacccaggcccccagggccatggccagctcctccccagcaggaaggaccaccagagcagcagccaccacagtagcagccacacacccgcctgggtccgtgacctctagggagctgctt

SEQ ID NO: 623 - DNA, 355 bp, Cricetulus griseus
actcggacactgaagtcagagaggacaccagcaacaaaaggtgaccaggagcctccaggatgtctgagctggagaaggccatggttgccctcattgatatcttccatcagtattcaggacgggagggtgacaagcacaagctgaagaaatcagaactcaaggagctcatcaacaatgagctctcccacttcctggaggaaatcaaagagcaggaagttgtggacaaagtcatggaaacactggatgaagatggagatggagagtgtgacttccaggaatttatggccttcgtctccatggtgactacagcctgccatgagttctttgaacaagagtgagacaaaaaaaaaaaaag

SEQ ID NO: 624 - DNA, 1275 bp, Mesocricetus auratus
  misc_feature (389)..(407): n is a, c, g, or t
  misc_feature (457)..(476): n is a, c, g, or t
atgcagaaagccacctactacgacaacacggcagctgcgctcttcggaggctactcctcgtaccctggcagcaatggtttcggctacgacgggcctccccagcccccctttcaggccgctacgcacctggagggtgactaccagcgctcagcgtgctccctgcagtccctgggcaatgccgctccacatgccaagagcaaggagctcaacggcagctgcatgaggcccggcctggccccagagcccctgcccgccccgccgggctcacccccacccagcgccgcacctaccagtaccactagcaacagcaataacgggggcgggccgagcaaaagcggcccccccaagtgcggtccgggctccaactctaccctcaccaaacagatatnnnnnnnnnnnnnnnnnnngaggcaaacgtccaagctgaaaaacagctcccccggcacagaaggttgtnnnnnnnnnnnnnnnnnnnntggcagcggcggcagtagcagcggcgggggcggcagtggaggcgggggaggggacaagagccccccggggtcggcggcgtccaagcgggcgcggacggcgtacacaagcgcgcagctggttgagctggagaaagagttccacttcaaccgctacttgtgccggccgcgccgcgtggagatggctaatttgctgaacctcagcgagcgccagatcaagatctggttccagaaccgccgcatgaaatacaagaaagaccagaaggccaaagggctggcctcgtcgtccgggggtccctctccggccggcagccccccgcagcccatgcagtccacggctggcttcatgaacgccttacactccatgacccccagctatgacagcccgtccccgccagccttcggcaaaggccaccagaatgcctacgcgctgccttccaactaccagccccctcttaagggttgcggcgccccacagaagtgccccccaaccccggcgtcggagtatgagccccacgtcctccaagctaacgggggcgcctacgggacgcccaccatgcagggcagtccggtgtatgtgggcgggggtggctacgcggatccgctgccgccccctgccggcccctccctctacggcctcaatcacctttcccaccacccctcggggaacctggactacaacggggcggcccctatgggccccaaccagcatcatggaccctgtgaccctcaccccacatacacagacctctcctctcaccacgcaccgcctcagggtagaatccaagaagcgcccaactga

SEQ ID NO: 625 - DNA, 6680 bp, Mesocricetus auratus
  misc_feature (795)..(840): n is a, c, g, or t
  misc_feature (1939)..(1956): n is a, c, g, or t
  misc_feature (3637)..(3663): n is a, c, g, or t
  misc_feature (4083)..(4135): n is a, c, g, or t
  misc_feature (5666)..(5690): n is a, c, g, or t
  misc_feature (6659)..(6680): n is a, c, g, or t
ggagcagcagaggcctgggactggagatggggacgcgccgggtcaccccgggctgtgcagcggggctgctcgtgctgttgctgcgatgcttcgggcttgcggagccttccgagttctcaggtgatgattcgttcaccatcgtcaatgaaaacacgggcaagtgcatccagccgctgtctgactggatagtggcgcaggactgcagtgaaaccagaagcatgctctggaagtgggtgtcgcagcaccgtctctttcacttggaatcccaaaagtgccttggcctagacatgaccaaggctgccgataacctgcggatgttccgctgcgactccagcgtcttgctgtggtggaagtgcgagcaccactccctgtacagtgctgcccactacaggctggatctgaaggacgggtatgccacagccagtacaaactcatctgccgtctggaagaagggaggctccaaggagaacctttgtgaccagccttaccgtgagatatataccagagatgggaactcctatgggagaccttgcgaatttccattcttagttggtgagacatggcaccatgactgtattcgtgatgaaaatcatagtgggccctggtgtgccactaccttaaattatgaatatgatcaaaagtggggcatctgcttaaaaccagaaagtggctgtgagggtaactgggaaaagaatgagcagattggaagttgctaccaatttaacaaccaggaagttctttcctggaaagaagcttatgtttcctgtcagaaccagggagctgacttactgagtnnnnnnnnnnnnnnnnnnnnnnnnnnnnnnnnnnnnnnnnnnnnnnttgctagaattgtttggattggactgaatcagctctattctgctagaggttgggaatggtcagacttcaagccattaaaatttcttaactgggatccaggcacacccagtgcacctatgataggcggatcgagctgtgcccggatggacacagagacggggctgtggcgaagtgtgtcctgtgaggctcagcagccctacgtctgcaagaagccattgaacaacaccgtggagctcccagatgtttggacatactcagatacccattgtgatgtgggctggctgccacagaatggattttgctatctgctggcaaatgaaagtggtccctgggatgctgcgcatttgaaatgcaaagccttcggaggtgacctcatcagcattcattccttagcagatgttgaggtggttgtcacaaaactccatagtggggatgtcaaagaagaaatatggacaggcctcaggaacgtaaacagccccactttgttccagtggtcagatggtacggaagttactctaacatactggaatgagaatgagcccagcgttccctacaataagactcccaactgtgtttcctacttaggaaagttaggccagtggaaagtccagtcctgtgaaaagaaactcagatatgtatgcaagaaaaagggagagataactaatgatacaagatctgacaagctgtgtcctcccgatgagggctggaagagacatggagaaacctgttacaaaatttatgagaacgaggtccctttcggaacgaactgcaatctaaccatcactagcaggtttgaacaggaattcttgaatgacatgatgaagaagtatgacaagtccttccaaaagtacttctggaccggcctgagagatgccgatgcccgaggagagtacagctgggccgccactggtgggctaaagcaggctatgaccttttccaactggaattttctccagccagcatccccaggtgggtgcgtggctatgtctactggaaagacccttggcaggtgggaagtgaaaagctgcagaagtttcagagcactttcaatatgcaagaagatgagtggaccccaggagcccgaggaagcaaccccaannnnnnnnnnnnnnnnnnccgaaggctggcacactttcccctccaacctttcttgttataaggtgttccacatagaaagaactgtaagaaggaggacctgggaagaggctgaaagattctgccaagcgcttggagcacacctccccagcttcagccacatgaatgaagtaaaggagttcctgcatttgttacaggaccagttcagtgtgcagcgttggttgtggataggtctgaataaaagaagccctgatttacaagggtcctggcaatggagtgatcgtacaccagtgtccactgttatcatgcatcgggagttccaacaggattatgacgtcagagactgtgctgccatcaaggtacttgacaatgcttggctaagaacctggtattactatgatgagagaaaatttggttatttgaagcctttttcttgtgatgcaaaacttgactgggtgtgccagattccaaaaggtagcactctccaagtaccagactggtacaatccagagcgcactggaatccacggacccccggttataattgatggcagtgaatactggtttgttgaggaaccccgcttaaactacgaagaagccgtcctgtactgtgctagcaaccacagctttcttgccacgataacaactttcacaaaactaaaagctatcagaggcaagatggaaaatctatctggtgaagagcagaagtggtgggtgaaagcgaatgcgaatccaatcgatcattactttctgaggacgcgacccttatggcaccgtttttccatgctgcttgatgaagaatgcttgcaaatgtcagccaaaatgtggcaccttgacttaaacaaacgagcagactgtaatgacaagttgccgttcgtctgtgaaaaatataatgtatcttcattagagaaatacagtccagattctgcagctaaagtgcagtgtactgggaaatggattcctttccagaataagtgctttctgaaggtcaaatctgagccagttacattttctcaagcaagtagcacttgtcatacctatggtggcacccttccttctgtgctgagcaagagcgaacaagattttattatatccttgcttccggaaatggaaacaagtttgtggattggtctgcgctggactgcctatgatagaataagcaaatggacagatggcagaaacctgacgtacagcaactttcacccattgctggttggtcggaggctgagcatagcagcatattttattgacgaagagtctcactaccactgtgccctgatgctcaatctcagaaagtcaccactcactgggacctggaattttacctcctgctccgaacgccattccctgtctctctgtcagaagtactcagaaaatgaagacggacggccctgggagactaattcggaaactgtaaaatatctaaataacctgtacaagatcatctcgaagcctctgacgtggcatggtgctctgaaggagtgtctgaacgagaacatgcggctggtgagcatcacagacccttaccagcaagccttcctctccgtgcaggccaccctgcgcaacacctccttctggatcggactctccagtcaagacgatgaactgaactttggttggtcagatgggacatatcttcattttagtaactgggctgtcgacaatgagaagcttgatgactgtgtgatcttagacacggatgnnnnnnnnnnnnnnnnnnnnnnnnnnnagaaccagcctggggccatttgctactacccaggaaatgagacttcaaaggaggtcagaccgttgaacagtgctaaatgcccatctcctgcgcagagtactccgtgggtcccatttcagaactcgtgctacaacttcatgataacgaagaatagacataggacaatcacacagaaggaagtacactccttatgccagaaactgcattcaaaagcacagattctgagtattcgaaatgaagaggagaataactttgtggttgagcagcttctgtacttcaattatattgcttcgtgggtcatgctaggagtaacgtatgaaaacaattctttgatgtggtttgataagactgcattgtcgtacacacactggagagcaggaagaccagccgtgaaaaatcacaaatttttggctggtctannnnnnnnnnnnnnnnnnnnnnnnnnnnnnnnnnnnnnnnnnnnnnnnnnnnntcatttttaccaacacagcattttagcctgtaaaatcgaaatggttgactacaaggaagaacgcaatagcacactaccagagttcattccgtatgaggacggcgtctataatgttattcagaaaagggtgacgtggtaccaggccttgagcatgtgttctcagagtggaagacatttagcaagtgtccacaacccaaaggagcagctctttctggaagacattgtgaaccgtgatggattccctctctgggttgggctctcgagtcatgatggcagtgaatcaagtttcgaatggtccgacggcagtgcgtttgactacatcccttggaagagccaagggtctcctggaaactgtgtcatcctagatccgaaaggaacttggaaacatgaaaattgtctatctgttaaggatggtgccatttgttacaagcctacaaaatttaaagagctggcctctcatgcacactcatcaaaatgcccattggtgaaaaggaatggctcccagtgggtccagtatggggaccactgttactcggctgagcaggcattacacaccttcgcagaggccaaaaaattgtgccaggaacttgatcattccgcaactgttgtcaccatagcagatgaaaatgagaataaatttgtgagcaggttgatgagagagaattataacataactatgagagtttggcttggattatctcaacattcactcgatcagtcttggagttggttagatggactagatgtgacatttgtcaagtgggaaaataaaagtaagaatggtgatggaaaatgtagcattttaatagcttcaaatgaaacctggaaaaaagttgaatgttcacgtggttatgcaagagtcgtctgcaaagttcctctgagcccggattacagaggcatcgccgtcctgttcgctgtgctcagcgttttagcgctcatcagcggactcatttggttcctcgtgcaaagaaaccatttccgctggacaggcttgtcttctgttcggtatgaacacggagccaacgaagacgaggtgatgctcccttctttccacgactagcttcttccaagagtttgttcattggcaacaacgttccagaagaaagatgagccgcttaaccttgtcccacaagcagtgtttactctgtttcaaagtagaagtcttttagggacgcttctagttggtgagttgctctgctgaggcgggtgtcacttgaccctctaaccgccatgctaattactccaggtgcctgagcagagaggacttaaaaccaaaatggatgttcagattgtttacagggggatacatttaactaatgtgaattttttttctctaagaatgcagttgctaaatagataggtgcatatcttaatagcgttttaacaacttcattgaaaattaaaattgtcaatactactatacgccacatcaaccctttagtttagatgagcattgggccaaatgcaaagttagtacctcaggcacaaactcaactacaagtcagatcgatgatgtttcaaaataggcttnnnnnnnnnnnnnnnnnnnnnnnnnaggcatgctttttacacagaaaatggggcctcctggaagatgtttcttatattatttcaaagatatctataccaatattaattagttgtaatgttttctatttatatacttgtattcagtggggttttttttatcttttgaggaaacagagtttaatgtttcgtaaagtgtggggttgcgactgttaaattgactaggcgtgttgtatcagcatgtcttctgtttgatgattttcttttttacaaggacccaactacagatgagatttaaacttttacagtttttatatttcacacagcacatcaacttttgatgaatgttattttgtaacctttttagcaaagcaaaacataaaagcagtctttgaatggtggtgtttgctaactttgtatttgtaaaatgaaagcttctaagaccttgaaacttgaaactttgtcattaatgtagaaatatttaaaatctaaatgactaggggaacattattttgtggatgtaatttccattttaagacccagaatatattcttataagtcgtgtccactaaataggatgacacttttattcagtgtttaattcatatttatattttagaatatttttgtacaagatacagatttattttgtttgaggtgtttatactatcataaagttgtaaataattttctaagactgttttaatatggtccacaaatgtcctaaatatttttattgaggcatcttagaaataaccattcagtttcttcaaagacctaaacgaatgcattgtgaccacagctgtgtatatggctgatgccatggtaaagttatcttgccttttaaaagtggtggagttgatcagtgcatgcaaaagcatctctgaattgattgtataccatgcctaatatgacgagaaagtgcccagctgttgcaaggtgaggtgttaaagattctgcaagcactgtctagagaataaattcctgtatctctgannnnnnnnnnnnnnnnnnnnnn

SEQ ID NO: 626 - DNA, 1812 bp, Cricetulus griseus
  misc_feature (664)..(688): n is a, c, g, or t
  misc_feature (861)..(884): n is a, c, g, or t
atggcaatgagggagctggtggagggcgaatgtgggggtgccaacccgctcatgaagctggccactcacttcacccaggacaaggcccttcggcaggagggactgaggcctggcccctggcccccgggagcctcagctgcagagacggtttccaagcctttgggagtaggttctgaagatgagttggtggcagaattcctgcaggaccagaatgcaccccttgtatcccgtgcccctcagaccttcaagatggatgacctcttggcagagatgcaggagattgaacagtcaaactttcgccaggctcctcagagagcccctggtgtagcagacttggccttgtctgagaattgggcccaggagtttcttgcggctggagatgctgtggatgtagctcaggattataatgagactgactggtcccaagaattcatcgctgaagtcacagacccattgtctgtgtcccctgcccgatgggctgaggagtatctggagcagtctgaggagaagctgtggttgggagagccggaaggatcatccaccactgatcgatggtatgatgactatcatcccgaggaggatctgcagcacacagccagtgactttgtgtccaaggtggacgaccccaaattggctaactccgagggcacatcagaggcctggnnnnnnnnnnnnnnnnnnnnnnnnnacacgtctgccctggatgtagaatttgaacgagccaagtcagctatagagtctgatgtcgatttctgggacaagttgcaggcagagttggaggagatggcaaaacgggatgctgaggcgcacccctggctttctgactatgatgacctcacatctgcttcctatgacaagggnnnnnnnnnnnnnnnnnnnnnnnncctgcgtgaccaccctcaggctttcgaagaagggcttcgtcggcttgaggagggggacctgcccaatgccgtgctgctttttgaggctgcagtgcagcaggaccctaagcacatggaagcttggcagtatctgggtaccacccaggctgagaatgagcaagagctcctggctatcagtgccctgcggaggtgtctggagctgaagccagataaccggacagcactgatggccctggctgtaagcttcaccaacgagtccctgcagcggcaggcctgcgagaccctgcgagactggctgcgctactcaccggcctacgcccatctggtgactcctggtgaagaaggggcgagtggggcaggactgggtcccagcaagcgtgtcttgggatccctgttgtctgactccctgtttcttgaagtgaaagagctcttcctggcagctgtgcgtctggaccctacatccattgaccctgacgtgcagtgtggcttgggagtcctcttcaacctgagtggggagtacgacaaggctgtggactgttttacggctgccctcagtgttcgtcccaatgactatttgttgtggaacaaacttggggccacactggccaacgggaaccagagtgaagaggcagtggctgcgtaccgtagagcccttgaactacagcctgggtatatccggtcccgctataacctaggcatcagctgcatcaacctcggggctcaccgtgaggctgtggaacactttctggaggccctgaacatgcagaggaagagccggggccctcggggtgaggggggcgccatgtcagagaacatctggagtaccctgcggttggccttgtctatgttaggccagagtgacgcctatggggcagctgatgctcgggatctgtctgccctcctagctatgtttggcctgccccagtga

SEQ ID NO: 627 - DNA, 20447 bp, Cricetulus griseus
  misc_feature (871)..(885): n is a, c, g, or t
  misc_feature (1015)..(1042): n is a, c, g, or t
  misc_feature (2016)..(2032): n is a, c, g, or t
  misc_feature (3040)..(3079): n is a, c, g, or t
  misc_feature (3261)..(3281): n is a, c, g, or t
  misc_feature (3547)..(3561): n is a, c, g, or t
  misc_feature (3640)..(3672): n is a, c, g, or t
  misc_feature (5995)..(6088): n is a, c, g, or t
  misc_feature (6963)..(6981): n is a, c, g, or t
  misc_feature (8509)..(8527): n is a, c, g, or t
  misc_feature (9294)..(9321): n is a, c, g, or t
  misc_feature (9605)..(9641): n is a, c, g, or t
  misc_feature (10518)..(10540): n is a, c, g, or t
  misc_feature (12944)..(12963): n is a, c, g, or t
  misc_feature (13634)..(13652): n is a, c, g, or t
  misc_feature (15412)..(15458): n is a, c, g, or t
  misc_feature (15937)..(15978): n is a, c, g, or t
atctcactagatgccgaaaaagcctttgacaaaatccaacaccccttcatgataaaggttttggagaaatcatggataacaggaacatatctcaacataataaaagcaatatacagcaagccaacagccaatatcaaattaaatggagagaaactcaacgcaattcttataaaatcagggacaagacaaggctgtccactctctccatacctcttcaatattgtccttgaagttttagctagagcactaagacaacaaaaggagatcaagggaatacaaatcagaaatgaagaattcaaactctcactatttgctgatgatatgatagtttacataagtgactggaaaaactctaccagggaactcctagagctgataaacaccttcagcaaagtggcaggatacaagataaactaaaaaaaaatctgtagccctactatataccaatgacacattggtggagaaggaaaccagagaaacaccctttacaattgccacaaacaacataaaataccttggagtaacactaaccaaataagtgaaagacctatactataagaatttgactctctaaagaaagaaattaaagaagatacccgaaaatggaaagatctcccatgctcttggataggtaggatcaacatggtaaaaatggcaattttgccaagagcaatctacagattcaatgcaacccccatcaaaatcccaatacaattcttcacagaccttgaaataacaattctcaatgttataaggacaaacaaaagacccaggatagccaaaacaaccctgtacaataaaggaacttctggaggcattaccatcccagatttcaagctctattacagagctatagtcctgaagacagctnnnnnnnnnnnnnnnagtacacaggtagaccagtggaatagagttgaaaaccctgatattaccccacacacctatgaacacctgatttttgacaaacaatccaaaattataagatggaacaaagagaacatctttgacaaatggnnnnnnnnnnnnnnnnnnnnnnnnnnnngaagactacagatagacccaagcctatcaccatgcacaaaacttacgtcaaaatggatcaaagacctcaacataaacccagccacactaaccctattagaagtcaaagtgggaaatacccttgaattaattggtataggagactgcttcctgaacattataccagtagcacagacacgaagatcaacaataaatgggacctcatgaaactgagaaacttctgtaaggcaaaggacacagtcagcaagacaaaatagcagcccacagactggaaaaaaatattcaccaatcccacatctgaaagaggggtaatttcaaaaatatacaaagaattcaagaagctagtctccaaaacccaaacaatccaattaaaaagtggggtatagaactaaatagacaattctcaatagaggaatctaaaatggctgaaagacacctaagaaagtgttcaacatccttagccatcagggaaacgcaaatcaaaacaactctgagataccatcttactcctgtcagaatggccaaaatcaaaaacatcaatgacattttatgctggagaggatgtggagaaaggggaacacacctccactgctggtgggagtgccaacttgtacagccactttggaaatcggtatggcgactcctcaagaaaatgggaatcagcctaccacaaggtccagaaattccactcttaggggtacacccaaaagaagcacattcatacaacaaggacatgtgttcaacgatgttcatagcagcattatttgtaatagccagaaactggaagcagcctagatgcccctcaactggagaatggaacgagaaaatgtggtacaattacacaatggattactactcagcagaaaaaaacaagggaatcttgaaatttgtaggaaaatggatggaacttgaagaaaccattctgagagaggtaacccaatcacaaaaagataaacatgatatgtactcactcannnnnnnnnnnnnnnnntagagtaaattattaccagtttacaatccacactgccagagaagttagtatagaaggaggacccttagagagacatacttggtcccctggagaaggggaaagggtcaagatcccctgagcaaatggagagcacaggaagagggagagggagctacaagaatgagaagggaagaagatgaaggatgcagagctcatgagggagcagaaaggttgagtcaggggaataagagaagaaaggatatgtgaaaggtagggttttagttggggggttggcaggggaggacaggagggagaagaaaactgtgattgtcatgtaaaacaattttgtttctagttcaaattaaaaaatcttagttttctagcatatagctagtattcaataatatgttataaataagtcaataaaataattaaatgaaaaaattaggtaggttaaaacttcatcaatggaaactaatgaaatgaagcctacttgtaaaaatagatgagcaaaaccctaaataaaatgcatacgcataagattttaagaatttttttttcactctaaaagatttgccttagactcactttataaagtgcatcctactttgtaacttgaaatataatatcagtagagctcaagcctcatggtttactcccagtaaattatggcttttgggaaataacaacttgtaatttgtagtttttaaaaattactcagttatttggggtacatcataggacctgtagttttcctgcttgccccagaaccacaatgttctgactactccattcatactacagtgttcaacacagaacactaaccagagtgttatgaccactcactttctttgagaaatcccaagacatagtctcagaaaatggtatttaatgcagcattgtccaagcttctatgatacttacactcatctatccattcatccatgcaaccatcaatcaatccacccatccatcaatccatctgatgtctactgctcagctctatgattttccaaggactagagggtnnnnnnnnnnnnnnnnnnnnnnnnnnnnnnnnnnnnnnnncctttgttgtcatgttctgcaattattttcctaattgtatattacctttaatctgtattttaggtacaaggacaataatagtttagtcatctttgttgtggcagaaaacagccatgtatctggaacatatgtatccatgttgttttctggatgaatcattatcacagtaatatattttcttnnnnnnnnnnnnnnnnnnnnnatttttaagtatatctcagggttctatttctctctgctgagagtattatttacatgtcttattgcaaaacttttagtatttaccaacatgattattattcgtgaatccattggctagtggaatgttgcattacgatgataaaatatctgttaataatttttcataactgatttccctaggtgtataccacccaaaacaaactgcaaacatgtatcattaccagactactaaaagctagaagcatgttacttgttttgttcttgctnnnnnnnnnnnnnnngagaattaaaatttgaaatatccaaactccaaggttgaaggtgaggttaccagcatgtaactgaagctgcaacagtgcnnnnnnnnnnnnnnnnnnnnnnnnnnnnnnnnncacactctcgtgagatcatctttcagcctcttgtgcctggtgttcaaaattcatctaccaaagaggagcttcaaagctgctgaggttaggggatgtatgatactgtccatttataggaaataatatatttgttttccatctgtcccctggcatacaactcttaagttccttgaaatcccagggatgtcctttgtttgccaatgaaatgactgatggttggaggcccccagtagaataactggtctccagaaagaaagaatcatgattaaaaatttgcaagccttcatcctcactacctcccccctgcccagcctctggagctagaagtcacacttgtttggatcaccaatggataatgattcaagcaataatgctatacaatacaatcaccagaaagagagaaagacaataatcacacaagcttccagagtgctcagcagattcctggaggggtggcaaagccacagagctcaaggggttccactcacctttctggatgccttcagcatgtatctctctcatttggctgtcaagtaacatgtttctctgagttcaattaggcactctagcaaattgagcaaacctcaggaggaggctgtaggaaacctcaatttgctatgggttgacaggaattatagatcacaacctggacttgtgtctagcttctgaagagggcaatagaggacaactttacaggatttagctgtcatctaggaggtctgactcaaactccagggcagtgtcagaactgaactgaattataggatacttcattgtctgctagaaaactgactgctggaaatgtagactggaactcccatgtctatggtgtccaaagtattttgctgagtcctgtgtgacatcaggaaaacacatttgtttctcttctctccacaggagcacatgaggataaaagggagtaaatttgaacacagatcaccattctgcatgagtgactgtcattttcaggtcatttctatcttaagatcctctcaggaagcaagattcagtttggaccataactaactataacagctacacttcacagtatctcttggttgttttctctttacaactgtttttttgtttcctatttatttatactgacatgaaacttgctatgtagagcagtctgcataaacattcttgtttttattgaaattaacacataactttgttctgttttatctgaataagtgaatagttaaatatatgaatattcaagtggctttgtttattataagtgggtaaacgtgtcaacaaaaagggcaattctatcactatctattctaatagattgaataattataatgtgatttatactaagagttggggcattataaaacaggataaaactctcttaagttaaaaacagaaacacaaagtgataaagaaaaggaacatgtgattgtccaaacagaagaatctatctatgagttgcttgtatcagacatgtaactacatctctttttgtatttttatatctgtatctataccttatacaccgtgcaacttctcctctgtaaagttgaaaaaaattaaaagattgaactgctctccatctccttatcataattccttattttttttgtttatgtactttaaactgctatggtaccaaagactggttgaattgaactgaaaaccacagtcataatataatactttgaattccaagtagaaacactgatacaggcaagaaatataaatagtctgcatggttttctgctgtgaagacttttaatttgataactaccaataaatgtttgcacatttaacataagaatttttaaatgtttacaaacttttgacatgtggaagaacatatatatcttcacatatatatcttcacaaatgctgagtgctatgaatcatgggaaatttcaaaaggccagcagggtgtcagattcttcaatgggttccttcctgtgtcctgttttcccgagtattaatgtatttcactctaggaagccctgtattttccttcaattctgcctcgctaataattaattcattttgcttacactgcagccagcttcaaatcatggtctccatttcttggtaatagattttgccacaggcaatgtgctgagccataacctcaattacagcttacaggggaggagactgcacttgatttctgttggaggtgctattttgttttaactgaaattgtacagaggtgataggggaacatcactgtagtgggaaacagtgaaccccacacgatactgatcatatgtagaatttagctctgcctatcatagcagtatccactgatataaaacaactggtaagagatggctagttaaataattaaacnnnnnnnnnnnnnnnnnnnnnnnnnnnnnnnnnnnnnnnnnnnnnnnnnnnnnnnnnnnnnnnnnnnnnnnnnnnnnnnnnnnnnnnnnnnnnnattttttctttcatggggggtacagcagggatgagggagaggatggggaaccaggagatgaacagaattggggtgcatgatatgaaactcccaaagactcaataaagaaatttagaaattttaacccaaataagtttgtgcatatactaataaactgttaaaaccatttacctcttggttgcttgcttattttattttgtattaattcattaagtagtatgcatgattgtcttgcctacatgtaaatctggctgccacttgcagacttggtgcccatgaagcccaagaaagagtgtcatatcccttagttctgggattgaactcaggtcctctacaagcacagccagtgctcataactgtgaagtcatcgctccacttacaagtcaggtatttctttagatgtcctgaaagctatgtttcagcaagagaagagacaaagaaactaatatagagacaggcacagaaaaacagagatatccatctgtcaattttataagaatgtcagaagatacaactctatcacttcattcctttattagaggtgtatgtatacagcatgtatcctcattccaaaaacttttgtcaaactttatagttatatgaattcccagagtatgtagtaactgtgactagaaaccgaaaggcacaatagggcatgatgagctaattgaactagtccacatattgatggcatgtgctagggaaactgatggttgtaatgacatatttgcttgtctctgaattccttctttaattacatagcagaagcgaaggtttaacagcagctacaggtgccccaggatctttaattgtcccattaatgaaagtgttaattatgagtaggaaactctattaccatgaagatagctagaagnnnnnnnnnnnnnnnnnnntatacaagtctttctgtcccagtttttaactcagagtctcccagtagtgaattagagccataaaagctacaaaatgccattaagttcagtgtgcccaagaccatggttggtgagatgcccttgctaagcactggaagatatggtgatttcatagaggcatatataattctcctctgtctctgatgttcctggcacttaattgcatacgatacttcgagaccagtgataaagatccactggagcctggaaggtgaaatttaagagagaagtcacaaagatttcatgttctggaaagtcccaagtttaaaacaaaaacaaaaatcttagagaaacaggaggggaagccatcaagagaaagcacaatgatgctgtgttaatgaaatgtctgcatatcagttcctgaggtttcctttctgtttccatagtataagattgaattattataatgatattatactagtagacatcttacagtaatgttctcccagactgattatagtattggtcattggcaattgtgcttagattttccaaaggagatactttaaaaagatacttggtagtcaatgcatacaactgtaactattacactgtatgaaaaatccctggtgtaagaatatgtaagacaaagattaaacaatgagcattttttaatatttccagggaaagtgaaatttgtatgagtaggtgcaaatcaatataaaatgtctataatgtgatcaccataaactttagagaggaaagttggcctacacatgctaaggttcaagaattcaaaggaccaaggcttaggttacatggcagacaaccagtagtttctataggcatcagcccatctatgtactgtggtatcatctcagcatttgttaatgcgggtgaggtacatatcatagtttatcaacagcagtggctgacttgcatggacatagagattaaataattatgactcatagaaaaggtttccaccagcttaatttttgcaataactttaaagggaaagactagtttcaatggaattagaaaattatgtgataagtttcctttgtgtaaacattaattcaagagaaagctcacacatgttgtcaagctgaatcatgagtgaaccagaggactatgaacatgtgtctaccagtgttgactattatggcacatttaattattcaaaacaaccacccaagttgcatcaacttaaaccagaataactgatgtagacagagctctacaagagtaagtaagatgtgactctacagttcaaggcatctcaggtgaaaactggaccaatggctggattaactttcaagtgaaattatgcagatgaccaaaatactcagcaacacaatttatatcttggggcttaatttatttaatctaaagaaaattctaatggatttaattctgagaataatttcccaatggaatcactatatgaaaagaagacctaccataaactcttaatttgtactgtaggatgtaagctcaacagatacaccatgttcggactttagactgggtgctgtattgttttcannnnnnnnnnnnnnnnnnnttagctggtaaaatcaagcaaaataattcatctatgaattcatgaaaaatcaccagtacaagtttaatatgaatttctttatcacaagggttgctctttatactttttatatatctctggaatacctggaattgtgggagcactgatttgaatatattgtctcatagagagaatttgttattttatttatttaaaatttttgccattagcagaggcagggaattttgattctctcctataaagatttttgaaaattcattgcattttcttataaaggaaagacaaaccttaagacatggaggaggaatctcccaggcgccttcctctggctcttgttaccagatgccattcagtgacctcagcaaaggtgcccttgatggaacacttgcccgaactgtcatcctgaacaactgcagttctaaagctttctataccggcatttaatcttttatttagtcacagaaacacaaagtcaccatttttttttaaaactgccaagagaaaattgggggagaagagtgttctctctcctcagctctgaggaaaatgacgtgagataataggaagatgagagcattttttccattaacctcttgaccccataagttaatggctttttgttgcaaactactatatcaacaaacagggctccaagtgagattctaacccaggtagggagggctctgcaactatctagaaaagtgtcctggcgttacatgctgctatctacaaccctaccaagaggccagctgccctatgggctatannnnnnnnnnnnnnnnnnnnnnnnnnnnccttagcaaggagccaaacagcaaaggcatttctcacacataagataaaatccttgaatgcagttgccagccaggaaagctcttcaaagtatgcagatcagctaaaggtatattgtgaggtccacagcttttcaacatagcctcctgtctgccttgaatgcagaagtgtccagaagttacttccatattgaagaaggaaatcaggtactaactatcaaatatagcaaaagagcctaggttcctaacagcactgggttactcatatgagttatggtctgactctnnnnnnnnnnnnnnnnnnnnnnnnnnnnnnnnnnnnnaataggcagcagcctggtattatacttaaatgtcattacccaggaggggaaggcaagaaactcatgaaatgaggtcagactgggccacaaagagagacattctttcaacaagatgataataataatcagaatgaacggcaaccacaaaagacactgcaataagaaatacaaatggtcatatattggtttaaattgcagttttaggaagctttcaccatagcccagtgatagagtatacctctatcattttacaaagtgggggagcagggaactgtgtgggagagacacttcaaagagaactgcctgtatagcacccaccatcctctgccttggcttcaagtcttaggaggaccttgaaatatgactgcatttatattcaggtcagccaaaagaggcattactctgctctgtggaggtttccatgttcacttgaaaagagtgagcagacaccggaattggttggctggatgctacaaacagaatgattagctcagaccagccccttgccttcagagaaatagctgtcattggttcggaatgtcaaaacaaccatcgcatgtatgatttgtgcatctatgtatgtgtgtgtggagggagggcacatgaaaaacagtagggggagagaaaaagagaaattttattttttatatttgtatagtgccatgtagaattgaaaatataattgaggaggcaactaaaatgtaagtattctttcttttttttccaagttgaaaatgcttcttgcaaaatattgtagttgaattttctttctttcttctcagaaaactatgtcagagaacatcccctgcccccaggccccatgttctcatttgtaatgatatactgtatgtaaagttatattactagcacatgcaannnnnnnnnnnnnnnnnnnnnnntgtcacaaaattataactaagagaggctgttacatctactgctctaaggcacagggagtattatttcagcaacaatgaaagcacataataaaggcctttaattttaacgacagcttgagtgcaagctgttagaaaaaccaagtatatgttttcctatccaggtaaccagatctggactctcctccagacagcacccttttccaacttactttggattttaattattcaattcaattcaacaagcatttgcaaatgcccactctatgtgaaggactacagtggattccttagctattgaataccaatacgggcattttggaggtcacagtctagtgagagagaaaaatgcctatttaaacaactttaataaaaggctattatgagaagtactgaaatgaggttaatttaagtgtcatgtacagcagagagggatgtgtgagaagggggctttggagaggcacagtaccatgaatatggaagtggtaaaacatcccagcaaagacacctaacatccaacatcattaactagcaggcaacaatgctgggacatgctaagaggcaagaagtggatagacatgacttcagagacagcaaatgtgaaaagaaaaggaagaaacttgaataaatgctgctgactgattggacataggagtgaggaagaaagtatcctgtgatattctatgtgactgatttagtatgtgttttctcttaattattcagtgtcactgattaagtgagcctaccagtgttacttttcaattgctgtgataaaactccatgactaaggcaacttatagaacaaagggtttatttggacttattgcttcaaagggtaagagtctttcatggtgtggaaatggtaggcatgggagacagagaagccagctgaggtctcatatccttaactgagagcaaaaggcaggaagatcgaagttgaaatggcctaagtctttaaacttgcaaaccctgccttcaatgagatgctttgtccaacaaggttatacctccaaagcctccaccaccaatgtcactaactggggaccaagcattacaatgtcttagattttatgggatatcttgttcaaaccaccatactgaacctctgggtgtatttatgagcagttatatagattaactgaagtgagaaagctgaccttgactgtgagtagcaccatctcatgggctgggatcctggactcattaaaaagtagagagtgagctgagtgttagaattcaacataccctttcacactgtggatacaatggaagcatttgctcaaggatctgctgccaacctttgccagcacagaagactattccctggaactgtaagatcaaggcaaccctttcctccttaaagcacttctgtcatggtatttcattacaggagcaggaaaagaaattaagacagtgatcaagacaaggaaagaaaaagaatggccagagattggcaaaataccctctttcagagtacccctagcaaccttctccctttaactaggtgccaattccttctctttaaaacacctttaacaattcaggtatgaatttatccatggactaatctaccagtgaagtccgatctaccctcatgatctccaaaccctattcccctcatcaacctttggggcatatttcagtttcagactgtaagagggggctaaaggttgaggtccatcttttatgagtactaccacagcggccagctacattaaactctggttgccagagtttgtaaatttctagtgaattgcttaaaaattgacttcctttccttctctacctcatttcctttttctaggaacagctgttccaagaaaggaaaaaaaaaaactgtttctgggaacagctccctaataaactatctaaactcaaatctttaaaaaaaatctcaggatctatttttaaagaatcacaaccaaagacagctagaataggtgatgacaatgtgtaaaaatgcatgtatagaactacatgatgaaggggagaatgcatcaagtcagtgttatcaccatgaagctctaacactttctttgaaaatcatgatcagtgtaaagatagagaaagcaatgctattaagagtagattatggacatcgaagatgatataataatacacacatcagaataagaaatacctttggcagattgaagcaaaagcatcgtttagtgagatggatgtacatttcttaaactggaagctatgcaacattcgaagggaaaggctacacttgaacaaactctacatagcttgtacttctaagatgcacaaacaaatcaaaagaggactacggaagtaatagtaaataatatgatccccttaatagttatgcattattagaaacacaaacattcagaatagttctgttgaattatacaacactccaatggctgtactgggtagnnnnnnnnnnnnnnnnnnnnctcttgcaaactacccttgattggacataggagtgaggaagatgccttccttgactactctggctctcaccaccctacccagattagggaacagatgagcattctgaactggacaacttcgtttgccttgcagcatgacttccttgtagtatgtgttaccatatcctgttttttaaagtggaccataattccccctaaacagaattcctgatggcttgcaaaaagtgccatggaaacctagttttctagggattgagagtggagctcaggaaattctgaaggaatgatcttgagaaaaacatgtgctggaagtgaaggaaggaaaggaaaaatgagcctagacagaagccagtttgaatcactcacctcacggagagctccattggaagtcatcaaaaactgttgtgagggaggtgatcctgtgatgtttgcaattagtctctcagatggaggacatggatataggtgtcctctacagcagtagatactactcagatcactgtaagcacgtaggggagatgtcaccacttaggacaagatacactaatgctagcaggaagacctcatgctgtttcttattcacttatttctttcttgtgttttattgttgaatatatacaatacatttatatataatttatatatattatatcaatattatacatttatgnnnnnnnnnnnnnnnnnnncatcattttatataacactggaatttatgtttagtgatcgatatagcttctaaaaaatgagtactttgaagttatagaacttttctgttgtccccaaacactataaccaatgtataattttattattaacaattccaattataatttggcgccgtttacaaatctgaagtgtatggtgtcttggtttcaatacaccaaaagaagacgattagaggaagaatcaagctgatccaaacactagggaaaacaatattgagagaagaaacctgaacacaaatgctgaaggactgcaatgcacgaagctctgtattttcaaatgatgcccttcacttttctgcctgaatgtacagaagtgcctaaggatactttagaatgatttcctttaagcatgactttttaaacattttagtatttgaattgataaaatgacattatctcagaaatgggtttctgcattctagattctgtgaaaatagtcaaatcagcagcatttgaatagattttgactgactaatctaccctcacgatgctgtgggtactcctaagtctcttcattgctattaatccactggtaattacactatgaatcatggtcattttaactccctcttattatttttctctgcagacaaagagggaagaaagaaaaagggctgcctgtttcaatggaaaacagtgtctcttctctgaagtcctctttaatgttggggacttttgataacaagttctaatttgactagatttttagctttaatattagaaccctgacttagcctcttctgagccttggtttccttctataaaagcaaatacgttacagggctaaattgggggtgaaggaagtcaactggctacttaggagggcctggcccacacacaacaccatgagactgcgggctgctggtgctacttctgaaccataagcacttcaataaaagcaatgtgagtaaatgcagaatagaggaagcacatagatagtcactgtgattattgaagttatgaatatttaaagtagactatctgggggagatagtgagtttctagcaaataaagagaatgtgatgattattaagggttttcaccatcctattattcactgacctactaaatatttagtgtgttaagaggaatttgagaaagtcagattttattttcatcaaatccttatcaataacaatctacaataagaaaattgaattacagtatatacttctgtaggggaagctgtagccacgcctacttggggctggctacaggtgtgcctgaccacgcttgcgagggcgtggtcagggtgacagagcgatacttgcatgggactgcattttctctttcagtttcactttggtacttgctggacagactgctgccacgccggctggctaggttgctctgtaagtaaggcttttccctattaaatacccttatatttctacgactccatattggtaatttcccactatacacttcaacttgaatttcccagttaaattccattttgagtagtagagagcagtggggctattactaggtcactaatcaccttgtgttgccagcttgtcttaagtaccagggtgagggaagggtctgtacagatgggaaagttcaaagacaccttcatggcttatgtatagcagtcagggaaaatacaagtatgatcttggcatgtgaatatgtagctatgtgaaggtcagtacaatctttgtgtgagtgttttgaaaggtaaaaggtacaatgttataagaaggaaaacctgaggatgnnnnnnnnnnnnnnnnnnnnnnnnnnnnnnnnnnnnnnnnnnnnnnnaaaccaatattgagaacagcagattagataaccacaattgggaatttttaaaaataagcaaattaacatagacatactgtgagcagcagattgccctatgtatactctgagcttggaatggagacatctaatgatgattcttgctagaacacatctgatgaaatttttttctcccactcataatcttgtctacaccaaagctgactcttaagcattggggtttgcagtggaatagagcctgtttagtaagataatgttatttttcttgttatgatttcacagaaaaaaatgaatttcagaataagcaacaacaaaacccaatacggtgaattggtagatttcatcctggctcttcttgacttagactggcatgctaggttgggatcctttcaattttcatgtattatttgtgcatgtcatggtgtacatgtgtaggtcagaaggccagcattttggagtcagttctccccctgcccccnnnnnnnnnnnnnnnnnnnnnnnnnnnnnnnnnnnnnnnnnnagggcttggaaggcaggtgcttttcccggctgagtcacctgccagcctaagttctgacttcttgacattccatcactagatacagcacttggattacatgatcttataaggactgttcccacaccatcattcaagtataatggtggatattaggaggaattaaacacctacacaatcagtttttattgactttaagttttcaagcccatgcaaagagaggaaattttaaaggtgcaccccaagtcactttgagttcaccttgtgaagcaaggtgccaagagctctcatatgattctacggtacgtggaaagaactgattgcactaaactcacacctaaagtgtcatcaactccatactttctcctgatagatgagatcctcgtgaactcacacttgatctaggctgagcctttgtcttagtcaagaattctgaacaacttgagcatccattttacagataaggccactcaatgggagagagtggtttaaaacatacacatgaagaaatggagatgggtagaagtagggggtcggggctgggcaatgaaattggtgttgatttaaccttggcttgcctttctaaggcagcagaggtgaaaacacattgtggcagtcagtacttctaccccacagactgcaatcagaaaaatttaaggcacatttgtaatggaatatctttatggtgtacctgttatttaatgtcaacaccaagtgcctcactttgtgcctgactcattggtaatgggaggcagtgaggcctcagataaaccttctttgataatggctgccatttgcaaactttggaaatttgaacaagttactcagaatttgtagggccatttgggggtgggagtcaggtctgatggtgagaagacagctggaaagaatgcaggatggagtggggcacatatgagacctcaagctttgtagatactcagtccattttcagaaactttcctcggccccactgctttgcggttgtagctcaactttcttcaatatacataggtttgtgaatggttcgagttaatgcaaggtatcatatttataacccattttcttctctttggtgaagaaattggaggccaccttgataaaagctgaaactgctttaggtatagagtatatcagtgtgaaaactggcacattccttacattagccatcagacacatctacggtttcaaacaagtttttccttgccttttatgtttgaacagcatattacagaatttcacgcctgggtccactagttacctaataaactatttttcttctttgttctctggcgccaccaaagctcctatttgtgttacttaatatacatcttcttacttgtgtggtctctaagaatccagcaaccttcagacttgtgtcagtttccaggaaagcagtaaaaaaaaataaataaataaattcacagctgttgagactgccatcataatatatcaagacatgaaacagaagcagactctcacccacatcacaggccaagccctgtgctcagacatctttatggggtctcttgcccctgagcaccagcccatacaatagctgaagtctgctcaattgggtattttaaaaataacacagtgaatcaagaaaaatccctggtaactcagcaatcactctgaatatctcaggacaccaccagccacttggaatacaaattaatattcacactttggataaaatgttaaacatatgcatattatgatatacctaataatctaaaacctagggagatgttcagcaaaaatttattcatgtttatgccaaaaggtatgcacaagaatgtttacagactctctataagctagaaattgctagtgtctactaacaggaaaatgaactagtataatcacatagcagaatatgaatagcactaaaaatgaaactacttccataggcaaaacatggaacctcaaatacataacattgactcaaagaactaagatataaatagctatagctatatggatctatttatatggatttcaaaagcaggcagaactaatctaagagccctggacactcttccttgtggaaatggaggtatgtgctgcatctcaacaggctgctggctacaaaacaaaacaaaaaagtgtagttggcaaaatttcaagtccaacactaggcatattcacatcctactaggtgtattacagcctgtagggacatacctgtagccagcactgatataccacacaatcctacaggacaagcagtggttgagagatctagtagaacacttaaggaaatgctccatagacaggctggtaagttaaaactccacaaacataggttgcacaatgctttattgacattaaactttcttaatgccaatgaaaaaggacaaacagctgcagaaagagagtggactacggagaaaactgctgaactgaatcaaccagtatacttcaaagatgtactaacctcggtatggaagcctagacattggggtaggggttttgcatttgtttccacagaagaaaaactttggataccatcaaagttgattctagttgaaagattcaagttgaaaaagacaaacctctcgaaaagaatgagtaacaggtattttactgaagtatatctcataaactggatagaaacctcacaaaggaaagggaagttttttgcttctatcttcacaggagaactcatctccagaagtccaagaacactacatgggtagatgcttaagaagagaagaaagctataaccatcaaacaaaaggaatgtgccatttggtaaactttatagctgtctctcaaaaaactctatttctctttatttttctagtccctattcaagtaaatctatgtttgatttagagttggatctggctttcctcccctaaaatccaagcacgttgtttaactaaactttagagtttttgtattgtatcaagaagccaattggtgtaaaacagaataagagaatttggggactgtctttgtctttcttggctctttccttcaaggtgtacaccatctcataatcattattgttccacgattgccttttccagcatatatacatacatatacaaggaaacatttctctgttagcagttatgtttgagtcccacacagccaatgaagatctgcctgacagcaatccttggacgctccagaaggaaactgggccatacctcctcaactgcactggatccaacttactctgtttcaactgacacttggagcagagctgtactgacttcaatcaagttgaggatttcaacctagatcttcaatcaagcaaatcccatctaacatggactggatataatccattcaagactttcaccatactaacattttcttcccacaagactccacgaggctacccccatcccatttcaacaggaagtaagttggaggatgctatgcccccgtcccccattattgtctattagggtagtataagcctagttgaggataacttactattgtttagggttgtgattggaaggagatgttcaggtttggatacctctttcagatgactttagggtttagctgaaatagacatggttaggatgtgcaatagcggattattatatcttcttgtatttcacttttatgattggtaattttggatactttacactattaagttttaatcctcttttagactaacaggggaattgtagggggacactgtaaccacacctcctaagggctggccacaggtgtgcatattgggtttttaagggggacccccttctctctggcctggctgcctttctgcctctagcacactctggcttgcatttgactgatatctgaataaagatatcttaaccttaaagaccacagaatcatcagctcttataataacagccagtaagtgtttcaaatatgaaaattaaaatacatacatgcttcaagaaaatcttgctacaaaacaaagcaaatcctcaaacattaaggaaagctctatcaggttcagcatgatcacaaattcaagaagaaattccaagcacccattccgatttgaggacagcccttgttccttattcaattaaaaagacactgcagggaacagtggcaatacacagctttcctctctcttacatacatgtggttaagtcctaggagcccaacatcaaggctaccagtctggctggactcctgggactcattgtgactatgatttgtctattggaattatccatgtgatcacagaggtaacacaatctcttgcttgcttttagaattttcaaaggatgaaatgaagacagatgtcttcaaaattccaaagtaagccttaggtttctttgtcccccaccccttttaaaatagtgttaaggatcaaactcagagttacacacagactagacatatgctacaacattaacctatatgcctagactccaagttttgttttttcttaacagaaacatataatcattagtaatcaacactagcaacatggaagaggtttatggaataaaaaataataa

SEQ ID NO: 628 - DNA, 10314 bp, Cricetulus griseus
  misc_feature (3171)..(3232): n is a, c, g, or t
  misc_feature (5653)..(5667): n is a, c, g, or t
  misc_feature (5728)..(5750): n is a, c, g, or t
  misc_feature (5834)..(5850): n is a, c, g, or t
  misc_feature (6347)..(6388): n is a, c, g, or t
  misc_feature (6401)..(6420): n is a, c, g, or t
  misc_feature (6423)..(6435): n is a, c, g, or t
  misc_feature (6550)..(6590): n is a, c, g, or t
  misc_feature (7075)..(7097): n is a, c, g, or t
  misc_feature (7123)..(7140): n is a, c, g, or t
  misc_feature (7224)..(7249): n is a, c, g, or t
  misc_feature (7337)..(7362): n is a, c, g, or t
  misc_feature (7364)..(7380): n is a, c, g, or t
  misc_feature (7406)..(7424): n is a, c, g, or t
  misc_feature (7612)..(7633): n is a, c, g, or t
  misc_feature (7984)..(8009): n is a, c, g, or t
  misc_feature (8540)..(8566): n is a, c, g, or t
  misc_feature (8647)..(8679): n is a, c, g, or t
  misc_feature (9090)..(9113): n is a, c, g, or t
aggacagctaaagctacttagagaccttatctcaaaaccaaaacaaaacctcattgcctgctgggcttggtggtgcacacctgtaatcccagcacttgagagactcaggcaggacgactactaccatttggaggttgcaaagccattaccaggctagctaggattacatagttggactctctcaaaaataacattgggctgaacagatggctctgggttaagagtacactgtgctcttgaaggcctgtattcaagttcattcccagtaagtgtgttcaggaggctcaggcctgaaactcaggtccagggcattggctacctctggccacttcatgaatctgcactcacatgaaactacctacagacacatattgtaagcatattgatgggggatcggatgagatggccagggattctggcacttggaagccaaagaatactgagtgttacagctcagacggaaaggtattctggccatccggagccaaggaatactacagtaaatatagcagcttgcagctctgcttcagggaacagtgtatcagctctgctccagcataagaggctttcccaggctaagttgttacagttggctctggtccctaagagaacagactttgcccagagaaggtcttgcccaaaagtcattcaagagatttattcagagggaagaatccaggagagagcctgccctctggcagggtagcagaggacagccgggtttatattgggcttcttgggggcgggggcccggagttttccagggtggggattggtcagatttcaatccttgagtttaggatggctagctctcctgctcagagattggttagttttctgtacaggtttagggtcagatttgactctggtttcagggccaaagtgtgtttctttcactggttctttttagccttttggctctaattttagggccagggtgtatttctttcactggctctgattccagggacaaagtgcgtgtctttggtcctggtttcagggtcagggtacatttctttggtttgggttgcatggccaaagtgtgttttttggctctgctcagggtgtgtttctttggctggtcctttccccctacacatgcacataattaaaaaataaaaacaaaccttcaaaaatcacaacgaagcaaaaccaaaacctgtgaaaaccatgaaggtgatctcttgtttactaagctttgtattggggcttttgtatttctcacgtgaatcgttttaaaactgatgttacagtgcccgatacttttttttctcctttctttcttcgtagggttgtccgattcccctagctttttgctcaaagagaaaggctgggaagattaccaggggcttcagtcccctgtccctagacttcaggagacatttttctttcccggggtgggctgagggttgggggtggggggcgtgagtggaggtgggggtggggaaatcctttcttggctctctccacagcactacaacccccagcaggcaccgcgcgggccaccctgccacggaggggaaaacctgggttgccgttggttctaaagcagagctgagccagagactctggtgccaggactcgctcccgctaacctagtctcactactctggcccccgagaaggctcacagtcaatccctggcctgcggctggctggtctccccacctcgttgttccgggtttcttttcagtttcccgcgggaaccgactcttgaagagaaccaaccgcggccaagagttttgcagcctggccaaccagagccgcggtgggcggtggcggggacagagtgttgagcttctggtcaccggctgcgtcctgtgggggggtccgctgcccaagtgggcagcctcctagcgtcgtgaggcggcggcgggaccagcatcacccatcagaagacctcttccggtaaccggctcaacctcggcgacaatgtccagccagatcatgtcagccctctcacaaacatcttctagtaccctggacctgtggaaggataagaatgaccggctcgttgaacaggctagggtaagatggttgttgggaccctcgctgtatcctcaagatcccagaaagtgggtttgcaatgatttcatcctagcctaggggaaggagcagaacttggtcgctgtccaaagaacccgaagtgactggaaaatgtgtccctcccttgtctgctacgagcgagaaggactgattcgcgccccccttctaatttcagcagctgactgggggttctcgtctgtctctgaggcgacagcagttggctcaagacacactagaagggtttagggagctcctcctcactttgcaaggtaagaaagagcttccaggaggctcatttgctctccttagcagccaaagatcagcttctcttacgtggttctggggttgaggtgtttattctggggtttaggaagtcatgttttgtctggtgttctatattgtgcggatgatcaaagaaagaaggtcactccaagataaattttaggccctttgcagcaggggaggtccagcctctgatggactgagccttaaacagccctgcaaaggcatatttgttgactgttcaccaaagttgctttttgggtaaaatgcgttcctcatatcaaagcccctgatctagtctttatgctcttttgaaggaaagcctcacacccttgccactttagtcccttattgtgcactgtttgcagtgcccaataattccaggtatgccaaggttttccccaattcctaaggctttatctttaccatcttatggagacaggtccccagtactgtgtacacctgaactaacacaggtggtggacacaggcctgaggctgcttcatgcaggctgctcagtctttgtgaccaaagtcatgcaaaggctgtaaagctctttcagaaaaaacagctctgtagataacaggaaacaatcactgttttcctcaagatctaagtacttctagacaacaactacttcattctgatgtttacctagatacaatggaaaacaactattccattctaatgtttagcctagatatagtggaaaacaactatttattctaatgtttaccctagatacagtgatcagtgattctgctatcttttctccacactgtttaaagcacagaagacacagggatggaattgtctttcaataggtgaattccccctcaccttnnnnnnnnnnnnnnnnnnnnnnnnnnnnnnnnnnnnnnnnnnnnnnnnnnnnnnnnnnnnnngcaacatttgaagaatggattttcaggagattttaagaacttcttgttctttccaagttgtctgagcaaaagatgaattccatattgtagccatcttggttggcatggggttgatctctgggttgttaactatttgggctgtatttcatgggacagcctgtgagaccagcatctgttgctccaggactccctgctgctgttcctgctctccccttggagctgactgtcatctgtaattacataatcctgggggctagcctggcccagggtttcactgaagaccttacccaggatgtccaaaggggcctagagagaggtaaggcctcccatgcctctggcatttccagcctggatttgtggtgagacttgggggtaggggaggagtgagaggcacaaaccttccactgagacagcttttctagttccccgtctgtttttcagaccagatgtattattgtaatctttgggattttatttattatgtacacagtgttgtgcctgcatgtgtgcctgcatgacagaagagggcaccagatctcattacagatggtagtgagccatcatgtggttgctgggtattgaattcagaacctctggaagagcagccagtgctcttaacctctgagccatctctccagccccaatctttgggattttaaagaaaggaaaaaccagagagtgtggggagataagtgatggctgtatgtgtgtgctttacagtgctggagacccagagtcagctggagcccaagttgcagcagggactccaggggctgtggcactctgtgctctctgcctcctccctcctgccaaagctgctacctgccttacactgcctggccagccttcaagctatcttctggatgtgtactgaccacctgggggacctggccttgttgctgcaaaccctaaatggcatccaggtaaccggggaagtgaagatgaacatgcctaccctcctctcttccccatagctgcagtattttacctagggttttacacatgctggacaagcactctaccactgagatatattttctatctcctcctgcccactttttaagaaaacttatttttatgtgtgtaagtgtttgacctacacacacatatgtgggctatgctcatgcctggtacccatggaggtcagaagaggggtcagattccctggagctggggttacaaatagtgagacactacatagatgctgggtcctctgtaagaacaaatgctcttaaccactgagctctctctctagtccatcacccctgccccttcctctctatacacatttttggagacagggtctcactatatagccttagctctcagggtagaccatgctgggttcaaactcacaaagatccacctgcttctgcctcctaagtgctgggattagaggagtacacaaccataacaggtttcctacttcttttttgagacaagctttctgtgtacccaggtcccaaacttaatgcagtcctccttgcctcagcctctccagtgctgagatttacaggtgtgagctaccacacccaggtctcaactttcattgctttttaattggagatagatagaaccttaatgaggtatccagtctagccttgaacttactctgtagccaaggctactcagtagcccaggttcaagatcttgaacctatgatcctttttgccttagcctctagagcagtggttctcaacctgtgtgttgtgacccctttgagccccgaatgaccctttcacggggtcatctaagaccatcagaaacatagatatttacatcatgattcataacagtagcaaaattgcagatatgaagtagcaatgaaataatcttgtggtgggtcatagcattagaaaggttgagaagcactgttgtagagcctgagttgctatgacaacaggcctgcaccaccattctcagcatacagcctcattatatgctgggaaggctgctatgatggttggcaaaacaacaacaaaccagaaacaaagaaacaaagtcagtatttttgagttatcttgctctggttagcttctcattggggggttttcaaaatagcttaataaagccacatcaggataaggctcttgtgactgctaaagctacctcccagcctcagtcctctcatagtaacccagtttttgttccatgtccgcctgggcatatgagagacaggggacttcagtcagcacttcctacgatttttcttgctgtccacatcattgccccatagttatctttctcttataatgggggaacagtaatcaggactcttgggctcaaagactgggtgggatagactgacaggaaaagatgggatgtttataggattagaacctctgactgtcctctctctttccagactgagacctctgaggatctgctactactgataaaatcctggagccctccccctgnnnnnnnnnnnnnnncattgattctgcaggatgctgagggtttgagggatgtccttttgacaacacttgcctgccnnnnnnnnnnnnnnnnnnnnnnnatcccttctttccctaaggggtcctctgggcttatgctctctgtatctccatggagtttctctaggttcttatttcccatcatnnnnnnnnnnnnnnnnncttttctaagaataccatgattgttcccaggcctccaggagctaatcacagggagcctaccccgagcactgagcaggctgcatgaagcagcctcaggcgtgtgtccaccatctgtgttagttcaggtgtacacagcgctggggacctgtctccgtaagatggtaaagataaagccttagggatggggaaaccatggcatcatgctttgtaagggtagctgaggcctgcattttcttttcatacagggaaatccacagagagcactgctctacttgactgcagccttgaaggtgggtacaacctgtgcccttccacttctggaggcgtctagaatatatcggcaactaggagacactgcagcagagctggagagtttagagctgctggttgaggtgaggagcttccaggtggagacagcttgtggaggactgctcgtgtgcttgtgttggggtgacttgtcaagacagaagtacacagccgggtggtggtggtgcacnnnnnnnnnnnnnnnnnnnnnnnnnnnnnnnnnnnnnnnnnnagcgagttcgagnnnnnnnnnnnnnnnnnnnnctnnnnnnnnnnnnngctccaaagccacacagagaaacccagcctccccccccccgaaaaaaaacatcccccccaacaagacagaagtacaaagatttaaattctttctgttctttttaggccttgagtnnnnnnnnnnnnnnnnnnnnnnnnnnnnnnnnnnnnnnnnntattgaggtagaattgctacttccaaaacctgacccagcctctcctcttcattgtggcacacagagccaggccaagcgcctgctagcaagtcggtgtctacagacagggaggtgagtctccccactgctcaccaagccccccttcccacttctgatgcttttgctgggcatgtgattctctctaaaattttatttatttttggaatgtgtggtatacctctgtggcaatgttgggggagcttccacttggctattttggggtgtgtaaaagctagagattgatattaggtatcttcctctattattacctactgtaattttggagatagggtttctcaatgaacctggcgctcactagttttggctagactggctggccagtgatttgcctctctcttactactccctcacccctagtgctgtggttaaaaatatgtattgtattctggtggtggtggcgggcggcagtggtggcggtgcttgtnnnnnnnnnnnnnnnnnnnnnnntagagtcaggtgaattcaagttgagnnnnnnnnnnnnnnnnnnttacagagtgatttccaggacaataggtgttttgcccagaaatcctgtctcaaaaacaaacaaaaaagtgtattgctgtaccannnnnnnnnnnnnnnnnnnnnnnnnncaagacatggtttttctgtgtagctttgaagcctgtcctggaactagctctgtagatcaggctggcctcaacctcacaaagatatgtnnnnnnnnnnnnnnnnnnnnnnnnnnannnnnnnnnnnnnnnnngtgctccaccactgcctggctgtacnnnnnnnnnnnnnnnnnnnccagagtactggagctctaaatttattgtgtctgcataacgagcactttgtccaccgaaccatgttccccagaccccatttttctcttgtgtgattgcttattcctgtgactaaagtagctttctgccttaaagtgggaccttaattgagaagtcatcatctagacagtaacagcttctatttgaaannnnnnnnnnnnnnnnnnnnnncatcctgaaatgggatagatgcatggtcagccatggttggagctcccaaaccctgctctcttgctttacactacagggtccagggcatccctccattaggcaagagagtattctcactggagcgtttatggggggcagggtccttggtaaagtgaaattcacaggctgactgactctccagggcagaagatgctgcagaacattacttggacctgctagctatgttgctgggtagctcagagccaagggtaagtgtgacttaaggttctctgcagttgagtgggtggtttgggacctcccctaccttcattggtcttcctggggaaccagttctctcttaatggtactggnnnnnnnnnnnnnnnnnnnnnnnnnnggctcatgccacttcaagacactgtccccctttctccaccccagttctccctgcccacctcctctccagggccttgtataccagagttgtgtctggaggctgcagcggcgctgatacaggcaagccgagccccagatgctttgactgtatgtgaggagctgctcagccgaatctcatctctaattcccaagacgtccttgtgggaaaatgccagaaaaagaactaaagaactgccatactgcccgatctggatctctgctacccacctgcttcagggccaggcctggtcacaactaaaggctcgaaaagaagcacttagtgagtttagccagtgagtccaggaagatagagcattggggaggtgttggaagcatggctttcagatccagaccttggttggtggactttattcttagtagttaccttaatttctgaggccagctctttattcctgctatttatatcctgcttcaggtgtcttgagctcctctttcgggccctgcctgaggacaaagaacaaggtgatttaannnnnnnnnnnnnnnnnnnnnnnnnnntgagactgggtttttctgtaggttttggaggctgtcctggaacttgctcagtagaccaggttggcacagatccacctgtcnnnnnnnnnnnnnnnnnnnnnnnnnnnnnnnnngccaccaccacctgtctgagatttaattttataacttttgctttcttttatttttacataacaggttctcatatagaccaggctgacctcaagcttactattttagtcaaggataaccttggatttctgatcctcctgcctctactcccaagtgctggcgatatagatgttttgccaccatgcctgactctaatttagattgtcaatttttcttaagtcctgaaagtggtgtgtgggttccctttccattgcatctcaatttgccagactgggagacttcaggggacatgctggggcatggtagcgtatacctttcatcctagcactcccaacaggtagatctctgagtttgagatcatcctgatttacatagtgagttctgagtcagccatgactatgtggtgagacctnnnnnnnnnnnnnnnnnnnnnnnnttagggaggacaggaggaggatagggactggggtgtttggtgactgtgtctgggatgatgggaagatgcttgctgactttggtggtgatctctaggggcaggctccaactgtgagcagaagtgttggcctgatgtggcactgaaacagcttcaagtagctgctctgcttagtcgtgggctggaatggatagccagtggccaggataccaaagccttaagtgacttcctccttagtgtgcagatatgcccaggtatgtacatttgcatgataattggctatgtacaggaggggtggtacttggaccgaagtgtaaggatggtattctcagatagaaagactgaatagggttatgctgtatatacctaggaggtacccatgtgttcatatgcaaacaaacatgtatgcaagaatcctaagagttccctggtctccctgttgtcttcagacaaagatctagactatgtggggatggttttgtaggaacagggctagttgaacactttgtaccgggcaggcagtggcttctgggagagcatggttatggaataatatagttttggttttatatgtgtgtgtagacaagatgcttcccctctctaggtctaaggctatattagcttctaagtctttgtactttggggtggggttataggcaatagagatggttccttttacctgcttcagactctgaaaagattggaacggaggaatgaggccgctgctttttggagggaggcccaaaatcaaccactacaggaagaagccacttggtaaggtttagtcttcctggcttggggctggggggcaattggaatcctgtagtgggggtgatgaggaacagaaggaaggaaggatgtcaaatctatgtctgtctttcattcttaggcatcaccattcttccttttcaggtctcttccactgtacttagaaacctgtttgagctggatccatccccctaactgtgaagctctccttaaggagtttggaacatctctgctataagtctcgtgattattagcttccttgtttccaggagcttgagctggggctcctgtggaccatctccatggggagggtttttttctgccttgtcctctttggataatatggctggagctgattgttcctaagtcactcctccactgatatgaggttggtggtcttgtgaaccttggtctacttattgccagtctagttcca

SEQ ID NO: 629 - DNA, 381 bp, Cricetinae gen. sp.
atgttgtatacatctcagctccttgggcttttactcttctggatttcagcctccagaagtgacatagtgctgactcagactccagccactctgtctctaattcctggagaaagagtcacaatgacctgtaagaccagtcagaatattggcacaatcttacactggtatcaccaaaaaccaaaggaggctccaagggctctcatcaagtatgcttcgcagtccattcctgggatcccctccagattcagtggcagtggttcggaaacagatttcactctcagcatcaataacctggagcctgatgatatcggaatttattactgtcaacaaagtagaagctggcctgtcacgttcggtcctggcaccaagctggagataaaa

SEQ ID NO: 630 - DNA, 417 bp, Cricetinae gen. sp.
atggcatggagctgcattattttcttcttggtatcagtaattacaggtgtccattcccaggtcaagctgcagcagtccggttctgaactagggaaacctggggcctcagtgaaactgtcctgcaagacttcaggctacatattcacagatcactatatttcttgggtgaaacagaagcctggagaaagcctgcagtggataggaaatgtttatggtggaaatggtggtacaagctacaatcaaaaattccagggcaaggccacactgactgtagataaaatctctagcacagcctacatggaactcagcagcctgacatctgaggattctgccatctattactgtgcaagaaggccggtagcgacgggccatgctatggactactggggtcaggggatccaagttaccgtctcctca

SEQ ID NO: 631 - DNA, 1880 bp, Cricetulus griseus
  misc_feature (137)..(151): n is a, c, g, or t
ttgcttgaaaggaagggagaccttccttataacgcaactccgagaaattgaaaattataaaccagattattttaatataacccgaaaatgtcgagatttgtgcaagaccttagcaaagctatgtctcaagatggtgnnnnnnnnnnnnnnnaagtcattctccaagaactagaattatctgtgaagaaagaattagaaaaaatacttacaacagcaacctcacatgagtatgagcatactaaaaaagatcttgatggatttcggaagctatatcatagatttttgcaagaaaagggaccttctgtagactggggtaaaatccagagacctccagaagattcgattcaaccctatgaaaagataaaggccagaggcctgcctgataatatatcttctgtgttgaacaaactggtggtggtgaaactcaatggtggtttgggaaccagtatgggctgcaaaggccctaaaagtctgattggtgtaagaaatgagaatacctttttggatctaactgtgcagcaaattgaacatttgaacaaaagctacaatacagatgtccctcttgttttaatgaactcttttaacacggatgaagacacaaaaaaaatacttcagaagtacaatcattgccgtgtgaaaatctacaccttcaatcaaagcaggtatccgaggattaataaggaatctttacttcctgtagcaaaggatgtgtcttcctcaggggaaagtacagaagcttggtaccccccaggacatggagatatctatgctagtttctacaactcgggcttgctcgacacctttctagaagaaggcaaagagtatatttttgtttctaacatagataacctgggtgccacagtggatctttatattcttaatcatctaatgaacccacccaatgggaaacgctgtgaatttgtcatggaagtcacaaataaaacacgagcagatgtaaagggtggaacactcactcaatatgaaggcaaactgagactggtggagattgctcaagtgccaaaagcacatgttgatgaattcaagtctgtgtcaaaatttaaaatatttaacacaaacaacctatggatctctcttgcagcagttaaaagactgcaggagcagaatgccattgacatggaaatcattgtgaatccaaagactttggatggaggcctgaatgttattcagttagaaactgcagttggagctgcaattaaaagtttcgagaattctttaggtattaatgttccaaggagtcgttttctgcctgtgaagaccacgtcagatctcttgcttgtgatgtcaaacctctatagccttaatgcaggatctttgaccatgagtgaaaagcgggagtttcctacagtacccttggttaaattaggaagttcctttaccaaggttcaagattacctaaggaggtttgaaagtatacctgacatgctggaattggatcacctcactgtttctggagatgtgacatttggaaaaaatgtttcattaaagggaacagttatcattattgcaaatcatggtgacagaattgacatcccccctggagcagtgttagagaacaagatcgtatctggaaatcttcgaatcttggatcactaagataagcgctgccggatacactttatactaattatgggttaaacagtttcttgtaataaaatgtcctctaagattctcaaatgagcaagtacttttactgtgcagtgttgattttttagagttttctgcaatgtgcttttagcctaaagagaagatagatggagcagtactgtccttttttgatgaagagcctagagatgagttcatctaaaagtgcaatattatttaatcgtagaactgggccagctcggcaatcttttaacaga

SEQ ID NO: 632 - DNA, 1106 bp, Mesocricetus auratus
  misc_feature (1081)..(1106): n is a, c, g, or t
gccgccgcctctaccgccgcgacggtccgggccgcggtcgcccagggactttgaatatgtcggggattgccctcagccgacttgcccaggaaaggaaagcttggaggaaggaccacccttttggctttgtggctgtcccaacaaagaaccctgatggcacgatgaacctgatgaattgggagtgcgctattcctggcaagaaggggactccatgggaaggaggcttgttcaaactacggatgcttttcaaagatgactatccgtcctcaccaccaaaatgtaaatttgagccaccactgtttcacccaaatgtgtatccttctggcacagtgtgcctgtccatcctggaagaagacaaggactggaggccagccatcacgatcaaccagctctttataggaatacaggaacttcttaatgaaccaaatatccaagaaccagctcaagcagaggcctacacaatttactgccaaaacagagtggaatatgagaaaaggttccgagcacaagcgaagaagttttgcccctcctaagcagcggcacttgttgctcccatgacggaggaagggattggcttggcaagaacttgtttacaaacttttgcatatctaagtcgctgcgtacaagttactagtcacctgggagggttgagcgggcgccattttccatttctgccactggcatttacagtctcaattcgctgaattgccccagttttcatacagggtctcttccttcagtcttttgtatttttgattgttatgtaaaacttgcttttattttaatattgatgtcagtatttcaactgctgtaaaatgataaacttttgtacttggtaagcccctaggagctagtttcttcgcgctcggatgcaggcatgcttcccactgttctctggcctccagctggctgtatgacagatccacactgtccctctctccccatcctcgtcctcctcagaaacctgggctgttgcttatgagcctcagatccaaagttggccagcgtctccattctgcacctcttcctttgtgtttatatggcgttttgtctgtgttgctgtttagagtgaataaactgnnnnnnnnnnnnnnnnnnnnnnnnnn

SEQ ID NO: 633 - DNA, 2045 bp, Cricetulus griseus
  misc_feature (1185)..(1199): n is a, c, g, or t
  misc_feature (2013)..(2045): n is a, c, g, or t
gcgctgcagccatttccggtttcggggaggtgggtgcggtgcggagcgggagttggcgccgcagccgcctccagagcctgccctgctgccgggtgctgccgggacgatgcggccggaacccggaggctgctgctgccgccgcccgctgcgggcgaacggctgcgtgaagaacggggaggtgaggaacgggtacgtgaggagcagcaccgccacagccgcggctgccggccagattcatcatgttacagaaaatggaggactttataaaagaccgtttaatgaagtttttgaagaaacacccatgttggttgctgtgctcacatatgtagggtatggcgtactcaccctctttggatatcttcgagatttcttgaggcattggagaattgaaaagtgccaccatgcaacagaaagagaagaacaaaaggactttgtgtcattgtatcaggacttcgagaacttctatacacgaaacctctacatgaggataagagacaactggaaccgacccatctgtagtgtgccaggagccagggtggatatcatggagagacagtcccatgactacaactggtcattcaagtacacagggaatataattaaaggtgttataaacatgggttcctacaactatcttggatttgcaaggaacactggatcatgtcaggaagcagctgctgaagttctcaaggagtatggagctggagtgtgcagcactcgccaggagattggaaacctggacaagcacgaagaactggagaaactggtagcaaggtttttgggtgtggaagctgctatgacttatggcatgggatttgcaacaaattcaatgaacattcctgctcttgttggcaaaggttgcctgattctgagtgatgaactgaaccatgcatcactggttctaggagccagactgtcgggagcaaccattcgaatcttcaagcataacaatatgcaaagcttggagaagcttttgaaagatgccattgtttatggtcaacctcggacaagaaggccctggaagaaaatcctaatccttgtggaaggcatatatagcatggaagggtctattgttcgccttcctgaagtgattgctctcaagaagaagtacaaggcatacttgtatctggatgaggcacacagcattggggcccttggcccttcagggcgaggtgtggtagactnnnnnnnnnnnnnnnccgaggatgtagatgttatgatgggaacattcacaaagagctttggtgcttctggaggatacattggaggcaagaaggcgctgatagactacctgcgcacacattctcacagtgctgtgtatgccacgtcaatgtcaccacctgtgatggagcagatcatcacctccatgaagtgcatcatggggcaggatggcaccagccttggcaaagaatgtgtacaacagttggctgagaacaccaagtatttcaggagacgcctgaaggaaatgggattcatcatctatggcaatgaagattccccggtggtgcctttgatgctctacatgccagccaaaattggcgcctttgggcgggagatgctgaagcggaacgttggtgtggttgtggtgggatttcctgctaccccaatcattgagtccagagccagattttgcctgtcagcagctcataccaaagaaatacttgacacggctttaaaggagatagatgaagttggagacctgctgcagctgaagtactcacgccgtcggctggtgcctctgttggacaggccctttgatgagactacctatgaggagacagaagactgagcctttttggtgctccctagaggaggaaactccctcccaggacagtgtgtggcctttctgagccagttccagaaccacacttcagtgaccacctcatgtgaaagacatttccgaagctactgaaggtggacacctccactccaaatggcattttgtaaatagtaaaaaaagaaacaaactgcttcacattcttccattgtttgctaagtctcacctttatatannnnnnnnnnnnnnnnnnnnnnnnnnnnnnnnn

SEQ ID NO: 634 - DNA, 2697 bp, Cricetulus griseus
  misc_feature (918)..(935): n is a, c, g, or t
  misc_feature (2606)..(2625): n is a, c, g, or t
  misc_feature (2665)..(2697): n is a, c, g, or t
ctgaccatggcgatggcggcggagcagtgggtgctggtggagatggtgcaggcgctgtacgaggctccagcataccatcttattctggaggggattctaatactttggataatcagactggttttctctaaaacctacaaattgcaagagcgttctgatcttacagccaaggaaaaggaggaactgattgaagagtggcagccagaacctctcgtccctcctgtctcgaaaaaccatcctgctctcaactacaacatcgtttccgggcctccaacccacaacatcgtggtgaatgggaaagaatgtgtaaactttgcctcctttaattttctcgggttgctggccaacccccgggtgaaggctgcagctctagcatctctaaagaagtatggtgtgggtacctgtggacctcgaggattttatggcacatttgatgtccatctggatttggaagagcgcctggcaaaattcatgaggaccgaagaagccatcatttactcgtatgggttttccaccatagccagtgcgattcctgcgtactctaaaagaggggacattgtttttgtggacagtgcagcctgctttgctatccagaaaggcttacaggcatcacgcagtgacattaagttgttcaagcacaatgatgtagctgacctggagcgactgctgaaagaacaagagattgaagatcaaaagaatccgagaaaggctcgtgtgactcgacgcttcattgttgtggaaggattgtatatgaacactggaaccgtctgtcctcttccagaactggttaagttaaagtacaaatataaagcaagaatctttctggaggaaagcctttcgtttggagtccttggggagcacgggcgtggagtcacggagcactatgggatcagcatagatgacatcgacctgatcagnnnnnnnnnnnnnnnnnntctcgcctctgtcgggggcttctgctgcggcaggtctttcgtggttgaccatcagcgcctctctggccaagggtactgcttctcagcttccttacctcccctgctagctgctgccgccatcgaggccctcaacatcatggaggagaatccaggcatttttgcagttttaaagaaaaaatgccaacacatccataaatctctacaaggcatttctggtttaaaagtggtgggggagtccctttccccagcacttcacctccagctggaagagagcactgggtcccgggagaaggatgtgcagctgctccaggaaatggtcattcactgcatgaacgagggcatcgccttgactcaggcgcgctacttggacaaggaagagaagtgccttcctcctccaagcatcagggttgtggtcacggtggagcagacagaggaagagctggagagggctgcgtccaccatcagggaggctgcccaggctgtgctgctgtagggtgcagcccggtgtttcctgccacatcacctgcgggcagaactgctcagactcctccagctgcccacggagtggattgctgcccgccatgcagctgtgacttgagttcacagacataactaatgaatggattttttttataaaggcaggagctgactttagaagaacacagatgacagcatataactgctatttactttgtgccattgggtctgtttggatgctttactatctgtcatttatattcatttttgtttcaaactggagcttcagttttcttctcccatctgtggtaatgatccaataagcactccttcgtattttgtagaaaaggacttagcagctaagaggagctctcgtgtaccacagttaactgtggcagagggagtcaactgcatcttcccagtccctcaggtagagctcaatggtggctgctatgcggagagcactttctgagagttagaaaattcatatagcatattggaatcctagagccttatatgcactagttattattgatgttgtcatttctaatgtgagcttctcttaatagaaaaatattcatactgcttcctaagcaataatatgaatcaaacattattttatttttgtgtaattgactttatatttttatatattctctagtcggttttgtgaagagggttattattctggtccccaaatacagatcatgccctgggtatttttgaatttgtcagatgtcctttttcatggtggttttgtttgggagcatagaactgtgggctttttctaagctgagaaaagtgagaacttttttcatcctgtaaattgctgatgcctcagaaaaacaggatgctctgaaagtgaccttcgagctgtacactggctgctgttctccttggtgagcatgctgagcagtgtaaggcttgcgatacttgccatggagcatgtacatagaaggaaggccgccattccttctcgtgtgcatgggcagagaatcgggtcgctaaaggtcgattccttctcgtgtgcataggcagagaatcgggtcgctaaaggtcgttttatgatgtgcattcatgttacagtgaccggcatcttttgaagtgatctgtgacatttttaatgtttctatttcatacgtgccttgtgattgctgctgctgtgagggctatggtcctgttggggatgggtcnnnnnnnnnnnnnnnnnnnntgaaataaacctccaggagcccacattcctgaaaaagaannnnnnnnnnnnnnnnnnnnnnnnnnnnnnnnn

SEQ ID NO: 635 - DNA, 740 bp, Mesocricetus auratus
  misc_feature (6)..(6): n is a, c, g, or t
  misc_feature (9)..(9): n is a, c, g, or t
  misc_feature (12)..(12): n is a, c, g, or t
  misc_feature (15)..(15): n is a, c, g, or t
  misc_feature (21)..(21): n is a, c, g, or t
  misc_feature (71)..(87): n is a, c, g, or t
atgccnctnccnccncayccngggagccctggctatatcaacttaagctatgagaagtcacattctcaggnnnnnnnnnnnnnnnnnactgcattagtgcttacccctttgaagtggtaccagagcatgataaggcagccgtatccttcctatggttacgaacccatgggtggatggctgcaccaccaaatcatccctgtgctgtctcaacagcatccccagagtcacacccttcagcctcatcaccacctcccagtggtgccagctcaacagccagtggccccccagcaaccaatgatgccagttcctggccaccactccatgactccaacccaacaccatcagccaaacatccctccatccgcccagcagcccttccagcagcccttccagccccagcccatttcaccccagtctcatcagcccatgcagccccagtcacctctgcaccccatgcagcccctggcaccacagccacctctgcctccactgttctccatgcagcccctgtcccccattcttcctgagctgcctctggaagcttggccagcgacagacaagaccaagcgggaagaagtggattaaaaaattcagaaaatgagagaaccgaagtggatacttcggttgtttttaggaataactcaagaacacaatgatttgtgcctacaatcacttagtaaattctgtaactaaaaataagtatcattagcagataataaaatgttttaaaaatcaaaaaa

SEQ ID NO: 636 - DNA, 1740 bp, Mesocricetus auratus
  misc_feature (771)..(804): n is a, c, g, or t
caaagacagctgctactcctagagaactctctgattcctgcttccagttcaggaagggagctcaatgctgtgcctgctgccattcagacctctaactcctggaaacaaaactcctttccaggagtgactgacagaccagaaaagactcacttgctgtacagcaccatcctgtggtctggaatcacaaagtaagcgaaaaggagagaacagcagactgccttccccggagtgacattacatcaaacctgctcccactgtgatccacttcctgtcttgaccatgcctgcatggagctgcttggtgacaggagcaggagggtttctcggccagaggatcatccgtatgttggctcaggagaaagagctgcaggaggtcaggaccttgttcaggtccttcaccccgaaacacagagaggaattatccaagctgcagacaaagaccaaggtgacagtgctggagggagacattctggatgcccagtgcctgaggagagcctgccagggcatctccgttgtcatccacactgctgccgccattgacgtctttggtgccattcccagacagactgtcatagatatcaacctgaaaggtactcagcacctgttggatgcttgtataggagcccgtgtgcccgtcttcatctacagcagctcagtggctgtggctggaccgaactcctacaaagtgatcatccagaatggctctgaggaagaaaatcatgaaagcacatggtctgatccatacgcatacagcaaaaagatggctgagaannnnnnnnnnnnnnnnnnnnnnnnnnnnnnnnnngatggtggcactttgcatacttgtgccttaagactcccattcatctatggggaaaaaagcaaattcatttcagatacaatggatagagcactgaagaacaatggtctaattaacggttttagcagattctctgtgatcagctcagtgtatgtgaataatgcagcctgggcacacgtcctggctgccaggggcctacaagaccccaagaagtcaccaaacatccaaggacagttctactacatctcagatgacacccctcaccaaagctatgatgatttatgttacactctgagcaaggactggggcctccgccctgattccagttggaaacctcctgtggccctgctgtactggtttggcttcctgctggaaactgtgagcttcctgctgcgtccggtctacaactaccagcctccctttaatcgccacttggtcacactcttaaatagtgtgttcaccttctcctacaagaaagctcagcgagatctgggctatgagccccttgtcagctgggaggaagccagggagaaaacttcagagtggatcgggtcactggtggagcagcacaagggaacactgaacataaaggctcagtgatgtgaagatggaggggacatgtcctgggtgctctcagctccttcagaaagggtctaagacacaatccaagtctttgacatactggccaacttgttttcagtcaccagaagccttgccagtcactggcccagctacaaaccttctgccctaaaaacctgcccagcaacatacaggctgtgcctcagctgctataaccaaaggctcagttgtagtgctgaactgcccagagcctcctgtaccttagaattgcatcagagcttccaattcccctcttgtctgagaaaatttccattgcttcatgaatctcaaggaaaagtacaataaaatcgtttaatgcct

SEQ ID NO: 637 - DNA, 1732 bp, Cricetulus griseus
  misc_feature (114)..(133): n is a, c, g, or t
gttcctgcgcggatgccggggctgtaaggcgccaggaggtcggctggttgtggatcgcagaaggaggacgctggggcccgccgtccatccgctgctactatgattcctgtgtcnnnnnnnnnnnnnnnnnnnngtggttggactgccgtctacctggccgacttggtgttgaagtcatctgtgtattttaaacattcttatgaagactggctggaaaagaatggattgagcatctctcctttccatataagatggcaaacttcagtttttaatcgtgccttttacagttggggacggcgaaaagcaaggatgctttaccaatggttcaattttggaatggtgtttggtgtaattgccatgttcagctcattttttctccttggaaaaacactgatgcagactttggcgcagatgatggctgactctccctcttcttcctcttcttcctcttcctcctcctcctcttcctcttcctcctcgattcacaatgaacaggtgttgcaagttgtggttcctggtataaatttacctgtcaatcagctgacttacttcttcgctgcagtcctcattagtggtgttgtacatgaaattggacacggtatagcagctattagggaacaagttcgatttaatggctttggaatttttctcttcattatttatcctggcgcttttgttgatctgttcaccacacatttgcaacttatatcaccagtccagcagctaaggatattttgtgcaggtatatggcataattttgtccttgctctccttggaattttagctcttgttctcctcccagtaattctcttgccattttactacactggagttggggtacttatcacggaagtcgcagaggactcacctgccattggacccagaggcctttttgtgggagaccttgtcactcatcttcaggattgccctgttactaacgtgcaagattggaatgaatgtttagataccattgcatatgagccccaaattggttactgtataagtgcatcaacgttacaacaattaagcttcccagttagagcatacaaacgactagatggttctactgaatgctgtaacaatcacagcctcacagatgtgtgtttctcctacagaaataattttaataagcgtttgcatacgtgtctacctgcccggaaagcagttgaagctactcaagtttgtagaaccaataaagattgcaaaaccagctcaagttcaagtttctgtatagtaccatcgttggaaactcatactcgattaataaaagtgaaacatccacctcaaattgatatgctgtatgtagggcacccactacatcttcactacacagtgagcatcacaagttttattccacgcttcaactttctaagcatagatctgccagttattgtggagacatttgtcaagtatctgatttctctttccggagctctggctatcgttaatgcagtgccctgctttgccctggatggtcaatggattttaaactctttcctggatgctacccttacctcagtgattggagacaatgatgtcaaagatctgataggatttttcatcttgcttggtggcagtgtacttttggctgccaatgtgacactgggactctggatggttacagcacggtaatatttgttctcatccaacagaaaatatggagtacaactatgtgggagtatcatttgctgttgaaattcctactaggtatgaagtgtaaagtgtttcctta

SEQ ID NO: 638 - DNA, 275 bp, Mesocricetus auratus
atggaaagtgtctttgaaccggtggtcaggcagagtcaacgccttcctgcgagaaaagaatcaaacaaaatctcacatgtaaattccatggggattgtgtcagatttccttgctagtgtcccaaacttgggtgagtgtcacttcccaagcaaaagagatgttctaattgtcatttgtatcttcaagtatcaactattaaggcaatggatgccaaagaatcatcccatatcaacaccatagtttcacttatagggagatattttacatagtttttt

SEQ ID NO: 639 - DNA, 523 bp, Mesocricetus auratus
  misc_feature (27)..(27): n is a, c, g, or t
  misc_feature (348)..(348): n is a, c, g, or t
  misc_feature (395)..(395): n is a, c, g, or t
ccttggagaaactaccatgcaaaaatnacagtttgaccccttcagtcccagaatttctctttcagaatcttcctctaccagacaaaggtaatagatctgtggggttttttttgaaagggttagatgagaaaaattgtgagcaaatgcactaatctataaataagagatacactcaagtgccagagtttagtattagctgacattttactaagatactattagtgcaatcacacaatacatgatggagacaactagagaaagacagtgctagaatgaagatcttaatgacacgcaccacaattaatgacagtgggagaataaaatgttcctaagttgctgtttcactgnctttaataagtggaagtcaatggaaagaaactatgagggcaagaganacagtttcaaaagtgtgcttgtggccttgggaagtcacttccttgaagacttaaaatgaatgtcagacatatctgactcaaaaacaccttaccaaacagctccctgaaagtccccttcgtgcccaata

SEQ ID NO: 640 - DNA, 667 bp, Mesocricetus auratus
  misc_feature (489)..(489): n is a, c, g, or t
ggagagtaaacatggtgtcagtgaggcattaaatatggaggaagagcagagaaatgcttcattctaccttctgtttgcagctcagagcattatgtgtgctcacactacgggaccccctcgataatttttaaaataatgcgtgttgggggcagaggaagtgagaaacaaaattaataccaaaatcatcaacactgtaaatgaataaggcataaaacataacataatatgtcacgttgccctaattttattcctggagtgtgagttttcatctcagtacactttaagtacaattatttacctgttatatacatatatatatatattcatgttcatttttggtccattcagtgctgaaatattgtatgttacatatgatagttcatgtctttgatagtggtacaattgttagactgtgcaacacacaaacatttcttaaattttgaagcagtactaaatcatgaatttcagaaattaattcctaagcctttnttgaatgtaaagcataaaaatacaaatcctcattttatacataggtttatagcaatagactgaaaccctgagtctatatcataattattactgatcctttggaagttttacatcatgtaccccaattctgctcacctcccaggtcctccatatctgccctcacccctgaagtgtccgt

SEQ ID NO: 641 - DNA, 759 bp, Mesocricetus auratus
ggaaaatgctggccctactcttcctgttggcccttctcttgcctcctgaagccggagctgaggagattattggtggtgtggagtcaaagccacactcccgcccttacatggcccatttggagatcgtcactgagagaggctttactgccagctgcggggggttcctcataacgccagaatttgtgatgacggctgcacactgcaaaggaaaagaaattactgtcacccttggagctcatgatgtgagcaaggcagaatccacacagcagaagataaaagtcaaaaaacaaatcgctcacccaaactacagcttctactccaaactgcatgacatcatgttcttaaagcttcaaaagaaagctaaagaagacccctctgtggacacaatccccctgcctagtccgtctgactttcttaaacctgggaaaatgtgccgggcagctggctggggaaggactggagtgacagaaccgacgtcagaaaggctgagggaggtcaaactgagaatcatggacaaaggggcctgtaaaaactattaccactatcattatgacttccaggtctgcgtgggcagccccagaagggtcagatcagcatacaagggagactccgggggacctcttctgtgtgctggggtggcccatggtattgtatcttatggacgtggagatgcaaagccccctgcagtcttcacccgaatctcctcatacgtgccctggattaatatagtcataaaggcaagcagttgaagagccagcc

SEQ ID NO: 642 - DNA, 1208 bp, Mesocricetus auratus
aaacatgccagccaagtcctgagctcgccatgtccaaaccagcctggcgaccatgccatgccaccagtgccggggagcagcgcacccaacagccccatggctatgctcactcttaactccaactgtgaaaaagaggcgttctataagtttgaagagcagagcagggcagagagtgagtgcccaggtatgaacacgcactctcgagcgtcgtgcatgcagatggatgatgtaattgatgacatcatcagcctggagtcaagttataatgaagaaatcttgggcttgatggaccctgccttgcaaatggcaaacacgttacctgtctctggaaacttgatcgacttatacagcaaccagggcctgccacccccgggcctcaccatcagcaactcttgtccagccaaccttcccaacataaaaagggagctcacagcgtgtattttccccacagagtctgaagcaagagcattggctaaagagaggcaaaaaaaggacaatcacaacttgattgaacggagaagaagatttaacataaatgaccgcattaaagaactaggtactttgattcccaagtcaaatgatccggacatgcggtggaacaaaggaaccattctaaaggcctctgtggactacatccgaaagttgcaacgagaacagcagcgtgcaaaggaccttgaaaaccgacagaagaagctggaacatgctaaccggcatctgttgctcagagtacaggagcttgagatgcaggcgagagcgcatggactttcccttatcccatcctctggcctctgctcgcctgatctggtgaaccggatcatcaagcaagaaccagttcttgagaactgcagccaggaacttgtgcagcaccagacagacctgacatgtacaacgaccctggatctcacggacggtaccatcaccttcacaaacaacctcggcaccatgccagagagcaaccccgcctatagcatccccaggaaaatgggctccaacttggaagacatcttgatggacgatgccctctcgcctgttggcgtcactgatccactgctgtcatcagtgtccccaggagcttctaagacaagcagccggaggagcagtatgagcgcagaagaaacggagcatgcatgttagcgagcccaccttgctctgcctctgcacaaactgcttcctctcttcttcagtagacttcataatttacctgaaga

SEQ ID NO: 643 - DNA, 217 bp, Cricetulus griseus
ggaattcctccaggaggcccgagaacggtggaacttcgagcttcgtcaccgagcgccgctggagggtcaactatgtttgggagcgcgtttgggacctagggctgcccaagctctacctgagccctgggtcccgcggatggccgtgacgacctgggaggggacaagcggcccagcacctcctctgccttgctgcagggtcacccccgacgaccatgtg

SEQ ID NO: 644 - DNA, 222 bp, Cricetulus griseus
aacaattccacagcctcccggactgctgcacgtccccacgggccaaggatcctttgcccgtggggacgtgcagcagtccggaggcttgtggaagtgtttatttatattgtccttttttaccgaagatatgcatactccatcgatgttgtattcacagtggctgaggaattcttgtacccagtttctttggcttcaagtccgattaaaagaccgtgtgaaacg

SEQ ID NO: 645 - DNA, 260 bp, Cricetulus griseus
tggcgcgctgtcttcccgcccgcgtcagggacctgcccgactcagcggctgccatggcatcagatgaaggcaagcttttcgtgggagggctgagcttcgacaccaatgagcaggcgctggagcaggtcttctccaagtacgggcagatctctgaagtggtggtggtaaaggacagagagacccagcgatccagaggctttgggtttgttacctttgagaacatcgatgatgctaaagacgccatgatggctatgaatggg

SEQ ID NO: 646 - DNA, 192 bp, Cricetulus griseus
tcaagcatgcctcggtacccacaggctttacaagaattacctattgtttgcttctttggattgacatgcagatcggtttcaggattctcatactcaggacaaagaatgtacagagtttatgatgtgtgtcaagcatgcctcggtacccacaggctttacaagaattacctattgtttgcttctttggattga

SEQ ID NO: 647 - DNA, 179 bp, Cricetulus griseus
tgcgaagccctcaagcacagatgcaaatgtactctctgggactcactggctggcactgatattcgcagtcagatccgtagcacggatccaggagctccacgcactctccatccaccaactcaaagccatcatagcagagacattcaaagccgcccttggtgttgacacagcgctgccgg

SEQ ID NO: 648 - DNA, 3514 bp, Cricetulus griseus
  misc_feature (39)..(82): n is a, c, g, or t
  misc_feature (1792)..(1821): n is a, c, g, or t
  misc_feature (3121)..(3220): n is a, c, g, or t
  misc_feature (3279)..(3348): n is a, c, g, or t
ggtaccagaacccctgcccccgccccattctgactaatnnnnnnnnnnnnnnnnnnnnnnnnnnnnnnnnnnnnnnnnnnnncagcagagcatagaatgaaagtaggttagaagggcaggtaaaagcactttagacaagagcaggtataagggccttggactccctccccagaacacacacatgaaggtaaacgatggttaaaggatacagataggatgtcgaagctggacgatcacttgcttttgtgtgcttgaagtgacaggctgtggctttcgggttcatggggtctgttgttgagttcacagtctcaccatgttagcaagcatgtcactattaagctctatccccgccccccttttttgagacatggtcttgctaacatacccagaccggcctaggaagcactttgcagtctcagctcccctgagtgctatgatcactcgtgtgagctacagtacccaaaccagaatatgtgtgttgggtgttatgagagttacacattgctgccttgaatgctgctctgcttgagttcctgtaggaagctgagctgggaacctaagcttcctcctcccagatagcagtaaccctgcagagacctcccaccaagactagctaacccctccttcttgtgctgtacttagcaagaacccaaggttctgggtccttgtgctacagttccagaagagtatgaacaatcttagcttttctgtatatgtgtctgtgtctgtcctgtcagatcaagtcccagcctcactgtatgcaacatgaaaggctgtgaaaactgtgcattttgagaatgaacatcattattgtctccagtaagttcaaaaacaaatgaaggcagccactcataagggtctttaatgaggcaagggggcaaaagggtggtttctgtttgttcaaagaagcctgtcatacattttcagaaaatttagaaacacgtatcatgtcatttcacgttagtatgaagtccttataattcatttcatattaaatgatttcctttggttagaagcaaaattatgcataaaatgtgttcctttgtgtttggagcaaaattacaagttcacattattagttaatattctagttcttatttttcccaatctccaagaagcaaaatattcccctaaaccctaaagcatcaaattatcctatcacacagtgaccagtcatcgtaacctaaatattaaagcatcagattatcctgtctatggtgaccagtcattgtaacctaaatattattgtaatgtggattagagttaactataccttttcatcacactataatgtaaacactctccaaatctttcaaagtcttgaaaacacaatttataaatactgtgttctgtttgttttgagacctgatccggttaggaatttcaggctgtcctcaaactcatcatcttcctgcctcactcaggtcctaagtgctgagattaaaggtctatgctaccacagccatacgaatgccatgtctccatcagcttatcacttcttaacttttttcttttcttcttctacatactgctgagtaggagcatcgatgacctcagcctagtaggaatggttcccatgtgaacccttaatctgtaggaagatgctggacttcttccattaagactgatctccatttgaacttgacttgtctctctcttgtgtggagctaccatcccatatataatcttctggtttataaacagattgctttaccctcaagatcctttgctagcgcagcaatgtaagttttaatacaaacagtaaggtctctgattggagtgtcatggtttnnnnnnnnnnnnnnnnnnnnnnnnnnnnnngttaagggctcaaccaccaagtgatgcttgtggataggaggcagggcctagtggacagtctttaggtcatggagctatgctgttgagggggactgtggggtcctggtctttttcccactcctttttaggtcctagctatgaggtgagtggttttgtcctatcaagcacctctgtcctgccatggtgtaattgattataactacaacctctgaaactaagccagtataacctatttatctcaagatgtaacttacaggtaatggtaagataaagctaacaaaagacaaattgttataatccaggcaagcctggccccatcccttgggggcatggcacagagtgtgtcacccatctgtgcatggcaagcagtaccctgactctgtatgctgattcaaaggtcccttaaagcaaactcctcccacttcctctctttttctgccatttctctgaggagggaggccactgtctctctgtctctctctgtgtctctttttctatcttcctctccctctcttccctttccccaataaactttccacattaagttttgtctgaaggtatctgtttgtctctcacccgccttttaggccccacctaccatgggatctgccaaaggtctcacctcgagctgtattcataacacaaatgacagacaaagatcaaccctgaagactagtaggatgtagaaggcctggagctgacctgaagaacactgctgacttcaacattgcccatccgtcagttatgtagcattaaagttatagtggttcctcagaaagcagtctcctttgaaaacttctcgttttgtgtctaaatggaattaaataccttgttcccgaataattgttttagttctcttgaaagatcccgtatacttactattaagatgtatataaacctcaagctgaaagaatgacttcccctatggccagatcacaagactctccactgatgtgcccgttgcaacctgattagaggaagagggtcaaagttccccaagattcagctgagttcatgcaagttttagaaaaaaaacaagatgttcctccacagttagaaaggagtggggctggagggatgactcactgagaaaggttattgtcgtacaagcatgaagacctgagctcgaagcctggcacccatgtaaaaagaaaccatgcatggtagtgtgcatcttcaatcccagcattggggagacagagaaagagaaagggacatccctagagcttcctggtcagccagccttggcaagccagtgaactccaggttcagtgagagacctgtctggggaggaaaaagnnnnnnnnnnnnnnnnnnnnnnnnnnnnnnnnnnnnnnnnnnnnnnnnnnnnnnnnnnnnnnnnnnnnnnnnnnnnnnnnnnnnnnnnnnnnnnnnnnnntgaggaagatacctgatatcaacctcacacactcatgtacccatgtatgtaggtacctnnnnnnnnnnnnnnnnnnnnnnnnnnnnnnnnnnnnnnnnnnnnnnnnnnnnnnnnnnnnnnnnnnnnnngatggtgttgaattctaaggctcttatccacacatatatggagacaaatagaagaattacagtcgtccctgcctttgacgctactctgtttctccaaccctgcttcccagatatttttcaacatctactcagccttgagtggttgcactctgaccccaggacctct

SEQ ID NO: 649 - DNA, 240 bp, Cricetulus griseus
ccactcgaccaggttctgggctgacaaatatcaagacggaagagatctctgaagtgaagatggatgcagagttcggacacgattcaggatttgaagttcgtcatcaaaaactggtgttctttgcagaagatgtgggttcaaacaaaggcgccatcattggactcatggtgggcggcgttgtcatagcaactgtgattgtcatcaccttggtgatgctgaagaagaaacagtacacatcat

SEQ ID NO: 650 - DNA, 172 bp, Cricetinae gen. sp.
agttatcccaaaatgatagcagaagactttcccggaattggcaacaaagttgatgctgttttccagaaaggtggatttttctatttcttccatggaaaaaggcaatacaaatttgatcccaaaactaagaaaattttgactcttctaaaagctaatagctggttcaactgca

SEQ ID NO: 651 - DNA, 272 bp, Mesocricetus auratus
ttctggctcacgcttttcctcctggaccaaattatggaggggatgcccattttgatgatgatgaaacctggacaagcagttccaaaggttacaacttgtttattgttgctgcccatgagcttggccactccctaggtctggaccactccaaggacccaggagccttgatgtttcccatctatacctacactggcaaaggccatttcatgcttcccgatgatgacgtgcaaggaatccagtttctatatggtacaggagatgaagaccttaac

SEQ ID NO: 652 - DNA, 828 bp, Cricetulus griseus
ccaagctcatcaggccaggcacacgggagagaaaccctacaaatgtgaggagtgcgggaagagctttactcgggcctccacgctcctggaccatcagcgaggccacactggcaacaagccctaccagtgcgacgcttgttggaagagtttctgtcacagctcagagtttaacaatcacctcagagtgcacactggagaaaagccctacgtgtgtgaggagtgtgggaagggcttcagccaggcctcgcatctcctggcacatcagagaggccacactggggagaaaccctacaagtgtggcacgtgcggaaagggattcagccggagttcagatcttaatgtccattgtcgaatccacacgggagagaaaccctacaaatgtgagaggtgcgggaaggccttcagtcgagtgtcaattctccaagtgcatcagagggtccacagtgacgagaaaccctatcagtgtgacgcgtgtgggaagggcttcaccgtggagtcacaccttcaggctcaccagaggtcccacactggagaaagaccctatcggtgcgaggagtgtggcagaggcttctgcagagcttccaactttctagcccaccgtggagtccacactggagagaaaccctaccgatgtgacctgtgtggcaaacgcttccgccagaggtcctacctccacgaccaccaccgggttcacactggcgagaaaccgtacaagtgtggggagtgtggcaaggtcttcagctggagctcctacctcaaagcccaccagagggttcacactgggcagaaaccttaccgatgtgaggcgtgcggcaaagggttcagctg

SEQ ID NO: 653 - DNA, 1146 bp, Cricetulus griseus
  misc_feature (771)..(790): n is a, c, g, or t
atgatgttctcgggcttcaacgccgactacgaggcgtcatcctcccgctgcagcagcgcttccccggccggggacagcctgtcctactatcattccccagccgactccttctccagcatgggctcccctgtcaacgcacaggacttctgcgcagatctgtccggctccagtgccaactttatccccaccgtgacagccatctccaccagcccagacctacagtggctggtgcagcccaccctggtctcctccgtggccccatcgcagaccagagcgccccatccctacggagtccccaccccttcggctggggcttactccagggccgcaatggtgaagaccgtgtcaggcggcagagcgcagagcatcagcagaagaagcaaagtagagcagttatctcctgaagaggaagagaaacggagaatccgaagggaaaggaataagatggctgcagccaaatgctggaatcggaggagggaactgactgatactctccaagcggagacagaccaacttgaagacgagaagtctgcattgcagactgagattgccaatctgctcaaagagaaggagaaactggagttcattttggcagcccaccgacctgcttgcaagatcccggatgacctgggcttcccagaagagatgtctgtggcttccctggatttgactgggggtctgcctgaggccactaccccagagtccgaggaggccttctcactgcctcttctcaatgacgctgagcccaagacatcactggagccagtcaannnnnnnnnnnnnnnnnnnntgaaggctgagccctttgatgacttcttgttcccaccatcatccaggcccagtggctctgagacgacggccagatctgtgccagacatggacctatccggttccttctacgcagcagactgggagcctctgcacagtagctccctggggatggggcccatggtcacagagctggagcccctgtgtaccccggtggtcacctgtactcccagctgcacaacttacacgtcttcctttgtcttcacctaccccgaggctgactccttccccagctgtgcagctgcccaccgaaagggcagcagcagcaacgagccctcctctgactcactgagctcacccacactgctagccctgtga

SEQ ID NO: 654 - DNA, 90 bp, Cricetulus griseus
ccccggatgatctccagtggtctggggtgcaggcttcaaacctgtagctgtttagcgacagagtggttcatttccacctttcgggcgcca

SEQ ID NO: 655 - DNA, 1902 bp, Cricetulus griseus
atgccggagatcagcctccgccacgtcgtgtccggcagcagccaggactcgacccattgtgcagaaaaccttctcaaggccgacacctaccggaagtggcgggcagccaccgcaggcgagaagaccatctctgtggtcctacagttggagaaggaggagcagatacacagcatagacattgggaatgatggctcggccttcgtagaggtgctggtgacccggtctgccggagggggcggggccacagccatcgagcaggactatgaggtccttctggtcacctcctctttcatgtccccttctgagagccgaagtggctcaaaccccaaccgcgttcgtatgtttgggcctgacaagttagtccgggcggcagcggagaagcgctgggaccgtgttaaaattgtgtgcagccagccatacagcaaggactcaccctatggcctgagttttgtgaggtttcacagccctccagacaaagacgaggcggagactccatcccagaaggggaccgtgaccaagctcggccagttccgtgtgaaagaggaggatgatggtgccagctccctaaagccaggggctctcttcttcagtcgcatcaacaagacgtcttcagcctctgctcgcggcccagcaggacccagctatgcagcagctacactgcaggcttctaatgcaacctcctcggcctcttcggtctccaaggctttgggtagctcttgcaagcctcaggagtctcccaaagggaagaggaaactggacttgaatctagaagacaggaggcctgccagcaaaccttcagcagggccacccaccctcaagagacccaaactgactgttcctagtcgctccccagctgcagccgcagcctctaccccagcacagaaggcagccccagggaagccccgagaaggcacggagcccaggggagcccgagctggcccccaggagctggggaagattctgcagggtgtggtggtggtgctcagtggcttccagaaccccttccgctcagagcttcgggacaaagccctggagctgggggccaagtatcgtccagactggaccccggacagcacacacctcatctgtgcctttgccaacacccccaagtacagccaggttctgggcctcggaggccggattgtgcggaaagagtgggtgctggactgttaccgcctgcggcgccggctgccctcccgcaggtacctcatggcagggcttggctccagcagtgaggatgaggaggacgactctcccggtgagagtggtgaagacgaagctcccaagctttcccggaagcggcctcaggccaaagccaagacccaagcagcaggacccagctcgccccagagaccacccactccaaaagagaccaaatcgccctcaccagaaccccaggacaatagtgacactgaaggggaacagtcagaaggacaggacaatggggcggaagattccggagacaccgaggatgagctgaggagggtagccgagcagagggagcagaggcagcccccagctccaggggagaatggtgaggacccatatgctggctccacagacgagaacacagacaacgaggcttccacagaggctgacctgccaattccagagctcccagacttcttccagggcaaacacttcttcctgtacggggagttccctggggacgagaggaggaagcttatccgatacgttacagctttcaatggtgaacttgaggactacatgagcgagcgggtccaattcgttatcacagcccaggagtgggaccccatctttgaggaggccctgatggagaacccttccctggccttcgtccggccccggtggatctacagttgtaatgagaagcagaagttactcccccaccagctctatggagtggtgccacaggcctga

SEQ ID NO: 656 - DNA, 750 bp, Mesocricetus auratus
gtccttaatactcctatcgcgttggcctagctctgagataatgcacaccacacgttgcatcttggctttgttgctctgcctcactcaggctatgtctggctgctactgccagggcacactcattgaagaaatagaaaatctgaagaaatattttaactcaagtagcttagatgtcgtgaatggaggggacctcgtctttaatatcttgacgaactggcaaaaggctggtgacacaaaaatcattgagagccagatcgtctccttctacttcaaactctttgaagccttgaaggacaaccaggccatccagaggagcatagacaccatcaaggcagacctgtttgctaacttcttcaacagcagcatggagaaactcaatgactttgtgaagctcaccaagattccggtaaatgaccttcaggttcagcggaaagctgtcaatgaactcatcagtgtgatgcctcacctgtcacgaaaacttagcctaaggaaacggaaaagaagtcggtgctgttttgggggtggaaatcgtcccaacaagaatattcttgccagcaatatttgaatttaaaacttaaacctatttattaatatttaacattatttatatggaaatttatatttttagaataaccaaccaaagaagtatttatgatagcaacttttctgtgatgaaaatgaatttctattaatatatatatgttatttataatttctgtatcctcaactatctcacctgaccatttattg

SEQ ID NO: 657 - DNA, 80 bp, Cricetulus longicaudatus
gctgaaaggtgactaaaattgcttagagttattgtaccctggtcaagcggtacaaccccaaaatggttaaggttgcaagg

SEQ ID NO: 658 - DNA, 2148 bp, Cricetulus griseus
  misc_feature (1562)..(1589): n is a, c, g, or t
  misc_feature (2098)..(2148): n is a, c, g, or t
ggcacgagtgggaacgcggagcggacgaattcgattcaacggggttccggaccaggctatggagcaggtgaatgagctaaaggagaagggcaataaggccctgagtgctgggaacatcgatgatgccttacagtgctattctgaggcaattaaactagatccccagaaccatgtgctctatagcaatcgctctgcagcctatgccaagaaaggagactaccagaaggcctatgaggatggttgcaagactgttgacctgaagcctgactggggcaagggttattcaagaaaagcagcagcccttgagttcctaaatcggttcgaagaagccaagcgaacctatgaagagggtttaaaacatgaagccaataacctccaactcaaggaaggcttgcagaacatggaggccaggttggcagagaggaaattcatgaatcctttcaacttgcctaatctgtaccagaagttggagaacgatcccaggacaaggacactgctcagtgaccctacctaccgggaactcatagaacagctacggaacaagccttcagacctgggcacgaaaatacaagatccccggatcatgactactctcagtgtcctccttggggttgatctgggcagtatggatgaagaggaagaggcagcaacacccccacccccacctccttccaaaaaggaggccaagccagaaccaatggaagaagaccttccagagaataagaaacaggcactgaaagaaaaagagatgggaaatgaagcctacaagaagaaagacttcgacatggccttgaagcattatgacagggccaaggagctagaccccaccaatatgacttacataactaatcaagcagctgtgcactttgagaaaggtgactacaacaaatgccgggagctgtgtgagaaggcgattgaggtgggcagagagaaccgagaggactaccgacagattgccaaagcttatgccagaatcggcaattcctatttcaaagaagaaaggtacaaggatgctatccatttctacaataagtctctggcagagcacagaactccagatgtgctcaagaagtgccagcaggcagagaaaatcctgaaggagcaagagcgactggcctatatcaaccctgacttggctttggaggagaagaacaagggcaatgaatgcttccagaaaggggactacccccaagccatgaagcactatacagaagccattaaacggaacccaaaagatgccaaactgtatagtaaccgagctgcctgctacaccaagctcctggagtttcagctggcactcaaggactgtgaggagtgcatccagctggagccaacctttatcaagggttacacacggaaagcagccgccttggaagccatgaaggactatacaaaagctatggatgtgtaccagaaggcgctagaactggactccagctgtaaggaggcagcagatggttaccagcgctgtatgatggcacagtacaacagacatgatagccctgaggatgtgaagcgacgggccatggctgaccctgaggtgcagcagattatgagtgacnnnnnnnnnnnnnnnnnnnnnnnnnnnntgcaaaaggatccccaggctctgagcgaacacttaaagaaccccgtaatagcacagaagatccagaagctgatggatgtgggtctgattgcaattcggtgataacttgcttttcccctcttcccttcgccaatgtggaaaggcgagctgggacggtggcgagcagcactgggcagagggggggggaagaaaggcttatctttatatttatacatgcctgcaaggaagacagactcatccagcgccacctcggaccctctcagcacacgcatggtctcttcactgctgcccttgagtgtccttccctgtcctacccaaacacccccacccccctgccccacccccgtcactgtctcggctgctcccctatagttggttattttttatttggggcagtgggttcatacggggaggggagggaattcttccctacctggggtcccagctgtcttcacttgttgttaccccacgtccttcaataaaacaagccagtcaggcgtggttatatgnnnnnnnnnnnnnnnnnnnnnnnnnnnnnnnnnnnnnnnnnnnnnnnnnnn

SEQ ID NO: 659 - DNA, 1330 bp, Cricetulus griseus
  misc_feature (178)..(204): n is a, c, g, or t
  misc_feature (1058)..(1075): n is a, c, g, or t
atcgagccatttaacatggcggaggatgtttcctcaacggccccgagcccgcggggctgtgcggatggtagggatgccgaccctactgaggagcagatggcacaaacacagagaaacgaccaggatcagttcgaatgccaggaactgctcgagtgccaggtgcaggtgggggcccccnnnnnnnnnnnnnnnnnnnnnnnnnnntcgggcctggtggccgaggccgaggccgtggctgccggctggatgctccatttcctctgcctctctctttgccgagctttccgcgacggccgctccgaggacttccgcaggacccgcaacagcgcagaggctattattcatggactatccagtctaacagcttgccagttgagaacgatatacatatgtcagtttttgacaagaattgcagcaggaaaaacccttgatgcacagtttgaaaatgatgaacgaattacacccttggaatcagccctgatgatttggggttcaattgaaaaggaacatgacaaacttcatgaagaaatacagaatttaattaaaattccggctatagctgtttgtatggaaaatggcaactttaaagaagcagaagaagtctttgaaagaatatttggtgatccaaattctcatatgcctttcaaaagcaaattgcttatgataatctctcagaaagatacatttcattccttttttcaacacttcagctactaccacatgatggagaaaattaagagttatgtgaattatgtgctaagtgaaaaatcatcaacctttctaatgaaggcagcggcaaaagtagtagaaagcaaaaggacaagaacaataacttctcaagataaacctagtggtaatgatgttgaaatggaaactgaagctaatttggatacaagaaaaagtgttagtgacaaacagtctgcggtaactgaatcctcagagggtacagtatccttattgaggtctcacaagaatcttttcttatctaagttgcaacatggaacccagcaacaagaccttaataagaaagaaagaagagtaggaactcctcaaagtannnnnnnnnnnnnnnnnngcagaagagccactgaaagcagaatacctgtttcaaagagtcagccggtaactcctgaaaaacatcgagctagaaaaagacaggcatggctttgggaagaagacaagaatttgagatctggcgtgaggaaatatggagagggaaactggtctaaaatactgttgcattataaattcaacaaccggacaagtgtcatgttaaaagacagatggaggaccatgaagaaactaaaactgatttcctcagacagcgaag

SEQ ID NO: 660 - DNA, 392 bp, Mesocricetus auratus
ccagtcagccagacccacatgctccgagagctgaggactgccttcagccaggtgaagactttctttcaaaagaaggaccagctggacaacatactactcactgactccttactgcaggactttaagggttacttgggttgccaaaccttatcagaaatgatccagttttacctggtagaagtgatgccccaggcagagaaccacgggccagaaatcaaggagcatttgaactccctaggagagaagctgaagaccctcaggaggcaactgcagcgctgtcatcgatttctcccctgtgaaaataaaagcaaggctgtggaacaggtgaaggataactttaataagctccaagagaaaggcgtcttcaaggccatgaatgaatttgacatctt

SEQ ID NO: 661 - DNA, 399 bp, Mesocricetus auratus
gcaagactctgagccactcacgactgctgcttcacaagaaggaaaatggaatttggtccactgatattttaaaggaccagaaagatcctaaaaataagaccttcctgaaatgcgaggcagcaaattactctggacggttcacctgctggtggctgactgcaatcagcactgacttgaagttcaacgtcaagagcagcagtagctcctctgattcccgggcagtgacatgtggagcagcgtctctgtctgcagagaaggtcacagtggaccgaaaggactatcagaagtactcggtggcctgccaggaggacatcacctgcccgactgccgaggagaccttgcccatcgggctggtgatggaggcccagcacaagtataaatacgagaactacagcaccg

SEQ ID NO: 662 - DNA, 416 bp, Mesocricetus auratus
atcctgtcttgcactgacgctcgcactccttgtcagcagtgcacccacttcaagctctaaaaaggaaacccagcagcacctcgagcagttactgctggacttacaggagcttctgaaagggatcaataattacaagaatccgaaactccccatgatgctcacgtttaaattttacatgcccaagaaggccacagaattgaaacatctccagtgcctggaagaagaacttggagccctgcagagcgtgctggatttggctcaaagcaaaagctttcacttggaagatgctgagaatttcatcagcaatatcagagtgacagttgtgaaactaaagggctctgaaagcacattcagatgtgaattcgatgatgagacagtaactgtggtggaatttctgaacagatggatcaccttct

SEQ ID NO: 663 - DNA, 1780 bp, Cricetulus griseus
  misc_feature (1758)..(1780): n is a, c, g, or t
gtggccgccagcggagggagggcgcgggccgtgtcgcggccgggtccgcgctacgccaagccgagaggcctgcgctccacgactcgcggggcgggggcggggcggtccgggattgcgggcctgcgagccccaggcctgcgaaaggactcggcccccaactctggaaggctccggtgctcccagcacagttctgagacagccgggaatccagtgtccccttcctgatacaggggaatggggggtgtcgtggcagaggcccctgacccctgcccactacctcccagccccaggatgctcccttttgcctcctgccttcccgggtctttactgctctgggcgctcctgctgttgctcttgggagcagcgtctccacaggattcggaagagccggacagctacacggaatgtacagatggctatgagtgggacgcagacagccagcactgccgggatgtcaacgagtgcctgaccatccccgaggcctgcaagggcgaaatgaaatgcatcaaccactatgggggctatttgtgtctgcctcgatctgcggctgtcattaatgatctacatggcgaaggccctccaccaccagtgccccctgctcaacaccccaatccttgcccaccaggctatgaacctgatgaacaggagagctgtgtggatgtggacgagtgcgcccaggctttgcatgactgtcgccctagccaagactgtcataacctgcctggttcctaccaatgcacctgccctgatggttaccgaaaagttgggcccgaatgcgtggacatagacgagtgtcgctaccgatattgccagcatcgatgtgtgaacctgccaggctcttttcgctgccagtgtgagccaggattccagctgggtcctaacaaccgttcttgtgtggatgtgaatgagtgtgacatgggagccccatgtgagcaacgctgcttcaactcctatgggaccttcttgtgtcgttgtaaccaaggctatgaactgcaccgggatggcttctcctgcagtgatatcgatgagtgcagctactccagttacctctgccagtatcgctgtgtcaatgagccgggccgcttctcctgtcactgcccacaaggctaccagctgctggccacaaggctctgccaagacattgacgagtgtgaaacaggtgcacaccagtgttctgaggcccaaacctgtgtgaacttccatgggggctaccgctgtgtggacaccaaccgttgcgtggaaccctatgtccaagtgtcggacaaccgctgcttctgccctgtctcgaaccccctgtgtcgagagcaaccttcatccattgtgcaccgctacatgagcatcacctcagagcgaagtgtgcctgcagacgtgtttcagatccaggcaacctccgtctaccctggcgcctacaatgcctttcagatccgtgctggaaacacgcagggggacttctacattaggcaaatcaacaatgtcagtgccatgctggtccttgccaggccagtgacaggaccccgggagtatgtgctggacctggagatggtcaccatgaactctcttatgagctatcgggccagctctgtactgagactcaccgtctttgtgggagcctacaccttctgaaggagaccctcagggaagggctgggtggggcccccctctttctccctctcatagcttaaggagcctggggttgaggagtgactgttctgcttaaagagacaatgatgtgaaggacaataaagggagaaaggaggnnnnnnnnnnnnnnnnnnnnnnn

SEQ ID NO: 664 - DNA, 926 bp, Mesocricetus auratus
  misc_feature (904)..(926): n is a, c, g, or t
actcagagactattggagaactccagggaggtcacccacaccgttcaggatgaaaactgtagtgctggccgtggctgtgctcttcctgaccggaagccaggctcggcacttctggcagcgagatgacccccagaccccatgggacagagtgaaggatttcgccactgtgtatgtggatgcggtgaaagacagcggcagagaatatgtgtctcagtttgaaacctccgccctgggcaagcagctgaacctgaatctcctggagaactgggacaccctgggctcaaccgttggtcgcctgcaggaacagctgggcccagtgactcaggagttctgggataacctggaaaaggagacagaatggctgaggcgggagatgaacaaggacctggaggaggtgaaggcgaaggtgcagccctatctggaccaattccagaccaagtggcaggaggaagtggctctttaccgccagaagatggagcctctgggcgccgagctgcgcgatggtgcgcgccagaagctgcaggagctgcaggagaagctaacccctctgggcgaggatcttcgtgaccgcatgcgccaccacgttgacgctctgcgcacaaagatgacgccctacagcgaccaaatgcgcgaccgcctggctgagcgcctggcccaactcaaggacagccccaccctggctgagtaccacaccaaggccgctgaccatctgaaggcgttcggcgagaaggccaaacccgctctggaggacctgcgccagggcctgatgcccgtgtttgagagctttaagaccagaataatgagtatggtcgaggaagccagcaagaagctgaatgcccagtgaggctcccatcttcataccccacccctacattggctttcttagaataaacctttccaaagnnnnnnnnnnnnnnnnnnnnnnn

SEQ ID NO: 665 - DNA, 171 bp, Mesocricetus auratus
cccatgaatgcatttatggtgtggtcccgtggtgagaggcacaagttggcccagcagaatcccagcatgcaaaatacagagatcagcaagcagctgggatgcaggtggaaaagccttacagaagccgaaaaaaggccctttttccaggaggcacagagattgaagatccta

SEQ ID NO: 666 - DNA, 2747 bp, Cricetulus griseus
  misc_feature (91)..(91): n is a, c, g, or t
  misc_feature (104)..(105): n is a, c, g, or t
  misc_feature (211)..(211): n is a, c, g, or t
  misc_feature (311)..(311): n is a, c, g, or t
  misc_feature (479)..(610): n is a, c, g, or t
  misc_feature (1337)..(1353): n is a, c, g, or t
  misc_feature (1775)..(1803): n is a, c, g, or t
  misc_feature (1968)..(1984): n is a, c, g, or t
  misc_feature (2005)..(2043): n is a, c, g, or t
  misc_feature (2334)..(2334): n is a, c, g, or t
  misc_feature (2344)..(2344): n is a, c, g, or t
  misc_feature (2454)..(2454): n is a, c, g, or t
taaataatacataaataaatgtaaaaaaataaaaccctaaaagccatatataatgccaccagtattatatctgaagtggttatcagggccnaagttctcctgtnntgtaacttctttttccccctagtttgttagaatcagagttcaaagctccgtattatgtttggttcatgagttcctttacatttctttccaggtgtggagtggtttngcaaagtatttgttaaaacaataagccttgctccacttttgggctgcataacatgtggccctctctgatgtggtgaaggatgccagcccctcccaccagnatgtagcctgggaatagtgtcagcctatgctcagctccttggtgctctctgttgtggtctgttatgtatccatgtcctcctaacagctgttaatagtagagtccagtgtgttcgtaataataaagtaagtctagttattctcacttttcttcctttgtggtttaatgnnnnnnnnnnnnnnnnnnnnnnnnnnnnnnnnnnnnnnnnnnnnnnnnnnnnnnnnnnnnnnnnnnnnnnnnnnnnnnnnnnnnnnnnnnnnnnnnnnnnnnnnnnnnnnnnnnnnnnnnnnnnnnnnnnnncttgtctcatcttctgtatatgtagggagacaccgtaaccacgcctcctaaaggctggcaacaggtgtgcctgaccacgcctgtcagggcatggtcaagtgagatcaggatgatgcgtgttacaactgttgcagatgggagcctctgcttgtgagaaggagcgagaagctttcatcagttgaggaggagcctggggtgaaccaagatagaaaagttgaggttataaaaccattagtggaggaaactgagagtgcaatcagagctacattcatgcttgggacctctgggaccagccctccagtggcactgaggacacaggagcctgaaatagaactctccagcgagcctcggcctaatgaagaatgtcttcagatactggagagtgccgagaaaggtgcaaagttccttagcgatgcagaaatcatccggttggtcaatgccaagcacatcccagcctacaaattgggaactctaatggaaactcatgaacatggtggatctattcaccctttaagaacctaacacgagtcatcctgacctcaccttgaccacgcccagcccttaggaggtgtggctacgatgtctccctacatgtataaactctaaaagtgatttggcctcaggaaagataccttacgttatctggggaagacttcatcaggtgtgtgggttggcctaaggagaacagatctttatatgctaacagctttctgtccacctgtgagtnnnnnnnnnnnnnnnnntctactctgtgatctagcagcatttgctgtgtggccctgtgtatgcatttgaggcatttcttactctctagctattgtcttttgttttgaaaccttgtcggtcatcagtgggtcttctcgttcatttccaggtgtcctgttgttgcatttgggaaatgaagacttcaaaagaggagggaggccctggtagagtgtttccattttccatatataactcctaacatttatatatacagtacatacttccttttttgtggaagctgatagtccagagaaggctaagctgtttaatgttttcaaaaaaggtcaaaacaagaactaagtttggcagttcacacttgtaatcccagcagtgaggaaactgacacaggaggagtgccacaaatcaaagctagcctgggctgtaccaagactctgtctgnnnnnnnnnnnnnnnnnnnnnnnnnnnnnaactaaccaaacaaagcgaaacatcaaagcataatttcatggttaaaatctgaaaatctggggcctggcaagatggctcaaagctaagagcacacaagtgctcttgcagagaactcgagtttagttcagagcatccatgttggcagctcacaaccacctgtaatnnnnnnnnnnnnnnnnnacaattgatgccctcttccannnnnnnnnnnnnnnnnnnnnnnnnnnnnnnnnnnnnnnaacagacacgcatccatataaataaacacgaaaagttgaagtcatctttcctatcttcttcaatcctttgccaaaatttactctggatgcctgaattttgaaaagtcctccattgtgtttgttattcgtggatcctgaatgatcatgatctgcagcttagtccttgaggttctaatggctttcccaccaactccacctttcacacaacacagcccaagtttctcattgtgtccagcccctgcccccgcttcttttggacaagagttggattaaagcaaaccaccttggcancttttgtaanccccaatagcagtttcggacagcactgaccagtaggcatggtgcccggagcccaagctgaggacctgcctgccttgctctcatttcgcttacgatagagcattttccctncagcaactaataacgtttatttggtttggaaacttaggtttcctaatccacaagagacagactgtccagaaatgctgggtggtcctcagcgtgtccaattccaacagcttcagaccagcacgtcagcccagcaactgcctcagctggagcctttccatggatgctttcctgtggagagccatccgccacatgtccacaaaggaggctgattcagtgagccatgcagactgatgctccacaccctgcaccctcccagcttgaacagttccccacatggctgtgtggccttttag

SEQ ID NO: 667 - DNA, 138 bp, Mesocricetus auratus
tggaaagtgttaccacaggggttcaaaaatagccccaccctcttcgatgaggccctccaccacgacttggcagattttcgcatcagacatccgtcattgatcctgctccaatacatggatgacctgctgctggccgcc

SEQ ID NO: 668 - DNA, 138 bp, Mesocricetus auratus
  misc_feature (7)..(7): n is a, c, g, or t
  misc_feature (85)..(85): n is a, c, g, or t
tggaaantgttgccacaagggttcaaaaatagccccaccctctttgatgaggccttacatcaggacttggccggatttagagtcnaccaccctgaggtcctcctcttacaatccatggatgacctcctgctggcctcc

SEQ ID NO: 669 - DNA, 138 bp, Mesocricetus auratus
tggaaagtgttgccacagggaatgttaaatggtcctactttatgccaggattttgtacaaaaaccattagaaataacccacaaacaatttctgcaatctataatttatcattacgtggatgacctgctgctggcctcc

SEQ ID NO: 670 - DNA, 138 bp, Mesocricetus auratus
  misc_feature (4)..(28): n is a, c, g, or t
tggnnnnnnnnnnnnnnnnnnnnnnnnnatagcccaactttgtgtcaatattttgtgcataaacctctggaaataattcttaaaaaatttccacatttgttaatatatcattacatggatgacatcctgctggcctcc

SEQ ID NO: 671 - DNA, 204 bp, Mesocricetus auratus
ggacccaatggaatccttgcccatgcctttcagccaggtcaggggattggaggagacacccattttgattcagaagaaacatggactgaagattccagaaattacaacctgtttctcgtggctgctcatgaatttggccattccttaggactctcccactcctctgatcccggtgccttgatgtatcccaactatgctttcagg

SEQ ID NO: 672 - DNA, 3960 bp, Cricetulus griseus
  misc_feature (884)..(901): n is a, c, g, or t
  misc_feature (1171)..(1200): n is a, c, g, or t
  misc_feature (2581)..(2598): n is a, c, g, or t
  misc_feature (2778)..(2795): n is a, c, g, or t
  misc_feature (3281)..(3300): n is a, c, g, or t
aagcttgctatatagaccaggctggccccaaattcagagatctgcctgcttctgcctcctggagtactgggattacaggtttgatagcccatctggctttacttttactttttgtctaacatttccacagataaatataaatataataaatataaataaacagcaagtaatgtcattataagaaaaaactgtcaccccaaaccaaaacaaaatgtgataaatgcacattaaaatggcctattagaagtaaaaaaaaaaaaaatcaacaaaaagatgttttaacgatttagaaaaaaaatcccttactggcctaggttttaagacatcgtctttgcaagcccctaattttgagacaaggtcacacatagcacagggtgtccttaaactcccaagtgccatgattacatactgtaccacaactcagctttctttccaacatctctatacaggctacttaggttttagagatgtgcatgttcacatacagtcgtcagaatcaattcaacttatgcatgcctcctactctttagtgactttgtctgtgatcccaaggaaccctgcacaaggtcatctttttggatttaatacatagtaactacagcagtacaactgtcagcagcttcccctttaaagtaactcagtcccagtgcctaaaagagggagtcccaaagacacatatatttctactatgtaacctgaaacatcacacacaggtccatgcagcttatatgtgtgtgctggtgctttgggagatgataggcaagatacaatttgtaaataatcgctattgagaattgtgcagtgtctggtgctttcgcatagttcccaaaacccactgatacccatttccattctaaatgtaatgaaaaagacacctgaaacannnnnnnnnnnnnnnnnngtaacttctgatacccgttctgctgtcctttctcattctaaacaattatagtgtaatctctttgtgcgactatagagcagtctcagaacactttattttcgaatgttcagcacataaaaggtgctcaataaaacctgaatacagccgggcatagtggctcacacctttaatgctggcacttaggaagcataggcagacggatctctatgagtccgagaccagcctgtcctacaaggcaagttccgggatagtcagagttacaaggtgagnnnnnnnnnnnnnnnnnnnnnnnnnnnnnngtgcccgaacgaacccactacgtccatgtgcattgggatacttatgtccatacgtctgtgacacttttagccgtcagccaaacgcgaatcaagtttttgtataagggaatctgggcgcaagcctgtgacagcaacactcgggaagctgaagcaggcaacaggctagaatatcgggaaacggctccccgttgcaaaaaaccctgtaaacgggacaaggcgccgcaaccccggccgcagccactcacctgtgcccggggccgtgacgtaagtgcgccgcgggttcgccagcaccttgccgtcgcgcaccacgcccacgccgatcttgttggcgctgccttcgaaccccagcaccgcgggcatggtgcaccccggctcgggatctgcggatggcaggactagtcgtaaccggcagtaccacgaacagcccagaaccaagcgatgggaccttcaggcgccctaagtgacgtcatgaggtgccaggtggaccaatcacaacactcctgatccacgtggggggaggggcgacctcggatcacgtgaccacaccaagctcccacgtggggacaggctccattctttgtgctgtgagcggcttcctggcttcgttggtaggtccggtagcttgtgctagctggttcggcggccctgctcgcagaagggcctaacgggggcgaggagctgcggggctgggatgcacgtggcgaggaaggctgggtgaaccgattgcacccccctcccccggtgtgcgagcgcctgatttcgccgtttcttatctgtaggcaacgctgtaaacactgcttcggtgctccaggcgcctaagggctttcgtcacagggatgccaaagcgtgggaagagagcggcggcagaagacgggaaagaacccaagtctggtaagcaggtgaaagtagcgcgtgggttaccccacctccaaatttaggactctactagaccaccatgagctacgctaaatatggaccacgttacattgcgggagtccgagaagttagggtaactagagcgcctcgtggggttggaaaccgctagctcttactttactcattttatagagccagagaccaagaagagtaaaggagcagcaaagaaaaacgagaaagaggctgcaggagagggccctttcctgtatgaggacgctccagataataaaacgtcacccggtggcaaacttgccacactcaagatatgctcctggaacgtggatgggcttcgagcctggattaagaagaaaggtttagatgtgagtacaattcaggagggaagtagattttccttgacagcctaaagaattatcttggagttggggctgtagtggcgcacgccttgaatcccagcagaggcaggcggatctctgtgagttcctgnnnnnnnnnnnnnnnnnntgcaagttccaggacagccaggactatacagaaaccctgtctcgataaaacaaaaacgtgtttactgtgagcccagaggatgttattttttttcttgcctgtagttggggctgggagcaagaaatgtcccttcgatcccaatcaccttgtctcatattctttttaactattcgctggaannnnnnnnnnnnnnnnnncccaataactactaaagatctcagtgggggaggggctggagcacttcgctctgcttcggaattaggtttctagtacccaagtcaaatggctcagtccattcacataccctaaaagtccctttgtcattcacatggtttacatataccctgctgcttgaattccttatgtactgggatccagtgtgtatactatgtagcacataagatttttcttaacttttcacgtttcattagtgggtaaaggaagaagcaccagatatcttgtgcctccaagaaaccaaatgctcagagaacaaactccctgcagaacttcaagacctgcctggactcacccatcagtactggtctgctccatcagacaaagaaggatatagtggcgtgggcttactttcccgccagtgccctctcaaagtctcttatggcattggtgagactattgatttttatgtctgagtgttcttcagcaagttaactctgctgcttagnnnnnnnnnnnnnnnnnnnntttatgctggatttcatttctgtaggtgaggaagagcatgatcaagaaggccgggtgattgtggcagaatttgactcctttgtcctggtaacagcctacgttcccaatgcaggcaggggtctggtaaggctggagtaccgacagcgttgggataaagccttttgcaagtttctgaaggacttagcttcccgaaagcctcttgtgctatgtggggatctcaatgtggctcatgaagaaattgaccttcgtaaccccaaaggaaacaagaagaatgctggctttactccccaggagcgccagggctttggggagttgctacaggctgtaccacttactgacagcttccggcacctctaccccaacaccccctatgcctataccttttggacttacatgatgaatgctcgggctaagaatgtcggatggcgccttgattactttttgttgtcacactcccttttgtcttccttgtgtgacagcaagatccgctccaaagctcttggcagtgatcactgtcccatcaccctttacctagcactgtgacacccctgctgaagtaacttacacctgggaaatagcctcctctcaagtccagtgtcctttaggccccggggttttgattttttgtgtaccccctgttttaaatgttaaaccaagctt

SEQ ID NO: 673 - DNA, 1137 bp, Cricetulus griseus
  misc_feature (1114)..(1137): n is a, c, g, or t
gggcggcgacggtttcctggtggccgcgcgctgctctgtgagcggcgggtggcagacggacctgggccctcaccccagacgcaccgcggatctggcatggctcacctgatgacaatgcagttgctgctcctgctgatatgggtatctgagtgtgcccaatcaagagctactcgggccagaactgaactgctcaatgtttgcatggatgcaaagcaccacaaagaaaagccaggccctgaggacaatttacacaaccagtgcagtccctggaagaagaattcctgctgttccaccaacacaagccaggaagcccacgaggacatttcctacctgtaccgattcaactgggaccactgtggaaagatgacattggaatgcaagcgacactttatccaggatacctgtctctatgagtgttctcctaacttgggaccctggattcagcaggtggaccagagctggcgaaaagagcgaatccttgatgttcctctgtgcaaagaggactgtcagcgatggtgggaggactgccgcacctctttcacctgcaagagcaactggcacaaggggtggaactggacctcggggtataaccagtgccctgtgggagcctcctgtcgccacttcgacttctatttccctacacctgctgctctgtgtgaggaaatctggagtcactcctacaaactcagtaactacagccgagggagtggccgctgtatccagatgtggttcgacccagcccaaggcaaccccaacgaggaagtggcaaggttctatgctgaggccatgagtggagctgggcttcacggggcctggccactaatgtgcagcctgtctttagtgctgctctgggtgttcagccgagttcctttaaccttctgatccccaggaactccctgccgggcttagactcccagctcccaacctcctttgtggtggggcctctgacaggcattcaatatctctcttatgaattatttgggtgtgaatgggaatataattattttgcatcctacttaccactgattgaagttgtttaaacttggttagttccctgctctaacacttactgtgggcaagttaaataaacttaattttcctgtgctgttccacnnnnnnnnnnnnnnnnnnnnnnnn

SEQ ID NO: 674 - DNA, 6023 bp, Mesocricetus auratus
  misc_feature (221)..(246): n is a, c, g, or t
  misc_feature (3856)..(3877): n is a, c, g, or t
  misc_feature (5539)..(5559): n is a, c, g, or t
cgcagtttttgcttggattcagcccccacctcctcagcaccgacttgcgttcccccccagagctcacctaccttggtaatccggagctgcccctgctcaaacaaccgccccccccccgccgccccctggccccagctcaaaaccaagcaaacgacctcttcaggcatcccttggcagggaggttttgcacaatgtttacccgtcagtgtctcgggggctgnnnnnnnnnnnnnnnnnnnnnnnnnnccattcattcatccatctgtgttctgaaggaagaacgcacccccacccccaccccccagaacacagatggatgaatgaatggcctcagtatcataggtaaagtaggttactgtacacttatttagaattcttcatttgctgcttccagccccagtcctggggttaattgaggccaggggctgagaaaattataacatttttttttgcactgatttgcggtgggcaagcttttcaagcctttagggctgcgtaccagtttctcctaatatcagattcagaaatgtcccaaattcctggacaatggaaaggaggcgacccccgccccccccaccccagtttcatggccctgacctgggaacagggtccacattgaatcaggtgcgaatgttcgctcgccttctctacctttcccgcctcccctcccccggccgcggccccagctcccccctcccccgcgctgcaccctcagagttggctgcagccggcaagcagttcccgtcaatccctttcccacaggatgtccatattaggacatctgcgtcagcaggtttccacggccggtccttgtagacctgggggtgacgatccccaaaatcctacatgcggagagtccaggagaccccctaagacccctattgtgaacacaaatgggtgaaaattacatgtcaagacggaggcgggggacccggggcgcggagttgacgccagggcggccgcagaaggcctgggggcgcgcggctcccctccgtcgccacagttccgcccagtgacgtgtaatgttcattcacaagcgcttctataaaggcaccggctgaggcgcctactactccaaccgcgactgcagctagcgactgagaagactggatagagccggcggcgggaacgagcagtgaccgcgctcccacccagctctgctccgcagctcgcaccagtgtctacccctggacccctcgccggactttccctagatctcgaccatgatgttttccggattcaacgccgactacgaggcgtcctcctcccgctgcagcagcgcctctccggccggggacagcctttcctactaccactccccagccgactccttctccagcatgggctcccctgtcaacgcacaggtgagtttgccttcgcgcagccgctgggtccgcgctgagggtctagaagaggggacaccggggtgggacactcgggatgtcagttggagggggctcttcccttttagcttgggaaggagactgttggtcagagcagccccagcctgggaatccaggactcatctgagcgcttgcacgcttgtcatagtaagacttagtgcccccttccccgcgcggcaggtttattttgagtggcctacgctcttctctcggtgacttgtctctgagatcagccggggccaaggagtctcaagcaaagactcgctagctagagcctgggaggcggcaaacagcggcaattcccccctcctggggcagcctggggccgggaggagggaggagggtgcctgcgggcgggtgtgtaaggcagtttcattgataaaaagcgagttcattctggagactccggagcggcgcctgtcagcgcagacgtcagggatatttataacaaaccccctttcaagcgagtgatgctgaagggataacgggaacgcagcagtaggatggaggagaaaagctgcgctgcagaattcatgggaggaaattgggagagctttcatctcggatgagatgcatacaggaagacacaaggagtactgtgacccgaatgtttctctctctccctgctgcatgcgacactaaggccacttgctccaccgctgtctggaacctgctcgctcacctccagtttcttctttttgttttgcttcaggacttctgcacagatctgtccgtctccagtgccaactttatccccaccgtgacagccatctccaccagcccagacctgcagtggctggtgcagcccaccctcgtctcctccgtggccccatcgcagaccagagcgccccatccctacggagtccccaccccttcgactggggcttactccagggcgggaatggtgaagaccgtgtcaggcggcagagcgcagagcatcggcagaagaggcaaagtagagcaggtgggcagcgattctggaccaggggttgagaggcacgggggcggggggggggaacaacacacatcaaaaaagggaaaaccccaatgcaactgactgcacttccccctctggagccatggctccaacccctttccctccctttttaaattctaacccttggccccaaaaatttctctaaacagtttcccaaacagcttcctacctctttctttattctgggagcttcatgtccccttgctaaagatcttactttacatgcaaatcacactcagcctgccaactgctggttagaaaaactgcttcacctagaggtgcgggtactgcaggcgccagtttcactggggtggctgaatgcaggggacgccagacaaccttactgaatgaatgttggtcctttttctattattctagttatctcctgaagaggaggagaaacggagaatccgaagggaaaggaataagatggctgcagccaaatgccggaatcggaggagggaactgactgatactctccaagcggtaggtagagcctgctggctacttctgaaagttcaaagctggagtttgggactaagggatgggggtccttgagtgagactgtgtcttacgcggtccttcgtctctccttgtgcaggagacagaccaacttgaagacgagaagtctgcgttgcagactgagattgccaatttgctcaaagagaaggagaaactggagttcattttggcagcccaccgacctgcctgcaagatcccagatgacctgggcttcccggaagagatgtttgtggcttccctggatttgactgggggtctgcctgaggctactaccccagagtccgaggaagccttctcactgccccttctcaatgaccctgagcccaagccatctttggagccagtcaagagcatcagcaatgtggagctgaaggctgagccctttgatgacttcttgttcccagcatcatccaggcccagtggctctgagacgacggcccgatctgtgccagacatggacctatccggttccttctatgcagcagactgggagcccttgcacagcagctccctggggatggggcccatggtcacagagctggagcccctgtgcaccccggtggtcacctgtactcccagctgcacgacttacacgtcttcctttgtgttcacctaccccgaggctgactccttccccagctgtgccgctgcccaccgaaagggcagcagcagcaacgagccctcctctgactccctcagctcacccacactgctggccctgtgagcagtcagggaaggggaggcagccggcatctgcaagtgctgctgcctgagctggtgcattacagagaggagaaacgcgtcttccctccagggttcctgtagacctagggaggaccttatctgtgcgtgaaacacaccaggctgtgggcctcaaaggacttgaagcatcctgctctggactcaagtcctcacctcttccggagatgtagcnnnnnnnnnnnnnnnnnnnnnnccgcatggagtgtatggttcctagacacctgagagttggtagttagtagcatgagagccaggcctgggtctgtgtctcttttctctttctccttagtcttctcatagcattaactaatctgtccggttcattattggaattaacctggtgctggatattttcggattgtatctagtgcagctgattttaacaatacctactgtgttcctggcaatagtgtgtcccaattagaaatgaccaatattaaactaagaaaaaatagaactttattttctagtagatagaactaagtagctgtatccatgtactgtagtccctcttcaacgtcaatgttcatcgtgatgtcactgatcatgcattgtcgaggtgatctgaatgtgctgacattaacagttttccatgaaaacgttttattgtgttttcactttatttattaagatggattctcagatatttatatttttattttatttttttctaccctgaggtctttcgacatgtgaaaagtgaataggaatgaaaaatttaagcattgtttgcttattccaagacattgtcaataaaagcatttaagttgaatgcgaccaccttgttgctctcttttgttcagatggttacgtgtggtttctggaaggcattactggagaccagtttgtcaagatgggtaggtcctggaggagacacacctctgcctgttccttatcacacagaaggaaacgctagttcgggacatttgacagatacgtgtgttcatattgcattgctgagattttctacctacctgccctgggggacgaaagctgcatgtaacagcttgagtaagaccacactttcctgcttctcttttctgctttctggggagagcagtcttaaatttatgtgctcatcttacatttagcagttttcatgggaaaggaatcctttgaatagagagccagttctataaaaactactttagctttcttttttgtattgtttgagataggatcttgctaggtaggtagcccacagtgtcctcaaactcacagtaatcttcttgcctcaggcttgtcagtgctggttattacagataaccagcaaatttagctttttattcctacaaatcatgtgaagatttactcttagaagcaagtgagttgaagaatggttgaaataaacgactttccacactgtaacccatgtcaccgcttcccacacttgcccaatctaggcttaactgcctcttttttaagattaagttttaaaattgcatttatttatgtgtggaaggctttaagagcaacctccagaagctgtgaatcctggagattgaaatcaggttgtcaggcatgaaacaagcacctttacccacgaagcaattttgccagccctgaatttcctccttcatttttatttattgttaagaatgttttgggggcatgtatgtttatgcaaaatgtgcatgcagtcccacagaggccagaagagggcgatgggttcccttggaaatggagataagagacaatggttttagcctccatgccagtggtgggaaattgagcctgggtcctttgcaggattttcaagtgcttttagttgctgagccatttttccagcctttgaacaaaattttaataattggctttaaaagttctcccttgaataaggtggtagtggtacatnnnnnnnnnnnnnnnnnnnnnaaggcagagttggtgtatatttgtgagttcgagggcatcctggtttacaaagcaaattccaggacagccagagctcttatacagagaaatcttgtcttgaaaaaccaaaaaagtttttccttggttaaaaacaacagcaatttttcaattgtttatttttgagataggttctaatgtggtctagtttgctatacagctgaggctgggtcctgaactcctgatctttctggttatatctctcaagtgctgggatcacaggcatgcaccaccatacctggctcactctaacatatgttcatttggtcaaccctttttattctcagaaggaggaattgtcctaccacacagcagaaaccaaattctaatttttgatgttactttaatgccaagtacaattcagattacagttggggggagctgactattcaaagacctcatgcagcataaataatggctgaccaacc

SEQ ID NO: 675 - DNA, 1881 bp, Mesocricetus auratus
  misc_feature (449)..(465): n is a, c, g, or t
  misc_feature (1636)..(1675): n is a, c, g, or t
atggcggaccagagaatggacatctcttcaacaatcagtgacttcatgtccccaggccccaccgacctgctctccagttccctgggcaccagtggtgtggactgcaaccgcaagaggaaaggcagtgccaccgactaccaagaaagtatggacacagacaaagatgaccctcatggaaggttagaatatgcagagcaccaaggaaggatcaagaatgcaagggaggcccacagtcagattgaaaagaggcgtcgggacaaaatgaacagtttcattgatgaattggcttctttggtaccaacatgcaatgcgatgtccaggaagttagataagctcaccgtgctgaggatggctgtccagcacatgaaaacgttgagaggtgccacgaacccatacacagaagcaaactacaagccaacatttctctccgatgacgaactgaaacatcnnnnnnnnnnnnnnnnngatggatttttgtttgtcgtaggatgtgacagagggaagatcctcttcgtctctgagtctgtcttcaagatcctcaattacagccagaatgaccttattggccagagtttgtttgactacctgcatcctaaagatattgccaaagtcaaggaacaactatcttcctcagacactgcaccccgggagcgactcattgacgcaaagactggacttccggttaaaacagatataacccccgggccatcccgactgtgctctggagctcgccgctctttcttctgtaggatgaaatgcaacagaccttcagtaaaggtggaagataaggactttgcctctacctgctcaaagaaaaaagcagatcgaaaaagcttctgcaccatccacagcacaggctatctgaaaagctggccacccacaaagatggggctggacgaagacaatgagccagacaatgagggctgtaatctcagctgcctcgtggcaattgggcgactgcattcacatgtggttccacaaccagtgaacggggaaataagggtgaaatctatggagtatgtttctcggcacgccatagatgggaaattcgtttttgtagaccagagggcaacagctattttggcatatctaccacaggaacttctaggaacatcatgttatgaatattttcatcaagatgacataggacatcttgcagaatgtcacaggcaagttttacagacaagagaaaagatcacaactaattgctataagtttaagatcaaagacggttcctttatcacactacgaagtcgatggttcagtttcatgaacccgtggaccaaggaagtagaatacattgtatcaactaacactgttgttttagccaatgtcctggaaggcggggacccaaccttcccacagctcacagcgtcccctcacagcatggacagcatgctgccctctggagaaggtggcccaaagaggactcatcccactgttccaggcattccagggggaaccagagctggggcaggaaaaataggtcgaatgattgcagaagaaatcatggaaatccacaggataagagggtcatcaccttccagctgtggctccagcccgctgaacatcacaagtacacctccccctgatgcctcctctccaggaggcaagaagattctaaatggagggactnnnnnnnnnnnnnnnnnnnnnnnnnnnnnnnnnnnnnnnnaagagaccccaggttatccatattctgatagttcttctattcttggtgagaacccccacataggcatcgatatgatagacaacgaccaaggatccagtagtcccagtaatgacgaggcagcaatggctgttatcatgagcctcttggaagcagacgcgggcctgggtggtcccgttgactttagcgacttgccatggccactgtag

SEQ ID NO: 676 - DNA, 1317 bp, Cricetinae gen. sp.
gtcctgtagtcacacctgtgctgaggttttagctgtagggttcagcatgtccaccgtcaaggagcagctaattcagaacctaactcaagaagataaaacctcccggtgtaagatcactgtggtgggagttgggaatgtcggcatggcgtgtgctattagtatcttactgaaggatttggccgatgaactggcccttgttgacactgataccgacaaactgaagggagagacgctggatcttctgcatggcagtcttttcttcaacacttcaaagattgtctctggaaaagattacagtgtgtctgccaactccaaattagttatcatcacagccggtgctaggcagaaggtgggggaaacacgccttgacctggtccagcgtaacgttgctatcatgaaatccatcgttcctggcttagtgcaacatagtcctgactgtaaaatgctgatcgtctcaaacccagtggatattttgacttatgtggtctggaagataagtggcctgcctgcaactcgtgtaattggaagtggctgtaacctagattctgcccgtttccgttacttgattggagagaagttgggtgtccaccctacaagttgccacggctgggttcttggagaacacggtgactctagtgtgcccttatggagtggtgtgaacgttgctggcgtacttctgaagtcactgaacccagcgttaggaagcgactcagaccaagagcactggaaaaagatccacaaccaagtggtggagagtggctatgaggtcctccggctgaagggctatacatcttgggctattgggctgtccgtgacagatctggcaagatcaatcctgaagaatcttaggagggtgcatcccgtttccacactggttaagggcttatatgagataaaggaagaaatctttctcagcattccttgtatcttgggacaaaacggcatcacagacattgtgaaagtgaacctgaatcccgaggaggaggcccttctcaggaagagtgcggaaacactctggaacgtccaaaaggacctcaaattgtaaagtttcagaattcgactgctgagcagatatgtgattgcgtattgcacatctcaaacctttccaaataataaatagttgaacaaactatcagagacctatgacataacagcatcctgttgagatgagacagacacagacgtttcctccttcccctctcttcgctacagagccctggctgcctggagctgcagactcagctcgcctcagagatctgctaacctcgaagttaagggcgtgcaccaccatgaccagctgaagtctctgcctttttc

SEQ ID NO: 677 - DNA, 90 bp, Mesocricetus auratus
atgactgaatataaacttgtggtagttggagctggtggcgtaggcaagagtgccttgacgatacagctaattcagaatcattttgtggta

SEQ ID NO: 678 - DNA, 1228 bp, Cricetulus griseus
  misc_feature (1135)..(1170): n is a, c, g, or t
  misc_feature (1201)..(1228): n is a, c, g, or t
ggcacgaggtctgaggtggctttgggcggcctctgagcgtttgtgtccctcgcccgctaccttccttcctttggttcccaccatgccgatgtaccaggtaaagtcctatcatggaggcagcgcacctctgcgtgtcgagcttccaacctgcatgtaccggctccccaacgtgcacagcaagactaccagccccgcgaccgacgcgggccacgtgcaggaaacatctgagccatctttgcaagcccttgaatcccgccaagatgatattttaaagcgcttatatgagttgaaggcagcagttgatggcctttcaaagatgattcacactccagatgcagacttggatgtaaccaacatcctgcaagctgatgagcctgtgcctttaaccacaaatgcactggacttgaatttggtgcttggaaaggattatggggcactgaaagacatcgtgatcaacgcaaacccagcctccccacccatttccctgcttgtgctgcacaggctcctctgtgaacgctacagggtcctgtctactgtgcacacacattcgtcagtcaagaatgtacctgagaatcttctcaagtgcttcggggagcaggccagaaaacagtcccgccatgagtatcagctgggcttcactttaatttggaagaatgtgcctaagacacagatgaagttcagcgtacagacaatgtgccccatcgaaggagaagggaacattgcacgattcttgttctctctgtttggccagaaacacagcgctgtcaatttaaccctcattgacagctgggtggatattgccatgtttcagctgaaagaagggagcagtaaagagagagcagctgttttccgctctatgaactctgctctggggaagagcccatggctggttgggaacgagctcaccgtggcagatgtggtgctgtggtccgtgctacagcaaactggggatggcagtggggtagcacccgccaatgtgcagaggtggctgaagtcctgtgagaaccttgtccccttcagtactgccctccagctccttaagtaagttctagcagcttgtcttacagggttcaacataagaatgatacagcttcaagtttgttgtcaggaaagggacttgtcctagaatcacaannnnnnnnnnnnnnnnnnnnnnnnnnnnnnnnnnnnagataatctgtggattttattttaagtcagnnnnnnnnnnnnnnnnnnnnnnnnnnnn

SEQ ID NO: 679 - DNA, 4199 bp, Cricetulus griseus
  misc_feature (130)..(150): n is a, c, g, or t
  misc_feature (4177)..(4199): n is a, c, g, or t
tgttcgcggcagaggcgccgttcccccgggcccgccgacctcgagcctgaggcggacgcaggtcggccctcagagtggtttcttgggcatccccactagatttgggtctgtggtgcaaatggagtctagnnnnnnnnnnnnnnnnnnnnnatgagagaagcccctgtccaagatggagaagaagcggagaaagaaatgaaagcctctttttgggccaagctgtgggtgaccatgggactgaggttttctttacgttggacaagtctgtaggatggctgatcagtaaggttgcagcttttagccaaaacagaaattcacttctgatcaaggaagaacctagtgcgatttgaatttatgcaattttatgaccatattcacttaggaccatgaagctcatcaacatctggcttcttctgctggtggttttgctctgtggaaagaagcatctgggtgacaggctggggaagaaagcgtttgaaaaggcatcatgccctagctgttcccacctgactttgaaggtggaattctcctcaactgtggtggaatatgaatatattgtggctttcaacggatacttcacagccaaagctagaaactcatttatttcaagtgctctgaaaagcagtgaagtagacaactggagaattatacctcggaacaacccatccagtgactaccctagtgattttgaggtgattcagataaaagagaagcagaaggccgggctgctcacacttgaagatcatccaaacatcaagcgggtgacacctcaacgcaaagtctttcgttccttgaagtttgctgaatctgaccccattgtgccatgtaatgaaactcggtggagccagaagtggcagtcatcacgacccctgagaagagccagtctctccctgggctctggattctggcatgcaacaggaagacattcaagccggcgattgctgagagccattcctcgacaggttgcccagacattgcaggcagatgtgctgtggcagatgggatacacaggtgctaatgtcagggttgctgtttttgatactgggctcagtgagaagcatccacacttcaagaatgtgaaggagagaaccaactggaccaatgagcggaccctggatgatgggctgggccatggcacatttgtcgcaggtgtgattgccagcatgagggagtgccagggatttgccccagatgcagagctgcacatcttccgggtctttaccaacaatcaggtgtcttacacatcttggtttttggacgctttcaactatgccatcctaaagaagattgatgttctaaaccttagcatcggcgggcctgacttcatggatcatccctttgttgacaaggtgtgggaattaacagctaacaatgtaatcatggtttctgctatcggcaatgatggacctctttatggcactctgaataacccagctgatcagatggatgtgattggagtgggtggcattgactttgaagataacatcgcccgcttttcttccaggggaatgactacctgggaactaccaggaggctatggtcgcgtgaaacctgacattgtcacctatggtgccggagtgcggggttccggtgtgaaagggggctgccgggcactctcagggaccagtgtcgcttccccagtggttgctggggctgtcaccttgttagtaagcacagtgcagaagcgggagctagtgaatcctgccagtgtgaagcaagccctgattgcatcagcccggaggcttcctggtgttaacatgttcgagcaaggccatggcaagctggatctgctgcgagcctatcagatcctcagcagctacaaaccacaggcgagcttgagtcctagctacatcgacctgactgagtgtccctacatgtggccttactgttctcagcccatctactatggaggaatgccaacaattgttaatgtcaccatcctcaatggcatgggagtcacaggaagaattgtggataagcctgagtggcggccctatttaccacagaatggagacaacattgaagtggccttctcctactcctcagtgttatggccttggtcaggctacctggccatctccatttctgtgaccaagaaggcagcttcctgggaaggcattgcacagggtcacatcatgatcacggtggcttccccagcagagacggaagcaaaaaatggtgccgagcatacttccacagtgaagcttcccattaaggtgaagatcattcccacccctcctcggagcaagagagtcctctgggaccagtatcacaacctccgctaccccccaggctactttcccagggacaacttgcggatgaagaatgatcctttagactggaatggcgaccatgtccacaccaatttcagggacatgtaccagcacctgcgcagcatgggctacttcgtggaggtgctcggtgccccattcacgtgctttgatgctacacagtatggcactttgctcatggtggatagtgaagaagagtacttcccagaggagattgccaagctgaggagggacgtggacaatggcctttccctcgtcatcttcagtgactggtacaacacttctgttatgagaaaagtgaagttttacgatgaaaacacaaggcagtggtggatgccagatactggaggagccaacatcccagctctgaacgagctgctgtctgtgtggaacatggggttcagcgatggcctttatgaaggggagtttgccctggcgaatcatgacatgtattatgcatcgggatgcagcatcgccaagtttccagaagatggtgttgtgatcacacagactttcaaggaccaaggattggaggtcttaaaacaagagacagcagttgttgaaaatgttcccattttggggctttatcagattccagctgaaggtgggggccggatcgtgttgtatggagattccaattgcttggatgacagtcacagacagaaggattgcttttggcttctggatgcactccttcagtacacatcatatggcgtgaaccctcccagcctcagccattcagggaaccggcagcgcccacccagtggagctggcttggcccctcctgaaaggatggaaggaaaccaccttcatcgatactccaaggttcttgaggcccatctgggagacccaaaacctcggcctcttccagcctgtccacacttgtcatgggccaagccacagcctttgaatgagactgcgcccagtaatctttggaaacatcagaagctgctctccattgacctggacaaagtagtgttacccaactttcgatcgaatcgccctcaagtgagacctttgtcccctggagaaagtggtgcctgggacattcctggagggatcatgcctggccgctacaaccaagaggtgggccagaccatccctgtctttgccttcctcggagccatggtggccctggccttctttgtggtacagatcagcaaggccaaaagccggccgaagcggaggaggcccagggcaaagcgtccacagcttacacagcagacccacccaccaaggaccccgtcagtgtgatcatcacagtggccagccacagaagccaacaagccttggaccactctgatggccacacagggcatcagaagagcatcctgggaggtgcctatttccaagggaccccatctccagcttgtggctgggttagtgtgttctccccaggcatctctgagttacatcctgaagtacctcactgtgctgggctcttgacaggaggtgctcagtagctcagcctccagtggtgtcagcaggcccagtgacagtgcaccaaagacacagagcctggaagggctgtcgggacacactttctacataaagcttacaatcctgaccaagcgaagaaatgcttgttacaggctattttctatatttattgtggggagagtcactttaaagacttgtactgtttggaagcaaagctgttgtgtttgtcagttgagtgcagttttctgcagtgacatcataaggagtcagatcccatgacctttttgatgagaggacagactgaactgaagggcatgtgcacagatctgggaaatgcaagccttcgctttatttttataagtatcaactgccatcatgttttgtaatttggggtcttgatttcaccattgttggtgaaagaaattttcaataaatatgcataaccnnnnnnnnnnnnnnnnnnnnnnn

SEQ ID NO: 680 - DNA, 1671 bp, Cricetulus griseus
  misc_feature (468)..(489): n is a, c, g, or t
  misc_feature (1651)..(1671): n is a, c, g, or t
ctctaaagggagcggcggcagcggcggcaggagccaagaagcaggctccggacgctgcttaggaaccgggggacccaggagtgcccgcaccctgagctctcagctccggaggcgtcatggccgagtacgggactctccttcaggacctgaccaacaacattacccttgaagatctggagcagctcaagtcagcctgcaaggaggacatccccagcgagaagagtgaggagatcactacaggcagtgcctggtttagcttcctggagagccacaacaagctggacaaagacaacctctcctacattgagcacatctttgagatatcccgccgtcctgacctactcactatggtggttgactacagaacccgtgtgctgaagatctcagaggaggatgagctggacaccaagctaacccgtatccccagtgccaagaagtacaaagacattatccggcagccctctgagnnnnnnnnnnnnnnnnnnnnnnccccaccaaagaaggcttgagcaaaggggagaagaagaagaaggttggatcttcatcagaccactcccttccccatcctcaatgggaggggctagggcaaccccctgccccgtacccacttactaacttggtcctaacccccttactatgcgcgtgtgtgtgcgtgttcacacgctctggctgtctgtctgtctagctcatctagttcctcctcctcgtgaggggactggagtcgggaggggggggcttaatttccccactatagggggaagtggaacctatttctatgtaaataaaaatgggcacattcctccttctcccctcccctccactcttcccgcattttcctacactgaggagctaaggttaagatgaggtatgggagagatggtgagagttaaaaccaatggggaaggaaggtaagaggctactcagcctctacctgggaaggggaaagaaaacccagaattcagggtttgtagatctatgctggactggctagaatccagtttcttgttattccttaggctgaagtcctaagagccaataggccctcttttatgcccttgtcatgggcctgggatgggtatgagccagaaatcttaatgagaagaccactagagcctttcctggcccccaaaatcaaaccccatggagaagccagcatttgatgtccccaacttctgctctggagagactatgctgggaccatgtactactgagcctgagatagggatgcaggtggagacaggcccaacttctactcctttattcctaaatacagactgttgaatatactgaccctgagcctaaggaggtttgggggaatgagatctataggttttaacctcaacctgcccatacctacagggtcccaatatggatattgtaggtaaccttcacaccagtctccagtttagaataccccaacaagaaagaagttaatcatagtggtttcctttgcacctattaccaccccagttcaatccaggaagggacttggttaaacctttctcaattgggtttgtggatgcctccaagccaagtcactagagtacagtgagtgaacccagcctcctacctgtcccaagatgcccttccccatcttgaccgtgctaactgtgtgtacatatatattctacatatatgtatattaaacccnnnnnnnnnnnnnnnnnnnnn

SEQ ID NO: 681 - DNA, 353 bp, Cricetulus sp.
aagcttaacgaggtgtatagtctcttgtagtatatatgtatatgctgttacatacactgtacagaatctgtactcctgtttggtgtgtaatataccacttagctttgtatgataggtcataaacttctaatttttgagagaaccacataaaaataaacagtctgtattatattagacaaaatagtaagctttataaaaagttatttttggtaaatagtaaagaattagtgtggaatgtgatgaaattaaaatatagctttgatataattttatgtgttacttcaacatatactgaaaatcaacatgatttgaataaataaaatgtattttgtacttggaaaaaaaaaaagctt

SEQ ID NO: 682 - DNA, 360 bp, Cricetulus sp.
aagcttaacgaggccaagcctagcactattgccaccagcatgcgggattccctcattgacagcctcacatgagtcaccttccatgctgctgtgtgggctcctggctctggactttggctcatttaccatgcctgagctagtatgtaccaaacgctggcagcagggcgtggcagagagcttaccagagctgaatggttgagcgcgcccaacccttcttcatccgtgccatctctagactattgttataaaaaggcttgccgtgtcatgctggctttgagttgtggctcctggatgagagttctgctgtcttgtgtcccaccccattaaagtactgcctccccccataaaaaaaaaaagctt

SEQ ID NO: 683 - DNA, 496 bp, Cricetulus sp.
  misc_feature (39)..(64): n is a, c, g, or t
  misc_feature (66)..(79): n is a, c, g, or t
  misc_feature (84)..(121): n is a, c, g, or t
  misc_feature (171)..(190): n is a, c, g, or t
aagcttctcaacgaggcggccgagcggcagacgctaacnnnnnnnnnnnnnnnnnnnnnnnnnngnnnnnnnnnnnnnntcttnnnnnnnnnnnnnnnnnnnnnnnnnnnnnnnnnnnnnncaagatccaagataaggaaggcattccacctgaccaacagagrctgatannnnnnnnnnnnnnnnnnnnggatggccgcaccctgtcagactacaacatccagaaagagtccaccttgcacctggtgcttcgccttcgtggtggcatcatcgagccatcccttcgtcagcttgcccagaagtacaactgtgacaagatgatctgccgcaagtgctacgcacgcctgcacccccgtgcggtcaactgtcgcaagaagaagtgtggccacaccaacaacctgcgccccaagaagaaggtcaaataaagctttggccataccaggcccatgaccctgggaccaaataaagtccccttccatcgaaaaaaaaaaagctt

SEQ ID NO: 684 - DNA, 346 bp, Cricetulus sp.
  misc_feature (18)..(42): n is a, c, g, or t
aagcttaacgaggacgannnnnnnnnnnnnnnnnnnnnnnnncagaacccacgacagtacaagatcccagactggttcttgaacagacagaaggacgtgaaggacggaaagtacagccaggttctggccaatggtctggacaacaagctgcgagaggacctggagcgactgaagaagatcagagcccacagggggctgcgccacttttggggtcttcgtgtccgaggtcagcacaccaagaccactggccgccggggccgcactgtgggtgtatccaagaagaaatgagycgctgggccttcactgttaataaatagtttatatgcctgtgaaaaaaaaaaagctt

SEQ ID NO: 685 - DNA, 1082 bp, Mesocricetus auratus
  misc_feature (703)..(731): n is a, c, g, or t
  misc_feature (1062)..(1082): n is a, c, g, or t
gtccctggaggttggctgtaggattcaggtggcttgctcaggctgggatcaaggacacagtgagcagatcaaccttaacctcagcccctcccctcgccacaggaggacactggtgtcagcagcatgaagctgaatttcactggtctcagggctctggtgaccggggcagggagagggattgggcgaggcactgcgaaagccctgcatgcctcaggagccaaagtggtggccgtgtcactcatcaacgaagacctggtcagcctggccaaagagtgtccgggcatagagcctgtgtgtgtggacctgggtgactgggaggccacagagaaggcactgggccgtattggccccgtggacctgctggtgaacaatgcggcggtggcgctagtgcagcctttcatacagtctaccaaggaggtctttgacaggtccttcaatgtgaatgtgcgctctgtgctgcaagtgtcccagatggtagccaagggcatgattaaccgtggagtggcaggatccattgtcaacatctccagcatggtggcctatgtcaccttccctggtctggccacgtacagctccaccaagggtgctataaccatgctgaccaaagccatggccatggagctgggaccatacaagatccgggtgaactctgtaaaccctaccgtggtgctgactgacatgggcaagaaagtctctgcagacnnnnnnnnnnnnnnnnnnnnnnnnnnnnnccacccactgaggaagttcgcagaggtggaggacgtggtcaacagcatcctcttcctgctcagcgacagcagcgcctctaccagcggctctggcatcctggtggacgctggttacctggcctcctagacggcccaggtgcaggggactcctggagacttccctggcctcacccttacatcaagaccccgccttcaacccaacccaataattttgttcgaatcctgtagagccccaccccacacacatccatccccaactttagactccgggatcccgccattccataccagctatgctgagataatttgattaaataagtatcccaaaccnnnnnnnnnnnnnnnnnnnnn

SEQ ID NO: 686 - DNA, 1695 bp, Cricetulus griseus
ctgtgacccaccctggtggcctgcacgtgcacctactccctgcacgtgcaccgcctgtaggcgctgacgccgagacactgccagcccaaggagatgttgtcggatgtccgcccgcatctctgctaccctgcagtagagcttggcctgcagaaggagcaaaggagacaggattcagggatcccccaggccatggatacgccccgagcagccaagggacagtgtccctggcgtccatgcctcatagggctgttgctgcagctgctgtttgctctgtgcttcttctcctacatccgagtatcccatgaccaacccggccccccagctcctgatagctccacaggaccagcctccaccccaactacccctgtccccagacccttcctcatcttactgtggacatggcccttccacagcccactgactctgtacccctgttccaagatgctcccaggcaccgccgactgccagatgactgtcaaccggagcttgtacccccaagcagatgcagtcatcttccaccaccgagaaatcagccccaaccccaggtcactgctgccaagtcagccgaggccgccaggccagcgctgggtgtggttcagcctggagtcacccagccactgcagcaggctgtcagccctggatggacacttcaacctaaccatgtcctatcgcagcgactctgacatcttcacaccctatggctggctggagccgtgggcagagcctccagtccaaacccaggtcaacatgtctgccaagactgacctggtggcctgggctgtgtccaactggaaccccaagtcggctcgggtgctgtactatcagaagcttcagagtcacctccatgtggacgtgtatggccgaggacatatgcccctttcccgaggggacatgatggggacgctggccagatacaagttttacctggcgtttgagaactcacttcacccagattacatcacagagaagctgtggaagaatgctctggaggcctgggctgtgcccgtggtcctggggcccagcaggaagaactatgaacgcttcctgccccctgatgccttcatccacgtggatgactttgagagcccagcagacctggctcagtacctgcagaagctagacaaggacagccagagctaccagcgctacttccgctggagggagacgctcaggcctcgcttgtctagcatggcccttgccttctgccaggcatgcaggcagctgcagtgggaccagaggtaccagacggtccacagtgtggcctcttggttccactgaggtggctggccagagtcctgcaggcagtgtcccactcaaaattcatcctctgttgcccctgtgttgtgctctatcgtgctgggtagttttatttcaatttgatacaaactagagtcatgtgggttgatggagccacaattgagagaatggcaccaccagattgacctgcagggcattttcttaattagtgattgatggtaaggcctcagctcactgtgggtggtaccatccctgggctgcttgtcctgggttctataagaaagcaggctgagcaagccatggggagcaattcagtaagtggcctctgcctcagctcctgcctccaggttcctgcctgactctgtgaatgatggagtgtgactgagaaatgtaagctgaaataaaactaaagttacttagccatcatggcattttagc

SEQ ID NO: 687 - DNA, 1045 bp, Mesocricetus auratus
agatgcccatgttgagcccccactccctgaaacctgacaccctgcacctgccacctgggacctcggagttcctaggctgccagcggcgccacacactccctgccagcgagttccgttgccttaccccccaggatgccatcagcgtgtttgagattgagcgtgaagcctttatctctgtctccggtacctgtcccctctacttggatgagatccgacacttcctaactctctgtccagagctgtcgctgggctggtttgaggagggtcgccttgtggccttcatcatcggctcactttgggacaaggagagacttactcaggagtcactgacactgcacaggcctggaggccgcaccgcccacctgcacgtcctggcggtgcaccgcaccttccggcagcagggcaagggctctgtcttgctgtggcgatacctgcaccacctggggagccagccagccgtgcgccgggctgtgctcatgtgcgaggacgcactggtgcccttctatgagaaatttggcttccaggcggtgggcccgtgcgccgtcaccgtgggctccctcaccttcatggagctacagtgctccttacggtgccatgccttcctgcgcaggaacagcggctgctgacccaagctgcccactcggccacggagagggtggggagcagcaggcttggggttcctaattcccacgccacaccctcctctgcctagagcccatccaagtagagctggctagcatgaagggagagacggcagccgccagctggagtgcagaggtaaggatcaatgcagagggcaggaggtggccctgcctcagcacaggctgccatctgtccccaaaggacctcttgcattctgaactgtgcacaaagccaagaccaggatgggaaaccagagcggtgggaggtctgtccccacacacttctgcctctaccagctctgtttccgcaccccagtgcagcgccctgattcttggggtccttgctctccccagactgacaccccttcctggatcctaactgggaatgaggggcagccaggagc

SEQ ID NO: 688 - DNA, 1747 bp, Cricetulus griseus
  misc_feature (1)..(131): n is a, c, g, or t
  misc_feature (667)..(681): n is a, c, g, or t
nnnnnnnnnnnnnnnnnnnnnnnnnnnnnnnnnnnnnnnnnnnnnnnnnnnnnnnnnnnnnnnnnnnnnnnnnnnnnnnnnnnnnnnnnnnnnnnnnnnnnnnnnnnnnnnnnnnnnnnnnnnnnnnnnnnagtccagcaatgcagccgggaccagcgttgcaggccgtgttgctggcggtgctgctgtcagaaccacggagttcgaagggtcggctgctgagcgggcagctggtctgccggggagggactcggaggccttgctataaagtcatttacttccatgatgcttttcaaagactgaactttgaggaagccaaagaagcctgcaggagggatgggggacagctcgtcagtattgaaacagaagatgagcagagactgatagaaaaattcattgaaaacctcttggcatctgatggtgatttctggattggcctcaggaggctggaggtgaagcaggtcaacaacacagcctgccaggacctttatgcttggacagatgggagcacatcacaatttaggaactggtatgtggatgagccttcttgtggcagtgaggtctgcgtggtgatgtaccatcagccatcggcaccacctggcatcgggggctcatacatgttccagtggaatgacgaccggtgcaacatgaagaacaatttcatttnnnnnnnnnnnnnnnagaagccaagtacaacaccttctataaggcctggaggtgaagcaactgagccaccaacaccagtacttccagaagaaacacagaaagaagacaccaaagaaacattcaaagaaagcagagaggctgctttgaatcttgcctacatcctaatccccagcattcccctgttcctcttactagtggtcacttcagctgcatgttgggtttggatctgtagaagaagaaaacaagagcagccagatcctaccacaaaggagcaacacaccatttggcccactcctcaccaagaaaacagccccaacctagatgtttacaatgtcatcagaaaacaaagcgaagctgatttaactgagccccgcccagacctgaagaacatctcatttcgggtgtgttctagtgaagcccctcctgatgatatatcttgtgactatgacaacatggctgtgaacccttcagaaagtgggtttgtgactctggcaagtatggagagtggatttgtgaccaatgacatttatgagttctcccctgacagaatggggaggagcaaggagagtggatgggtggaaaatgaaatatattactaagacatatgaaaaactggcaaaaatgagaaaacaaaagcaaaagcctcctatttctcacaaggaaaatgttcagaaagtttatgaagatgctcagaccagttcttaaggtgagcacagaatctccacaagttcctactggggtccccaagttctggtatgtatcccttatcccagagcctcacccagctcagccttgtgagaaggcaccttgcctaggggctgccatacagcagaccctcaataactgtcagccagtgtgctgcaactgatgttcaagggctgatgcttccaatggtcaggataaaggtgtcaccaaggagtttggaaagcccgcctctaggctccttgctctctacagcagcacgtgcaatcatagaaagacataaactctggaatcttctcaaaggctatgtatggaagccccaggctggcctgcccagcaacaattcccatatcttcccctagcccaaataaaatccaat

SEQ ID NO: 689 - DNA, 201 bp, Mesocricetus auratus
atgactgagtacaaactggtggtggttggagcaggtggtgttgggaaaagtgctttgacaatccagttaatccagaaccactttgtggatgaatatgatcccaccatagaggtgaggcccattttaccagctggccctggctcccacttttggctctttcttaccaatgtgtcctctgtttttcgatactaaagaggagag

SEQ ID NO: 690 - DNA, 178 bp, Mesocricetus auratus
gtatttacattcctctagctatgccccaccaccaccacctcaacctttcacattcccaggattcttaccgaaaacaagtggtaattgatggtgagacttgtctgttggacatactggacacagctggacaagaggagtacagtgccatgagagaccaatacatgaggacaggcgaagg

SEQ ID NO: 691 - DNA, 403 bp, Cricetulus griseus
  misc_feature (383)..(403): n is a, c, g, or t
acctttgaggagccggttgctgtttggagcgagttagcggtgcggagatgtggttcgagattctccctggcctcgccgtcatgggtgtgtgcttggtcatccccggggtggccactgcgtacatccacaagtacaccaacgggggcaaggaaaaaagagttggtcgccttcgttaccagtggtatttgatggaaagagatagacgtgtctctggagtcaatcgctactatgtgtccaggggcttggagaacattgactagagaagcattttcctggcggatgaaaaaattacttggttattcatctgttcctgctagaaggcaaatgcagcatattatatactatgcgcatgttatgtaatgcttaataaaatttaaagaacnnnnnnnnnnnnnnnnnnnnn

SEQ ID NO: 692 - DNA, 297 bp, Cricetinae gen. sp.
tcatggacatacggctggccaccggttaatcttattagctggatacaccctagccaagggatgtcaaaacacctgaaggatgaggccagcctagtatcaattaaacttatgacaagggaacaaataccaaacgatagatgggtcactgtggctagctgtaaaggtttcaactcattagtagcagctgcccagtgccatgtgaaggaacaaactggtttttggttttcttttccctttcagttttaatgttatgtaatgtatttaaacccctatttaaataaaacttgtttaagaaat

SEQ ID NO: 693 - DNA, 398 bp, Mesocricetus auratus
  misc_feature (347)..(361): n is a, c, g, or t
ccaaggacgcagctttctatcctggccactctgaggtgcatagcgtaatgtccatgttgttctacactctgatcacagcttttttgatcggggtacaggcagaaccatacacagacagcattgtcccagaaggagactccgtcccccaagcccactggactaaacttcagcattccgttgacacagccctccgcagagcccgcagcgcccctggtgcatcaatagcggcccgtgtgaccgggcagacccgcaacatcactgggacccaactgtttaagaaacggagactccgttcaccccgtgtgctgtttagcgcccagcccccacccaccttcgcggacactctnnnnnnnnnnnnnnnggcccatggtacaatctccttcaacaggactcaccgg

SEQ ID NO: 694 - DNA, 389 bp, Mesocricetus auratus
  misc_feature (278)..(278): n is a, c, g, or t
gctgatccaggcggatatcttgaaaaacaagctctccaagcaaatggtggatgttaaggaaaattaccagagccccctgcccaaagcagaagcccccagagaacccgagcagggggagtccaccaggtcggaattccagcccatgactgcaagggacacagaactactgcggcaacagagacgctacaattcgccccgggtcctgctgagtgacagcacccctttggagccgcctccgttatatcttatggaggattatgtgggcaacccggtggtanccaacagaacatcttcgcggcggaaacggtatgcagagcataaaagtcatcgaggggagtactcagtgtgtgacagtgagagtctgtgggtgaccgacaagtcctcagcca

SEQ ID NO: 695 - DNA, 489 bp, Mesocricetus auratus
tgcgatgatccttgtggatgggcagccacgccaggccaaaggggagctagggctctctcagatgctccacatcgccagtcagatagcctcgggcatggtgtacctggcctcccagcacttcgtgcaccgggacctggctattagaaattgcttggttggagccaacctactggtgaagattggtgatttcggcatgtccagggacgtctacagtactgattactacaggctctttaatccatctggaatgatttttgtatatggtgtgaggtgggaggacacaccatgctccccatccgctggatgcctccttgaaagtatcatgtaccggaagttcaccacagacagcgtgtgtggagcttttggggttatactttgggagatctttacctatgggaagcaaccatggttccagctctccaacacagaggtcattgagtgcatcacccaaggccgtgtcttggagagaccccgagtctgcccaaaaga

SEQ ID NO: 696 - DNA, 297 bp, Mesocricetus auratus
  misc_feature (155)..(155): n is a, c, g, or t
  misc_feature (157)..(157): n is a, c, g, or t
  misc_feature (274)..(274): n is a, c, g, or t
tggcggtctggtgacttcgttgatgctggcttgtgcttgcgccgcatcctgtcgtgagacctgctgtcccgtgggcccctcggggttgcgctgcaccagggcagggaccctgaataccctccgcggcctgcggggcgccgggaacctgacggagntntatgtggaaaaccagcgggatttgcaacgcctggagtttgaggacctgcagggcctgggggagttgagaagcctaaccatcgtgaagagtggcttccgctttgtggcccctgatgcnttccatttcacccctcggctcaa

SEQ ID NO: 697 - DNA, 380 bp, Phodopus sungorus
atgaagttgatccagctttgcatcctattctggtgctggcgagccatttgctgccaaggctgtgagttaaccaacatcaccatcgcagtagagaaagaagagtgtcgtttctgcataagcatcaataccacttggtgtgcaggatattgctacaccagggatctagtgtataaggacccagccagacccaatacccagaaaatatgcaccttcaaggagctggtgtatgagaccataagactacctggctgtgctcaccactcagactccttctacacatacccagtagccactgaatgtcactgtggcaagtgtgacagcgacagcactgactgcactgtgcgaggcttgggacccagctactgctccttcggtgaaat

SEQ ID NO: 698 - DNA, 384 bp, Phodopus sungorus
atggagaggctccaggggctgctgctatggctgttgctgagccccagtgtggtgtgggcatccaggggtcccctgcggccactgtgcaggcccgtcaacgcaaccctggctgcggagaacgaagcgtgcccggtctgcatcaccttctccaccagcatctgtgccggctactgtcctagcatggtccgagtgttgccggctgccctgcctcctgtgccccagcctgtgtgcacctaccatgagctacacttcgcttctgtccgcctccctggctgcccacctggggtggaccccatggtctccttccccgtggcccttagctgccgctgtgggccctgccggctcagcacctctgactgtgggggtcccaggactcaaccaatg

SEQ ID NO: 699 - DNA, 5855 bp, Mesocricetus auratus
  misc_feature (3852)..(3871): n is a, c, g, or t
  misc_feature (4529)..(4560): n is a, c, g, or t
ctaccaggagcgcgtggctcacatggagagctcgctgggccaagcccgcgagcggctgggccgagccgtgcggggcgctcgggagggtcgcctagagctgcagcagctgcaggctgaacgcgacggcctccaggagcgcagagaggcgctggaacagaggctggagggccgctggcaggaccggctgcaggccactgaaaagttccagctggccgtggaagccctggagcaggagaagcagggcctacagagccagatcgcccagatcctggaaggggggcagcagctggcacacctcaagatgtcccttagtctggaggtggctacatacaggaccctgctggaggctgagaattcccggttgcagactcctggccgaagttcccaggcttcccttggttttcaggaccccaagctgaagctgcgtttccttgggacaccagagaaccagcacctgggatctgtgctccctgtcctcagcccaacacccctcccttcccccttgcctgatacccttgagacacccgtgacagcctttctgaagacccaggaatttcttcaggcccgaatccccaccttggccagcacacctatcccacccatgactgaggctccctgtcttgcaaaagcagaggtcagagcccaggatgcccctctttccctgctccagacacagggtgagaggcagcaggctccagagcctctctgggccaaagccacagcgtctgtttccaccggtgtcctcacagaactagaggaggctggaggccagcagccaggccacttccctgaggatgcgactgcctcagctccatccctcagtcctcatcaccctgttttagaggctaaagatggagactccactgagtctagaggatctagcatattccaggaagatgaagggcaaatctgggagctagtagagaaagaagctgccatagagttaaaagtagagagcagcttggcacaggaaacacaagaagatggtctacacacagaagaaatccaggattcccagggtcctttgcaaaaggaaaccctagaggctctaggagaggagccacttatgtccctgaaaatccagaaccatgagacccctgggaaggagaattgcaattctctgaggtctgtagacgagaaccagggaacactaaaaagcccagaagaagaaaaacaaacactactcaagtctttagaagaaaaggatgtagaggtagagaaaactctggaaaagggggttcctgaactgtctaagcctttaggaaaagaagacccaagaatcgaggatcaagaattaatgtctcctgaaggtacactagagacgctttcatttataggaaagagaaatgaagaggtagtgaggtcttcagaagaggagaacatagagtcattggcagcttttaaaaaggagagccagcatcctctgggatgcccagaagaagagatccagagggttgagaggctgatagaaaaggagggtcaggagtccctgagctctccagaagaggaggaccaggagacagatagacctttggagaaagagaatggagagccgctaaagcctgtagaagaagaggaccagctgtttgagacactgatagaaaaggagggtcaggagtctctgagctctccagaagaggaggaccaggagacagatagacctttggagaaagaagaggaccagctggttgagagactggtagaaaaggagggtcaggagtccctgagctctccagaagaggaggaccaggagacagatagacctttggagaaagagaatggagagccgctaaagcctgtagaagaagaggaccagctgtttgagacactgatagaaaaggagggtcaggagtctctgagctctccagaagaggaggaccaggagacagatagacctttggagaaagaagaggaccagctggttgagagactggtagaaaaggagggtcaggagtccctgagctctccagaagaggaggaccaggagacagatagacctttggagaaagaagaggaccagctggttgagacactgatagaaaagcagggtcaggagtgtctgagctctccagaagaggaggaccaggagacagatagacctttggagaaagaagaggaccagagagttgagaggctgatagaaaaggagggtcaggagtccctgagctctccggaagaggaggaccaggagacatacagacttttggagaaagagaatggagagccactaaagcctgtagaagaagaggaccagagagttgagaggctgatagaaaaggaagatcaggagtccctgagctctctgaaagaggaggaccagaggattgtgaaaactctagaaagagagaattgggaatctctgcggtctcttgatgaaaacctggacactgttatgccactagaaagcaagaaccagaagccactgaaatctctagaagcagaagaggagcagagaattgtgaaacctctagaaaaagtgagccaggactccatcgggtctctagaaaaagagaatgtggagctactgaggtctctagaagacgaccagataactgagagtctattaaaaaaagggactcaggagtccctggaatctcatgaagatagaaaccaggagacccaagatccacagagatttctagaagaggagggccaagggattgtgaaacagctagaaaaagaaaaccagggcttcctggggtctctagaagaagagaaggtggtcaagagatctctagaaagagagaaccatgaaccactgagttctgtagagaaggactgggtgactgagagcctgctagaaagagagagtcaggactcaggaaagtctcttgagggccaggaggcctttagatgtctgggaaaagaggatccagagtccttgcaatttcctgaagttcaggaccaagagatacagagatctcttcaacaagagactcagcagacactgggggctctcggagatgagcagatggcatcggaaccaccagaaaaggtgggtccagagttactgaagtttcttgggaatggccaggaaatagttagatctcttgaagagcagaaccaagagtcactggtgtcagtgaaagaaacaagtgtggagacagcgaagtcttcagacatggaggacatagaaccgctgaagagtgcagacgaggacctggaaataatcaactctgcaggagctcaagagtcactatggtctatggaagtgactagagagacaacgagacccctagaaaaagaagtccaagaatcactggggtttgtgggtgggaaccaagagatactgagaccccttgagagggggaatgaggagttgggatctctgggcaagtggaacctagaggctgtggactctccagaagcggtggaggagggcaggcaacccctgggagaggaagcatgcctagagatgggagaacaccaggaaccgccgaggtctctgggagaggtggagcaggggctgcctggctctggaaatcaacaaaagtgggaggacagggcagtggagaacgcagcagccgatcagggcccaaccctagggaggacgggaatagaaagtgaggatgaggcagagctgcccctgagtgggcaaggagagaaggaagaagatgctgaggagagggagctgcaactagacgccatgggggaggcctggagcctggcgagctctgagccccaggagccgagggtccctagtgagggagggagtgctggggccccccaaggcttggagggtcagtcagagcaggtgggggtcctaggggtcccagttggtcagggaatgccagaggtgacagagcccctgttgcaagaggatgtagcccaagcaggtaagcgagacccgannnnnnnnnnnnnnnnnnnngacgctgctaccagagccgggctgggcctggagcaggaagtggcagggtcaggagggtcaaggcatctggccagggaggaggccatccacccatccctgggggaggaaagtgtagaggcaaagatagctcacgacttggaagggcctggaaaagaaccgaaggaggcaggtgccctggagtcagagatctctgaattgcccaggactagcagtgatgttctggaatccaagggctgcaagcagtcagagcctgtgttgggatgggcagtggaggaagcctcggtggaggcctcagaccatgagggcagtgatgcccctgagcccaggccctcagagacagagggagatgagggtgcacaggcagcactagcaccccctggtcccaagctcatggaaccctgttcacccaccccaatcctgaaagatgcctatgagtggcagccccaggctgagggcacccgggaaactgggcggcagctagaaggtgggtctgcatcactggaaagggtagaagatgagcaagagtttggtcttggggggatccccgagggcctccaggattgggaggagagcagagaggaaagcgaggctgatgagttaggtgaaactctccctgactctactcccctgggcctctacctgaggtcccctacctccnnnnnnnnnnnnnnnnnnnnnnnnnnnnnnnnctcccctcaaggggaggccaggaaggaaggctggggtcctgctgtcccggctgcccagggcctcagcaacccaccgggggaggaggagcgaggccatgactctgacctatcatctgaggagtttgaggacctggggactgaggcctctcttcttccaggacttcctaaggaggtggcagatcatctgggccaggtacccccagggccagagcctgaatgctgggatcagggtggggagtctgatgggttcgctgatgaggaagagagtggggaggagggagaggaagaagagcatgaggacgggactgagtcaggggctcaatggtgggggtcaggaccctccaaggtccaacatgtcacccaaagaggggacctccaggaacacgagtctgtgggtatcagtggtccctgggatgatggctggagaggtgctgcagctggtatctctgtgactggcctggaaactgagtctcaggacagtgctgagccttctgggtcagaggtatctgagtctgtctcctcagagggggaggatcaagcccctgaccatttggataccccccaaggggtgactaacgtggtcccaggggcaggagacaccttcggtatcagtggccaggcccccaacttggagtcagaacacatgaacgggaggttggagaatgggttagagcagtctgaggggcagggagtcctggacaggcaccaggatcaaggacacccttcgcagcaacaggaagtgggtgccttaaaggcccctttgttagggtctcctgtgcaccgaggcccaagccagtccctggagttccctttgagtggggcagatagagattcctggtcctcgggggaagactagacagtgctcctctgatgctgagggcttcatggtggggggatgtcctcccttgctcggggccagcaccctcagtttcgatagcttgacctgtggtgtctgtcctggagaggtgtggcgggctgagggagatgaggtcctgtcagggccatcttgcttggattgtcctgaaggctcaagctgagtcccggcactaggccccctttcttctgcatctccctgccaggagaggcctggctctgagctttcccctggggctgctctggccaggtcttgctaaccctgcctgtctacagtagagccatcctcaccatgtctggtctggcctatacccagaggagctgagggcagcaattgtgaccaccgacctatcatcttatctcagcctgctgagattttgttctgctcttccttgtttgaataaagttgtgtccctccctac

SEQ ID NO: 700 - DNA, 2815 bp, Cricetulus griseus
  misc_feature (174)..(202): n is a, c, g, or t
  misc_feature (2794)..(2815): n is a, c, g, or t
ggcacgaggaaatgagccatttacttggtggaagaaaatagcttgacttaattaagtataatattattaaatataattaaatataaatgatggaaaatctgattatagccacattctttttgttgttaatttgtgtgggctttatttgtttgtttgtttttggatagagttttnnnnnnnnnnnnnnnnnnnnnnnnnnnnnctcttcctgccttcatctctcaagtgctgggattctgtgtgtgagccatcacacatgtccaagtcaaatcgtggaggatgttacatgttctgtggaccttctggatcttggtggccatgacagatctctccaggaagggatgttctgctcaggcatctctgtcatgtgatgctgctggtgtgtgtgatggccgctctaggtctttcacctccatcccctcaggactcacagcagccatgaagagccttgacctgtctaacaacaagatcacctccattggccatggtgaccttcgggggtgtgtgaacctccgggccctgatattgcagtccagtgggatcaacaccatagaggaagatgccttttcttccctgagcaagcttgaatatttggacctgtctgataatcacttatccaacctatcttcctcctggttcaggcctctttcctctttgaaatacctaaacttgctgggaaatccttataggatactgggggaaacaccactgtttctcaacctcacacatttacagacccttagggtaggaaatgttgccaccttcagtgggatcaggagaacagattttgctggactgacttctcttgatgaacttgaaatcaaagcgctaagtctccagaattatgagcccggaagtctgcagtccattcaaagcatccatcacttaacctttcacctaagtcagtctgatttcctgctgggggtttttgaagatactctgagttctgtgggatatttagaactgagagatgctaacttggacagcttctacttttcagaactgtccacggatgaaatgaattcaccgatgaaaaagctggcattccaaaatgcagatctcactgacgaaagttttaatgaacttctgaagctgttgcgttacactccagaactgttggaggtagaatttgatgactgcaccctcaatggagtgggcgattttcagccctcagagtcagacgtagtgagagagctaggcaaagtagaaacgctaataatacggaggctgcacatccccagattctactcattttatgatctgagtactgtatataccctcctggagaaagttaagagaatcacagtcgagaacagcaaggtttttctggtcccttgtctgttctcacagcatttaaaatcattggaattcttggacctcagcgaaaatttgatggttgaagaatatttgaagaacgcagcctgtgagggcagctggccttccctgcaaactttaattttgaggcagaaccgtttgaaatcaatagaaagaactggaaagattttactgactctgaaaaacctgactgcccttgatatcagccggaacagctttcagtctatgcctgactcttgccagtggccaggaaagatgcgtttcctgaacttgtccagtacagggatacaggcagtaaaaatgtgcatccctcagactctggaggtgttggatgttagtaacaacaatctcatttcgttttctttgtttttgcctctgctccgagagctctatatttccaggaacaagctccacactctcccgatgcctccttgttccctgtgttactggtcatgaagatcagagagaatgccataagtactttctctaaagaccaacttagttcttttcccaaactggtgagtctggaagcaggtggcaaccacttcatctgctcctgtgaactcttgtccttcaccttggagcacccagcactggtccaggtcctggccggctggccagacagttacctgtgtgactctccctcccgcctgcgtggccagagggtccaggatgcccggccctcagtcttggagtgccaccagactctactagtgtctggtgtctgctgtgcccttgtactgttgatcctgctcataggtggcctgtgccaccatttccatgggctatggtacctgcggatgatgtgggcgtggctgcaggccaagaggaagcccaagaaagctccttgcagggacatttgctatgatgcctttgtttcctacagcgagcaggattcctactgggtggagaacctcatggtccagcagttggagaattcggaacctcccttcaagctatgtctccacaagcgggactttgttcctggcaagtggatcattgacaacatcatcgactctattgagaagagccacaaaaccctgtttgtgctttctgagaactttgtgcggagcgagtggtgcaagtatgagctggacttctcccacttcaggctctttgatgagaacaacgacgccggcatcctggttttgctggagcccattgagaagaaagccatcccccagcgcttctgcaagcttcgcaagataatgaacaccaagacctacctggaatggcccttggatgaaggccagcaggaagtgttttgggtaaatctgagaactgctataaagtcctaggttctccacccagttcctgtcatgtgctatgacatgaactgtaacaaagtttattctgacttaattatttaagtgccatagaattgtacccttgaagatttaagtataactaataattgtgagctttatcgtgaatgctgttataaaaatattttatattnnnnnnnnnnnnnnnnnnnnnn

SEQ ID NO: 701 - DNA, 772 bp, Cricetulus griseus
gctggggagatggccaccgggacagaccaagtggtgggatttggcctcgtcgctgttagcctgatcatcttcacctactacaccacttgggtgattcttttgcccttcattgacagccagcatgtcatccacaaatacttcctgcctcgtgcctacgctgtcctcatcccgctggccacgggcctcctgctgctcctatttgtgggattgtttatcacctatgtgatgctgaagagccgaagactgaccaagaaggctcagtgagggtccagcagggatgaggataccagccttctccatatctcctccagggaagggaccaagtgtcacatcctgatacagtcagcctgactgctgcagtcctctttaggaggtggggctgcttacagctcaactctgacaaactggagccctctcctctcttattcatccttctggaagccaagaggaacgtgggttgggaaacctctccctcatggcttcgggctcagggcctgaacattgctggtcctgtccacctacagtcaaagctctctgccactcccacaaggttctgctctcttgcctgtttttcctcctgtcatgtgctgatagatgctgcaggctccccgtttgtgtgcagcctcccctcgccgtacaacctatctcttcacatggcagctcttttgagtctgacactgtccagactccatgaggacttctgcacccagaaagccctagtcccagctggcctgtgtttgggaaaacttacaaataaatgttgatcatgttg

SEQ ID NO: 702 - DNA, 2010 bp, Cricetulus griseus
  misc_feature (176)..(196): n is a, c, g, or t
atgggtcgcatgcacgctcccgggttaagcccgcggcaccaagtcgggttgtggggctgagctggggcgcggggcaagagaagaagggtgcgggctgcaggcggggcgacggcggggctgcttgaggctctgcgcgggccgccagttgactcattatgcttctgttctcagaaagnnnnnnnnnnnnnnnnnnnnnccctaccgccgtagcgtccccactgtgagtaaagcgagggcagcgtggggcggtgtagggatcagtgtacgtgaggttggggtccgaggtacaaggtctgtcgcgttcttttatgctgaggcccgatttatgttccctgtacagtggctgaagctggcgtctgacgacgtgaaggaacaaatttacaaactggccaagaaaggcctgactccctctcagataggtgagtgttgtcagtgttcagcttctgcgcccgtgtgactggaaagacaaatgtgtctagtccttacgttgaaaatgcgtgtccctgcttcacggctaaacgaggagcatctgggatcgagtcacatctagctgtgaattgacttaaactgctgtcattgtgtcacatggcaaataagttatgtgtgaatatggttcgtaggcctaggataactggttataggaggaaaacatccgcgataaggccatgattttactgacagatagggaggggggctaaaagaatctgaaaatggactcagccaatcaaataatttgaggtttaaaaggaataacatgcagttttaaagattggtataaataaacattaagctggttcctttggtcagctttgttctagcagactcagtgtgatcatggtgttccaacattcgcattttccacgagaagggcttcttccatgttgggtagacttgcaagcacttaagttggctatttgcaggaaactggaagagttgggctttactacatgctcgtttattaagttacatgtttttttcaggtgtgatcctaagggactcacatggtgtggcccaggtccgttttgtgactggtaataaaatcttaagaatccttaagtctaagggccttgcccctgatctccctgaggatctctaccatttgattaagaaagctgttgctgtcagaaagcatcttgagaggaacagaaaggtaaggtgaggaaacaaacttgttgtgtaggcgatgcttgtacctgactcttaggacactaggaactgcatttaagtttaagttctttggctctagatactaactagtcagcactgtcgtttccttgcaatgggtagtttgatcttcagtgtcctaaacatgatacccagttggttccaaatgttgggtgttcttttgtagccttgtcaccattcctaaagaccttattctagaacctcaaattgcctatatgggtttggtaatgtgtgcctgtaatttcagcaaggctggtggttctctgagttgaggtcagcctcgtctagccaagttataatataaccagggctgtatacactattttaaaggctttgaggacttaaccatagaagatactgagttacttacttggtggctttcttaattctctttctaggataaggatgctaagttccgcctgattctgatagagagcagaattcaccggctggctcgttactataagactaagcgggtcctcccacccaattggaaatagtaagtataagccattttgttggggagaatcaaccagatggtaaataacatggtagtgggtgtagtaaaccacttcgtggcagatattttgcctttctgggtcctatgcttaagtgccatttcagctcatctctgtcatagtagtggcaaaagcttacaaacttttaaattctcagtttggtgatgcattgtatgcagttaggtatttagctgtttggggatagctccagtagcaaagaaagttgttgcagtagatatcaaaaactaatactaattccccagtttccttcagtgagtcatccacagcctctgctctggtggcataa

SEQ ID NO: 703 - DNA, 3332 bp, Cricetulus griseus
  misc_feature (28)..(44): n is a, c, g, or t
  misc_feature (519)..(536): n is a, c, g, or t
acaaattacagtaaaccgtagccatgannnnnnnnnnnnnnnnncaggccggccaatgtggcaaccagatcggtgctaaggtaagaatttttaaattggtaccggatacgcgtgaggatgagaaatccaggttaatcatgattaatgttaccgggtgttagcattctccctccgccggctttggcccctcaaagttctgcgcgaacaattataacccatatttgtagcttgcgttctgagaaatatttatcttggcacattttccgaaagccattaaaagagacgcctgggtttaggggacggagagtctgaggagggactggagtgcttatctaaaagaggggatttctatcggttcgagaacgggagaggagagatgcggaaacgatccgagacaaagccgaagcgaggttttccccttgcgccacccccacccagcctggagggccttagcggagcaggactgtcgggggcaggggagaggttgggcggcagctgcagaggtctccgggccgcatnnnnnnnnnnnnnnnnnntggagaccctcgcgatctcgccatcccctggctcgcttttaggtggatggtgatgattccgtgcggggggctccttttacttcattgccgttaagaaatcttagggtgtgacctgatgggaaagtgagaggtttgtgtgtctataagaggtccctcgggactatgtgtgtgtttgggggaaagctatttagggaagagaaggtagcaaaagcaaaaaaaaaaaaatctgaggccatggttttctctttttttttggcgcgcaattacaatgtagcgggggatgggtggagaggaggaagtcggccgctagattgtagccgaagggtgggaccctttgggggcggggctagcgcccctggcgcgcagggacaatgcagcccttgctggcgggggcgcgctggcgccgcccctcgtgccaggcccgcccacgctgctcccgcctttgtgggctgctggaagagcggcccgccaccgcagtcacgtggaacgcgtaaggggtgggcgactgcagtggccgcaccttcctaccccatccctcttttggtgctggcctggaggggcggtgcccaccctgaagcgcttggctgggtgctgagccgagggggcggatggcagttcagtcagcccatatgggtgcttgcaaccctcagccccttgaactgtccatcacttgaccagggccacaaaggtggcgaccttccccggttggaggttcggtcgtggaggctcggcaggcagataacggaattgcagtatcaacccgtccgcctcgtttgagcacgtctagagttgaaatgcgggcggggaggcatcccttaggacttcagccattgaggcctggctcattgctcattgctctgtctagttctgggaggtgatcagcgatgaacacggcatcgaccccaccggcacctaccatggagacagcgacctgcagctggaccgaatctctgtgtactacaatgaagccacaggtgagggagggaatccagcttcttttttctctgttaacacttatccctggtctttttaaaccctgcgcccttctgttgagacagggtctcgttatgcagccatggctgccctggaacttacctccctaatgctgcttttaaaggcggccgcaccacgccctgttttcccacgttaagtgcctgttaacccggttgctggggtctcacccttttccattagacacccaccataagtgggccaaagattagctctgctgccgccgggtggcagggcctggaatggcagactaggggtttgtggtatttcccaccccagatttcatcctcgctgcagagggctctgacagttctacttgaatccctgtaggtggcaagtatgtccctcgggccatattggtggatctagaacccgggaccatggactccgttcgatcaggtccttttggccagatcttcagaccagacaactttgttttcggtgagttacatggaatgaattcctttgtacccaagggcatgattccagaggtgaaaggtgaagattagtaatgataatgacgtaatttttttcccttctcaccacattccaggtcagtctggggcaggcaacaactgggctaagggtcactacacggagggagctgagctggttgactctgtcctggacgtggtgcggaaggaggcagagagctgtgactgcctgcagggcttccagctgacccactcgctgggtggaggtaccggttctggtatgggcaccctgctcatcagcaagatccgagaagaatatcccgaccgaatcatgaataccttcagtgtggtaccctcacccaaagtgtctgacaccgtggtggagccctacaatgccaccctgtctgtccatcagctggtggagaacaccgacgagacctactgcatcgacaacgaggccctgtacgacatctgcttccgcactctcaagctcaccacgccgacctatggggacctcaaccacctcgtctcggccaccatgagcggggtcaccacctgcctccgcttcccaggccagctcaatgccgacctccgcaagttggcggtcaacatggtccccttcccacgtctccacttcttcatgcctggctttgcccctctcaccagccgtgggagccagcagtatcgggccctcactgtgcctgaactcacccagcaggtcttcgatgccaagaatatgatggcagcctgtgacccccgccacggccgatacctcaccgtggctgccgtcttccgtgggcggatgtccatgaaggaggtggacgagcagatgctgaacgtgcagaacaagaacagcagctactttgtagagtggatccccaacaacgtcaagaccgccgtctgcgacatcccaccacgcggcctcaagatggccgtcaccttcattggcaacagcacggccatccaggagctcttcaagcgcatctccgagcagttcacggccatgttccgccggaaggccttcctgcactggtacaccggcgagggcatggacgagatggagttcactgaagccgagagcaacatgaacgacctcgtctccgagtaccagcagtaccaggatgccaccgcggaagaggaagaggatttcggggaggaggcagaagaagaggcctaagccagagagagagagccctgcgtcttctcctcaggctacttagttccctcagctttcttcagctgcccgtttttctccttcagagttttcttttctgctgcctctgtcctgtttttttatttttttccatgggggggtaaacagtgcctggcacatagtaaggcgctcaataaa

SEQ ID NO: 704 - DNA, 1255 bp, Cricetulus griseus
  misc_feature (512)..(548): n is a, c, g, or t
cgagcggctgtcgcctgaggaggcctgaggaggcctgaggaggccttcgcggccgacttgggacggtcccccgaacctgagcgtctctccagggggccgcacggaggcgtcggggagccgagacgccctggggctccgagccacgccgggtgacgcagttccgcttccggcgccgggcgcagacctgtcatggcctccccgggggcgagtcgcggcgcctccgccgccaccgccgccgccgcgtctccccggccgccgcagggccgctcctcgcgacgggacaagtactcggttctgctgcccacctacaacgagcgcgagaacctgccgctcatcgtgtggctgctggtgaagagcttctccgagagttcaatcaactatgaaattataatcatagatgatggaagcccagatgggacaagagaagttgccgaacaactggaaaagatctatgggccagacagaattctcctaagaccacgggagaaaaagctcggccttggaactgcctnnnnnnnnnnnnnnnnnnnnnnnnnnnnnnnnnnnnncatcattatggatgctgatctctcacaccatcccaaatttattcctgaatttatcaggaaacaaaaggagggtaattttgacattgtctctggaactcgctacaaaggaaatgggggtgtttatggctgggatttgaaaagaaagataatcagccgtggggccaattttataactcagattttgctgagaccaggagcgtcggacttaacaggaagcttcagattataccgaaaagaagttctgcaaaaattaatagaaaaatgtgtctccaaaggctatgtctttcagatggagatgattgttcgagcaagacagttgaattacaccattggtgaggttccaatatcatttgtggatcgagtttatggtgaatccaagttgggaggaaatgaaatagtctctttcctgaaaggattattgactctctttgctactacataaaagaaattactcatttatacttaccatgttcatttcaattaaaagtaagagaagcctgggtcactgatttttgtcaatgctctcttgatacatgagccaaaggtaaggtgcatttcatactggtcatttctctggagaaactccattttatatttcaaactaaaatttaaagttaggtttaataagcaatgttctcgatttttatgtacattgtgctgtattaagacctataaataaatgtatataggtttgtgtaaaaaaaaaa

SEQ ID NO: 705 - DNA, 299 bp, Cricetulus griseus
gttaaactagaacctttaagacgtgctttaaacggtaatcagctatgggttaccggtatcagatctgagcaatctgtaaacaggcacgatatgaccaacctggagtgggatgagcaaaatcagttgatcaagtttcatccgatctttttctggtcgcttgatgaggtgaaggaatacattaaaaagaataatattgtttacaacacattacatgataagggtttccctagtataggatgtgctccttgtacaagagcagtaacacagggcgaggatttagagctggcgttggttgtgga

SEQ ID NO: 706 - DNA, 1632 bp, Mesocricetus auratus
  misc_feature (1294)..(1309): n is a, c, g, or t
  misc_feature (1601)..(1632): n is a, c, g, or t
ctaaaggggctttgaccacctataaaacttagcaatgggaaataaaaaagccctcaaggaggaagccttcttggggagcgcagaagaaggagctgattttgaccaagccatgttccctgtgatggagaccttcgaaatcaatgatcccatgcccaagaagagaaactgggggagcttttgcacggcagtcatggccatccacctgatcctgctcacggcaggcaccaccctgctgacgcttaaagttctcagtctgcagaagtggatcctggagaagtacttagacaatgagacactggctgctgaggacaggtcattcttctcactacagctggcaagtcccgaaacgcacctggtacccagaacaccggggctgcaagccctgcaggtccagctcacgcaggtccgcaccagccaggagcaactgcttcagcaggtggacaacctcactcggaacccagagctgttccggattaagggtgaacgaggctccccaggtatcccaggtctccagggcccgccaggcatcaagggagaggcaggcctccagggacccatgggtgcaccaagggagccaggagcaactggtgccccaggacctcaaggagagaagggcagcaaaggtgacaagggtctcattggccccaagggggaacatggcacaaagggagacaaaggagacctaggccttccagggagcaaaggggacatgggcatgaagggagtcacaggggtcatggggccccctggagcacagggaaataaaggcgatcctgggaaaccaggcctaccaggtttggctgggtctcctggagtcaaaggtgatcaaggacaacctggattgcagggtgttccaggcactcctggtgcagcaggaccttcaggtgccaagggtgagccaggccaccctggtcctcctgggccaacaggaccccaagggatctccgggagtccaggagccgcaggtttgaaaggaagcaagggggacacaggaattcaaggacagaaaggcacaaaaggagaatcaggagtcccaggccttgcaggtagaaagggagacactggaaaccctgggctggcaggccccaaaggagaaccaggacgacccggcctgaagggagaccctggaatgaaagggtcttctggccagcaaggacaaaagggagagaagggtgagaaaggccaatccttcaaagaggtccggattgtgggtggcaccaatcgaggccgagctgaaattttctataacaacgcctgggggacaatttgtgatgacaactgggataataacgannnnnnnnnnnnnnnncgcatgctcggttactccagtggcaaaggattcacctttggtggtggctctgggaacatctggctggatgacgtgaactgtcaggggacagaggacagtttgtggaactgcaggaagaacaactggggctctcacaattgcaaccataacgaagacgcaggcgtggagtgccgctgacgtgggtgccgcagatgtcaccctgcgtccccaggtgtctttgggctccaccctcatggagatctgtgggctccatcactctgttgaggggagattaataaagccctgctggggnnnnnnnnnnnnnnnnnnnnnnnnnnnnnnnn

SEQ ID NO: 707 - DNA, 864 bp, Cricetulus griseus
ctgtcacgtgcacggtcagtgtccgtgaggtgtttactttcatgtgacctttcaatatctgttgttttctgtctagattttgggggttcctctttagcccatggactttgatgtatgtctcaaagtttaatttccccctgaacctttgccttttatccttctctcctattctctgcatctctccaggggacatggaactttctttcctcacattcctttcttggcttttgaaaataatcttctgaagccaggcacagtggcatacgatgtattcccagctgtttgggaggttgaggcaggattgcttaatgccagcctgggcagcataacaagacctgattctcacacacacacacacaaaaatacagcccagtggggtgacacacacctataacttcagcactggggcgcctaaaacaggacgaacaaaagttcaaggccatccttggctacacagtaagatttctgagagggagaggtggggggggggagaaaggtgtgggagagagggggagggaggggcaggccagtgcaggcttttaatcctagcacttgggaggcaggcacattctgagttcaaggacagcctggtttacagagagaattgcaggacagccaaggctacatagagaaatcctgtcttgaaaaaccaaaagaaattaaaccttctggtgtgtagatgccaatcctgttgttggtggctgccctctcccataatacttggcatccagagcaggtgtttttcctcagacccccactctgaccttggttcattagttggcttgccctctgaccttagattctttttcctttcttacagtactccccttccctaaataagcaattttggcagctggcaaaaac

SEQ ID NO: 708 - DNA, 5571 bp, Cricetulus griseus
  misc_feature (905)..(923): n is a, c, g, or t
  misc_feature (1500)..(1560): n is a, c, g, or t
  misc_feature (3463)..(3480): n is a, c, g, or t
atggtggataagaatatttacatcattcaaggagaaattaacattgttgttggcgccatcaaacgaaatgcacgatggagcacccatataccactggatgaagaacgggatcctctgctgcacagtttcagtcatctaaaggaggtcttaaacagtgtaacagaactctcagagattgagccaaatgtattccttcgtccatttctggaagttattcgctctgaagataccactggtcctatcactggcctggcgctcacctctgtcaacaaattcctgtcctatgcactcatagatccaactcatgagggcacagcagagggcatggagaacatggcagatgctgtcactcatgcccgttttgtgggtacagaccctgccagcgatgaagttgtcctgatgaaaatcctccaggttcttcgaactctgttgctaaccccagtgggtacccacttaacaaatgaatctgtgtgtgagattatgcagtcttgcttccggatttgctttgaaatgaggcttagtgagttattgagaaaatccgcagagcacactctcgtagacatggtgcagctgctcttcacaaggttacctcagtttaaagaagaacccaagagctatgtgggaaccaacatgaagaagctgaaaatgagagcgggaggcatgagcgactcatccaagtggaaaaagcagaaaagatcccctcggcccccgcgtcacatgaccagagtcacaccaggttcagagctgcccgccccaaatggagccaccttatcctgtaacctcaccagtggcatgcctttcattgatgtgccctcatccatctcctctgcaagttcagaagctgcctcagcagtggtcagtccctgtacagacagtggcctggaattatcctcccagaccacctnnnnnnnnnnnnnnnnnnncctagagcaagctggttccccaagggaaagcacaaccacagagtctgggagcaatgagataggagtttccgatcagcttgaccctcaggaagggtcccatgtggaaaaggcccagtcagcatcggtggaatctatccctgaagtgttggaggagtgcacatctcctcctgaccactctgcctctgtccatgacatggattatgtcaatccccggggtgttcgcttcacacagtcctcccagaaggaaggcacagctttggttccttatggtcttccttgcatccgagagctcttccgcttccttatctccctcacaaacccacatgaccgccacaactcagagggtatgatccacatgggactgcatttgctgacagtggctctggagtcagcccctgtagcccagtgccagaccctcttgggtctcatcaaggatgagatgtgtcgccacttattccagctactcagtgtagagcgattgaacctgtatgctgcttccctacgggtatgcttcttactctttgagagcatgcgggagcacctcaagttccaattagagatgtacatgaaaaaactnnnnnnnnnnnnnnnnnnnnnnnnnnnnnnnnnnnnnnnnnnnnnnnnnnnnnnnnnnnnngaggccatcgtgcagctctggcgcatccccagctttgtcactgagctctatatcaactacgattgtgactactactgcgccaacctctttgaagacctcactaagctgctgtccaagaatgcctttcctgtgtctggtcaactttataccacacacctactgtcccttgatgccctgttgacggttattgacagcactgaggctcactgtcaagccaaagtcctcaacactcttacccagcaagagaagaaggagacatccagacccagctacgaggcagtggatagcacccaagaagcaaacagtactgaaagagccaccattgatgggaaagccacaggcatggcctcagatgccctaggccttcatcttcaaagtggaggatggctgtcagcagagcatgggaagccaagatgcaatgatgtggaagaagctggtgactctggggctgacaaaaagtttaccaggaagccgcctcgattttcctgtcttctgccagatccacgggaactaattgaaattaagaacaaaaagaagctgctgatcactggcacagagcagttcaatcagaaacccaagaagggcatccagtttctacaggaaaaaggtctccttaccatcccaatggataacacagaggtggcccagtggctccgagagaaccctcggctagacaagaaaatgattggggagtttgtgagtgaccgaaaaaacattgacctgttggagagttttgtgagcaccttcagctttcagggtctacggcttgatgaagctctccgactctacctggaagccttccgtttgcccggggaagcaccagttattcacaggttgctggaggcattcacagagcactggaggagttgtaatggctccccatttgccaatagcgatgcctgctttgccctggcctatgctgtcatcatgcttaatactgaccagcataaccacaatgtccgcaaacagaatgtacccatgactctggaggagtttcgaaaaaacctaaaaggtgtgaatggaggcaaggactttgagcaagacatcctggaggacatgtaccatgccatcaagaatgaggaaatcgtgatgcccgaggaacagacaggcctggttcgtgagaactatgtgtggagtgtgctgctgcaccgaggtgccacccctgagggtatattccttcgtgtacctcctggcagctatgatcttgacctcttcactatgacctggggcccaactattgctgctctctcttatgtctttgataaaagcattgaggagaccatcatccagaaagccatctcaggtttcaggaagtgtgccatgatctctgcccactatggcctcagcgatgtgtttgacaatctcatcatctctttgtgcaagttcacagctctcagtagtgagtctattgagaaccttcccactgtgtttggaagcaaccctaaagctcacattgcagccaagacagtattccacttggcccatcgtcatggtgacatccttcgggagggctggaagaatatcatggaggctgtgctgcaactcttccgtgctcaacttttaccccaggctatggtggaggtagaagattttgtggatcccaatggtaagatctctctacagcgggaggagatgccatcaaaccgaggagagtcatcggtacttagctttgtgagctggctgacgttgagtggtcctgagcagtctagtgtacggggcccctccacagagaaccaggaggccaagagagtggccttggactgtatcaagcaatgtgacccagaaaaaatgatcacagaaagcaagttccttcagctggaatcattgcaggagctcatgaaggctttggtctcagtgacagcagatgaagagacatacgatgaagaggatgctgctttctgtnnnnnnnnnnnnnnnnnnattgtgttggagaacagggaccgtgtgggctgtgtatggcagactgttagagaccatctataccacttatgtgttcaggcacaagatttctgctttctcgtggagcgggcagtggtggggctgctacgcctcgcgattcggctactccggagagaagagatcagtggccaggtcctgctgtccctgcgcatcttgttactgatgaagcccagcgtgctgtccagggtcagccaccaggttgcctacgggctccatgaactcctcaagaccaatgcagccaacatccactcgggtgacgactgggccaccctcttcacattgctggagtgtattggctcaggcgtgaagcctccagatgctctacaggccacagccagggctgatgctcctgatgctggagcgcagtcagacagtgagctcccatcctaccatcaaaatgatgtcagcctagaccgagggtacacttccgactcagaagtctacactgaccatggcaggcctggcaagatacaccgatctgccacagatgctgatatggtcaacagtggttggttagtggtggggaaggatgacattgataactccaaagcaggagcagggctcagcaggcccagcccttcacccctggttaatcaatatagcctcacagtgggcctggacctgggaccacatgacactaagtccctgctcaagtgtgtggaatcactgtccttcattgttcgtgatgctgctcacatcacccctgacaactttgaactctgtgtcaagactctccgcatctttgtagaggccagtctgaatggtgggtgcaaatcccaggataaacgtggcaagagtcacaaatatgacagcaaagggaaccgcttcaagaaaaaaccgaaggagggctcagtgcttcggcggccccgaacctccagccagcatggcactcggggtggacatagtgatgaggaagaggatgaaggagtgcctgccagctaccatacggtgtctttacaggtcagtcaggacttgctggacctgatgcacaccctgcacactcgggcagcctctatctacagctcatgggcagaggagcagcgccacctggagtcaggtggccgaaagattgaagctgactcacgcaccctctgggcccactgctggtgccctttattgcaaggcatcgcctgcttgtgctgtgatgcccggcgccaagtgcggatgcaggccctgacgtatctgcagcgagcacttctggtgcatgacctacaaaagctagatgccctggaatgggagtcctgctttaacaaggtgctgtttcctctactgaccaagctgttagaaaatatcagccctgcagatgtgggtgggatggaggagacccggatgagggcttccacgctgctctcaaaggtcttcctgcagcacctgtcccctctgctgtcgctgtccacctttgctgccctgtggctcaccatcctggacttcatggacaagtacatgcatgcaggctccagtgatttgctgtcagaagcaatccctgagtccctgaaaaacatgctcctggtgatggacacggccgagatcttccacagtgcagatgcgagaggaggcagcccctctgccctctgggagatcacctgggagcgcattgattgctttttgccacacttacgtgacgagctcttcaagcagactgtcatccaggaccccatgcccacggaacctcacagccaaaacgctctggcctccacccacctgacccctgctgctggtgaccccggccatctaccttccccagagataccctcagaagtgggggcctgtgactcagagaagcctgagggtacccgagccaccagcagcagctctccgggatcaccagtggcctccagccccagtagactgagtccttccccagagggacctcccccattggcccagcccccactaatcctgcagcccctgacttccccgctgcaggtgggcgtgccacccatggctctgcccattatcctcaaccctgcactcatcgaggccacctctccggtgcctctcttgtccactccccgtcctacagaccctattcccacctctgaagtcaactaa

SEQ ID NO: 709 - DNA, 695 bp, Cricetulus griseus
aggcacggtaggcgccgcttcccagcatgcaaggcgctatgcaaatgaggctacttattgtaatctagtgggataattcgcggcatatttgtaaagaaaagcatgttttcgctaaaacatgtgagaagaatgttgaaaatactagaattggtcgtgtgttattaaaaaaagtagtcaccacaagtgtaaaaatttctgttttttgacctttatatatgtgtccgaaaatagatacttctgcccggatgatctccagtggtctggggtgcaggcttcaaacctgtagctgtttagcgacagagtggttcaattccacctttcgggcgggagtatctatcccattttgcttcctgcaaccggtactatgtgacaaactcctctaaatccccctctattcgtatttattcctcttcgtcattacttttttccggtcccggaaggatccaacacatctcagaagtgtatttaaatttgtcttctacagttctagcgtattcctgtctgtctctgatgtctctccttcaacgatttatttattattcatccagtcatttgctcgattatgtatttaatcatgcgtgcagctcttagtcatatatttgttcatttgttcactctggctcagtcctgtctctctatttgagctgtatggatggggacacagttgtgatcacacccttagccctggtctcatg

SEQ ID NO: 710 - DNA, 654 bp, Cricetulus griseus
  misc_feature (339)..(351): n is a, c, g, or t
  misc_feature (353)..(385): n is a, c, g, or t
  misc_feature (453)..(475): n is a, c, g, or t
  misc_feature (481)..(512): n is a, c, g, or t
ggtagggactggagagagggctcagcagttaagagcactgactgttcttccagaggacctgggttcaactctcggtacccacatggcagctcacaactgtctgtaactctagttgcaggggatcttgttaccttcaccccaatgcatataaaataaaggtcaaataaattatattaagaaaattaaaaggttaagtgcagggtttggtgcctggtgcttagaaagtgctgagtattcttaagtaggattctgtatacagtttatagttcttgagatttgtaaaaaaaatttttggcccagatgatttccagtggtctggggtgcaggcttcaaaagctnnnnnnnnnnnnngnnnnnnnnnnnnnnnnnnnnnnnnnnnnnnnnnacaggcggatctctgtgagtttgaggccagcctggtctccagagcgagtgccaggataggctccaaannnnnnnnnnnnnnnnnnnnnnngggggnnnnnnnnnnnnnnnnnnnnnnnnnnnnnnnngttggagagatagaaggcttggtggttaagagtctcactgctcctccagagaacctgagtttgattcatgacctcatgacagacagctcacaaccacctgtaactctagcttcaggaatctaattccttctggcctctgcag

SEQ ID NO: 711 - DNA, 1764 bp, Cricetulus griseus
  misc_feature (474)..(500): n is a, c, g, or t
  misc_feature (801)..(821): n is a, c, g, or t
  misc_feature (1230)..(1280): n is a, c, g, or t
  misc_feature (1421)..(1474): n is a, c, g, or t
tctagaaacttatgtaagcttatataaatcaaaccaacgttgaaatcagaacaaaacaaatattagtatgaaaggggagcaatatatgttgctaattgacaatgaaagtatcggggtctttcaaggataaacttaagcatgcaatatgaaatttaagtaattcattcagagcaccagaggtttccaaattctgatcagcacaggctgcatagtggaatactgtctctaaaaacaataccaacaacaggaataaaaagtaaattacttaacaaaagtctctaataaatagcaatcaataaatactaataaacaatggaaaatcatgatactctgactcccaaagttgtcaaattgggagattgtattccaattttcattcacattatgaagtcccaaatgaacaagtgatataaaatctaatagcagcacatgaaacaaaatgtgtaagatagaggtacagaaaacaataactannnnnnnnnnnnnnnnnnnnnnnnnnntagacctactaaatatttgaaaaacataaggacattcacggaaaagtaagaccatctacacgggaacaggaccaacctacagcagtgatgcttcatcaagtggagaatgccaactgggagacaggaatgataagaacaagccacagagaaaacctgcacaagaaaagtatagtgactgaggcgaccatttcaacagaatggctcaatgatagcttgattaagcaaatgaagtaaccctaagcttaaagatttgtgaattgaaactattcggtctgaaaagcaggagaaaataagaacggtnnnnnnnnnnnnnnnnnnnnngctaggacactaaagagcaaatcaatgtcacatgattggtccagtgagaaaaaaaggggagggtggtaggagaaaaacaatgaaattcaagatctaacactgaagtacttcttaataatcaagaataaaccaaggacatattttcttggccttcacagcattttactagcaattgtgactaggaggctcagttaaaggggaaagagcacaaaacaagagacatttaaaatcaaaggaaaaataaactctgtttatggatgaaatgatctgatataaagattcctagagactggatgatcttcaaacctgtagctgtttatagacagtggttcaattccacctttcggacgggagtatctatcccattttagccgggagttggtagcacacgcctttaatgccagcactnnnnnnnnnnnnnnnnnnnnnnnnnnnnnnnnnnnnnnnnnnnnnnnnnnncagagccagtgccaggataggctccaaagctacatagagaaaccctatctcgaaaaaccaaaaacaacaacaaaaaagattcctagaaatttcaaaaaaagtgtttggatctgatgaacaaaattcagcaaagtggcagtnnnnnnnnnnnnnnnnnnnnnnnnnnnnnnnnnnnnnnnnnnnnnnnnnnnnnncaatacaaaaaacatatgtaacagcaatggttgatctaaaattgaaattaatgaaacacttccattcatcatagcatctgtgactaagataaaaatgaatgcagtgaagaatgtacaatatttgtacattgaaaactacaaaacatagttgcaagtgactaagaaacaaggaagaaaacataatattttatggaatataagggtcaatactgttaaatattatcagctatctaaatatttagtgcaatcactgtcaaaattcccataagttttatctaagaaatggatga

SEQ ID NO: 712 - DNA, 532 bp, Cricetulus griseus
  misc_feature (481)..(517): n is a, c, g, or t
catcttgcccaaaaacaactaactggaggaaaggtttacttgggttatagttccaggctacagtggaccatttcaggaagtcaaggctggaacaagtcacatcccatgcatagctaagaagagagcagggaaagcacccatgcttcccacctgctgctacttagccatctttctcctctcctatacagttcaggacccctgcccagggaatggtgtcacccacaatgggctaggtcttcctacagcaattaatgattgagacaatccctcccacacaccagacatactggccaactgaataaagacaactactcaattaaaactcttctgttgggctcagatgatcctcagtggtctggggtgcaagcttcaaacctgtagctgtttagtgacagagtggttcaattccacctttcaggcatgagtatctatcccattttgcttcgtaaaaccagtatttcctggctttggtggtgcacannnnnnnnnnnnnnnnnnnnnnnnnnnnnnnnnnnnngatctctgtgaattc

SEQ ID NO: 713 - DNA, 302 bp, Mesocricetus auratus
tccatggagcacttccgctggggcaagccggtgggcaagaagcgacgcccagtgaaggtgtaccccaatgtcgccgagaacgagtcagcagaggcctttctctagagttctcgagggagctggcgggcgagcggcccgacggcttggagccggtcctggagccggacgccgagaaggaagagggccctatcgggtggagcgcttccgctggggcagcccgcccaaggacaagcgctacggcggcttcatgacctccgagaagagccagacgcccctggtgacgctcttcaaaaacgccatca

SEQ ID NO: 714 - DNA, 218 bp, Mesocricetus auratus
gcgatgagccctggcgggcgggccctacatacatccagaggggccatggccatgctggcgcggaaattcccgcgtacccggctacccgtgggagccagtgccctctgtgtggtggtcctctgttggctctatgtcttccctgtctaccggctgcccaacgagaaggagatcgtgcaaggagtgctggcgcagcgcacagcttggaggaggaaccagac

SEQ ID NO: 715 - DNA, 3910 bp, Mesocricetus auratus
  misc_feature (1783)..(1851): n is a, c, g, or t
  misc_feature (3885)..(3910): n is a, c, g, or t
aagtgaggcggtgatgcgggcgctggcggcctgggctgcgcgagagcggagacacaggctcaagatggcagattcccactgaggctgagggggccgagctcgcgcgccgcttcccttctccgttgccatgaaccgcggacaccccggccccgatggcccccgtgtacgaaggtatggcctcacatgtgcaagttttctcccctcacacccttcaatcaagtgccttctgtagtgtgaagaaactaaaagtagagccaagttccaactgggacatgactgggtacggctcccacagcaaagtgtacagccagagcaagaacataccaccttctcagccagcctccacaaccgtcagcacctccttgccaatccccaacccaagcctaccttacgagcagaccatcatcttcccaggaagtactggacacatagttgtaacatcagcaagtagcacttctgtcaccgggcaagtcctcggtggaccacataacctaatgcgtcgaagcactgtgagcctccttgacacctaccaaaaatgtggactcaagcgcaagagtgaggagattgagaacacaagcagcgtgcagatcattgaagagcatccacccatgattcagaataatgccagcggggccactgtagccactgccaccacgtctactgccacctccaaaaacagtggctccaacagtgagggtgactatcagctggtgcagcatgaggtgctgtgctccatgaccaacacctatgaggttttagagtttttgggcagagggacatttgggcaagtggtcaagtgctggaaacggggcaccaatgaaattgtggccattaagatcctaaagaaccacccttcctatgcccggcaaggccagattgaagtgagcatcctagcccggctgagcacagagagtgctgatgactacaactttgttcgggcctatgagtgcttccaacacaagaatcacacgtgcttagtctttgagatgttggagcagaacctctatgactttctgaaacagaacaagtttagccccttgcccctcaagtacattcgcccagtcctccagcaggtagctacagccctgatgaaactcaaaagcctgggtcttatccatgctgacctcaaaccagaaaacatcatgctggtagatccatccagacagccataccgagtgaaggtcattgactttggctcagccagtcacgtgtccaaagccgtctgctccacctacttgcaatctagatactacagggcccccgagatcatccttggtttgccattctgtgaagcaattgacatgtggtcccttggttgcgtcattgctgaattgttcctgggctggccgttatatccaggagcttctgaatatgatcagattcggtatatctcacaaacacagggtttgccagctgaatatttattaagtgcagggacaaagacaactagatttttcaaccgtgacacagactctccgtatcctttgtggaggctaaagacaccagatgatcatgaagcagagacggggattaaatcaaaagaagcaagaaagtacattttcaactgtttggatgatatggcccaggtgaacatgacaacagatttggaagggagtgacatgttggtagagaaggcagaccgacgggaattcattgacctattaaagaagatgctgaccatagatgctgataagaggatcactcccattgaaactctgaaccacccgtttgtcacaatgacacacttgcttgattttccccatagtacacatgtcaagtcttnnnnnnnnnnnnnnnnnnnnnnnnnnnnnnnnnnnnnnnnnnnnnnnnnnnnnnnnnnnnnnnnnnnnnccttcatcacacacgtggcccccagcacatctactaacttgaccatgacatttaacaaccagctgaccactgtccacaaccagccctcagcggcatccatggccgcggtggcccagcggagcatgcccctgcagacaggaacagcccagatttgtgcccggccggaccccttccagcaagctctcatcgtgtgtccccctggcttccaaggcctgcaggcctctccctccaagcatgctggctactcagtgcggatggaaaatgctgttcccatcgtcactcaagctccaggagctcagcctcttcagatccaaccaggtctgcttgctcagcaggcctggccaggtggggcccaacagatcctgcttcctccagcctggcagcagctgactggcgtggccacccacacatcggtgcagcatgcagctgtgatccctgagaccatggcaggcactcagcaactggccgactggaggaacacacatgctcatggaagccattacaatcccatcatgcagcagcctacactcttgactggacatgtgacccttccagcagcccagcccttaaatgtgggtgtagcccatgtgatgaggcagcagccaaccagcaccacctcttccaggaagagtaagcagcaccagccttctatgagaaatgtctccacctgtgaggtgacctcttcacagtctaccagctcccctcagcgatccaagcgtgtcaaggaaaacactcccccacggtgtgccatggtgcacagcagcccagcctgcagcacctcagtcacctgcgggtggggtgacgtggcctccagcaccaccagagagcggcagcggcagacgattgtcatccccgacacccccagccccacagtcagcgtcatcaccatcagcagtgacacggatgaggaggaagagcagaagcacgcccccaccagcacggtctccaagcaaaggaaaaatgtcatcagctgtgtcacagtccacgactctccctactccgactcctccagcaacaccagcccctactcggtgcagcagcgaacaggacacaacggcaccaacaccttggacactaagggggctctagaaaatcactgtaccggcaacccccgcaccatcatcgtacccccactgaagacccaggccagtgaagtgttggtagaatgtgacagcctagggccagcagtcagtactggtcaccattcgtcctccttcaagtgcaagtcctccagcaccgtgacctccaccagtggccactcttcagggagctcctcaggagccatcgcctatcggcaacaacgtccaggcccccatttccagcagcagcagcccctcaatctcagccaggctcagccgcacatggctacagaccgaactgggagtcaccgtcggcagcaggcctacatcactcctaccatggcccaggctccatacaccttcccgcacaacagccccagccacggcacggtacacccccacctggctgcagctgcccaccttcccacccagcctcacctctacacctacacagcgcccacagccctaggctccacaggcaccgtagcccacctggtggcatcccaaggctcagcacgccacaccgtgcagcacactgcctacccggccagcatcgtccaccaagtccctgtgagcatggggccccgggtcctaccctcgcccaccatccaccccagtcagtaccccgcccagtttgcccatcagacgtacatcagcgcctcgccagcctccaccgtctacactggatacccactgagtcctgccaaggtcaaccaatacccttacatataaacactggaggggccgcagggagcggggtggaggagcccccagcagacctggggagccgggtttctctactgcaggtgcctgccgcactcaaacaatgcaaatggggcagggagggacagctgggacacagatgaaacttgaactagaagtgggaggacttagagcagagaagagagcattttagaaggaagggattcaggagtgggaaatctatgctttttannnnnnnnnnnnnnnnnnnnnnnnnn

SEQ ID NO: 716 - DNA, 1097 bp, Mesocricetus auratus
ctaaacggactgctaaaatagcacctgtaatcccgagcatttacaaggcggctgacctcctacaagggagtaaatatgaaaaagcgcctgtcgggagggctcgaggtctgttcaaatgctagttcagtggatagaagcaatttcctcagaaagctgaaggcaccaaaggttatatttgttagcatttcagtgtttgccaaattcagcacagattccctgtttcccagcgcttcaaacttcagaagcccctagctacgactctgggtagtgtcactactgatgcccactacgcccccctcgctagtactgttaaagctgccggcctcgagttagaggagctgctatcctgaggtcaggatctttggtttagctgtgtgcacacgcttgctcagagactctggtctcgccatcgtgcctgagtgggagatgaccagtagctctgtaccctggggtgaaagttgctgtgacagtgagaaaggcggacacaccgcttcacctggtccccaccctttggtggtggatgttaagggaacctttttgggagctgagcttatggtaggaccacaataaagctttaagaacccgtacagtagaattccgaccctaatcatgaagctttactggaaagaactaggactgccactacccactgtctgcaccgaactcagacagcagcggccggctctggagcagggtgagccttgggttcctccgccttcagaaccttcaataaatcaaagacaggtgtctttgcttgctaccccgccccagtctacaccacgtggggcccgagctccgagcgaaaggggggccgagaaactctctgtggagggaacctttgcgaccacacctctctcggttattcttaaattccccgcaaccactgaaccgtaggaccaccgacagaaaagcgccgtttgtgcaaccccgcctcttccgctacaagcttggttcgcttcgatcccgccccttcctccgtgccgaccccgccttttcccgccgcggactctcaatgtccggggtcctgacgcttttctgagccgccctacatcgaagttcccgcacgtgggaggcccggccggatcttgagcgcgatg

SEQ ID NO: 717 - DNA, 4171 bp, Mesocricetus auratus
  misc_feature (1226)..(1247): n is a, c, g, or t
  misc_feature (1646)..(1661): n is a, c, g, or t
  misc_feature (4142)..(4171): n is a, c, g, or t
gggaggcccggccggatcttgagcgcgatgccccgcgcgccccgttgccgggccgtgcgcgctctgctgcgcagtcaataccgtcaggtgtggccgctggcaaccttcgtgcggcgcctgggacctgagggcaggcagcttgtacaacccggggacccaaaggtcttccgcacgttggtggcccggtgcctagtgtgtgtgccctgggactcacaacctccacctgctgacctttccttccaccaggtgtcatcactgaaggagctggtggccagggtcgtgcagagactctgcgagcgcggcgagaggaacgtgctgacttttggcttcgcgctgcttaacggagcccaaggcggtcctcccatgacattcacaaccagcgtgcgcagctacctgcccaactcggtgactgagtctctgcgcgtcagtggtgcttggatgcttctgctgaaccgagtgggcgacgacttgctggtctacctgctggcccgctgtgcgctttacctgctggtgcccccgagctgtgcctaccaggtgtgcggctcacccctgtaccaaatctgtgccaccgcagaaacctggccttctgtgtcccgcatctacaggcccacacgacccgtgggcagaaattttactcatcttggatccacacaccgggtcaggaacagcagtcaccaggaagcatggaaacccccgcccttgccatctcgagaggcgaagcggagtctaagcatcaccaatagaagtgtgcctccatctaagaaggccaggtgcgatctggccccgagactggagaagggaccctacaggcaggcagttccaaccccatcagacaaaacatgggtgccaaatcctgccaagtcccatgcagtgcctattagtagaactaccaaggaagatttgtcttccggggtgaaggcacctggcctgagtcgctctgggtcagtgtgctataaacacaagcccagttccacatccctgcagtcaccactgtgccaaaatgcctttcagctcagaccatatactgagaccaaacgcttcctctactctagggaaggtggccgagagaggctgaacccctcgttcctactcaacaacctgcagcccagcttgactggggccaggagactggtagagatactctttctaggcatgagacctaggacatcgggaccactctgtgggagacgccgcctatcgaagcgctactggcagatgcggccccnnnnnnnnnnnnnnnnnnnnnnccatgcgcggtgcccgtatgtccggctcctcaggtcccattgcaggtttcggaccgcagcccaccaggtggcaggtgccttgaacaccaccagcccacagcgcctcatgaatttgctccgtctacacagcagtccctggcaggtatatggctttcttcaggcctgtgtcggaaagctggtgcctccgggtctctggggttcccggcacaaccagcgacgcttctttaagaacgtgaagcggttcatctccttggggaagtatgacaagctgtcgctgcaggagctgacgtggaagatgaaagttcaagactgcaggtggcttcgcagcagcccagggaacaactgtgtcccggctgcagagcaccgcacgagggaaaggatcctggctgtgttcttgtnnnnnnnnnnnnnnnngtacgtggtagagctgcttcggtcattcttttacgtcacagagaccactttccagaagaaccggctcttcttctaccgaaagagcatgtggagaaggctgcagagcattggagtcaggcatcaccttgagagagtgcggctacaagaactgtctcaagaagaagtcaggcagcgccaggaggcctggccagccatgcccatctgcagactgcgtttcatccccaagcccagtggtcttcggcccattgtgaacatgagttatatgggcaccagagcctttgacaaagggaagcaggctcagcatttcacccagtgtctcaagactctgttcagcgtgctcaactatgaactgacaaaacatactaaccttctgggggcatctgtactgggcctgaatgatatctacaggacctggcggaccttcgtactgcgtgtgcgcactctggacccagcacccaggatgtactttgttaaggcagatgtgacaggggcatatgatgccatcccccaggacaagcttgtggaggttattgccaatatgatcagacacccagacaactcgtactgtatccaccaatatgcagtggtccaaagagatagacaaggccaaatccacaagtccttcaggagacaggtctccaccctctctgacctccagccacacatgggccagttcttgaagcatcttcaggactcagacaccagtgcgctgaggaactccgttgtcattgagcagagcttatctctgaacgaggccagcagcagcctgttcgacttcttcctgcgctttgtgcgtaacagtgtcgtgaagatcggtggcaggtgctatgtccagtgccagggcatcccccagggctccagcctgtccaccctgctctgcagtctgtgtttcggggacatggagaacaagctgtttgctgaagtgcagcaggatgggctgcttttgcgttttgttgatgactttctgttggtgacacctcacctggtccaggcggaagccttcctcagggccctcgtccgtggcatccctgagtacggctgcatgataaacttgcagaagacagtggtaaacttccctgtggacgctggtaccctggatggcacagctccacaccagctgcctgctcactgcctgtttccctggtgtggcttactgctggacactcagactctggaggtgctctgtgactacactggttatgcccggacctcaattaaggccagcctcaccttccagcgcaccttcaaggcggggaggaacatgcgacagaagctcttagctgttttgcggttgaagtgtcacagtctgtttctagacttgcagatgaatagccttcagacagtctgtatcaatgtgtacaagatcttcctgcttcaggcctacaggttccatgcgtgtgcgcttcagcttccctttgaccaacatgttagaaagaaccccgcattctttctgagcatcatctccaacatagcatcctgctgctactccatcctgaaggtcaagaatgcaggaatgacactaaaggccaagggtgcctctggctcatttcctcctgaagctgcacgttggctctgctaccaagccttcctgctcaagctggctggtcattctgtcacctacaagtgtctcctgggacctctcaggacagcacaaaaacagctgtgccggaagctcccaagggcaacaatggccatccttgagactgccgctgacccagccctaagcacagactttcagaccattttggactaacccctccccttcagctggatgaacatgggcattgtagcctcaccactcctggatgcatgccacaagagggactgacctgttgtgaggccagtttgccctccaaaacatgtgccagggctgtagtatgggggttgtccctgtgccgtgtttcctgtggtggacttgatttctttcctgatgcctccggggaagcagctcccacccctctcggtggcagggatccactagccagtaacaccagacagaggagaagatgcctgggcactgggacagtgtgcacggatctgagatgcccggccctgtgtctcttcacatctaacccatggagcctttcccaacggggtcacagtagaaagtgtttttggggggcttacagttttaaaggtttagaatctatgatcatcacggtagggagcatggcagcaaggaggcaggcatgtgtcttctcacgcctaaccgaggagccttttccaatgggccagtggggtcagaatgtctcagagatgaaaacaggactttgaactgatgtgggggtttgaagatgtgtagtccccacagacccgtgtgttcaaatgcttggcctattggaatgtcactattaggaggtgtggcttgttggaggaagtgtgtctgtcactgtgaggacagggctttcaggtctcatatatgctcaaactgtgcccaatacacagacgacttctgctgctatgaataaagatgtagaactnnnnnnnnnnnnnnnnnnnnnnnnnnnnnn

SEQ ID NO: 718 - DNA, 3371 bp, Cricetulus griseus
  misc_feature (44)..(68): n is a, c, g, or t
  misc_feature (326)..(340): n is a, c, g, or t
  misc_feature (1179)..(1195): n is a, c, g, or t
  misc_feature (3353)..(3371): n is a, c, g, or t
ggcacgagatctagcctcctgagatagggtagatacattctagnnnnnnnnnnnnnnnnnnnnnnnnntgagaatgctaaggttgccactctcacttcctctcacccttagcccagaacattttttaatatagttctttcagaggggcacccgcccagagagaagaggccggtgccccagggactctgccttgccaacggctacagttagttcatcatgctttctcacggcctcggctggttgcagaaaatgccaggatgatgccttctttctgcctggctgggacactgatgatggcattgttcctctcctccctgagacctgannnnnnnnnnnnnnntgtggaggtggattctaacactagctaccaatgcatggatcggaatctcaacaaaatccctgacaacatcccttcttcagtcaagcatttagatctgagcttcaaccccctgaagaccttaggaagccatagcttctttaattttccagaactcaagttgctggatttatccaggtgtgaaattgagacaattgaagacaaggcatatcagggtctacaccagctcacaaccttgatactgacaggaaaccctatccagaatttatccaagggaactttttctggactagcaaatttacagaatctggtggctgtggagataaaactggcttctctggacagcctacctattggacaccttgtaactttaaagaaactcaatgtggctcacaatcttatacattccttcaagcttcctgaatatttttccaatctgaccaacctagaacacttagacctttctaataactatatccaaacaatttactacacagatttacagactttacgtgaaaatccccagctcaatctttctttagagctgtctttgaacccaattgactttattcaacctggagcctttcaaggaattaggctccatgaactgactctaagaagtaattttaatagcacaaatgtaatgaaaacttgcattcataacctggatggtttacaagtgcatcggctgatcttgggagaatttaaaaatgaaaggaatgtagaaaggtttgaccgctatgtcatagaaggactgtgtaaggtgaccattgaggagttccggttcacatatgcaaatgagttttcagaagatatcactgattttgattgcttggcaaatnnnnnnnnnnnnnnnnnggcaaatgtgtatctaaagcgcctagaagacattcctaaatatttcaaatggcaaaccttagcagtcattagatgtgaacttaagcaatttccacctctggaactcccctttcttaaaaggttgatttttattaccaacaaaggggctaccagttttccagaagtgaatctgccaagccttacatttctagatctcagtggaaatggtatgagctttaggggttgctgttcttacactgatttgggagcaagaagcctgaaacacttagacctcagcttcaatggtgtcatcagcatgagtgaaaacttcatgggtttagaacagctggaatacttggattttcagcattccactttaaaaaaggccactgaattttcaatgttcttaccccttgaaaaactgctctatcttgacatctcttatactaacaccaaaattgatttcaatggcatattttttggcttgaccagtctcaacaccttaaaaatggctggcaattctttcaaagacaacatcctttcaaatgtctttacaaatactacaaacttgacattcctggatatttctaaatgccagttacaacaagtatcttggggggtgtttgacactctccatagacttgagttactaaatatgagtcacaacaatctactgcttttggatctattccattataaacagctgcattccctcaagactcttgattgcagtttcaatcacatagagacctccaaaggaataatgcaacatttcccaaagagtctagccttcttaaatcttactaataatccctttgcctgtatatgtgaacatcagaacttcctgcagtgggtcaaggaccagaggttgttcttagtgaagactgaacaaatgacatgtgcaacacctgtagagatgaaggactccctggtgctggactttaggaatgccacctgttatgtgcagaagaccatcatcagtgtgtcggtgatcagtgtgcttgtggtatccactatagcatttctggtctacaaattctatttccatctgatacttattgctggatgtaaaaagtacagcagaggagaaagcatctatgatgcctttgtcatctactccagccaggatgaggactgggtgagaaatgagttggtaaagaatttagaagaaggagtgcccccctttcagctgtgcctccactacagagactttattcctggtgtggccatcgctgccaacatcatccaggaaggcttccacaagagccggaaggttattgttgtggtgtctagacactttattcagagtcgctggtgtatctttgaatatgagattgctcagacatggcagtttctgagcagccactctggcattatcttcattgtcctggagaaggtggagaagtccctgctgaagcaacaagtggagctgtatcgacttctcagcaggaacacctacctagagtgggaggacaatgctctggggaggcacatcttctggagaaggctcaaaaaagctctgttggatggaagagcctggaatccagagggagcaacagaggcagaaaacaatcaacaagaaacaacaacttccatctgaggaggacaaaacatcttggtctaatactcattctgtttacaagtattaaatattacagctcaccatggattatgttgtagacaagggtcccatggtgcacaaggtaccaaaaggctggtaaactaatggaccttacaaagcagaaagtgataatattatgctgaaactccatgccttccaggggtgctctttcaccaactcaggcaaagaatcataaccaagaaagtcagctcctactgtatcaagctgaaggaaaagaggctaagccccagtgagaccaaaaaggagcattagttatcccttggccttttgagtctatataatatatcatgtactatgtttcaactaccaactgaactgaatgtttatttactttcccttcttactacttaatgcaatttaaattccactggctctctttgtgtgtttgattccaagttcatgttccattatatgtcattttcttttttacctatttctttaggaaacctgattaatacatgctcatggacatcctggccaatacttagtatgctgtatttattaaataaaaattcctaatatacttttatttttatnnnnnnnnnnnnnnnnnnn

SEQ ID NO: 719 - DNA, 2713 bp, Cricetulus griseus
caggaaccggatgtgtcctgttgctccaacgaaacgctggggagatggtgagctcggggtgcagtacctctgtgatttggggataccaggggtccggctcggagtttcctttggagttgggggttgggctttccgaatccggattgcttacccgaccactttgcggacaggtgacacggggctccgcgcggtttgctagtcagcccccgtgtacagctgttgaatgaacgaggagcttggagtgtaaactggcggcgcggaccctccattagtgcactccacgtagagtcgcctcaccagctgagccttcctttttctccaggccaccgggacagaccaagtggtgggatttggcctcgtcgctgttagcctgatcatcttcacctactacaccacttgggtgattcttttggtatgtgtcctcccccaccccacccaagcccacgtttatcctgccccggatctcttaacaaaccgactgctaacacaacttaagcagcatctacatgccaggcactgtgctggatgcttggcctgccctaatttcgcgaaatccactgtgattgttgatggtgtctgcattttatagatgaggctgagatccgggcagaatggtaaggctcagactcaactgctgcactgtaaggttagccagctcctcctgggtgtagcaatcgcccgtggattttactaataccttgaggctttctcttttttagttgtgaaaaggtctgttagttattgcttagaagtgcattgtgtttgaaagcaggtatcttgcagtacttggtatcctttagagagaaaagttaggagggctggagagatagctagcacagcggttaagagcagttggctgctcctccagaggatcagggttcaagtcccagcaccaacatggccacttccaggagatccagcaaaagtgcctggcacaccagtgctgcttaagtgttaggagttgcattggagattcagggcttggatgaggtacatcttgctcgyatgtgcacataatcaaaaaatgaaataatttaaaaagacctagaatttctggattcagaagacaggaaggtgggtctttgtgagcccagcctggtctacatagcagttccaggtgagccagggctatgtcatgagaccctgcctcagaaaacaaaaggaatggtttccagtactcagaaggctaaggcagtagttcaaggctacctgacatagtcaaaatacatacccacacccagaggcacggaggttgggaacctcgtaggttgtttgctaagctcgggatgccgtcgggcaggtcctcaggacccagtgctgttaatgggtttagccccttggacagaggaggtgggatggcctctcattgggctgggtaaaatgagcagtactcaccagagctcttgccctcggtgccagcccttcattgacagccagcatgtcatccacaaatacttcctgcctcgtgcctacgctgtcctcatcccgctggccacgggcctcctgctgctcctatttgtgggtaagtctcccattctccaaaagtctcctgactggggggcaagatgtctggaaggccagccactctcaccccaagtgtgcgtccatactttggcacttggtgttcatctgcctagaagctccttggccccaactctccctggggttttcctgttcctccttaaaggctacaagcagaaagccctctgcttgttccagtgcttcaggtttgtggggcagtaagggatgtctgtctcccttttcctgtctcagcttcatcttcacacctccgccacctacccttttgtcaccctgtcacctctcttattgcttctgtgggttggggactgtgtcttcatcattacagcattctaagctctagcgcaggagtgacgctgaacgagtgctaggagcgttcgggtgactggacgatgggacggtgctggtaggaaggagggtggatatgtgaggacatggatgggcagatcactcaccatgaaatctgaagcactcagcaaagcatgtgacagatgatgagtggccatggggcttaaggaatgactgtgaaggtgcctacagggtgtttgtttgggagccctggccatccagccttcattctggtccttttgctctgtgtgttctaggattgtttatcacctatgtgatgctgaagagccgaagactgaccaagaaggctcagtgagggtccagcagggatgaggataccagccttctccatatctcctccagggaagggaccaagtgtcacatcctgatacagtcagcctgactgctgcagtcctctttaggaggtggggctgcttacagctcaactctgacaaactggagccctctcctctcttattcatccttctggaagccaagaggaacgtgggttgggaaacctctccctcatggcttcgggctcagggcctgaacattgctggtcctgtccacctacagtcaaagctctctgccactcccacaaggttctgctctcttgcctgtttttcctcctgtcatgtgctgatagatgctgcaggctccccgtttgtgtgcagcctcccctcgccgtacaacctatctcttcacatggcagctcttttgagtctgacactgtccagactccatgaggacttctgcacccagaaagccctagtcccagctggcctgtgtttgggaaaacttacaaataaatgttgatcatgttggt

SEQ ID NO: 720 - DNA, 447 bp, Mesocricetus auratus
ccttctcagccaagctcaagagtctcctcatggcctagcactctgttctgcattttaagcccatgatgttttcccacggatggcaagagggaggctagagctgtgccttctcaccccaggttcaatcagtacatcgtgtgtctggcccatcatgtcatagcgatgtggttcattaggtgtcgactgcccttccggaaggatttcgtcccttatatcactaaggttagccaggggccatggatggtgttggacatgggcaatggacagggtcatggatggaagtgggaactggctgaggttctatggcacccaggagctggctctgctgagctggcttactggactcaacctgaggtaggcatggggagagaacttctgatttgctctcccatggtccccctcacagcttatgtctctaccccaactccagggcctgcgatccaatgt

SEQ ID NO: 721 - DNA, 464 bp, Cricetulus griseus
aagattatccaccaggatggttattcactggaagaatgcctcgagttcatagccatcatctatggcaacactctgcagtccatcctggccatcgttcgggctatgacgacactcaacattcagtatggagattcggcccgacaggatgatgcccggaagctgatgcacatggcggataccatcgaggaaggcacaatgcctaaggagatgtctgacatcattcagcgcttgtggaaagactcgggtatccaagcttgttttgagcgagcctccgagtaccagctcaacgactctgctggctactatcttctagacctagagcgcctggtgactccaggatatgtgcccactgagcaggacgtgctgcgctctcgtgtcaaaactgctggcatcatcgagacgcagttctccttcaaggatctcaacttcagaatgttcgatgtgggcgggcagcgctcggagcc

SEQ ID NO: 722 - DNA, 972 bp, Cricetulus griseus
cgcgacatgggtcacccgccgctgctgctgctgctcgcctgggccccagcctccccgggcctgcggtgcatgcagtgtgaggacagccagaactgcctggtgaaggagtgtgccctgggccaggatctttgcaggaccactgtgcttcatgaatgggaagatgataacgaactggagttggagatgagagactgcgcccattatgagaaaaccaacaggaccatgagctatcgcgtgaactcaaagatcatcagcctggccgaggtcgtgtgtgccacagacgtctgcaacaggccgaggcctggagcccgaggggttgcctttccccggggccgttacctggagtgcatgtcctgcagctccttggatcagagctgtgagaggggccgggagcagagcctgcaatgccgctatcccggagaacagtgtgttgaggtggtcaccctacggagcacggaaaggagtctgaaggatgagaactacaccagaggctgtggcagtcttcccgggtgcccgggcatagccggtttccatggcaaccacaccttccacttcctgagatgctgcaactccacccactgcaatggcggcccagttctaaatcttcgggacttaccaccgaatggcgtccagtgttacagctgcgagggcaacagcacccacgggtgttcctccaaagagacttccctcgttgactgccggggaccgatggatcagtgcctggaggccaccggcttggatgtgctggcaaaccggagtcacaccgtgagaggctgctcgacggcttcctggtgcccaggctcccatgtggcagatgccttcctcctgagccaccccaacatctcgtgctgtgatggcagcggctgtaatggacccagaagcggcgcccccaggacagaccctgctcgtctaggcctcatcgtctccctgctcctgaccgtcagactgtggggaggcactctcctctggacc

SEQ ID NO: 723 - DNA, 845 bp, Mesocricetus auratus
  misc_feature (828)..(845): n is a, c, g, or t
gattaccacataagctgcagaggaaggagtccagagacagagcaagatgagctccgagacaggtcctgtcgttgttgaccccactctgaggagaagaattgaaccccacgagtttgatgccttcttcgaccagggggaacttcggaaagagacctgcctgctctatgagatcagatggggcggcaggcacaacatctggaggcacacgggccagaacaccagcagacacgtggagatcaacttcatagaaaagttcacttcagagagatacttttacccatctacccggtgctccatcgtctggttcctgtcctggagtccctgtggggaatgctccaaggccatcacagaatttttgagtggacaccccaacgtgactctgtttatttatgcagcacgactttatcaccacacggatcagcgaaaccggcaaggactcagggacctcatcagcagaggtgtgaccatccggatcatgactgagcaagagtactgttactgctggaggaattttgtcaactacccaccttcaaatgaagtttactggccaaggtacccaaatctgtggatgaggctgtatgcgctggaactgtactgcatccatctaggacttccgccctgtttaaagataaaaagaagacaccaatacccacttacgtttttcagacttaatcttcagagttgccattaccaaaggataccgccccacatcctttgggctacagggtttatatgacctctgggagttggagatgaataaaatgactcccttgtatgtgtactgtttggacagcaagcaatggtgacctattaaaaagtatcaagctnnnnnnnnnnnnnnnnnn

SEQ ID NO: 724 - DNA, 1344 bp, Cricetulus griseus
agcagtggtaacaacgcggagtacgcggtggggtctgtctacttggtgacaaactgtacgctgttgggggttacgatggacagacctacctgaacatagtggaggcttatgacccccaaacaaatgaatggacccaggttgctccactgtgcctaggaagagctggagcatgtgttgtgactgtgaagatataactttatgctttgttctctaaatgacgatgccctccctctccctttattaatataagggcagtcctatcagcggattcatttttaatgaacattcgatgccacattcctaggcacaaagtgcctcatttcaaaatgaagatgttgaaacaatggaggaaggaatggatggaccaggatgagatacttcgttcgtctcttagtaaactaaagctgcagctagcagactgaaactatacctgtctgaaatgcaatatgaaggcaagtgcactgctctacaacaatccagcactaactgggaacttcatctatttttagtcaggcacattttattcacattgtccagagttattacagtacaaacatataaacttccaaaatactactttataagtttgtcataatgagcttccatactttttattatttaatcaaaccactattttaatgacatactaaagactatgctgtctggttttttcaggtacaatgatattaaatatgctctagttgtgaattttattactaaaattggtttaacccaagaataaagaaaaacacttaaagcattaaaaaaataagactgaccaaataaaaacttgataggatctctaggtcctacttaaatagccattccatcccatctagatccacggagaactgtgtgataggctatgaccgaaattaaagcgggatgctttacattaagatatgcaagtttatgtagagaaaacaaatactatagactctataatgttcttccacctaactagtatttaattatgtggatttcttttatactacaaaagattgtttgagtttgtctttttgatactgatgcaattgtttggctgttcttacattctgtctgctgctgcctgttgtctcacattttgacccattgtgttaagaacctattgtgctcctttgtaatcaaaaaattgggggggatgctaattgaatatttgaaaaataagtataaagtgtttgttactcaaaattttatacatttgtaaattctaattacatatgtgaatggtaatagtctcagtgaattgattattggttgcaaatgcccctggcagtaatattggatgaaactttctttaaggcagaagacattaccttaatataaaatagatgtaaactaaaa

SEQ ID NO: 725 - DNA, 562 bp, Mesocricetus auratus
  misc_feature (422)..(454): n is a, c, g, or t
cagtttggcatcatgcctctcgctgcctttgtcctgggcaaggtcttccatttgaaaccaattgaggcactggccatcctcatctgtggctgctctcccggggggaacctgtccaacctcttcaccctggccatgaagggggacatgaacctcagcattgtgatgaccacctgctctacctttgctgccttgggcatgatgcctctcctcttgtacatctacacaaaagggatctatgacggagacctcaaggacaaggtgccctatggaggcattatgatatcactggtcatggttctcattccttgtagcttagggatcttcctcaagaccaaaaggccacagtatgttccctacatcatcaagggaggaatgaccatcactttcttactcagtgtggcggtcacagtcctgtctatcannnnnnnnnnnnnnnnnnnnnnnnnnnnnnnnncaccgccattactggccacctcctccctaatgcctttctctggcttcctactgggctacgctctctctgctctcttccagctcaatccaaggtgcagacgcaccatca

SEQ ID NO: 726 - DNA, 4089 bp, Cricetulus griseus
  misc_feature (597)..(630): n is a, c, g, or t
  misc_feature (2233)..(2250): n is a, c, g, or t
  misc_feature (2959)..(2976): n is a, c, g, or t
ggtggacggcaagcagaaccgcggtcggtagccccgcgcgacgacaacatgagcgcgcgccacccggccctcggcctcctcctgctgctgctgtgccctgcgcaggtgttttcacaatcctgtgtttggtatggagagtgtggaattgcatttggagataagaagtacaactgtaaatattctggtccaccaaaaccattaccaaaggacggaaatgacttgctacaggaactctgcccaggattcttcttcggcaatgttagtctctgctgtgacgttcaacagcttcagactctgaaaagcaacctacagctgcccatgcaatttctgtccagatgtccatcatgtttttataacctaatgaccctgttttgtgagctaacatgtagccctcaccagagtcagtttctgaatgtgacagcaactgaagattatgttgatcctaagacacaggagaataaaacaaatgtaaaggaattagagtattatattggacaaagctttgcgaatgaaatgtacaatgcctgccgtgatgtggaggcccctgcaagtaatgagaaggccttaggaatcctgtgtggaaaggatgctagtgcnnnnnnnnnnnnnnnnnnnnnnnnnnnnnnnnnnaataaaaacaatggacaggcgccatttaccatcactcccattttttcagatcttccgatccttgggatggaacccatgagaaatgccaccaaaggctgcaacgagtctgtagatgaggtcacagggccatgtagctgccaggactgctccattgtctgtggccccaagccccagcctccaccaactcccgtgccctggaggatcttgggcttggatgccatgtatgtcatcatgtgggtcacatacatggcatttctgtttatattttttggaggacttttggcagtgtggtgccacagaaggcggtattttgtgtctgagtacacgcccattgacagcaatatagccttttcttcaaacaccagtgacaaaggggaggcctcatgctgtgacccactaggtgcagcatttgatgactgtctgagacgcatgtttacaaagtggggagctttctgtgtccgaaaccccacctgtgtcattttcttctcattggtcttcatcactgcatgttcttccgggctggtgtttgtccgggtcaccaccaaccctgtggagctctggtcagcccctcacagtcgggcccgcttggagaaggagtactttgataagcactttgggcctttctttcgcatggagcaacttattatccaggcccctaacaccagtgagcacatctatgagccgtacccctcagggtccgatgtgtcctttgggcctccactgaacaaagagattctccaccaggtgcttgacttacagattgctattgaaagtattactacatcttacaacaataagaccgtgacacttcaagacatctgtgtggcccctctctctccgtacaacaagaactgcaccattataagtgtcttaaattacttccagaacagccattctgtgctggaccaccaagtaggcgatgacttctatgtatatgccgattaccacacacactttctgtactgtgtacgggctcccacctctctgaatgacaccagtttgctccatgatccttgcctgggtacatttggaggacctgtgttcccatggcttgtgctgggtggctatgatgatcagaactataataatgccactgcgcttgtgatcaccttccctgtcagtaattactataacgacacagagaagctccagagggcccaggcctgggagaaagagtttattgattttgtgaaaagctacaagaatcccaatctgaccatttccttcattgctgagagaagcattgaagatgaactcaatcgggaaagtaacagtgacgtcttcactattgccatcagctacgccatcatgtttctgtatatttcccttgccttgggacacataaagagctgtagcagacttctggtggattctaaaatctcactgggcattgcggggatcctgatagtactgagctcagtggcctgctccctgggcgtcttcagctacatggggatgccactgaccctcattgtcatcgaagtcatcccattcttggtgctggctgtcggggtggataacatcttcattctagtgcagacctaccagagagacgagcgtcttcaggaggagacactggatcagcaactgggcaggatccttnnnnnnnnnnnnnnnnnnatgttcctttcttccttctctgagacctcggcatttttctttggggcactgtcctcgatgccggctgtccacaccttctctctgtttgcgggcttggcggtcctcattgacttcctccttcagatcacctgctttgtgagcctcttggggttagatattaagaggcaagagaaaaatcggctggacatcctgtgctgtgtgggaggcactgacaatggaagaggcatccaggcctctgagagctacctgtttcgcttcttcaaaaactcctttgccccctttctgctgaaggactggctgcgaccaattgtgatagccgtatttgtgggtgttctgtcattcagtattgcagtcatgaacaaagtggaaatcggattggatcagtctctttcaatgccaaatgattcttatgtgattgactatttcaaatcgctcggtcagtacctgcactcgggtccacctgtgtacttcgttctggaggaaggtcatgactacactacccacaaggggcagaacatggtgtgcggcggcatgggctgtgacaatgactccctggtgcagcagatatttaacgcagctgagctggacaactatacccgcataggctttgccccctcatcctggatcgatgactactttgactgggtcgcgccgcagtcctcctgctgtagactctacaacgccactcaccagttttgcaatgcttctnnnnnnnnnnnnnnnnnnatccgctgcagacctctgactccagagggcaaacagaggccacaggggaaagagttcatgaaatttctgcccatgttcctttccgataaccccaaccccaaatgtggcaaagggggacatgctgcttacagttcagctgttaatatcatcggagatgacacttacgttggggccacttacttcatgacctaccacacggtccttaagacctctgctgactatatcgatgctatgaaaaaagcccaacttgtagccaggaacatcacagaaaccatgaattctaaggggagtaactaccgagtgttcccatacagtgtgttctacgtcttctacgaacagtacctgaccatcattgatgacaccatctttaacctcagtgtgtctctgggctccatatttctggtgaccttggtggttctgggctgtgaactgtggtctgcagtcatcatgtgtatcaccatagccatgatcctggtcaacatgttcggggttatgtggctgtgggacatcagtctgaatgctgtgtccttagtcaacctggtgatgagctgtggcatttctgtggagttctgcagccatataacaagagcattcaccatgagtaccaaaggaagccgagtaagccgagcagaagaggcgctggcccacatgggtagttctgtattcagcggaatcacacttacaaaatttggagggattgtggtgttggcctttgctaaatctcaaatttttgagatattttactttaggatgtacttagccattgtcttactcggagccactcacggactgatatttcttcctgtcttactcagctacgtaggaccatcggtaaataaagctaaaagacacaccactcaagagcgatacaaagggaccgagcgagaacggctcctcaatttttagccttgtagcaggctttggtgactttgtctatggagaggtcaagtttctgcaggaaagctgtactgtcaaggccatgctggattctggttgttcctaggcattaggctgtgtcacagctgtggcaaatgcagctccacccacgtttttaaactcaggaatgcacctgtgacttgtgaagcagtattatggaaactgaaggtgacagaa

SEQ ID NO: 727 - DNA, 249 bp, Mesocricetus auratus
ttctcagaagtattttcctagaagtacttcaaccctttctgtgactacacctacccatggtagagaccatcttaaattcccattttttccagccttcatcctagagccttccagacttgatcaaggagaaaagcccaaactgctggctcctatcacagcatctctcccctgtcttcctacagctacctgaagtccaagaagggccagtctgcctcccgtcttaaaaaactaatgatcaagagagagggg

SEQ ID NO: 728 - DNA, 14465 bp, Cricetulus griseus
  misc_feature (135)..(152): n is a, c, g, or t
  misc_feature (195)..(219): n is a, c, g, or t
  misc_feature (248)..(268): n is a, c, g, or t
  misc_feature (271)..(287): n is a, c, g, or t
  misc_feature (1549)..(1619): n is a, c, g, or t
  misc_feature (1745)..(1762): n is a, c, g, or t
  misc_feature (3769)..(3794): n is a, c, g, or t
  misc_feature (4999)..(5061): n is a, c, g, or t
  misc_feature (8288)..(8303): n is a, c, g, or t
  misc_feature (8306)..(8322): n is a, c, g, or t
  misc_feature (8367)..(8385): n is a, c, g, or t
  misc_feature (11044)..(11061): n is a, c, g, or t
  misc_feature (11751)..(11771): n is a, c, g, or t
  misc_feature (13500)..(13516): n is a, c, g, or t
tctccagggtctaaggaccccacttgacgcaatgaattttgtttcaggataagctagaagccagaagctgctaaagaaagttaccatctgttaaaaactgcagccaagatttgttgtttgtttgtttccgagaannnnnnnnnnnnnnnnnnccttgctgtccaggaactcagagatccacctgcctctgcttcnnnnnnnnnnnnnnnnnnnnnnnnngctgactacaggcaagcttgtttgtttannnnnnnnnnnnnnnnnnnnncannnnnnnnnnnnnnnnnatagctctggctgtcctggaacttgctctgtagaccaggctgtccatgaagtcacagagatctgcctgcctctgtctccctcctgagtgctgggatcaaaggtgtacaccatcacccagtccccactcccccccccacctcccagcacaggcaaggtttttaatgtatagactctgcataatattccagttcctttggccatatatacaaggatggaaaaaatacctgaaaataatggtttttattttggtcatggaattttaatacatttttctttattcatttcagtgtctttcaaatcctaacattttggctacagaattaaaaaaaataataactgaccttaaacttccatgtctgtgataagggtacatttgttattattggaggataaactgttacttcaccaaatgttacttgtaaatgtgctgttcaccatgcatctggctgcagtttctctaggccctttggcctattgattgttgtctgcttcttaagttagctcctaggacctctggacagcctcatctggagctgcggctgctgttgcccttcctctgtagctgtccatgttgcctctgcagtatttgctttccttgtccttgtttgtgctgttcattgctagttgtactccaatatgcaaatttttgaaaactttttcagtaacattatcctaattgttccttttcgtttataagtagtttactttctttacataattttcttaggactgatgcatttcaattggcttttttttgtgacagggtctcttgttgctcaggctagccttgagctcccagttctcctcaaatcctcaaactttatggtaaagaagacctaagtttatcatgggcagccatatatgctgattatcctttccttataatatataatattgttattcatgtagaaggagctctttaatgccattttgttaaacagccaactatttagcatattagctgttcatattttatagtttttaagagctctttttggggatcattatgaatttatagagaaaagtttggtttaactagttagccatagaaatggatagactattcagttggataggaagcagtatgttacttatgctgtcataattgcagtgtacaagaacccagcaaaatggtagtggtgttggggaggaaaagtgacaacattgactctttggtggacagcagagcatagctatattatttggtttttcgagatagggtttctcttgtagctttggagcctatcctggtactccctcnnnnnnnnnnnnnnnnnnnnnnnnnnnnnnnnnnnnnnnnnnnnnnnnnnnnnnnnnnnnnnnnnnnnnnngtgtgccaccaacgcctgacattaagttttctgacactgtcaggaattgtcacttctgcttctcagtttccttctctgaaaaatgaggagaaaggtatctaggctgcctcctcatttctgactagnnnnnnnnnnnnnnnnnngagacagggtctctctcatttggtagtcttggctggtgtggaaccaggcttatcttgaactcacagagatccatctgcttctacgccttgaatgccgggattaaaggatgtgcataatttatagactagttttaggaagggaaaaaaaaaagactatggtagaagaaattgtggaagtgttttattatacctgaaagtcctttgtggcaattttggcatggttaggcaaagtttaaacatcccagtcatcaaatagattacatcacgacattcctatggcttatcccggactcataaaagtattttatgattcacttaaagatttaatagtgatttggattacttgtgtgggaaaacacaaaatgaggctgtagtatcttacagtgtcagaaacaatactttaaaaacctactgggatcctgttagaggacccttaaagaggccccactgggcagagctagaatcagatgagccacgagagaaggaatgtggactattgcttttaagtatgaagtgagcccacatctctgctataaatgatataaatgaatgggggggtagtctaccttatggaagaactccaaaactttatgtagctcttgcaacttcatggagaaagtgaagtatggtatcctgaactgggatctagaatacaaagatgacatgtgcagaaagcattctaaagtccaagtgaagtttggagtttaaccaatgttaatttttaattttgacaagtgtaccatggaaataaaaaatattaacagttggggggagggagctaggagaatgagaaggggaaaagaggaggggtgtggaggacatgagggagcagaaaggttgagtcaggggaagaatagaagataacaagaatggagataccataatagagggagacattttaggattacagagaaatcaagaaactagggaaatgtctggagatctacaaagatgacactagctaacaatctaagcaacagaggagaggctaccttaaatgccctcccctgataatgagattgatgactgacttatatgccacccggcacccacaactaatcactgaactgaactggaatccagttgcagagaaagacaagtgatgaccaggctggtgaaacccacagaaacagctgacctgaacattggggagctcttggtccccagactgaatgctgagataacagcatgggactgatccagaccccagaaacatgggtttcagtgaggaaaccttggaaatctacgggacctcctgtagtagttcagtacttatccctagcataggtgtggagtttgggagcccattccacatagaggaatattacctgagccaagacacatgggggtgggcctaggccctatcccaatagactctgatgacaccctatttaaagcctcaccatccagggggagcaggaaggatatgtgataggtagggttttagttgggggtggtggtggtaagggaggatgggtgggtgtgggaactgggattgtcatgtaaaacaatcttgtttctaattcaaataaaatctacagaaaaaatagtaacagttgggaaaatgagtaagaagtagtcaggatctttctattctgagattaaagtttacccttttagaaaaggctggggatataacttagtggtagagtgcttgccttgcatgtccaggtccctaaattcaagccccagtactacagagatacatacatacatagaagatttaacagactgtgcttgcagacccagtttcattttagccagagatatagtgaaactctatctcagtatgttcctatcacccgcatggttagaaatagttgattttaaatataaaatctaagtgaacttgtagagaatatgaggaattaaaagtagaaggttgattttggttcaaagggatttccagttccccaagtggtacaagatgtttgcaagggggcacagtaaagaaactgtgctgacataaacacactatgatatgataactgtttttattgtagggannnnnnnnnnnnnnnnnnnnnnnnnnaagagaaagagtgatttaacaagtacttgtgatactgaaggagcctggaggctgtcatgggttttgatatgcaatcacaggtatatatcagtggagagccatatgtaccttctgccagaggtaagggtaaggaaaatgagtcattttggcagactgaaactggtttcccaagttcctgagaaattctggtgtttaactaccagaaattctatagtctggcttgagttcatttctgggtatacagactgccttttggagtttgggatttggagtttatttcctttggactgacagttgaaaatacaaatcacctcacttggttatcatctttggattttgactgctttttagatgaaacttgttcccatgaccatgcagacatcattatggtgtgtatgtgtatatgtaattatgatgctgtatatactcagttttgtagatttaattttaactatgtattttccaagatttaattttaactatgtattttccagtccacaagtaattattagactactttatggaccagataccaagataagtacacttgggataatggatgagtgagaatgctgtgggtctttgtttggaggttgttgatatctagggagagatgatgtactatctagggatgatgattgtgagagcatgtaaatcgtagaaccaatgacatgtctgtccttcaaggcaagtgaaagaaggaagcagtagactggtgcaatgggagctggaatacagtgttcacttggaggcagagcatcagctagtgctgaagcctcatagtgtgaagcgccagggaggaacagtgtctggagtgcagagaatgggcctttagaaaggaatagccagagactgaagaaatagcaaagtaagagcttaatcatgaaacttagcctgggcgttcccttgaaagtgatggaactcactgagaatactaaagctaggcagtgataaaaggagcctgctgtggtgtgggcaaatagatgggcaagtggtgagaagtcctggacctggtagtgtgttaaaagtgatagtaaaatacaagctgtttgtaattgctgcctgctgggaaaggaaaaagtcacttttttccccaatggagtgtcaatgggtatatcaactacactccacaaaatgaactccatgaaatttttatgggctttttgttttatttgttttgttagagagagagagagatagagatnnnnnnnnnnnnnnnnnnnnnnnnnnnnnnnnnnnnnnnnnnnnnnnnnnnnnnnnnnnnnnnaagaggcctttagagagacaattaattttgggtttgtggtgaggtagggaagatctgggaagagttggggaggagaaaatatgaccaaaatatattgtatgaaaacaagatattgtaaaacaggagattattgctagaatataacagttgaaatgctaggagttggagttggttgcttttataactgataatgaagttgggtgttcctacctcaggtaaaaaaaactccagcacagtaatccaagagtagccatttgtacagtgtccttgtttgtagttttaagagcaaaagaaattgttttgtagtagaaagttgtggtgttgctcagaaaccaaataaaggaattctgagttagaatctttttatttggcaacagcatgctgactgtgagagatgacaagctgcttttgactgtattgttttacttggtatccaccaatagcattggtggtactattctactgagatgtgccagcaccatgtcacattgggtaccataaactcactagccatacattgagaatctttgggaaaggctggtttagaagctgtgatgactattcttggttgtcaacttaactatatctgcaatgaactgtaacccagagatggagggcacacacatgatccggatcttgagactggttgacacgtcctttaatccagcccttgcttgaggctggagggtacacctttaatctggctacaccttctgctggaaggacaattgaggaaagaaggggtgtgtttgttcttggcctgttttccctcgtcttgtcagcacatccatttctttcactggtattggagtctacttctttgggattttatcatatacagaagaccagttgagatgctgagtctcctgggactggatccttggactttttattcacaggtaggcattgttggactgcagcccttaagtcattccaatatgggaatatatatattctaaaagttatatatgaatgaatatatatattcattctataagttctgtgactctaagagacctgactaatacagaaactttttaaacactttttagttttcattgtatgtatgttttgtatgtgcttgtgagtgcagatgctcatggctgcagaggtatggagtccctacagtatttaacattgttaaatttcttttcctgctttcaccactacttctgtcgttaactggcttgttgtgataggtggctgtcctagttagggtggctattgctgtggtgaaacaccatgactaaagcaacttggaggaaagggtttgtttgactcacaattttatgtaacagtccatcattataagcaatgagagtaggacctcacacagggcaggacctggcagaacccatggaggaatgctgcttactggcttgttccccatggcctgctcagcatgattacttatagaacccaggaccaccagctccagtatggccccacccacaatgggttgagtccccccacggtaaccactaattaagaaaatgccctacaagcttgcctatagcccaaccttatgaaggtattttttcatgtgacaaggtgacataaaattagtcagcacagtggccaagcctgtatctttgagactcccaggccccagctttgcctaactgtatttaatgtctgcctgttggagagaagtccagatgctttcaaatggtctactcagacttatttttagaaataaactattccaaagttcatctggtacttattctaagcaaggtcatgctcttcatgcatttgatagccttcaccctgttgtcagttcccttgtaaacattttctgcacccatatccccaggctgtttatttagagcaacctacttaatgctagtagaattagaggaccgcccaaatgggtgcattcatgtaacaggaaggtggtacattcagagaaaattaaaatacgttaaatttatgcagtgctgtgatttggaatgttttaaatgtactaggaaaaagaacttggagatctgttggttcctgcctggataaaatgagcctaagtaccaatgaaatcctgaaaataccgaattggtattactggaaagaagtgtttgttttttattacactactggacttggctatttgtatctaaaatcccatctgcaaatgttgccttagcacagtaaaacagtaaggtattgaaaaggttcaaaaaagtgcaagtcattgaatactgtgttatatttgctctaccccttggttaggtgtgaaggagtgagcataacaaatcctaagtgagtgagtcagttgtctgtttttctgttgtgtatttgttttgtgattcttgatttctttaaaagattttatttatttattgtatacaacattctgcttccatgtatatctgcacaccagaagagggcaccagatctcataatggatggttgtgagcccccatgtggttgctgggaattgaacttgggacctttggaagaacagtcagtgctcttaacttctgagccatttctccagccccgtgattcttgattttatcttctactttctgcagaaaatattttaaaactggaattagatggtttggctctttggctttccattccaattgagtacatttaaggctgtaaatttccctttaggtaatattgaatctttatgctgttatctttagttatcatcatcattgttattttaccttttacaatagtatttactttagtggacatgaccaggctgagctgggctatgtgggacagggaggggaggggagagaggaaccaactgcagcacccaggaggccaaagggacaagagggaaaggggtgggtaaccaaaatgtctggtttgtataggaaaaagctctggaggaagggtggggaatgacagccataccttggaacagttagggactgaggatgctggaagaacctgttggccatatctagctttaatatgttaaataggcacctcagctgtttgtcctggatttgaaatttaacaaaaagatagtagttttcttaggtcattagtgttatatgtgaccaggaggctggagcaccacaatatcacaatacaaataatctggtttagccaggcttccatatgaggttgatgtttgactagaaaagggtttgcaagccctgtgtgttacctcctggcttgtgattttggttcttcagagtttcccccttaagccttaactgcttgttgtgttcaagaattcaggacttttagccaggcttggtggnnnnnnnnnnnnnnnntcnnnnnnnnnnnnnnnnnaggccaacctggtctacagagcaagttccaagacagcctcgcaannnnnnnnnnnnnnnnnnncctggaaaaacaacaacaacaacaacaaaaacaaaataaaagaatgggcaggctttgaggtttccagtgctgacatactgtccagtgtctcagttgatgtcttgttgcctacaaaatgtaagaactctcagctcctccagcaccacgctgccatgtctcgccatgatgacaatgaactggacctctgaaactataattgagccaccccaattaaatgttttccttatatatataaaaaaaaagaattctgaacttttcttttgttcccttcccttctaccacaccctaattgtaatccattttaatttcctggtcacagtcctgtctctccttccattgtaccttgcccttttctaaagagcgactgcaaagtatgtttgcgtaggtgaggatctaaaactttatgaggtacgaacatcacagaattactttgtaatttcagtttattgtaggcttggctttttggggagggtttacgtcttagacctcttagtgcttctttgtttcatggtgttctaacttcgaagcatctctgtagctttaatggattccttttctgaaagctttgctctctttcttccccctcggctttctcttaggcaagagggctaactgtaaagtaaggcttactgccttgtgtttccaaatgtgtccgaagaggaagtgtcttctgtgaatcctgttatgcatgaataacaggaaatagaaagaaattcactttcattattataaaagtaatatgttcgtttaaaaaattctaatgaagagctggagatgcaacccaggggtagagcacacactcagcatgcaggaggccctgggtccaatcttggaatctcctctcagttaacctgatctctagctgattagtagtgagtgcaagcccactttcctcttctgcctcattgctcagtgataacagctgttaaactttgtcttattctaaaactacctctgtgcaaatgctagcacaataatatatatcatatgcacatgattttttttttatcttgaaaagtaagtcagtatagctacaaagttcacttggcattgtcaacatttcacaggcgtaatattcctcctctagtactgtcctcttcattctttgtgaccaagtttggagagagtgcacaaatgccagggaggtttgtgggaaggtttctcatgttctggtaaggcgagtaagaaaatagtctcatgcaggtgaaatgagtgctatgcagtatatattataccagagaacagcaaatgaccaaattcacactgaactagttcagtaaaattggctttgtcaaagctttccttgcttaaaatgtaattccctgtcatcctagttctggtctggattcttttcctggagtcttgacttccagattccctgtggacttttgtttgagtttcaagcttttgaaatatagaaacctatctaacttaacaaacttgggagagaaaagactccagaacaactgaaaacagaccaggctaaatgaatagactttattcctctcttcttacctgcagttttcagatatgcagagttggagcggatcttagaggttgattcattcatgcctgaagaaaacacattttatagaccctgtgcccaagttcgtggtggacatcaccctttatttactaattgcactacataacaggcattttagaagactgctccagtcagagaccccgccttagaggaatctgtaaaccctgaactcctatcactcatgagcactagttatgtttggaatgccgtattaaaacaaaagttacatttctaaacttaaaattttctagcacagagacagtgggagtagctaactttgatagacatttttctactaaaagtctttctaagtacataatcttctgtaagttggaaaacagcaaaatagaacgtctcctacgtagttaatctttttgcataatttgcacatgtaggagttattagtatacgggtaagttttcactttttcccccaactggagtgtcttgtggctgggtttgaaaaagggaacgggaggccgctggaggggattggtaaatgagataaaacaccactcattcaactcagtgactcagcatttaaattttccataaaaggattaaaggaaaattaaacaaattcttaaagccaagactctggagaaacttgttggtgtgctttagttttcactgttatgactcatgaatttatgcataaattagtacatttataaaaacatagcctttttagagttttctgtttggctaaagtgccattgttagcatttggaattacctttttatgtcttatattttttccaaataaaaataaatgtttctgctgtcttactactgaaactacgttgtgagcactttaaatttctcaaagcagtttcgcctgttatacttggcgcttagtcatcgtcgtacacaacaggacctgattaagaaggctgtgctgcctctaagccgggctagattgtagccactagcaaccaggctgcaataatttccctttgatgacatcatccactgtggaagaacccagttgcttcagccagtcgaactatacagttccaacctcatcaaatatggcatctcccttgcctgctatagcagggggaggaaaaaatgccaccatctttttaatctagcaagcttctcttttcttcannnnnnnnnnnnnnnnnnaaaaaaattctgatcatggatgcttcttccgatccctatttgccttatgacgggggaggagacaatatccccttgagggaattacataaaagaggtaagagcatccccttgctctgaatcctctgttggttgttgtgcatgcggctgggcggttctggggacaggctgtctgttgtcctcttgctgcaatgtgctgcttagttgccctgccttgttgctgtgggagaatgcgaccttcccagcagggctggccctccctgattgtttgctctgtgcagattagccctgcttcagatcacatagggctgcagactccatcttctgtgtgaaaatgctttcggtttgattgcagaaataagctgcctttacagccagctaaagtcctggtggttggttggcacctgcaaagtagtatttttgtacctctggaaacttatattttctttacacagcaatatcaagtgccggtatgccattctgttttggctgctgccaattaccatgtagactttgcaccacagagtaatagtaaaagctcctagctgcattttataacatttaaaaatagcaggaaagaagaattatttttgatttaacatgtttttgtcatttaacgtcttaactgattgacatactatattgtctgtctcgtgggtatcttgtacaacttgataggataaagcaatttannnnnnnnnnnnnnnnnnnnnatacatccagaatgtaagtcgtcagtagttttcgaacagataagtaatggtgttaatcttttggcaggctttgccttggtctccttaaagctaattaggtgttacttaattaaactgctcttttgctcattttcttaaattatttttttaaaagatagttggcatttgctgttctagaaataaacttcaagaaacattctttagccagatgacttcatgtatgagccatgttagtttgaattatttgcttggtgttataaactttatggtttaataccaacttttattatgtttacaaggtaaataaggaaaatttcaagtacattttgtatcctgagaacaaatttaagttccatagaatttaggaattacaatgtattcaacagatacttacttgtcatactgtgcctgcaaaacaataattagactctgaacaggtgcaacaattttctgtagaattctgtgcttagtaaaaggttgctttttatattttgagagaaatctatttaaagatcatggcccatattttgtgcatatttttttctgtataccatttccatatatgtgtgtgtgtgtacatatatgtatatatataaaatgttagaacatttgaggaaatagctaaaagtacaaaagtaatgttttctaattttttactccccgaggttatttcttttttccttgttttcctttctctttgttcctatcatcagtttctagtaatactcttattgaacagtgattattcaaatgtcacattatttattaatcagcatttaaatggtaaaaccagacagaccatactttctctgagtgatgacaacatccatttttagtaatgataaactagaagggtcaggcttgatagtctttgtcaggactaatttatagactgtaaaggccaaaagaaataagaaatgtcaaaactcttgtgaaactagacatacagatattaccaagagagaaactagaaaaaaaaattctgtgacatggccttaatttgccaggcaccatcgtgaaggcctaaacccctcttagaagctcactcagatgccatcctgcttctctgatgagacttcctgtcaatacaaacatggtttaggaagaatgagtgtttgcagtataaaccagttatttactagccttactttaagaatatactgtagtgtccttgagagagaaggtgtttgttttctgtaatttatgacccttttgaaaccatagatcagcacaaaggaactggggatatggaaatgggaacataacttaaatccagaaaagtgaatcagattccctgtgaggacaaaatgcaatatttagaaataggatctttaggctgggagggagaaaagaggaaaaaaatgaaagtataacatttttcataagtataagatttcataaaaaaatgaaatctataacatagagggtgttgataaagtaagcatggatatgtttagtaaagccgacagagctaagaattagctttgtgagtaattggacttaatcaaacttttcaaggtgggatacaaatgaataattgtagaataaatggataaaagaatatgaataaaatgaatagtgagtaaaaattaaaaatgaagctttttacttaagtgcatattgtagtggctagaacaaatagattcaaaatagaaatcatttatatattcttgattagaagataaaatgttattttagaaatagccatctttggaagtaaatttgctannnnnnnnnnnnnnnnnttcataatttgtctcttattttttttcaggaagaaaaaaaaacttgacttatttgtactgctaagttttattcaatgtgcttgcttgcttaaatttttaatgaagttttagtcatttggtggtcaaattccttttatctactaatcgcttttcgtggctttggcttttaaaattgtatttactgcatttatttgtgtgtattaggagtcaggtggccatatgtgccatggcatgtgtatggaagcacttgtggacatgaatcttctctttccacatgtgtgggccactggaatcaaactagtgtcaggcttggcagcaatttttaatgcactgagccttctcaccaccccctggacttttgtggggcagaaggggacaagtttaatattttatttactccatgtagaaagcctttaaaaaatgtagaaagcctttaaactacctattgttttatttgaattatgaagctcttgtgtttatataaattacagttaggtactgtggagactaatggtagctacaatagtaatattaatagctaaaacttagtagaatctgattgagttaatttggccctttccatcataaggtactcttcccaagcatcacatgacctgtgcttaagtctggtgggggcttatggctttgatattgaaaacaaatcgtcaaggatgttaatttcttgttactgctattacactgaattttctatggctctttaggagaggaagagacaagtcttcttttggcaggtgttactaagtaggccatttcccaaggaacagggaatttgccaggcttttgtggtggagagaatagaatgaataaatgctgtggggagtaaagagcttgtcagaagatgattagttctgtggcaccaaaaccaagagatcagttttcctgtgagaagtaaaggaagcattgtagaaaaatagatgtgttgaagtct

SEQ ID NO: 729 - DNA, 396 bp, Mesocricetus auratus
  misc_feature (263)..(279): n is a, c, g, or t
tggagctggagctgtcgttgctgctcccgtagtcctgggtgctgtgggcttcactggggcaggaattgcagcgggatccatagcagccaacatgatgtcagcagcagcaatcgccaatgggggtggagttgcagcaggaagcctggtagccatactgcagtctgtgggggttgctggactctctacatcatccaacatcatcctgggctctgttggggctggctctgttggggcagctcttctggccttgctttgaacttacnnnnnnnnnnnnnnnnnttgaacctactgcctataaggaatatccagaagacagtgtaccacatgatgatccccatatccatcactgaagtcagagaaagatgaaaaataaaggttaatgcttgtaaaaaaaaa

SEQ ID NO: 730 - DNA, 555 bp, Mesocricetus auratus
gcccgtgggaggaccctgcagaggagcccaggctcctgtcctgcgcttctggggagggcggagccactgtagacaatgtgcagcccttccccctcacaggccgggtgcatagtggggacagttatagcccacacaggagagaggctccagactgtgagaagaagcacatcatctatctagatccttgctggctttgtggagtgggtcagcaggctcgggtgagcgagaagcagagagtgggccgcgtaacgctccagtcctggacttgatgagatgctggactgcagagtgggcagcccaggttctaggcccttccctgactgtgcgcatacatccacagcgggttccctgctggggagtcagtggttgggaccgatctctgagactggtgggaaaggaaagccgtatctcctaaggtaagtagagggagacagccgttaggtcgcaggacacactgggtccttgatctcacaaacgggtggccggcctcccctttccacccacgttccgccctcaccccacacttggtgccgagcgctgtttatgggatccggg

SEQ ID NO: 731 - DNA, 540 bp, Mesocricetus auratus
gtgggatggactggccacacagcctgctattccttcttgccatctctatcttcctggggccaagccagccccgcaacaccaaaggcaaaaggaaggggcaagtgcggcctggccccttggcccctgggcctcaccaggtgccactggacctggtgtctcgagtgaagccctacgcccgaatggaagagtacgagaggaaccttggagagatggtggcccagctgaggaacagctctgagccagccaagaggagatgcgaggtgaacctgcagttgtggctgtccaacaagagaagcctgtctccttggggatacagcatcaaccacgaccccagccgcatccctgcggacttgcccgaagcgcgttgcctgtgtctgggctgcgtgaatcccttcaccatgcaggaggaccgcagcatggtgagtgtgccagtgttcagccaggtgcccgtgcgccgacgcctctgtccaccacctccgcgccctggaccctgccgccatcgcgtcgtcatggagaccatcgctgtgggttgcacctgca

SEQ ID NO: 732 - DNA, 1257 bp, Cricetulus griseus
  misc_feature (1030)..(1047): n is a, c, g, or t
atggctgggcctgaggaagcagtccgtggaggctgtgacacccatcctccctttgctggtgggaaatctgtgctgtgctttgggcagagccagtacacagcagaggaataccaggctatccagagggctctgaggcagcggctgggcccggagtacatcagcagccgcatggctggaggaggccagaaggtgtgttatattgaaggtcatcgagtaattaacctggccaatgagatgtttggttacaatggctgggcacactccatcacccagcagaatgtggattttgttgacttcaacaatggcaaattctacgtgggagtctgtgcatttgtaagggtgcagttaaaggatggttcctatcatgaggacgtgggttatggagttagtgagggcctaaggtcaaaggccttgtcactggagaaggccaggaaggaggctgtgactgacgggctgaagcgggcactcaggagttttggaaatgcacttggaaactgcattctggacaaagactatctgaggtcactaaataagcttccacgacagctccctcttgaagtggatttaactaaagcaaagagagaagattttgaaccatctgtggaacaggcaagatataatagctgcctacagaatgaagcaccgggacccccaaaaccacaagaagcggcttccccttgcagaccaagccacccacatgattcgaacattaggctgcagggggctaaggactgcagcagctcctgcagtctggccgcccccatggagagtgatgccattcaccagcgcaagctccggaagctccggcagaaacagctgcagcagcagttccggcagcagatggaggcccacctacagggccacacacctgccgtaaaagtgaaagccgagcgtgaggcagtgcttccagaccttcctccaaaacacagtacccctgtaactgctgcctcagaactcctcagggagaaagccatttttccagataaccctgaagacaaccttgaaatgtgggacctgactccggatttannnnnnnnnnnnnnnnnnttgtctagaccagaaccacctcaaacctctgccaccagagtccaggtgatccaggatggtgtcctacacggcctttgccaccagatgccaccagaaaaacatgaagctggtcacctgcaggcccacagcactcaccagcatgtattaggaaactctgactctcataggaagagccaggacctgaagaaaaggaaaggtgatccatcctga

SEQ ID NO: 733 - DNA, 1287 bp, Cricetulus griseus
aagctacagcatgagagccggtgccgcccctcgcggtcggtggacgcgtggcgagctgaggcggccgctcctgggccctgcatggggacgccggggacccggcaacgcgcacgagtgcgcccaggctggagattacgccggagctcctctgcgctggctgcagccgggctgctctgcaccgctttgaccgcctgcatctgctggggacagctgccgccactcccctgggcatctccagccccgccgcgcccggtgggagtgctgctctggtgggaaccttttggggggcgcggcggccaccctaggtctccccctgattgcagcctgcgcttcaacatcagcggctgtcgcttgctcacagatcgcgcggcctacggggaggctcaggcagtgctgttccaccaccgcgacctggtgacgggactctccgactggcccccgccctggggagcccaagtgcgcagggacgaggctctggagcaacgtgtgttcgacgaccaggagggagcggcgatgctagcaggcgaagccctggagaccgcaggctctagacccccgggtcaacgctgggtgtggatgaacttcgaatcgccctcccactcccctgggctgcggggcttggctaagaatcttttcaactggacgctgtcctaccgggccgactcagatgtcttcgtgccctatggcttcctctaccccagaagccatcccactgaccagccgccaggcctgagccccccgctggcccgcaagcggggcctggttgcctgggttgtgagccactgggatgagcgccaggcgcgggtccgttactaccgccagttgatccagcatgtgcctgtggacgtgtttggtcgggcggcagtcgggaaaccagtgccagccagcgggttgctacacactgtggcccgctacaagttttacctggccttcgagaactcacaacacgtggattacatcactgagaagctgtggcggaatgccttcctggctggggctgtgccagtggtgctaggtcctgaccgtgccaactatgagcgcttcgtgcctcgtggatccttcatccacgtggatgacttccctagtgctgcctccctggctgcctacctgctctttctcgacagaaacctggctgtctatcgccgctacttccactggcgccggagctatgcggtacacattacctctttctgggatgagccatggtgccggacatgccaagctgtgcagacctctggggaccagcccaagagcatccaaaacttggcaagctggttcgagcgctga

SEQ ID NO: 734 - DNA, 600 bp, Cricetulus griseus
atgtcttcaggaaatgcaaaaattgggtatcctgcccccaacttcaaagccacagctgttatgccagatggacaattcagagacatctgcctaagtgaatacagagggaaatatgtcgtattcttcttttaccctcttgattttacttttgtgtgccccactgagatcattgctttcagtgatagggcagaagaatttaagaaactcaactgccaagtgattggagcttctgtggattctcacttttgtcatctggcatggattaatacacccaagaaacaaggaggattgggacccatgaacattcctttggtatcagatcccaagcgcaccattgctcaagattatggagtcttaaaggctgatgaaggtatctctttcaggggcctctttattatcgatgataaaggtatccttcgacagatcactataaatgatcttcctgttggaagatctgtggatgagattctgagactagtccaggccttccagttcactgacaaacatggtgaagtgtgcccagctggctggaaacctggcagtgataccatcaagcctgatgtccaaaagagcaaagaatatttctctaagcagaagtga

SEQ ID NO: 735 - DNA, 476 bp, Cricetulus griseus
gcgcgcgagagttcgagctccagcgagagccggcgccggccaatcagcgcgcgccaccccgggtacttaagggcgacctggcgggcggctgccagtctaaccctgaattctgagagctgtgggtactgtgctttcgtctccgcccgctgtttttctcgctgacttccagcgggcgggaaagtccagacctgcagcgggccatcgcgcgttttccaccacaaaaaaatgtcagcgctgggctcatgtgcctggagccttgcggccggccgcccagccccgcacccgcctgaggccgcggtcggcctggagtcctcgggctccgctgccgccgcgaagagctagactctgtcagccgcggggcgtcaggggctggggcgagccccggcagcgccgcaagcagagaaacggagctggtcccgtgaacggtgacttccctgagttgtgggaaatgcaccaggaactcggttcccacaacc

SEQ ID NO: 736 - DNA, 1705 bp, Cricetulus griseus
  misc_feature (1505)..(1521): n is a, c, g, or t
cacagtgaagtggttctacacccgtctctgctgcccatgctgttctctacagtaaaaaattatgacatcaacatccaaaggcattcttcgtccattcctaatcgtctgtgttatcctggcctgcttcatggcatgtctgcttatttacatcaagcccaccaacagctgggtgttcagtccaatggagtctgccagttctgtgctgaaaatgaaaaatttcttctccacaaaaactgattattttaatgaaaccactattcttgtttgggtgtggccatttgggcagacctttgaccttacatcctgccaagcgatgttcaacatccaagggtgccatctcactacagaccgctcactgtacaacaaatcccatgcggtcctgatacaccacagagacatcagctgggatctgactaacttacctcagcaggctaggccgccctttcagaaatggatttggatgaacctagagtctcccactcataccccccaaaagagtggcattgagcatttgttcaacctgactctaacatatcgccgtgattcagatatccaagtgccttatggcttcttgacggtgagcacaaatccctttgtgtttgaagtgccaagcaaagagaagctggtgtgctgggttgtgagtaactggaatccggagcatgccagggtcaagtattataatgagctcagcaagagtattgaaatccatacctatgggcaagcctttggagaatacgtgaatgaaaaaaatctaattcccaccatatctacttgtaaattttatctttcttttgaaaactcaattcacaaagattacatcaccgaaaagctctacaatgcatttttggctggctcagtacctgttgttctgggaccatccagggaaaactatgagaattatattccagcggattcattcattcatgtggaagattataactctcccagtgagttggcaaaatatcttaaggaagttgacaaaaacaataagttgtaccttagttatttcaactggaggaaggatttcactgtaaacctcccacgattttgggaatcacatgcatgcctggcttgtgatcacgtaaaaaggcaccaagagtataagtctgtgggtaatttagagaaatggttttggaattaatgtttccctcattttcaaatttaaggaaatgtattaacatgacatcatataagttgtaaggataagaagagaaacaccttgctttcaaatcacagtttattttaattgccctcccttgagtaacatgtatattttgatggaaaatttttaagagctcagaattagcaatcacttcatttggattaaattatcctgtatatacgtgataatgagcactgaaaataatttattctccactctcatttgtaaacattcttttttcacatcttatagttgtctgtaaagtaagtttatgattcaattgtttctacatcaatcagatctttagtctgtttgggaaatggaaatgggtgtcctaaaatannnnnnnnnnnnnnnnngtattataatgtctagattctagtttgcataatggtaacaaagaagtattagagtatcacttaattcttaacctctttgagttcagagttgacactgtgtgtaattgatgtactttttaactgtttaccacatttgtgaagacagactgactcatgttgtaaataagaaagatatgaagcagaa

SEQ ID NO: 737 - DNA, 448 bp, Cricetulus griseus
atgggtccgaagctgcttgagtcccgactttgtctcctgctgctgctgggatttgtcataatggttgacaaggcttcattccagatcccaaggggtttaaccccttcccagtggtttgcagtccagcatttaaatatgaccaaccctcaatgtactacagcaatgcagagggttaaccgttatacaggacgttgcaagggcatgaatacttttcttcatacacgatttgctgctgttgttcgtgtgtgtggcagaagaaatactacttgccgtaatggtcttacaaattgtcataatagcataactcgggtacctttaactgtctgcaaccttacaactccaaacgacaccagcaacaaagttctacagaattgcttgtgactatagaagggcacaagacagtcgtatttatccagtggttccagttcacttggatgggacattttag

SEQ ID NO: 738 - DNA, 1251 bp, Mesocricetus auratus
  misc_feature (108)..(122): n is a, c, g, or t
  misc_feature (606)..(622): n is a, c, g, or t
atggagctgcgtgtggggaataagtaccgcctgggccgaaagatcggcagtgggtcctttggagacatctacttgggtgccaacattgcctctggtgaggaagtagcnnnnnnnnnnnnnnntgtgaaaacaaagcacccgcagctccacatagagagcaagttctacaagatgatgcaaggaggagtggggatcccgtccatcaagtggtgcggggctgagggtgactacaatgtgatggtcatggagctgctggggcccagtctcgaggacctcttcaacttctgttcccgaaagttcagcctcaagacagtgctgctgctggccgaccagatgatcagccgcatcgagtacatccactccaagaacttcatccaccgggacgtgaaaccggataactttctcatgggcttggggaagaaaggcaacctggtctacatcattgacttcggcctggccaagaagtaccgtgatgcccgcacccaccagcatatcccctaccgggaaaacaagaacctgactggcactgcccgctatgcctccatcaacacccacctgggcatcgagcaaagccgtcgagatgacctggagagcttgggctatgtnnnnnnnnnnnnnnnnntgggctccctgccctggcagggtctcaaagccgccaccaagcgtcagaagtacgagcggatcagtgagaagaagatgtcaacgcccattgaggtcctctgcaaaggctacccctccgagttctcaacatacctcaacttctgccgctccctgcggttcgatgacaagcccgactactcctacctgcgccagctcttccgcaacctctttcaccggcagggtttctcctacgactacgtcttcgactggaacatgctcaaattcggtgcagcccggaatcccgaggacgtagaccgggagcgacgagaacacgaacgggaagagaggatggggcagttgcgggggtccgcgaccagagccctgccccctggcccacccacaggggctactgccaatcgactccgcagtgcagccgagcctgtggcttccacgcctgcctctcgaatccagcaagctggcaatacttctcccagagcgatctcacgggccgaccgggagaggaaggtgagcatgcgactccacagaggcgcacctgccaacgtctcctcctcagacctcactgggcggcaagaggtctcccggatttcagcctcacagacaagcgtgccatttgaccatctcgggaaatga

SEQ ID NO: 739 - DNA, 1122 bp, Mesocricetus auratus
  misc_feature (233)..(259): n is a, c, g, or t
atggcccagacatgagtggccccctagaaggggctgaggggggaggagaccccaggcctggagaacctttttgccctggaggagtcccgtctcctggggccccacagcaccggccttgtccaggccccagcctggctgatgacactgatgcaaacagcaatggctcaagcggtaatgaatccaatggacacgagtccaggggtgcatctcagcggagttctcatagctcttcnnnnnnnnnnnnnnnnnnnnnnnnnnncctggagaccactgagagcagcaagagtacaaactctcagagtccatccccaccaagcagttccattgcctatagcctcctgagtgcaagctcagagcaggacaacccatctaccagtggctgcagtagtgaacagtcagctagagccagaacccagaaggaactcatgactgcaattcgggagctcaaacttcgattgccaccagaacgacggggcaagggccggtctgggaccctggccacactgcagtatgccttggcatgtgtgaggcaggtgcaggctaaccaggaatattatcagcagtggagtctggaggagggtgagccttgtgccatggacatgtctacttacaccctggaggaactggagcatatcacatctgaatacactcttcgaaaccaggataccttctctgtggccgtgtccttcttgacaggccggattgtctatatttcggagcaggcaggtgtcctccttcgttgcaagcgggatgtgtttcggggtgcccgcttctcagagctcctagctccccaggatgtgggtgtcttctatggctctactacaccatctcgactgccaacctggggcactgggacctctgcaggttcaggcctcaaggacttcacccaggaaaagtctgtcttctgcagaatcagaggaggtcctgaccgggatccagggcctcggtaccagccattccgcctaactccatatgtgaccaagattcgggtatcagatggagctcctgcacagccatgctgcctactcattgcaaagcgcatccactctggttatgaagctccccgcatccctcctgacaagaggatctttaccacgcggcacacacctagctgcctcttcc

SEQ ID NO: 740 - DNA, 5362 bp, Cricetulus griseus
  misc_feature (679)..(696): n is a, c, g, or t
  misc_feature (762)..(777): n is a, c, g, or t
  misc_feature (812)..(830): n is a, c, g, or t
  misc_feature (1210)..(1264): n is a, c, g, or t
  misc_feature (1311)..(1342): n is a, c, g, or t
  misc_feature (1465)..(1484): n is a, c, g, or t
  misc_feature (1486)..(1521): n is a, c, g, or t
  misc_feature (1553)..(1572): n is a, c, g, or t
  misc_feature (1822)..(1864): n is a, c, g, or t
  misc_feature (1878)..(1892): n is a, c, g, or t
  misc_feature (1989)..(2001): n is a, c, g, or t
  misc_feature (2003)..(2022): n is a, c, g, or t
  misc_feature (2126)..(2178): n is a, c, g, or t
  misc_feature (3338)..(3358): n is a, c, g, or t
ctaaagagcgcgcgtgcgcggcctgggtcaatggcgggcgggcaagcctggcggaagcaatagttccaacatggccggtgaggcggacggaccgttcaaacgagtgctggtgccagttctcttacctgagaaatgctatgaccaacttttcgtccactgggacttccttcatggtgagttttattcagccttcaaagtctacttcaagtaaccttggaccgtaatttggcgagagtagtgcaagtgacaggtggctaacatcacgcgaagctgggcggaaggcgcttctgaagagggcggaagtgttctgggccctgcatagagaaggtgccatatttgggcatgagggggagtcgcccgaaaaagtaatcaaatttgtgttttacagtctggaaagtctgtaccctccccccaccccttctgagctggggatcgaactcagggccttcttcgtaccactctgaaccaagttctatcccccagcctggaaaacgtaaacattttataaaacaaaattaaaattccagccaggagtgtgtagactcactcctttcatcccaacactgaactgacagaggcaaatgtttcttttatttgttttcttgctgttggtttttttgttttttttcgagaccaggtttctctgtattgctttggtggctgtcctggatcttgtttnnnnnnnnnnnnnnnnnntaaactcacaagagatccacctgcctctgcccacccccaacctccagtggctggaattaaagcttnnnnnnnnnnnnnnnngcccttgtttgttttttgctttgttttgtttttcnnnnnnnnnnnnnnnnnnngctttggaggctgtcctggaactctcttgtagaccaggctggtctccaactcacagagatccacctgcctctgcctcccaagtgctggaattaaaggtgtgcgccaccaacgcccagcgtttgtttgtttttaaagataaatctcacccagccccagcttttagaacttggtgtgtagtgcaggctgccgtgaactagcagccgtccttcctgggccaccagagctctgggaatacagggatattcccactaccttccttccctcctgtaacaccctgggcaagctcttggcccagggttacaggagccatcagagcctttggtaagtgcatctgtctgctctagtcaggtcatatactcagaggacactgttctagtgnnnnnnnnnnnnnnnnnnnnnnnnnnnnnnnnnnnnnnnnnnnnnnnnnnnnnnnggattcaatgttagaggaactgccaggaacaacgacccaccttactnnnnnnnnnnnnnnnnnnnnnnnnnnnnnnnnaggaccactgagttcaaggacatcttagtctactgggtgagttctaagatgggtaggactacacagagaaagaaaccttgcctcaagaaaccaaaataaacaaaaaaataaataaatgatagnnnnnnnnnnnnnnnnnnnnannnnnnnnnnnnnnnnnnnnnnnnnnnnnnnnnnnngagtgagtgccaggatagataggctcccaaannnnnnnnnnnnnnnnnnnnattgaaataaataaatcaaaataaataaataaataaataaatgatagagatagtggatgaacaggggataaaagcaagccctgaagagtaggccactggataagggctaggaacaaccagaaggttcaggaatgtattctgtgatttgtctttggaaggaggccatctgaagtgggttattgagaagagagaaaaaaagactcaggaactcttgagcaatgcctgtgtaactgaaaagcaatggcagacnnnnnnnnnnnnnnnnnnnnnnnnnnnnnnnnnnnnnnnnnnntgcaaggctggtgnnnnnnnnnnnnnnnctggaaaccacaaaaaggcccacaaagttgtcctctgaccgtcatacatgtacctatgtgttcacacacggtattatcatatttatatagattgtannnnnnnnnnnnnannnnnnnnnnnnnnnnnnnncctgtgaatgcaggggcctgaagatgccaggggcacaagatatcaccggaactgaaattacaggccaccacccaacatgggtgctggaaatgcaattccctgannnnnnnnnnnnnnnnnnnnnnnnnnnnnnnnnnnnnnnnnnnnnnnnnnnnnaaaattcatttttgttgtgtttgttgtgcacatctacttatacatgctcaggttatcagacttagcatcagagccatcttgctggcatcttgctggcacaataattttttgtctgttttacatgcattggtgttttgttttgcctacctgcatgtctgtgtgagggtgccagatccctaaaactggagttacagttgtgaactccatatgggtgctgggaattgaacctgggtcctctggaagagcaagcagtcagtgctgtgcgggggtgaactccatatgggtgctgggatttgaacctgggtcctctggaagagcaagcagtcagtgcttttaaccactgagccatcttttcagccccttatttttacttttttgagacagggtctctctacagagctctagctgtcctagaactcactatgtagacaagctggctttgaactcaccaagatctgtctgtctgggcctgtgccatcatacctggcaatagtttttaaatatttaagacagagtctcactgtataatcctgactggctttgaactcagagtttaaatgaaattaaaggcatgtaccacaacacacagccctaaggactttttaaaaaatttagtagtgtatagtgttctgcctgcataccagaagagggcaccaaatctcatagatggttgtaaaccactatgtggttgcttggaattgaactcaagacctctggaagaacagccagcgagtgctcttaacctctgagccatctctccagtccccctagtgactttttaaaaagacaaatttttagtacatttttattaggctcatgcatggaagtcagaagacaaattttggaattggctctctgcttctaccatgtggatcctggattgaactcagatcattagctatcctgttagccctaaaaagtatattatttcaatgtgtatgtataggaaatggaaggtggagtaggaaggaaggcatgtatttacgttgaagccattctggcaacacacctagtctggatgtaacatgtttgcatcaggaggatccctgccccatcattcccacctgtcccctaaacagagagtcactggggtggtggtcatgccaaggggagggggagggaagagctcataagagcatggcaaaccctcacctgggttnnnnnnnnnnnnnnnnnnnnnttctctctccacagttccctgcctcaagattctcctcagcaaaggccttggactgggcatcgtggctggatcacttctgggtaggtatagttccttctttctgtcagagtagggggggggtggctgctgggaagctaatgccaagggctcggtgctttagctctttcctcagccatgccgttcttcctctagtaaagctgccccagatatttaaaatcttgggcgccaagagtgccgaaggactgagtctccagtcagtaatgctggagctggtagcattgacaggaactgtgatctacagcatcaccaacaacttccccttcaggtgagggccccactcttcatccccaaggccaaaccccaaattcttttttattacagttattaattggggggtgtcagagaacaacttgtaggagttggttctctccttccagcgcatggattctggggctgaagtcaggtggccaggcttggagtcaagcacctttacctgctgagctacttcaccagtcctagcacacacagctcaataagtgttgagaacacttcagcccttccagtttagtcacaccgatggaagtagtgataaagtgagcattctctaacccagccaggcatggtgggggctggggcagcacaagcctgacgatggctatggaggctctccaggccttcctctttccctccccctctcgcctctgcagctcttggggtgaagcgctgttcctgacactacagacaattaccatctgcttcctggtcctgcactacagaggagacactgtgaaaggtgcggggatgtgctggagagcgggcactgggtcttgggaaccttgctggggactcaggaggctcaagagggctccttgtctccctgacccccaggagttgctttacttgcctgctatgcgacactcctgctggctctgctttctccactcacgcctctggctgtagtcaccatgctccaggcctccaatgtacctgctgtggtggtgggcaaggtgggtactcggaagtgaaacgaggtgtgtgtggtggcggcgggatggaaccccaaagtatgcagtattggttttcgagaatgagggattagtgatgggaacacaggggaggttcagatgacagaaccaaacaaaagtgtggatttctcctctagttgctccaggcagccaccaactaccacaacgggcacacaggccagctttcagctatcacagtgtttatgctgtttgggggctccttggccagaatcttcacttctgttcaggtagtgcacctctgcttctagagggcacttaaacctcatactcccagtggaacctttctagactggtggctctccttaacaggaaactggagaccccctcatggctggagtctttgtggtctcttccctctgcaatggcctcattgccgcccaggtcctcttctactggaatgcaaagcctccccacaaacataaaaaggagcaatagtgctgagctagcttctagaatcattcattccacttccattcagccactcaacttgagggtcttccccacttgacgtggtctgctggtgcaactcagtcgtcctccattcctgcataactgcaacctcctgagccagggtttgtgtaaagagtaaaaagcttttccaagtcctgtattcactcgtttcaccaatggctgaggtccctcctttataagcagctattttgttattggagcagacgccttgccttgtccacttaccttctttcaggatggaggacagagcctggacaaatgtggttgggagcttgtggctgcgtccctctgccagctggttgggacagtctattggaccctagttctgaaggtgggggaggggagaatgactcaggtaaaggcctcagggtggagtagggaggttcctgctgtggcaggtccacgaagggtgtggagaaggcacaggttgctgttgtagtgggaatacagatgggacaataaagactcggagacgtgctttcattgt

SEQ ID NO: 741 - DNA, 3078 bp, Cricetulus griseus
  misc_feature (320)..(355): n is a, c, g, or t
ctaaagggcgagcgcaggagtaaacagcggcggagtgagtgtgcgagccgctgcagaagggaaaaaagaaagagccatgcagggattcgtgaggttacggcgccccagctgcaagatgcactagccggctgaagccgggcgggctgacttgttggaaccgcggtgctcggccaccggagcgtgtgcaggaggagttgaagagttgctctctcccccccgggctcgttctcctgacgccgccgagagaggaatcggagcggcgaggcaagccaggcactcggtcattgccattgattgggtatcgggagcttttgggctgnnnnnnnnnnnnnnnnnnnnnnnnnnnnnnnnnnnnctccttcgccgctcgctttctttccctccgtcttgttgcatgcaagcaagcaagcaagcaagcaagcaaatcgccggccgctgctcgctcccccgcccgccctggctgcgagacctcccgcccggctccctcccgtgcattgtgcagcccgaagatgaaagaccggaggggagaaagttaaagaaatcgcccacatgcgctggatcagtccacggcttggggaaaggcatccagagaaggtgggagcggagagtttggagtctttacaggcgggaagatggcggactggagctcaaagtgttgattgggaaacttgggtgattcttgtgtttatttccaatcctcttgacccaggcaggacacatgcaggccaaaaaacgctatttcatcctgctctctgctggctcttgtctcgcccttttgttttatttcggaggcgtgcagtttagggcatcgaggagccacagccggagagaggagcacagtggtcggaatggcttgcaccagcccagtccggatcatttctggccccgcttcgcggacgctctgcaccccttctttccttgggatcagttggaaaacgaggattccggcgtgcacgtttccccccggcagaagcgagacgccaactccagtgtctacaaaggcaagaagtgccgcatggagtcttgcttcgatttcgccctttgcaagaaaaacggcttcaaagtctacgtgtacccgcagcagaaaggggagaaaatcgccgaaagttaccaaaacattctagcggccatcgagggctccaggttctacacctcggaccccagccaggcgtgcctctttgtcctgagtctggatactttagacagagaccagttatcacctcagtatgtgcacaatttgagatccaaagtgcagagtctccacttatggaacaatggtaggaatcatttaatttttaatttatattccggcacttggcctgactacaccgaggacgtggggtttgacatcggccaggcgatgctggccaaagccagcatcagtactgaaaacttccgacccaactttgatgtttctattcccctcttttctaaggatcatcccaggacaggaggggagaggggctttttgaaatttaacaccatccctcctctcaggaagtacatgctggtattcaaggggaagaggtacctgacagggatagggtcagacaccaggaatgccttatatcatgtccataacggggaggacgtccttctcctcaccacctgcaaacacggcaaagactggcaaaagcacaaggactctcgctgtgacagagacaacacggagtatgagaagtatgattatcgggaaatgctgcacaatgccactttctgtctggttcctcgtggtcgcaggcttgggtccttcagattcctggaggctttgcaggctgcctgtgtccctgtaatgctcagcaatggatgggagttgccattctccgaagtgattaattggaaccaagctgccgtcatcggcgatgagagattgttattacagattccttctacaatcaggtctattcatcaggataaaatcctagcacttagacagcagacacagttcttgtgggaggcttatttttcttcagttgagaagattgtattaactacactagagattattcaggacagaatattcaagcacatatcacgaaacagtttaatatggaacaagcatcctggaggattgttcgtgctcccccagtattcctcttacctgggagacttcccttactactacgctaatttaggtttaaagcccccctccaaattcactgcggtcatccatgctgtgacccccctggtctcccagtcccagccagtgttgaagcttctcgtggctgcagccaagtcccagtactgtgcccagatcatagttctgtggaattgtgacaagcccctaccagccaaacaccgctggcctgccactgctgtgcctgtcatcgtcattgaaggagaaagcaaggttatgagcagccggtttctgccctatgacaatatcatcacggatgctgtgctcagtcttgatgaggacactgtcctttcaaccactgaggtggattttgccttcaccgtgtggcaaagcttccccgagaggattgtggggtaccctgcacgcagccatttctgggataactctaaggagcggtggggatacacctccaagtggacaaacgactactccatggtgttgacaggagctgctatctaccacaaatattatcactacctgtacacccattacctgccagccagcctgaagaacatggtagaccaactggccaattgtgaggacattctcatgaatttcctggtgtctgctgtgacaaaattgcctccaatcaaagtgacccagaagaaacagtataaggagacaatgatgggacagacttcccgtgcttcccgctgggctgaccctgaccactttgcccagcgacagagctgtatgaacacgtttgccagctggtttggctacatgccgctgatccactctcagatgaggctagatcccgtcctctttaaggaccaggtctccattctgaggaagaaatacagagacattgaacggctttgagggatcccactgagtgggggaggggaagaagataggactggagtccagctgctctctcttcccggtgcagagccactcagctcatcgatggagccagactgtgccaagtatcaaaaatt

SEQ ID NO: 742 - DNA, 2894 bp, Cricetulus griseus
ggcacgaggtgggtgcgcagcgcagctggctgtcccgggaggaccccagctcggacgggcgagccttgtgtagctagctccccgagtgcctggactggaggcggtggaaagcgccaggcagcggccagacctggcaagcttcggcgtgagacatgccatcgtatctcacaaggcagaagacccgaaaaattttctcatgggttggcaggccattgccagatcgaaaacacaaccaccaaatctacaaagaaatgcgaatgaaagtcaatgattgttccactgagattcacatcaaggttggacagtttgtattgattaaaggaaataataatgcaaagccctatgttgctaaactgattgaattatttgaagatggatctaaatttcattccaagaaatgtgctcgagtacagtggtgtgtccgattctctgagattcctatctctaaaaggcatttgttaggccggaagcctgctgcacaggagatattctggtatgacgatcccgactgtggtaacaacatttgtgtggagaccatcattggtcctgttcaggtagtggctttagccccagatgaagtgatccctatggatcagaaaagtgaggacacactgtttgtgaagctatcctggaatacaaaaaactttgaaccactgtcaccagaagtacttgcagcattgaagaaactagaagatagccctaagtgccagaaacctttagaaggcaagagtaagaatgtaaaaaacccttcttggaacgcaacagaacaaatggtcaaaaggattgaatcaagtcactctacctccaaatcttgccagacatctgctcatcctgtctcccccaatgcaaggaagccgctggaactcagtgactcagacattcccaggaagcctaacatgaggctatcacagaagatcttgtgtgactccttggattctcaaaaaaattctaaacgaaaaacagccttctctgagacagcctcaccacctaaaagatgtcagcctggtgaaatcaagaacttgtcacctttgaaaactctggaaaagaatggacaggctcattccttttgtgacaaaggtagcatgattctaagagcgcaagacccatctttcataactacaaagattagtatggagagggcactcgaccctgtcaggagcagattgaggccttcagtgatgctcacttcaattctgacaccaaagcggactgggagggaggcgggaaaacaagaagctcacacagaacccacccgtacttcccatcgtgttcatagaaggagctctctcttgactttgaatcggattaggcagcagctttggcttctcgatgatgataagagtgaccaagaagaggaagagtccatatcctcagcagaggtgtcagactccactagtgaggaggaagatgattctattccttcccttctaaagagaaattcccagccgcagtccaggaaccggagaatggcctcaaagccatcattgcagaccccctccaagacaccaaagaaaactactcatcatccaactcctcagattcggggtagaaatatcgctgtccaggagccaacaagtgtgcttgaagaggcccggctgatgctgcatgtttctgctgtgcctgactctcttccctgtcgagagcaggaattccaagacatctatagctttgtggaaagcaaacttcttgatgggactggagggtgtatgtacatttctggggttcctgggacagggaagacggccactgtaaacgaggtcatacgctgtctgcagcaggcagcccaaacaaatgatgttcctccctttgaatatgttgatgtcaatggcatgaagctgacagagccccaccaagtctatgtgcagattttacagaagctgacgggccagaaggcaacagctaatcatgcagcacaactactggcaaagcgattctgcagccaagggtcccaacaggagaccactgtgctgcttgtggatgagcttgaccttctttggacttccaaacaagatgtcatgtacaacctctttgattggcctactcacaaaggagcccggctgatagtcctggccattgccaacaccatggacctgccagagaggatcatgatgaaccgtgtatctagtcggctgggtctaaccaggatgtccttccagccctattctcacaaccagctgaaagagatcctagtgtcccgactcaagcatttaaaggcctttgaagatgatgccatccaattggtagccagaaaggtagcagccctctctggagatgcacggcgctgcctggacatctgcaggcgtgccaccgagatttgcgagctttcccataatcatggcaactctctgggcccagtgactgtgtcccacttaatggaggctatagatgaaatgttctcctcatcctacatcactgccatcaaaaactgttccctcctggaacagggcttcctgagagccattattgcagaattccgtcgatctggactagaggaagcaacatttcaacagatatacagtcaacatgtggctctgtgcaggatggagggactgccttaccctaccatgtcggagaccatggctgtgtgctcaaatctgggttcttgtcgcctcctcctggtggagcccagcaggaatgacctactacttagagtaaggctcaatgtgagccaggatgatgtgctctatgctctgaaagaagagtgaagagcttcacagacttctgctgtttctcagcctatttatttttcttcagaacatgaataatagcaaaatatacagaatggaaatgattgttgtagattttggcatttatgttatttagtttgctttttccagagtgtttgagaaatttgtggtaatgtactatgtatataaataaataaaaataaatat

SEQ ID NO: 743 - DNA, 2791 bp, Cricetulus griseus
  misc_feature (292)..(321): n is a, c, g, or t
tgaatttgcaagctgcagaatgcatagcaccttacaaggttggccataatgagcacactgcagttaaaggaagctaaggtgctggatgttcaatttgtgggagatgataatgttctcaatcacatttttgatagagaaggaggaactaaattaaagaaggagaaagctcagcttttggttaatccccagaaaataataaagaagccagaatgtgaattggagaagagtgaccaagaagtcttaaaggatcagaactatgtggaagttttgggaagaaatattcaagattccnnnnnnnnnnnnnnnnnnnnnnnnnnnnnnaataaagtttattcttttcaacatagaaaacactctgaagagatggctaaattagctttagaactagcaaaaacatcaagaaaagttccgtttgactcaaaggctgatcctgaaattaagaaaaatgtcactcagaaaagcaaggggcattcaacttcagagaaagtacaactggagaacaataacaaaactgaatttctgtcagcaccacctcgtagtctaagaaaaagaataatagtgccaacatctcattgtgacagtgaaagtgaatattctgcttccaactcggaggatgataaagaggttgcaagagatgatgaagacgacactgaagcagttgggctctctcaaaagagtcgagttcagagtagagtacttccggcttctgtttccaagcggacaccgcttaagaaaatgaaaagagacaaagccagtgacttggtggaagaatattttgaagcccatagcagttccaaagttttgacatctgatagaaccctgcagaagctgaagagagccaaactggatcagaaaacgctacgtaacttattgagcaaagtctcaccttccttttctgctgaaattgaacaattaaatcaacagcatgagaagttgtttcataaatggatgctacaactacaccttgggttcaacattgtgctctatggtttggggtccaagagagatttactagaaaagtttcgagccaccatgcttgaagattccattcatgttgtcatcaacggcttctttcctggaatcacggtgaaatcaatcctgaattctataactgaagatgtcctcaatcatatgggcactttccagagtgttctggatcagcgagactggataataaacaaatttaaagaagattcttctttagaactcttccttcttatccacaatttggatagccagatgttgagaggagacaatagccagcaaatccttggacagttgtcgtctttgtgtaacgtgcaccttctagcatctattgatcacctccatgctcctctcatgtgggatcatgcaaagcagagtctttataattggctttggtatgaaactactacatacagtccttatactgaagaaacatcctatgagaattcccttctggttaaacagtctggatctctcccgcttagttccctgattcatgtcttacgaagccttacccccaatgcaagggggattttcaggctacttataaaattccagctggataaccaggacagcccttcctacattggactttcttttcaagatttttaccagcagtgtcgggaggcattccttgttaatagtgatctcacacttcgagcccagctaactgaatttagggatcacaaactcataaaaacaaagaagggaactgatggtgtagaatatttattaattcctgttgacagcggaacattggctgatttcttggagaaggaagaggaggaggcttagactgtcactttttaggtggaagagtcattgttccccagctgccgatccttagtaagaatgctcttttacatccaacattagatcattctgtccagcatacaagttttaccattgaaggggcatgtcatcaatttgaacttggattagcctggctggtgtactgtctctgtggtcattgagctgggggaaaaaatgtgcctttaatttattacctctctgaggacttcttgctggatgaagagtgtgctcagggcttatttggaaccggatgtttggggattattttacactgaatgcaatccctgattgttgagggcagtttagcactacccaggctgaattactgcaggtgcacttgttcacatcttgaaagtacaaagaaagatggggcacacagaacttatgaggaaggaggcggtttatttgctttttctgaaatgataaaaggtatttagtgggttaagatggtcctgctttctccttgtggacttaggctgcacataattgggacagttagtgctattccaccaaaatagtgggagaagtataaggactagataaggcatgtgcccaatctagaacgcatatttaaaatagttaatatctgtaccatgatcttgatttttatgatagaaatgagaagccaggctaaaaaataaaatcccgatttacatgttagtaattgttttcatgacaatagataaaaaaagcatttcattattcttgtacatgaacattttttattttcataaaaaacacataagtatagatggcacacccctttagtctcaccattctggagtcagaggtaggcagattgcttctcaatcctttcaaaacaacggtagcaagacaggagctcacatttgtaatcccaacaccaagaaggctgaggcaggatgaaacatgagatcaaggcctggactagttaaggagttctaggtcagtctgaactacaatgatgccctgtttcagaaaacaacaaactaaataaatacacagtgataacatg

SEQ ID NO: 744 - DNA, 432 bp, Mesocricetus auratus
ccacattctggcctgagctcccagaaaagatcgatgctgtgtacgaggccccgcaggaagagaaagctgtgttctttgcagggaatgagtactgggtctattctgccagcaccctggagcgagggtatcccaaaccactgaccagcctggggttgccccctgatgtccagcgagtagatgctgcctttaactggagtaagaacaagaagacatacatcttcgctggagacaagttctggagatacaatgaggtgaagaagaaaatggatcctggtttccctaagctcatcgcggattcctgggacgccatccccgacaacctgagtgcagttgtggacctgcagggcggtggtcacagctacttcttcaaaggtgcctactacctgaagctggagaaccaaagtctgaagagtgtgaagtttggaagcatca

SEQ ID NO: 745 - DNA, 14619 bp, Cricetulus griseus
  misc_feature (2751)..(2765): n is a, c, g, or t
  misc_feature (5981)..(5999): n is a, c, g, or t
  misc_feature (6573)..(6594): n is a, c, g, or t
  misc_feature (7283)..(7317): n is a, c, g, or t
  misc_feature (7320)..(7334): n is a, c, g, or t
  misc_feature (9420)..(9510): n is a, c, g, or t
  misc_feature (12124)..(12151): n is a, c, g, or t
  misc_feature (13563)..(13585): n is a, c, g, or t
  misc_feature (14598)..(14619): n is a, c, g, or t
gatggccacaacctcatctccctgctggaagtcctctcaggggacagcctgccccgagagaaggggaggatgcgtttccacaagctgcagaatgttcagattgccctggactatctccgacatcgccaggtgaagttagtgaacatcagaaatgatgacattgctgatggcaaccccaagctgacccttggcctgatctggaccatcatcctccacttccagatctcagacattcaggtgagcgggcagtcggaggacatgactgcaaaggaaaagctgctgctctggtcacagcgtatggtagagggctaccaaggcctgcgttgtgacaacttcaccaccagttggcgtgatggtcgtctcttcaatgctatcatccaccggcacaagcccatgctcattgacatgaacaaagtgtatcgtcagaccaacctggagaacctcgaccaggccttctccgtagcagagcgggacctgggagtcacaaggctcctggacccagaagatgtggatgtccctcagcccgatgagaagtctatcatcacctatgtttcatccctgtatgacgccatgccccgtgtgcccggcgcacagaatggggtgagggccaatgagctgcagctccgctggcaggagtaccgggagcttgtgttgctgcttctgcagtggatccggcaccatacagctgcctttgaggagcgcaagttcccctccagctttgaagagattgagatcctgtggtgccagtttttgaagttcaaggagacagagctcccggccaaggaggcagacaagagccggtccaaaggcatctaccagtctttggagggggcagtacaagcaggccagctccagatccctcctggcttccacccgctggacgtggaaaaggaatggggcaagctgcacgtggccatcctggagcgggagaagcagctccggggcgagtttgagaggctggagtgtcttcagagaatcgtcagcaaactgcagatggaggctgggctgtgtgaggaacagctgaaccaggccgactccctgctgcagtcggatattcggctgctggcctcaggcaaggtggctcagcgggctggggaagtggagcgagacctggacaaggctgatggcatgatccggctgttgttcaacgatgtgcagacccttaaagatgggcggcacccacagggtgaacagatgtaccggagggtgtatcgtctgcatgagcgcctggtagccatccgcactgagtacaacctccggctgaaggcaggagtggctgcccctgtgacccaggtgaccgtgcagagtacacagaggcgcccagagctggaggactctacactccgctacctgcaagacctgctggcgtgggtggaggagaaccagcgtcggatagacagtgctgagtggggtgtggacttgcccagcgtggaggcgcagctgggcagccaccggggcatgcatcagtctattgaggagtttcgggccaagatcgagcgggctcggaacgatgagagccagctctccccagccacccggggtgcctaccgagagtgcctgggccgcctagacctgcagtatgcaaagctgctgaactcctccaaggcccgcctccggtccctggagagcttgcacgggtttgtggcggctgccaccaaggagttgatgtggctgaatgagaaggaagaagaggaagtgggctttgattggagtgaccgaaacaccaacatggctgccaagaaggagagctactcggccctgatgcgtgagctggagatgaaggaaaagaaaatcaaggagacccagaacactggagaccggctgctgcgggaggaccaccacgcgcggcccacagtggagtccttccaggccgccctgcagacccagtggagctggatgctgcagctgtgctgctgcattgaggcacacttgaaagagaacaccgcctacttccagttcttctcagacgttcgggaggcggaggaacagctgcagaagcttcaggagaccatgcgcagggagtacagctgcgaccgctccatcaccgtcaccaggctggaggacctgctgcaggacgcccaggacgagagggagcagctgaatgagtacaaggggcacctctcaggcctggccaagcgggccaaggccattgtgcagttgaagccacgcaaccctgcccaccctgtgcggggccatgtgcccctgatggcggtgtgtgattataagcaggtggaggtgactgtgcacaagggtgaccagtgccagctcgtgggccctgcccagccgtcccactggaaggtgctccgcggacccagcagtgaggcggccgtgccctcggtgtgctttcttgtgccgccgcccaaccaggaggcccaggaagctgtcgctaggctggaggcccagcatcaggccctggtcacactgtggcaccagctgcatgtggacatgaagagccttctggcatggcagaatctcagtcgtgacatacagctcatccggtcctggtccctggtcacgttccgcacgctgaagccagaggagcagcgccaggccctgcgcaacctggagctgcactaccaggccttccttcgagacagccaggacgctggcggcttcgggcccgaggaccggctggtggcagagcgggagtacggatcttgcagccgccactaccagcagttactacaaagcctggagcagggcgagcaagaggagtctcgttgtcagcgatgcatctcggagctcaaggannnnnnnnnnnnnnnggaggcctgtgagacccggaccgtgcaccgtctgcggctgcctctggacaaagagcctgcacgggagtgtgcccaacgcatcgctgagcagcagaaagcgcaagctgaggtggaagggctgggcaagggagtcgcccgcctctctgctgaggcggagaaagttctagcgctgccggaaccatcacccgctgctcccaccctgcgctcagagctggaactgaccctgggcaagctggagcaggtccgaagcttgtctgccatctacttggagaaactcaagaccatcagcttggtaattcgcagtacccagggggcggaggaggtgctcaaagcccacgaggagcagctcaaggaggcgcaggctgtgcctgccacgctccaagagcttgaagccaccaaggcctcactaaagaaactgcgggcccaggcagaagcacagcagcctgtattcgacaccctaagggatgagctgcggggggcacaggaagttggcgagcggctgcagcagcggcacggagagcgggacgtggaagtggagcgctggcgagagcgtgtcaatcagctgctggagcgctggcaggccgtgcttgcccagattgacgtgcggcagcgtgagctagaacagctggggcgccagcttcgctactaccgcgagagcgctgacccactgagctcctggctgcaggatgccaagaggcggcaagagcagatccaggctgtgccaatacccaacagccaggctgcacgggagcaactgcgccaggagaaggccctgctggaagagattgagcgtcacggtgagaaggtggaggagtgccagaagttcgccaagcagtacatcaacgccatcaaggactatgagctccagctggtcacctacaaggcacagcttgaacccgtggcctccccagccaagaagcccaaggttcagtctggatcggagagtgtcatccaagagtatgtggatctgcggacacgctacagtgagctgaccacactcacaagtcagtacatcaagttcatcagcgagaccctgcgccgcatggaagaggaagagaggctggctgagcaacagcgggcagaggagcgtgagcgactggctgagggagaggctgcgctggagaagcagcggcagctagctgaggcccacgcccaggctaaggcccaggcagagctggaggcgcaggagctgcagcggcgcatgcaggaggaggtggcacggcgtgaggaggcggcggtgaacgcgcagcagcagaagcgcagcatccaagaggagctgcagcacctgcggcagagctcagaggcagagatccaggccaaggcccagcaggtggaggctgcagagcgcagccggatgcgcattgaggaagagatccgagtggtgcgtctgcagctggagacaaccgagcgtcagcgtggaggggcagagggtgagctgcaggcgctgcgtgcacgggccgaggaggccgaagcccagaagcggcaggctcaggaggaagccgagcgcctgcgaagacaggtgcaggatgagagccagcgcaagaggcaggccgaggcagagctggccctgcgcgtgaaggcccaggccgaggcagctcaagagaagcagcgggccctgcaggccctggaggaactgcggctgcaggccgaggaggctgaacggcggctgcgccaggcccaggcggagagagcgcgccaagtgcaggtagctctggagacggcgcagcgcagtgcggaggtggagctgcagagcaagcgtgcgtcctttgcggagaagacagcgcagctggagcgcacgctgcaggaagagcacgtgacagtgacccagctgcgcgagaaggccgagcgtcgggcccagcagcaagcggaggctgagcgagcccgcgaggaggctgagcgggagctggagcgctggcagctaaaggccaacgaagcgcttaggctgcggctgcaagcagaagaggtggcccagcagaggagtctggcgcaggccgatgcagagaagcagaaggaggaggccgagcgtgaggcccggcggcgcggcaaggccgaggaacaggccgtgcggcagcgagagctggccgagcaggagctggagaagcagcggcagctggcggagggcaccgcgcagcagcgcctggctgcggagcaggagctcatccgcctgcgggccgagacggagcagggtgagcagcagcggcagctgctggaggaggagctggcccggctgcagcgggaagcgaccgcagccacgcacaagcgccaggagctggaggccgagctggccaaagtgcgggccgagatggaggtgctgctggccagcaaggcgcgagccgaggaagagtcccgttctaccagcgagaagtccaagcagaggctagaggccgaggccgaccgctttcgagagctggccgaggaggctgcgcgtctgcgcgccctggcggaggaggccaagcggcagcggcagctggctgaggaggacgcagcgcgccagcgggccgaggcagagcgagtgcttacggagaagctggccgccatcagtgaggccacgaggctcaagacggaggcagagattgccctcaaagagaaggaggccgagaatgagcgcctccggcgcctggctgaagacgaggccttccagcggcggcggctggaggagcaggcggccctgcacaaggccgacatagaggagcgcttggcccagctgcgcaaggcgtcggagagtgagctggagcgccagaagggcttggtggaggatacgctgcggcagcggcggcaggtggaggaggagatcctggcgctgaaggtgagctttgagaaagccgccgccggcaaggcggagctggagctggagctggggcgcatccgcagcagtgccgaggacacaatgcgcagcaaggagcaggcggagcaggaggcggcgcggcagcggcagctggcagccgaggaggagcagcggcgtcgggaggccgaggagcgcgtgcagaagagcctggccgctgaggaggaagccgcgcggcagcggaaggctgcactggaggaagtcgagcggctcaaggccaaggtggaggaagcgcggcgcctgcgagaacgagcagagcaggagtccgccaggcagctgcagctggcccaggaggctgcccagaagcgactgcaggcagaggagaaggcgcatgcctttgtggtgcagcagcgggaagaggagctgcagcagannnnnnnnnnnnnnnnnnncatgctggagcggctgcggggtgaggcagaggcggcgcggcgagctgccgaggaggccgaggaggcccgggagcaggccgaacgggaggcggctcagtctcggaaacaagtggaagaggcggagcggctgaaacagtcggcggaggagcaggcccaggcccgggcccaggcccaggccgctgcagagaagctgcgtaaggaagctgagcaggaggcagcgcgtcgggcacaggcggagcaggcagcgttgaagcagaagcaagcagccgacgcggagatggagaagcacaagaagtttgcagagcagacgctgcggcagaaggcccaggtggagcaggagctgacgacgctgaggctgcagctggaggagactgaccaccagaagagcatcctggacgaggagctgcagcggctgaaggccgaggtgaccgaggctgcccggcagcgtagccaggtagaggaggagctcttctctgttcgcgtgcagatggaggagctgggcaagctcaaggcccgcattgaagccgaaaaccgggcactcatcctgcgtgacaaggacaacacccagcgcttnnnnnnnnnnnnnnnnnnnnnnatgaaacaggtggcggaggaggctgcgcggctgagtgtggctgcccaggaggcggcccggctgcggcagctggccgaggaagacctggcgcagcagcgggccctggcagagaagatgcttaaggagaagatgcaggcggtgcaggaagccaccaggctcaaggccgaggccgagctgctccagcagcagaaggagcttgctcaggagcaggcccggcggctgcaggaagacaaggagcagatggcccagcagttggtagaggagacgcagggtttccagcggacgctggaggtagagcggcagcggcagctggaaatgagcgcggaggccgagcgcctcaagctgcgcatggctgagatgagccgggcgcaggcccgtgcggaggaggatgcccagcgcttccggaagcaggctgaggagattggcgaaaagctgcaccgcactgaacttgctacgcaggagaaagtgacattggtgcagacgctggagatccagcgacaacagagcgatcacgatgccgagcgtctgagggaggccattgctgagctggagcgggagaaggagaagctcaagcaagaggccaaattgctgcagctgaagtctgaggagatgcagactgtgcagcaggagcagatcctgcaggagacgcaggcgctgcagaagagcttcctgtctgagaaggatagccnnnnnnnnnnnnnnnnnnnnnnnnnnnnnnnnnnngcnnnnnnnnnnnnnnntttccaggacgaagtggcaaaagcgcagcagctccgggaggagcagcagcggcagcagcggcagatggagcaggagaaacaggagctggtggccagcatggaggaggccaggaggcggcagtgcgaggccgaggaggccgtgcggcgcaagcaggaggagctgcagcatctggagctgcagcggcagcagcaggagaagctgctggccgaggagaaccagaggctgcgagagcggctgcagcgcctggaggaggagcaccgggccgccctggctcactctgaggagattgcagctactcaggctgccgccgcgaaagccctgcccaatggccgcgacgcgctggatggcccgtccatggaggtggagcctgagcacgccttcgagggactgcgtcagaaggtgccggctctgcagctacgggaagcgggcattctgagcgcggaggaactgcagcggctggaacagggccacaccacagtggctgagctctcgcagagggaagatgtgcgccagtacctgcagggccgcagcagcattgcggggctgctgctaaagcccaccgatgagaaactgagtgtctacacagccctgcagaggcagctgcttagccccggaacagctcttatccttcttgaggcccaggcggcctcaggcttcctgctggaccctgtgcggaaccggcggctgactgtcaacgagcccgtgaaggagggcgtcgtgggtcctgagctgcaccacaagctcctgtcagccgagcgcgctgtcactggctacaaggacccctacacgggggagcagatctccctcttccaggccatgaagaaggacctcctcgtcagggaccacgccatccggctgctggaggcccagatcgccacggggggcatcatcgacaccgtgcacagccaccgcgtgcccgtggacgtggcctaccagcgcggctacttcgacgaggagatgagccgcatcctggctgaccctggggacgacaccaagggcttcttcgaccccaacacgcatgagaacctcacctacctgcagctgctggagcgctgcgtggaggaccccgagacgggcctgcacctcctgccgctcacagataaggccgccaagggtggtgagctggtgtacacggatacagaggcccgtgacgtctttgagaaggccactgtgtctgcaccgtttggcaagttccagggcaagaccgtgaccatctgggagatcatcaactcagagtacttcacagcggagcagcggcgggatctgctgcggcagttccgcacgggccgcatcacggtggagaagatcatcaagattgtcatcacggtggtggaggagcaggagcggaagggccagctctgcttcgagggcctccgagccctcgtgcctgctgcggagctcctggagagcggggtcattagccacgaactctaccagcagctgcaaaggggggagcgttctgtgcgggaggtggccgaggcagacagcgtgagacgggccctgcggggtgccagcgtcattgcaggagtgtggctggaagaggcagggcagaagctgagcatctatgaggccttgaagaaagacttgctgcagccagacgtggctgtggccttgctggaggcccaggctggcactgggcacatcattgaccctgccactagtgcccggctgaccgtggatgaggcggtgcgcgccggcctagtgggtcccgagctgcatgagaagctcttgtcagctgagaaggctgtgacaggctatagggacccctactcgggacaaagcgtgtcactgttccaggccctgaagaagggcctcatcccccgagagcagggcctgcgcctgctggacgcccagttatccaccggcggcatggtagaccccagcaagagccaccgtgtgccactggatgttgcgtatgcccggggctacctggacaaggagaccaacagggccctgacgtcacccaggaatgatgccagagtctaccttgaccccagcagccaggagccagccacctacagccagctgcagcagcggtgccgtgctgaccagctgaccgggctgagcctgctgccagtctcggannnnnnnnnnnnnnnnnnnnnnnnnnnnnnnnnnnnnnnnnnnnnnnnnnnnnnnnnnnnnnnnnnnnnnnnnnnnnnnnnnnnnnnnnnnggttttaagggcaggacaatgacagtgtgggagctcataagctctgagtacttcacccaggagcagcggcaggagctgctgcggcagttccgcacaggcaaggtcaccgtagagaaagtcatcaggatcgtcatcaccatcgtggaggaggtggagacccagcggcaggagcgactgtcctttagtggcctccgtgcccctgtgccggccagtgagctcttggctgccaagatcctcagcagagctcagtttgaccagctcaaggaaggcaagacatcagtcaaagacctgtcagaggtgggctctgtgcggacactcctgcaaggcagcggctgcctcgctggcgtctacctggaggactctaaggagaaagtgaccatctatgaggccatgcgccggggcctcctcagacccagcacagccacactcctgctggaggcccaggctgccactggctttctggtggaccctgtgcggaaccagcgtctgtatgtgcatgaggctgtcaaggcgggagtcgtgggtcctgagctccatgagaagctcctgtccgctgagaaggcggtcaccggctataaggacccctactcaggcaccaccatctcactcttccaggccatgaagaagggcttggtcctcagggagcacgccatccgcctgctggaggcccagatcgccacggggggcatcatcgaccccgtgcacagccaccgcctgcccgtggacgtggcctaccagcgcggctacttcgacgaggagatgagccgcatcctggctgacccgagcgacgacaccaagggcttcttcgaccccaacacgcacgagaacctcacctacctgcagctgctggagcgctgcgtggaggaccccgagacgggcctgcgccttctgccgctcaaaggggcagagaagacagaggtggtggaaaccacacaggtgtatacggaggaggagactaggagggcgtttgaggagacgcagattgacatcccgggtggtggcagccacggtggctcctccatgtccctgtgggaggtgatgcagtcagacatgatcccagaggatcagcgagcccggctcatggctgacttccaggctggccgagtgaccaaggagcgtatgatcatcattatcattgagatcatcgagaagaccgagatcatccgccagcagaaccttgcctcctatgactacgtgcgccgccgcctcactgccgaggacctgtacgaggcccggatcatctccctcgagacctacaacctcttccgggaaggcaccaagagcctccgtgaagttctggagatggagtctgcctggcgctacctttatggcacagggtcagtggccggggtctacctgcctggctctcggcagacgctgaccatctaccaggcccttaagaaggggctgctgagtgctgaggtggcccgcttgttgctggaagcacaggcagccacaggcttcctgctggatccagtaaagggtgagcggctgaccgtggatgaggccgtgcggaagggtctggtaggccccgagctgcatgatcggctgctgtccgcagagcgggctgtgactggctaccgtgacccctataccgaacagaccatctcactcttccaggccatgaagaaggagctgatccctgctgaggaggcgctgaggctgctggacgcccagctagccacaggaggcattgtggacccccgcctggggttccacctccctctggaggtggcttaccaacgcggctacctcaataaggacacacatgaccagctgtcagagcccagtgaggtgcgcagctacgtggacccctccacggatgagcgcctcagctacacacagctgctcaagcggtgccgccgtgatgacggcagtggccagatgctcctgccgctctctgatgcccgcaggctgaccttccgaggcctgcgcaagcagatcactgtggaggagctggtgcgttctcaggtcatggacgaggccacggcgctacagctgcaagaaggcctgacctccatcgaggaggtcaccaagaccctgcagaagttccttgagggtaccagctgcatcgccggagtcttcgttgacgccaccaaggagcggctgtcagtgtaccaggccatgaagaagggcattatccgccccggcacggcctttgagctcctggaagcacaggcggccactggctatgtcattgaccctatcaagggactcaagctgactgtggaggaggctgtgcgcatgggtatcgtgggccccgagttcaaagacaggctgctgtcagccgagcgcgccgtcactggctacaaggatccctactctgggaaactcatctctctcttccaggccatgaagaagggcctaatcctgaaggaccacggcatccgtctgctggaggctcagatcgccactggcggcatcatcgaccccgaagagagccaccgcctacctgtggaagtggcctataagcgtggcctcttcgacgaggagatgaatgagatcctgaccgatccctcagatgacaccaagggcttctttgaccccaacacagaggagaacctcacctacctgcagctgatggagcgctgcatcactgacccccagactggcnnnnnnnnnnnnnnnnnnnnnnnnnnnnagcgggagcggaagacgtcctccaagtcttcagtgcgtaagcgccgtgtggtgattgtggaccctgagacaagcaaggagatgtcggtgtacgaggcctaccgcaagggcctcattgaccaccagacgtacctggagctgtcagagcaggagtgcgagtgggaagaaatcaccatctcctcgtcagacggcgtggtcaaatctatgatcattgaccggcgctctggccgacagtatgacattgatgacgccatcaccgagaacctcattgaccgctccgcactggaccagtaccgtgcgggcacactttccatcactgagtttgctgacatgctctcgggcaatgctggcggcttccgctcccgctcctcctccgtgggttcatcatcttcctaccccatcagccctgccgtctcgaggacccagttggcttcctggtctgatcctaccgaggagaccggcccagtggctggcatcctggacacagagactctggagaaggtgtccatcacggaggccatgcaccgcaacctggtagacaacatcactggccagcggctgctggaggcacaggcctgcactgggggcatcatcgatcccagcacgggtgagcgcttcccagtcactgaggctgtcaacaagggcctggtagacaagatcatggtagaccgcatcaatctggcccagaaggccttctgtgggttcgaggacccacgcaccaagaccaagatgtcagccgcgcaggccctgaagaagggctggctgtactacgaggcaggccagcgcttcctggaggtgcagtacctaacgggtggtctgattgagcccgacacccctggccgtgtacccctcgatgaggccctgcaacgtggcaccgtggatgctcgcacggcccagaagctgcgtgacgtcagtgcctactccaagtacctcacgtgccccaagaccaagctcaagatctcctacaaggatgctttggaccgcagcatggtggaggagggcacggggctgaggctgttggaagccgcagcacagtccagcaagggctactacagtccctacagtgtcagcggctctggctccaccaccggttcacgcactggttcacgcaccggctcccgggccggctcccgccgtggcagctttgatgccactggctctggcttctccatgaccttctcgtcttcctcttactcttcctccgggtatggccgccgctacgcctcagggcctccagcctctttagggggtcctgagtccgcggtggcctgacccctctgcctgcaccctgccctcccgctctgcatgcggccaggctccctgtggaggcgctggggtcttttaacatgtaaaggtgtcttcctcccaagcggtgcctaaaatttaaccaaaaagaccagactaacacgttannnnnnnnnnnnnnnnnnnnnnnccagacagcctgtgtcttgggaaatggggctggcccaggcccagtgaccacttcaccactcccttgggtccccctaaccctaccacctgccactcaccactgctaggtgccttggagaatccagagctgggcactcagcctaccacgcctctctctcctgggaggattctatctgggaaaggcctccagacctctaagccaaccccgccggatgtctgcctgctggccctagctgctgaggggacctggggaacgatcctatgagcagacagctcttgggcctcttgaggcctctgtcctgagccagctgcgtctctccagtgtgtcgctgaattacctgcctattcatttgggtcttgctggcaaaggaaaggccccaagccagccatctcttccagcctgcccggagaggccccttccccgtgggaagatgaggcccggccctggccccagcctcccgcctggctcctgcagctgccattggagctatgcttttgtagctcaccggcccgtactcaccccccgcccgagacccgagcctctgcttcagcctccagcctcagctccccttgtaagtgccttctgtgtccctcttgtgccctaaagacccagacgcaggggtaggagatggactttgtggctgggcaagggcttggacggttcttcagatctgagacttcttctacccagaggccagtggctgctagcctgtggaaaccccctctgggtgctgctgcccacctctcttccagggagccttggcctctccgtggcccaaagacactggctggcccatctgtgcagacatcagcacccggccagtaccacctcccttcctgtccagccagcccctggccttggtggctcctacccctgcctccaccctctgagtgagctctgcatgttccactaacctcgagctggtggcaggtggagatgccaggcagaacactaacctgaccatgggcggagccccgcggtggccgcccctcaataaaagcaattccaacctnnnnnnnnnnnnnnnnnnnnnn

SEQ ID NO: 746 - DNA, 948 bp, Phodopus sungorus
aatcgaattcatggttggtttcaaggccacagatgtacccccaacagccacagtgaagttcctgggagctgggacagctgcctgcattgcagatctcatcacttttcccctagacactgccaaagtccgcttgcaggtccaaggagagagtcaagggctagcgcgcactgcagccaacgcccagtaccgcggcgtgctgggcaccatcctaaccatggtgcgcaccgagggcccacgcagcctctacaacgggctggtcgccggcctgcagcgccagatgagctttgcttctgttcgcattggtctctatgactctgtcaagcagttctacaccaagggctcagagcatgcaggcatcggaagccgcctcctggcaggtagcaccacaggtgccctggctgttgccgtggcccaacctacagatgtggtaaaggtccgcttccaggctcaggcccgggctggcggtggtaggagataccagagcactgtcgaagcctacaagaccattgcacgagaggagggaatccgaggcctctggaaagggacctctcccaatgttgcccgtaacgccattgtcaactgtgctgagctggtgacctatgatctcatcaaagatactctcctgaaggccaacctcatgacagatgacctcccttgccacttcacttctgcctttggggcgggtttctgcaccaccgtcatcgcctccccagtcgatgtggtcaagacgagatatatgaactctgccttgggccagtaccacagcgcaggccactgtgccctcaccatgctccggaaggaggggccccgagccttctacaaggggttcatgccttccttccttcgcttggggtcctggaacgtagtgatgtttgtcacctatgagcagctcaaaagggccctgatggctgcctacgagtcccgggaggcacctttctgagctcctcc

SEQ ID NO: 747 - DNA, 935 bp, Phodopus sungorus
  misc_feature (621)..(634): n is a, c, g, or t
  misc_feature (637)..(649): n is a, c, g, or t
ggcagcaaaggaaccaggcccatctgctgggcagcatggttggacttcagccatcagaggtgcctcccacaacagttgtgaagttcctgggggccggcactgcagcctgttttgcagacctactcaccttccccctggacaccgccaaggtccgcctgcagatccagggggagaatccagggacacagagagtgcagtaccgcggagtgctgggtaccatcctgaccatggtacgcacagagggtccttgcagcccctacagcgggctggttgctggcctccaccgccagatgagctttgcctccattcgaattggcctctacgactctgtcaaacagttctacacccccaaaggagctgaccactccagcatcgccatcaggattctggcaggctgtaccacaggagccatggcagtgacctgtgcccagcccacagatgtggtgaaggtccgatttcaagccatgatacgtctgggaactggaggagagaggaaatacaaagggactatggatgcctacagaaccatcgccagggaggaaggaatcaggggcttatggaaagggacttggcccaacatcacgagaaacgccattgtcaactgtgctgagatggtgaccnnnnnnnnnnnnnnggnnnnnnnnnnnnnactctcacctgttcactgacaatttcccctgtcactttgtctctgcctttggagccggcttttgtgccacagtggtggcctccccagtggatgtggtaaagaccaggtacatgaacgctcccccaggcagatacctcagccctctccactgtatgctgaagatggtggcacaggagggccccacggccttctacaaaggatttgtgccttccttcctgcgtttgggagcctggaatgtgatgatgtttgtaacttatgaacagctgaaacgggccctggaaagtaa

SEQ ID NO: 748 - DNA, 290 bp, Mesocricetus auratus
tctggctgaccggaagctgtgtgcggaccaggagtgcagccaccctatctccatggctgtggcccttcaggactacatggcccccgactgccgattcctgaccattcaccggggccaagtggtgtatgtcttctccaagctgaagggccgtgggcggctcttctggggaggcagcgttcagggagattactatggagatctggctgctcgcctgggctatttccccagtagcattgtccgagaggaccagaccctgaaacctggcaaagtcgatgtgaagacagacaaat

SEQ ID NO: 749 - DNA, 2999 bp, Cricetulus griseus
  misc_feature (1926)..(1943): n is a, c, g, or t
  misc_feature (2974)..(2999): n is a, c, g, or t
ggttcggtgcatcggcgcgacggacgggcgggcgggcaggcgctgtctctctcccccctgccggcggctgcgaccgtgggagcccccctgactttcgtcaaacttgctgctttgcccccgtggacatgactccttagctggcattgtgcatgccagttgtgtgtggtggaagcctccctgggtgctcagatggaggagccaatggcgttttctcccctgcttggcggtgaccggagtcccgctgatgactccttaaaaaaatatgagcagagtgttaaactttcaggcattaaaaaagacattgagaagctttgtgaagctgtacctcagcttgtcaatgtgtttaaaattaaggacaaaattggagaaggcacattcagctctgtttatttggccacggcacagctgcaagtaggacatgaagagaagattgcactgaaacacttaattccaacaagccaccctgtaagaatcgcagcagagctccagtgtctgacagttgcgggggggcaagacaatgtcatgggagttaagtactgcttccggaagaacgaccatgtggttattgccatgccgtatctggaacatgggtcatttttggacattttgaattctctttccttccaagaagtacgggaatatatgtttaatctcttcatagctctgaaacggattcatcagtttggtattgttcaccgtgatgtgaagcccagcaattttttatataatagacgtctgaaaaagtatgccttggtggactttggtttggcccaagggactcatgacacaaaaatagagcttctcaagtttgtccaatctgaggctcagcaggaagattgctcacaaagcaagtaccacggagtcactggacaaaagggctcactgagtcgcccagcacctaaaaatctggatcagcagtgtgctgcaaaaacttctgtcaaaagatcctatgccagcgcacaaactcacattaagcaagggaaagacgcaaaggagggatctgtaggcctttctgtccagcgctctgtttttggagaaagaaatttcaatatacacagctccatttcacatgagagccctgcagagaaactcataaagcaatcaaagactgtggacataatctcaagaaagccagcaacaaaaaagacagccatgtctacaaaagctgtggctagtgtgaccatgtctacaaaagctgtggctagtgcgatgaggaaaaccaccagtccttgcccggctgtcctgacctgcgactgttatggaacagataaagtctgcagcatttgcctgtcgaggcggcagcaggttgcccctcgggcaggcacaccaggattcagagcaccagaggtcctgacaaagtgtcctaaccaaaccacagccattgacatgtggtctgcaggtgtcatactcctctccctgctcagtgggcggtacccattttacaaggccagcgatgatttaactgctctggctcaaatcatgacaattcgaggatccagggaaactatccaggctgctaaagcttttggcaaatcagttttgtgtagcaaagaagtcccagcacaagacctgaggaaactgtgtgagagactaaggggtctagaccccaccactcccaagttagcagttgatccaccagggtgtgcctctctagagaacactgaccataaagcttcttccctcggacagacgcctccagcacagcactcagagggttccttgtgtaaaggggacagtgatgactgtgggagtcgtcccagggagtgcactaccaacttggaaggctgggactcggtacctgatgaagcctatgacctgcttgacaaacttctggatctaaacccagcttcaaggataacagcagaggcagccttattgcatccattctttaaagatatgagctcctgaggtggttttccatttacnnnnnnnnnnnnnnnnnntgaggtggggtagataatcacaggttcttgtttgcatccaagtccagggaaggatgactaacttatttttaaagttacaatattttgctctgatgtcagattgtaagcagatggggaattattcaagatccagggggaggcctctatgtgatcttagagttaaaccaccaagtatagtcagatctttagttccctggttttctctgcttctggagcagccttagcctgatgcacgggtcaaggaacgggtcataaaggtcacagatgtgacagggagtaaatgagtgaaaaagactgtttccagatgtctgtggcctacgctgtgtatgcctggggaactggctcttggtggtgtacaggagagacagtgatctttcctataggtgtgcatataaacacagttaccgcagggacataggggaaatgacaccactcaatatagttgtttcctgtaagttacacagtgcttactgcagagtttctggttcttcattaggtgtatttatttatattgggaacctaataatgtgcagattgttgacgaggcagaagtctttttctcgtacagctattttgtcacactatcttagtttaattaggtaattgccacaaggaaaggtgagggtacaactgggaacattactgggttttgtcttccaggagtacccagacttctgcatttctgacctaagttgaccttgctcagagagtaatggtcattgcagtctcaggtggattgggaggaaatacaatgacgtagacaaagcagcaaagggcttgcacggccatctatgcattttttacattctgaactgccctgtgtttgtgatagaatgccagggttcccaggggtcaggaggataaacttgctgaagagttcccttcgtataatcacaggtcatcagtatattcactttcctgttttgaatcctgatagatcaatgtgtgtacacactttgtcttatgctgtatttttttaagcttgaatgtttttggaatatgtatttaataaatgtttcctttcagattcnnnnnnnnnnnnnnnnnnnnnnnnnn

SEQ ID NO: 750 - DNA, 591 bp, Cricetulus griseus
  misc_feature (497)..(515): n is a, c, g, or t
ccgcggggcaggaggaggtccccaacccatgctagctagccagagcagagcccggcgtcaggtcctccacgtcacgcctacctcagggcccgcccatgccatgcccacctcagcctggctttaggcccctcccctagcgcctcagtgttgctcgcacctcggagccccaatgctcccgcgtcgagcccaccccaagcctctcctgtatccgtgcaggtcccggtcccagcggctctagcctcaggccccgcccccagctccttggctcacgggctcagaaaccgccgccccccagagcctgctgccttgggccccgcctccgccccaaccaggctccaccccgcgcacgcgccgcacgtgccgcacgcgccccgcgttcctcctccacctgtaggccccgcctcccagccaatgggcgccgccgccgccgcgtgcgtcctgccccgccccgccccttgtccctcagccccgcgtcggctggccgcagagctgagcgnnnnnnnnnnnnnnnnnnnctcgtatatccctcccgggtgaccgccgctgaggcctgctgcagctgggctcgggctcttctgccgagctaccatg

SEQ ID NO: 751 - DNA, 870 bp, Cricetulus griseus
ccagctagtgccctgagcttgagctatgcagtctactccccagcttttgagcggtcgtcagcccgcagactccccgccctcacactcaccccgacacctgggcgagtcagtgattcggtgccgggtcctctctggaccgaagctgaagcagcagagaaagcagcgaggacccgtgttcggggtgcccaacagattgcctgactagcagcctcagagacgccaaggagggccgcaggactaggaagataaaatgggcggaaaggcgttcagtgagaggaacaatgtctcccgaggttgaggatctgaatcttctgcgttgctcgaggtctggaagaacggggaggttggcactccctgacgcaggcgctcaccagcagcctaactctgtttggggacccttaccgtagtattcgaggccctggatggacgggacatcagatacgcgcagagccaatggttatggactagagagtcacggattgggcggggctaaaaggggcggggcttaggataaggggcggtgacgagtagagggggcggagccacagggctgaggggcgggacgcgcgatagtgccaaactagggtgagagtgcgaagatggcagctgctgaggagccaaagcccaaaaagctgaaggtggaagcgccacaagcgctgaggtgagagccgccaacgtggggaggagggagacggcatttgcggcgagccaaggcccacgtgggctggcgctgctgcgtggtgtttgcgttcgtggggccaacacgcgggacctgcagctcggggagttgccctcgtggctgcacattgaccccttggtttgaaccgtgctcaggtgctttcccggccctggcagccattgaccaatcag

SEQ ID NO: 752 - DNA, 469 bp, Cricetulus griseus
tactatctctaaaatattgtcctacatctaattggcaaatcagtggtttaattaaactgcgatgctaggcttatgttcaagtgaagatatagtttattttcgtatttgtgttttctaacttccttttgcttttttcttttagtgaaaatgtgttgtttggaatggggaatcctcttcttgacatctctgctgtagtagacaaagatttccttgataagtaagtattaaatgcttcatgcctacagcatcaaacatccactgattaaactgtggaattaggctggtaggatggttcagtgggtaaaaacatccctgtctagactgacaacccaagtttgatcccagggacctacatagtgaaaggagaaaactaactcctgcaggttatactctgacctccaaacacacatgcatggcatgtgcactttcacatcatgcacacgtacacatatataaatgagtagataaa

SEQ ID NO: 753 - DNA, 312 bp, Cricetulus griseus
gtgaccttcatttgtcaaatcttttattttgctgtctatgtagtataatgacttagttcacagtatatattttagattcttaatgttatgtatttacagaagaaatttaattcattttttgaatgcaaatagatgattttgggattgcactaattatattttaattagaagaacttgtagtctgtgaaaactgacatatgctaacttaacttctcctgtggtttccttgataggtttgatgaacttgtaagaaaattcaaagttgaatatcatgctggtggctctacccagaattcaattaaagtggctcag

SEQ ID NO: 754 - DNA, 433 bp, Cricetulus griseus
tatcgataagcttgttttcctcagcagtagtgcagtgttgaagttccgttcatcagcatcacaaagcttgcctttcaagcccccatacatggcagagtccgaaattatctgtactgtttctgatccatccagtcatttatgttcttacttttcagtggatgatccagaagccacacaaagcagcgaccttctttggatgcattgggatagataaatttggggagattctgaagagtaaagctgctgaggcccacgtggatgcccattactatgagcagaatgagcagccaactggaacctgcgctgcatgcatcactggtgacaacaggtaagtcattatcaaccaggagcaccctacgcgagagctgtggagactcttactaaacccaaatgacagtttgaaattcacttcaagctgataatcatttctaat

SEQ ID NO: 755 - DNA, 269 bp, Cricetulus griseus
ggctgttttccttctctcctgtcctaaaggcttgaggcacatctcaatcttcactatctacaatatcagcctttgaatttgttcatttctgtattaaatacctgacaggttttttaatcttttataagtaaaacgtatttcctacttcttgggtttttaggtctcttgttgctaaccttgctgctgccaactgttacaaaaaggaaaagcatcttgatttggagaataactgggtgctggtagagaaggccagagtatactacatagcc

SEQ ID NO: 756 - DNA, 1195 bp, Cricetulus griseus
  misc_feature (1071)..(1104): n is a, c, g, or t
aagcttcaggccagcctgggctacacaggaggattctgcctcaaaaatgatgaataattctttaaaacctctgtaattggatatttgacttaatatttatttgctggtgataaggacttcttatggtggtggggacttcctgggactttgtgctagccaagcagttgctctaccaagtggcagcatgcccacccaaaaacactctactgaggtacagaagatttaaaatattttgggtttgtttttgtgctaggaactgaacctggttcttttggtaagtcagacaaaatgtttaaagtatatcatgattatgtatgttgtgtgttagtcattatctttcagagttaacatacttgcacatttatagattaaattataaagcaaacctttgctttgaaataaaatgcatggcaggtattgaaagtgaagagaaataaagtccatcataaatgtgaagtttgggaagactcatgagaggagcttgtgtgctgttctctgtatgattaaaaatttcttttcaaatgttccctggtagatactcaggtgccatcagaagcaaaagtgttaaaatgttaataaaatttgcccttactctactgattatgaattttttcactctattaatagactaaagacattaaagagatagccaaaaaggcacaggctcttgcaaaggtgaactcgaagaggccgaggaccgtggtcttcacacaagggagagacgacactgtagtggctacaggtactgttggaactatgtgaaaaatccagtgctaaggagattaatcatgacaaattctatagtctttctatcacgtgtcttttacagtttaactatattcctctcctttcaagattacaatttacgtttattgatgtagcttgtttacttttaaagtttggggggatttttttagcccagaaatatctttcttttcaaacataatacgttttacatataaacatttattcagttatgagcaagtaaagtccaaaatgtttcttctgattttctttcctgtcattattaatttgtcttgtttttgcaatagtaggaatttattatttttnnnnnnnnnnnnnnnnnnnnnnnnnnnnnnnnnntcctggatctcactatgtacatgaagctagcctccacctcacagagattcacccacccctatctcatgcccagcctaatgctgaaaagctt

SEQ ID NO: 757 - DNA, 1122 bp, Cricetulus griseus
  misc_feature (78)..(94): n is a, c, g, or t
ctcattctgctcgggcaacccacaagcagggcagacaagtctcactcctgtagttaccaacatgctactactctgctnnnnnnnnnnnnnnnnntctccgtccatcaagttgacaatcaagattaaccttcacaatgagacttagaccagagccaccaggtggtagttgagatcttgataattgtaatgctgttatataacactcacattctctcgattttgtctgttgtagggtttctctctcaactggtctataacaagcctctgactgaatgcatccgagccggccactatgcagcaagtgtcattattaggcgaactggctgtacctttcctgagaagccagacttccactgatggaagaaagaaaactcactgggaggtgcaggctgcagtgacctcgtcctaagtgttcctgccataagaaagaataattgtactgctatttttgccaaccatgattctcattaatttagagggctcagtattgctcctagaacctttagtctttgaaatctggggggaaaatgtttatttccataatttgttagtgcctcttaaatgtcaaaaaggaatatagcatttcagtagaaacttttatttcattttccattgtttgtaaattcatctgtatttagtaaattaattggtttttttacatttctgctttaaatacaggtgcaatttaatataatagactttttaaagaaattaatgctaacatcattcttgagctttttatataaatatatttaatttggaggtatgtatatgcacacatgtcatatatatacatatatatctgataactggtagataaggtacagaaatgtttatcacaccaaattattccacataagctcttcattgtgcttcagacatatgatggacttggaacaaccgattcccccaacatttgcatcatgttattcaaatcataacctatgcttactgatggtactctgtaatttgatacaaataaattaccatataggaatcctttctgtcttggcttatgctcaataaaactaaggaagaaattgttatttagtactgggccttgtatgattttattgatggggtgagggaaggaatgttaatatattaaatataaatatgtgc

SEQ ID NO: 758 - DNA, 77 bp, Mesocricetus auratus
gcaggcttgaagacccttccatgtggtgatgggaaatgaaactcactctcccgacttttcctattttccacccacat

SEQ ID NO: 759 - DNA, 534 bp, Mesocricetus auratus
ggccagtgcggcacttgcaccaacgaccagaaggatgagtgccggccttccctggagggggcaataacctcttgttctgatatggctccccattggaaggtgcccaaccagccttcatgccaaggcgctcctccaacatcaacttcagtggtacccagtccttcaccagccccgtgcccaccatcaccaatctgtgagctcatcctaagcaaagtctttcagtcttgccacgatgtcatccctccactgccattctatgaaggatgcttgtttgacatctgtcacggcatgggctgggaagtcgtgtgctcaggtctagagctctatgcatcactctgtgcggcccacggccggtgcatcccctggagaagccagaccaacaacacctgttcattcacctgccctgctaacaaagtgtaccagccatgtggcccaaccaacccttactactgctatgggaatgatgacctcagcaccagcttgactcttcaagaagctggccccttcacagaaggctgcttctgtccggagggc

SEQ ID NO: 760 - DNA, 507 bp, Mesocricetus auratus
  misc_feature (26)..(26): n is a, c, g, or t
  misc_feature (173)..(204): n is a, c, g, or t
tctccaccgggtagtgttgaggcttnttaacagggcttctttctggggtcctcccagcggcagtctggccttgatccctctactcttccttctttttcaggtgatgatgatgggcaacacccaagtagccagactgctgctgctctacggtgcggaaccgaactgcgaggacnnnnnnnnnnnnnnnnnnnnnnnnnnnnnnnnagcacgggagggcttcttggaaactctggcgatactacaccaggcgggggcgcggctggatgtgcttgacgcccggggtcgcctgccggtggacctggccctggagcggggccactgcgatgtcgtacagtatctacgtgcggctgggaacaccccccaaggcagcgagccggcaggcgtaacttctgcccagacacccccaggtgagcacggctggtccaagagtttgaaatctgagggctcctgaaactcagttacagatggaaaagttgaagcagggtcttccggcggccttcagctcac

SEQ ID NO: 761 - DNA, 379 bp, Mesocricetus auratus
  misc_feature (148)..(209): n is a, c, g, or t
catgagcatgggtccctttttgattacttgaatagatacactgttacagtggaagggatgatcaaacttgctctgtctacggccagtggtcttgcccatcttcacatggagattgttggtacccaaggaaaaccagctattgctcacnnnnnnnnnnnnnnnnnnnnnnnnnnnnnnnnnnnnnnnnnnnnnnnnnnnnnnnnnnnnnngggactggctgtgaggcatgattctgccacagacacaattgatattgctccaaaccatagagtaggcactaaaaggtacatggctcctgaagtcctagacgattccataaacatgaaacactttgaatccttcaaacgtgctgacatctatgcaatgggcttagtgctct

SEQ ID NO: 762 - DNA, 285 bp, Mesocricetus auratus
gccctactgaacttggccacagtaagcttctctctgtccacttgcaccaccttggacttcggccacatcaagaagaagagggtggaagccattaggggtcagatcttgagcaagctcaggctcaccagtccccctgagccatcggtgatgacccacgtcccctatcaggtcctggcactttacaacagcacccgggagttgctggaagagatgcatggggagagggaggaaggctgcactcaggagaacacagagtcggagtactatgccaaagagatccataaa

SEQ ID NO: 763 - DNA, 1455 bp, Cricetulus griseus
  misc_feature (1058)..(1082): n is a, c, g, or t
  misc_feature (1339)..(1380): n is a, c, g, or t
gatgccaacatggcagcggttggggttggcggatctgccgcggcggccgggccaggggccgtatccgctggcgcgctggagcctgggtccgctacagcggctcaccggcgcctcaagtacatatccttagctgtgctggtggtccagaacgcctccctcatccttagcatccgatatgctcgtacactgcctggtgatcgcttctttgccaccaccgctgtggtcatggctgaagtgcttaaaggtgtcacctgtctcctgctgctcttcgcccagaagaggggtaatgtgaagcacctggttctcttcctccacgaggctgtcctggtgcaatatgtggacacactcaagctcgcggtgccctctctcatctatactttgcagaataacctccagtatgttgccatctccaacctgccagctgccactttccaggtgacatatcagctcaagatcctgactacagcactgttctccgtgctcatgttgaaccgcagcctctcacgcctgcagtgggcctccctgctgctgctcttcactggtgtggcgattgtccaggcacagcaagctggtgggggtggcccacggccactagatcagaatcccggggccggactagcagctgtggtggcctcctgtctctcctcaggctttgcaggggtatactttgagaagatcctcaaaggcagctcaggttctgtgtggctgcgtaacctccaactaggcctctttggcacagcactgggcctggtggggctctggtgggctgaaggcactgctgtggcccgtcgaggcttcttctttggatacacgcctgctgtctggggggtggtactaaaccaagcctttggtgggctactggtggctgttgtagtcaagtacgctgacaacatcctcaagggctttgccacctccctgtctattgtgctgtccactgttgcctccattcgcctctttggctttcacctggacccattatttgccctgggcgctgggctcgtcattggtgccgtctacctctacagccttccccgaagtgcagtcaaagccataacttnnnnnnnnnnnnnnnnnnnnnnnnntgggccctgcattcaccagcagcctcctgggcagccaccaccaccaccgcagctgtcttctcgaggagacctcatcacggagccctttctgccaaagttgctcaccaaggtgaagggttcgtagctgctggaattgaagacactggcctgccttcgttctccctctcttgccctggcccagctgggactaaactcttatcagtattaggggtagggtgagggagacatgggaattgcctgtcccaccaaccctgccnnnnnnnnnnnnnnnnnnnnnnnnnnnnnnnnnnnnnnnnnnctgaactcctgctatctttgcagtatttcttaggtaagtttctgcaaataaaatgtattttgcatcttgaaaaaa

SEQ ID NO: 764 - DNA, 517 bp, Mesocricetus auratus
tgaacttttccccaagttccaccagccccaccaaggagccaggggagcctcagcccagccgggctgttctccaggaagacgtggacatgagcagtggctccagtgggaacgaaaccaacgaaaactgctccccagggagggactctcagggcagtgactgtgatgacaatgggaaggagctgcggatgctcgtggaaccttccagcgctcacccgagccctgatgccttcagactgatgatgacagagccagaacacaacccctccacaagcggctgcagtagtgagcagtctgccaaagctgacgcgcacaaagaactgataaggaccctgagagagctgaaggttcacctccctgcagacaagaaagccaaggggaaggccagcacgctggcaaccttgaagtatgccctgcgcagcgtgaagcaggtgaaggctaacgaggagtactaccagctgctgatgtccagcgagagccagccctgcagtgtggatgtgccctcttacaccatggagca

SEQ ID NO: 765 - DNA, 1927 bp, Cricetulus griseus
ggaaaagagaagagcaaacaggcactttcaggagcaatcccctcacctccaagccgactgcgctctaggaatccaaattccgtgcctcccgaagacaaaggcgccaaagagagcggcggcggaccccagggcgtgggcccaccgcggagccgcaccgcccggcgcccgacggcggaccatgtctcccgcccctcgaccctccagcttcctgctgctccccctgctcacgctcggctccgcgctcgcctccctcgcctgggcccaaagcagcaacttcagccccgaagcctggctgcagcaatatggctacctacctccaggagacctgcgtacccatacacaacgatcaccccagtcactctcagctgccgttgccgccatgcaaaggttctatggtttgcaagtgacaggcaaggctgatttggacaccatgaaggccatgaagcgccctcgttgtggtgttccagacaagtttggtactgagatcaaggccaatgttcggaggaagcgctatgccatccagggcctcaaatggcagcataatgagatcactttctgcatccagaattacacccccaaggtaggcgagtatgccacattcgaggccattagaaaggccttccgagtatgggagagtgcaacgccactgcgcttccgtgaagtgccctatgcctacatccgagagggtcacgagaagcaggctgacatcatgatcttgtttgctgagggtttccacggcgacagtacaccctttgatggtgaagggggcttcctggctcatgcctatttcccaggccccaatattggaggggacacccacttcgattctgctgagccctggactgtccaaaatgaggacctaaatggaaatgatgtcttcctggtagctgtgcatgagttgggccatgctctaggcctggagcattccaacgatccctctgccatcatggcgcccttttaccaatggatggacacagaaaactttgtgctacctgacgacgatcgccgaggcatccagcaactttatgggagtaagtcagggtcacccaccaagatgccccctcagcccagaactacctcttggccctctgtcccagataagcccagaaaccccacctatgggcctaacatctgtgatgggaactttgacaccgtggccatgctccgaggagagatgtttgtcttcaaggagcgatggttctggcgggtgagaaataaccaagtgatggtaggatacccgatgcctattggccagttctggaggggcctaccagcatccatgaatactgcctatgagagaaaggatggcaaatttgtattcttcaaaggagacaagcactgggtgtttgacgaggcttccctggaacctgggtaccccaagcacattaaggagctaggccgaggactacctactgacaagattgatgcagctctcttctggatgcccaatggaaagacctatttcttcaggggaaataagtactaccgtttcaatgaggagttcagggccgtggacagcgagtaccctaaaaacatcaaagtctgggaaggaatccctgagtctcccagagggtcgttcatgggtagtgacgaagtcttcacatacttctacaaggggaacaaatactggaaattcaacaaccagaagctgaaagtagagcccgggtaccccaagtcggctctgcgggactggatgggctgcccttcagggggccgacctgatgaggggactgaggaggaaacagaggtgatcattatcgaggtggacgaggagggcggcggagctgtgaatgccgccgctgtcctactgcccgtgctgctgctggtgctggtgctggtggtaggccttgcagttttcttcttcagacgccatgggacccccaagagactgctttactgccagcgttcactgctggacaaggtctga

SEQ ID NO: 766 - DNA, 1720 bp, Cricetulus griseus
  misc_feature (1370)..(1410): n is a, c, g, or t
  misc_feature (1448)..(1464): n is a, c, g, or t
  misc_feature (1466)..(1495): n is a, c, g, or t
gatctacaaggatgataccaactatcgcaatctaagcaatagtggagaggctaccttaaatgtccttccccaatactgagattaatgactaccttatatgccatcctagagccttcatccagtggctgatgtaagcagaggcagacacccacagctatacactgaactgaactctggaacccagttgcaaagagggaggagtgacgagcaaagaggtcaagcccaggctggtgaaacccacagaaaaagctgacctggggagcacatgcaccccagactgatggctgggaggccagcatgggactgattcagaccccctaaatgtgggtgtcagtgaggaggcttcagcaactatggggcctctggtaggagatcagtatttattcctggtgtacgatggactttgggagcctattctacatggaaggatgctctttctgcctggacacattcagggagggcctaggccctgcccttgatgatatgacagactttgggaatcccttatggagggcctcatgctccctggggagccgaggggggatggcatgaggattagtgggggtcaggggaggagggaaaggagagggagctgggattggcatgtgaagcaggcttgtttccaatttaaattaaaaaatataaaatataaaatatggggagtggcatgtctattgtaagattattgaaaaaattatatataattcagctaaagagcctccatagtatctggattatttatggtggcatgtccttccatagcaaaaaaatgctaaaaccccagtggctgaataccatacaaatatagtttttgcacaaagtccagctcatagattttcattcagtggttcttcaggaccagcctcttcccatctcattgtattccattcagggttttaggacatttccttctagactgcagaggggaaaagagcctaaagacaacaccttggtggctttctttagcaagtccaggaactgaacacctcactcttgtcagcagtccatgaccttactcagccactcaactgcaaatgtaactgagatacccaatagaagagcatacctccatatcctaggcacagccattgcaatcaacactatatcagacattgttgattgtctcctgatgggcagcagcacactatcaaccacaagtttaatggcaatgcttttcttaacattgataaagtaaacaagtaatgaagaacaggaagagcaataagatataaaataaagaaaggacttggatgaaagggataaatattttaatgctgttgcaatggagttcagagccaatatgcagtattaaactaagagatttgattagtgttaaagagcacatctgactgttcattttcattttttcnnnnnnnnnnnnnnnnnnnnnnnnnnnnnnnnnnnnnnnnngagggttaggcttagggtgagggttagggttagggtgnnnnnnnnnnnnnnnnngnnnnnnnnnnnnnnnnnnnnnnnnnnnnnnccctactctgaaatatttgtaagatctcagtcaacatttagcctttcattctgttcttcttaagggctcgctctcctggttttttctttgttttcttttggttctgagtgtgtgatttgaaagagtcgggatgagatgagaggggagaaattctgttcatcctaagcatttctcaataaacaatattcttaggctgtgggtcacaacctcatatagaattgtgcc

SEQ ID NO: 767 - DNA, 1362 bp, Cricetulus griseus
  misc_feature (14)..(14): n is a, c, g, or t
tatataccgttgcngtgcccgctttgaagtcagacgttgttcagtttgtactcaggctcaattaatacaagttattttatttctaaatttaattatgcttctgccagcttcaatttaattggtagactgaagccaacacatataattcaggcttaggctaagagataaacaacacaatgctaataaaaacacacagcaaaaaaaaaaaaaatcacagtaagtattccccttttccttttgtgctaaggttagggttagggttgaagttggggttggggttggagttggggttagggttagccttcctccatccaaccgctcaccttctcatcttctctttcttagattcttccttcttttctgtcttcccaacagacccattgcccctttcaggtaaatatgctaatggctcagttattcccctgatgattacaactcaaatttcaacaaatgctctctgagtaagtacttcagaagggaaccttcagataatctaattaagaatatgattaaaatgttttttattaggtccaaatattctaccctactgagacttctggagtgtcttctttggataatacatcacagacacttccccctcttgttttattgatgtcactgatgaagagctttaagcatctgagtgaatgatcagaagctgaaaaatggcagaaagaaaaaatgtaaatatatggatttcacaaaatccttaaagctatttattttactcatcattgactgtgatttacttaaagtatcactatttggatttgtttcattttagcaagtcatcataatgaattttttaagagggttttaattctacttgctgtgtatttttcttgaatagagaacatttgtcttagaattttgtgaggtctgtaaccatatgtttttgcatatagtctcttatgtaaggagtttcagtgaaattttctttgttaatatcacctccagataaatctttaattaaaaggtttgaatctttattcagcagtgtgaaatgctttgataagaatttctaagcataattacttatagaaaatttgcatatggtgggaataatgttcaaagacctggaagacatttgtaaaatttgtacttcagtggagctacctaaatatataaaatataacttatgtagctcaagaagactatttttataactatgttttattttggaaaaaagcagatgttttattatctttcaggaagggaatgattttgcttaaaatgttatttcctatgatatatcactttatataaaatgtgtttaaagtaagaaaacatcttattaagactctagagatgttatatttggaaatgccacactggattaaaaagttataacttgctaagctt

SEQ ID NO: 768 - DNA, 1528 bp, Cricetulus griseus
  misc_feature (77)..(77): n is a, c, g, or t
  misc_feature (80)..(80): n is a, c, g, or t
  misc_feature (642)..(675): n is a, c, g, or t
  misc_feature (683)..(704): n is a, c, g, or t
  misc_feature (732)..(750): n is a, c, g, or t
  misc_feature (767)..(782): n is a, c, g, or t
  misc_feature (784)..(801): n is a, c, g, or t
gcttttttcaagagttgagagcagtagccccattgggatcccctgagaatgtgtctatagtatgaatgtacatattncanaatttccaaattctgtaaaaatgaaagacatccatctgccagatctcattcctccaaatgtctttaggattacagcctgctgacagtggagtttggttataaaaagaataagtaggacagtttctcactatctccttagcttgttgccaagtgatggagaagtcctttttaaaaaatttgctatttacatgatgtttcttatgaaattctgaggcttctagcacactttcaattaataaatgatcaatttcgccattgccttgtgctagtggacctggcagaaccgtatgggatctgatatgtgtaatgtatagaggattacatctgtttctgattgtttcctataaaaacaacgagattaattctgtattatcaggaacgaattctgaaatctcaatgtgaaagatgactctgtatattgggaatcagtaactatattaagaggttctgtaaaatccataagcaccatgagaattgcatataattctgccttctgtacagaagtatatggactttgaactcctttacttacctcaccagctttataaccagggttaggggnnnnnnnnnnnnnnnnnnnnnnnnnnnnnnnnnnatttttcnnnnnnnnnnnnnnnnnnnnnnttttggagcctatcctgtcacttgctcnnnnnnnnnnnnnnnnnnnaaactcacagagaacgnnnnnnnnnnnnnnnnannnnnnnnnnnnnnnnnnacatgcaccaccaacgcctggctcagactgtcttttttatgaatttaattctgtagttttgggatagttgttgctaatcattcccaaaagtcagtaagagctatttgcaatattcattatccttccataaggaggaaatttcttcattaatactataatttctgctggatgtattccagtcagttgatgaagtcttaatttgccctttaaaatgaaatcagaaatcttttctatatatgtctttaactttttattctgttttgtggcagaaatatccactccaatatggtctcttgcctctgcatcagaattccagaagtatattttttggatggcaagataaccagaatacagtctaaatcaaggtttatctgatctacatgcacatccaatattctgttttctacccattgtaattctttttctgcctttgcggataatatttgtggactgtttaggtccttaaaggccattgttaaaggctttaagtcatgaccttctaccccaataatcatctgaatttgagaaatttctcctagcaagcagcttctgaagacattatttgtaatagccagaacctggaagcaagctagatgcttctcaactgaagagtgaatagagaacatgtggtaccattttcacaatgcaagtactgctcatctggggaacaaaaactcaatgaaatcttaaaattcgaaagcaattggatggcactagaagaaacctt

SEQ ID NO: 769 - DNA, 215 bp, Cricetulus griseus
agtcagcgaatgaggcacagcaaccattctacagagaactctcccattgaaagacgaagcctaatgacctctgatgaaaattaccacaatgagagggctcgtaagagtaggaaccgcttgtcttccagctcacagcacagccgagatcactaccctctggtggaagaagattaccctgacacataccaggacacttacaaaccccataggaaccg

SEQ ID NO: 770 - DNA, 205 bp, Cricetulus griseus
gaggtccgggtgacagtgctgcggcagacaaacagccagatgactgaggtctgtgccacgacattcacaatgaagaataagttgggcttcctagatgatcccttctgcagtggtaccttcaatgaaagcaaagtgaacctcaccatccaaggactgagagctgctgacaccggactgtacttctgcaaagtggagctcatgtacc

SEQ ID NO: 771 - DNA, 433 bp, Cricetulus griseus
  misc_feature (397)..(397): n is a, c, g, or t
tgagaggaaacacatccttgacctgatattacttggaggaaagaacttcttttggttttgtttctctgcatggagtgcaagccagtgtgctgtctagggaaaaagagtgtggatggtccttggatgtccctaaaggaagaataaccactttattaagccagtaaggtcatctagagatcttatttcccagtgcacatgagtatgaaagctggtaacagaataaacatgatatttggaatgtttctagaatatacttaggacacctggcaaggctgacatagattttgctgatttgtctgcttatgaatggacaggatgccagtctggcagtttgcattggcaataaatcaccactagacattttatttaaaatttggcactggcttggaagagtganggattgtcaatttgtttttattttgaagccaggcac

SEQ ID NO: 772 - DNA, 204 bp, Cricetulus griseus
cgccatcatggacaccagccgtgtgcagcctatcaagctggccagggtcaccaaggtcctgggcaggaccggctctcagggacagtgcacgcaggtgcgcgtggaattcatggacgacacgagccgatccatcatccgcaatgtaaaaggccccgtgcgcgagggcgacgtgctcacccttttggagtcagagcgagaagcccg

SEQ ID NO: 773 - DNA, 2085 bp, Mesocricetus auratus
  misc_feature (1949)..(1967): n is a, c, g, or t
atgagcggcggcgaagtggtttgctcgggatggctccgcaagtcccccccggagaagaagttgaagcgttatgcatggaagagaaggtggttcgtgttacgcagtggccgtctgactggagaccccgatgtcctggagtactacaaaaacgaccacgccaagaaacctatccggattattgatttaaatctatgccagcaagttgatgccgggttgacattcaacaagaaggagttcgaaaacagctacatctttgatatcaacaccattgaccggattttctacctggtcgcggacagcgaagaggacatgaacaagtgggttcgttgtatctgtgacatctgtggcttcaatcccacagaagaagatcctgtgaagcccctcggcaactcctcacaggcgcccgttgattcgcctttcgctgggaacacagcgccagcctccacccagctggaagcctctccagtcacactacctccctcttaccagctcatcagcctcccgccacacccagacactctaggcctccaggatgacccacaagactatctcttgctgatcaactgtcaaagcaagaagccagaacccaccagaacccacgctgactctgcaaagcccacctcttccgagacagactgcaatgacaacgtcccttcccataagactcccgcttcctcccagagcaagcatggggtgaatggcttttttcagcagcaaatgctgtatgactgcccaccgtcccgggctgcgtccgtctctgtagactccagcctctataacctgcccaggagttattcccacgacgtgttgccaaaggaatctccgtcaagtactgaagcggatggacagctttacatctttaataccccgtctgggacttcgagtgtagaagcccagatgagacatgtgtcaatcagttacgacattccaccaacacctgggaacacttaccagattccacggacatttccagaaggcacactgggacagtcatccaagctggacaccattcctgatatccccccacctcggccaccaaagccacatctaactcatgaccggtctcctgtggaaacgtgtggcgccccacgcacggcctcagacactgacagcagttactgtgtccctacggctggcatgccaccatccaggagtaataccatttctaccgtggatttgaacaagttgtggaaggatgctagttctcaggactgctatgatattccacggaccttcccgagcgatagatctagttccctggaaggcttccataaccagtctaaaatcaaaaatgtgttgacagtggcaagtgtctcaggtgaagaaccggatgaaaactatgtccccatgaaccccaactcgccaccacgacaacattccagcagctttacggaaccaattcaggaaccaaactatgtgccaatgacccctgggacatttgatttttcttcatttgggatgcaagtccctcctcctgctcatttgggcttcaggtccagcccaaagacccctcccaggaggccagttcctgttgctgactgtgaaccacccccagtggataggaacctcaagccagacagaaaagccaagccggcacctctggaaataaagccgctgccggagtgggaagagctacaagccccggtcagatctcccatcaccaggagcttcgctcgggactcctctagattccccttgtcccctcgacctaactctgtgcacagcacgacatcgagcagcgactcccatgacagcgaagaaaactacgtccccatgaacccaaatctgtccagcgaagatccgaatctctttggcagtaacagccttgatggagggagcagctctatgatcaagcccaaaggagataaacaagtcgaatacttagatctagacctagattctgggaaatccacgccacctcggaagcaaaagaacagtggttcgggcannnnnnnnnnnnnnnnnnnggtggactacgtggtggtggaccagcagaaaactctggccctgaagagcactcgggaagcctggacggacgggaggcagtccacagagtcggaaactcccaccaagagcgtaaagtga

SEQ ID NO: 774 - DNA, 885 bp, Mesocricetus auratus
  misc_feature (639)..(664): n is a, c, g, or t
ttcatcggcacagatgtggtactgcactgtagttttgccaacccactgcccagtgtgaagattacccaggtcacatggcaaaaggccaccaatggctccaagcagaacatggccatctacaacccaactatgggcgtctccgtgctgcccccctacgagaaacgagtggagttcctgcgaccctccttcattgatggcaccatccgcctctcccacctggagctggaggacgagggcatgtacatctgtgaatttgccaccttccctacaggcaaccgtgagagccagctcaatctcactgtgatggccaaacccaccaactggatcgagggcacccaggcagtgcttcgagccaggaagggacaggatgacaaggtcgtggtggccacctgcacctcagccaatgggaagcctcccagtgtggtgtcctgggaaacacgactaaagggcgaggcagagtaccaggaaattcggaaccccaatggcacagtgacagtcatcagccgttaccgcttggtgcccagccgggaagcccaccggcagtccctggcttgcatcgtcaactatcacctggaccgcttcagggagagcctcacactcaacgtgcagtatgaacctgaggtgaccattgagggcttnnnnnnnnnnnnnnnnnnnnnnnnnncagatgtgaagcttacatgcaaagcggatgccaaccccccagccaccgagtaccactggaccacgttgaacggctctctccccaagggtgtggaggcccagaacagaaccctcttcttccgaggacccatcaactacagcctggcaggaacctacatctgtgaggccaccaaccccattggcacccgctcaggccaggtggaggtcaatatcacagaattc

SEQ ID NO: 775 - DNA, 188 bp, Cricetulus griseus
cagcttgaatctgacgagaaggcagctatcacaagcatatgggataaagtggacttggaaaaagttggaggagaaactctgggaaggtaggatctgagaccagggcaggggaggaatggagagaatatgtgcttggcactaaacatcaggcttctttaggggttgtgactatctgactttacgctatg

SEQ ID NO: 776 - DNA, 173 bp, Cricetulus griseus
  misc_feature (25)..(41): n is a, c, g, or t
  misc_feature (136)..(150): n is a, c, g, or t
gagctcacacacttgaccctgtgcnnnnnnnnnnnnnnnnngtgttgctgtcatgaatgtagttcaccctgatgagccacaccctggcattggcaaacagctcacacagggcagagagggaaggagccaggacagnnnnnnnnnnnnnnngaggaccagtttcaactccaatt

SEQ ID NO: 777 - DNA, 208 bp, Cricetulus griseus
tctctggctcttttctccttcttaggttgctgattgtctacccttggacccagagattctttgaaaagtttggagacctgtcctctgcctctgctgtcatgagtaacccccaggtgaagcgccatggcaataaagtgatcacctcctttgctgatggcctgaaacacctggacaacactgaaggcacctttgccagtctgagtgagct

SEQ ID NO: 778 - DNA, 148 bp, Mesocricetus auratus
gagctcagccagtgctggggacaggagggcgcccctgaggagccagccccaggccacagtcacggaggaagcccaagggtctcaggaggcctgtgcaggctccaggagttcagattcctcccacggcagccatgggacccatgtcaat

SEQ ID NO: 779 - DNA, 1262 bp, Cricetulus griseus
gtagcccacccccctcttaaagccgcggcgggaagatgaggtttctgaggccggtcctgggcggcagcgccgcgatgccgggcgcgaccctgcagcgggcctgccgcctgctcgtggccgtctgcgcgctgcacctcggcgtcaccctggtctattacctctcgggccgcgacctgagccgcctgcctcagctagtcggggtttcctctacacttcggagcggcacgatcggcgccaccgccaacaagcagccccccggcgcgcggccgccgcctcctgtgggagtctcctcgaagcctcgcccgggtcccgactccagccctggtacggcttttgaccccggcctgaagagcaactggacttcggtcctagtgccccctaccactgcactgttgacgctgcccgcttgccccgaggagtccccgctgctcgttggccccatggtgattgactttaatattgctgtggacctggagcttttggcaaagaagaacccagagataaagatgggcggtcgttattcccccaaggactgtatttctcctcacaaggtggccatcattatcccatttcgcaaccggcaggagcacctcaaatattggctgtattatttgcatccggtcctacagcgccagcaactggactatggtatctacgtcatcaaccaggctggagacaccatgttcaatcgagctaagcttctcaacataggcttccaagaggccttgaaggaccatgactacaactgctttgtgttcagtgatgtggaccttattccaatggacgaccataatgcctacaggtgtttttcacagccccggcacatttctgttgcaatggacaagtttgggtttagcctgccttatgttcagtactttggaggcgtttctgccctcagtaaacaacagtttcttgccatcaatggatttcctaataattattggggctggggaggagaagatgatgacatttttaacagaatagttcataagggaatgtctatatcacgcccaaatgctgtagttggaagatgtcgcatgatacgacactcaagagacaagaaaaatgagcccaatcctcagaggtttgaccggattgctcacacaaaggaaactatgcgctttgatggtttgaactcacttacctaccaggtgttgaacgtagagagatacccattatataccaaaatcacagtggacatcgggacaccaagatagcattgtggaacaaataacagacctgaaaatggccaggggctcaga

SEQ ID NO: 780 - DNA, 750 bp, Cricetulus griseus
gcggcgggcaccatccaaacctctgtcaatgacgtcggctccaagacacaccttacctgctctttgaacagcagtggtgtcgacatcattggccaccgctggatgagaggtggcaagatactgcaggaggacacactgcctgacctgcagacgcagtacacggtggacatagatgaccgctctggggactatgcctgcatcttccttcctgagcccgtgggcaggagcaacatcgttgtggaggggccacccaggatcaaggtcgggaagaagtcagaacattccagtgagggagaaaatgtgaggctgatctgcaagtctgagtcatctcacccccctgtcactgagtggtcctggtttaagacctctgactctggggaccagctgatcaccaacagctctgagagcaagtacgtcgtgatatccacagctgacagatcagagctgaccatcagcaaccttgacataaatagtgaccctggtacctacatgtgtaacgccaccaacacccagggcagtgtccaggagataatgacactgcgtgtgcgaagccgcctagcagccctctggcccttcctgggcatcgtggctgaggtcctggtgttggtcactatcatcttcatttatgagaagcgacggaagccggaccagaccctggacgaggatgaccctggtgccgccccactgaagggcagtggtcatcacatgaacgacaaggacaagaatgtacgccagaggaacgccacctga

SEQ ID NO: 781 - DNA, 733 bp, Phodopus sungorus
ccgggccaggtggacttctatgcgcgcttctcgccgtcgccgctttccatgaagcagttcctggacttcggatcagtaaatgcttgtgaaaagacctcatttatgtttctgcgacgagagttgcctgttagattggccaatataatgaaggaaataagccttctcccagacaatctcctcaggacgccatcagtacagttggtacaaagttggtatatccagagtcttcaggagctgcttgattttaaggacaaaagtgctgaagatgctaaaactatttatgaatttacagacacagtgataaggatcagaaaccggcacaatgatgtcattccaaccatggcccagggtgtgaccgaatacaaggagagcttcggggtggatcctgtcaccagtcaaaatgtccagtactttttggatcgattctacatgagtcgcatttcaattagaatgttactcaaccagcactctttattgtttggtggaaaaggaagcccatcttatcgaaaacacattggaagcataaatccaaactgcgatgtagtcgaagtcattaaagatggctatgaaaatgctaggcggctttgtgatttgtattatgttaactctcctgaactagaacttgaagaactaaatgcggtctcaccaggacagacaatacaagtggtttatgttccatcccatctctatcacatggtgtttgaactgttcaagaacgcaatgagggccacca

SEQ ID NO: 782 - DNA, 547 bp, Phodopus sungorus
  misc_feature (320)..(345): n is a, c, g, or t
tccgggcgctgttgaagaatgcgtccctagcaggggcgcccaagtacatcgagcacttcagcaagttctccccgtccccgctgtccatgaagcagtttctagactttggatccagcaatgcctgcgagaaaacttccttcaccttcctccggcaggagctgcccgtgcgcctggccaacatcatgaaagagattaatctgctccccgacagagtgctgggcaccccctcagtgcagctggtgcagagctggtatgtccagagcctgctggacatcatggaatttctggacaaggacccagaggaccaccgtacactaagnnnnnnnnnnnnnnnnnnnnnnnnnntccggaaccggcacaatgacgtagtgcccaccatggcacagggagtgctggagtacaaggacacctacggcgatgacccggtctccaaccagaacatccagtacttcttggaccgtttctacctcagccgtatctccatccgcaagctcatcaaccagcacaccctcatctttgatgggagtaccaacccagcccaccccaa

SEQ ID NO: 783 - DNA, 482 bp, Phodopus sungorus
gcccgtccccgctgtccatgaagcagctactggactttggttcagaaaatgcctgtgaaagaacgtctttctcttttctgcgacaagaattgcccgtgagactagccaacatcctgaaggagattgacatcctccctgagagactggtgaataccccctctgtgcagctggtgaagagctggtacatccagagcttgatggacttggtggagttccatgagaagaacccagaagatcagaaagctctatcagactttgtagacacgctcatcaaagttcgaaacagacatcacaatgtggttcctacgatggctcaaggaatccttgagtataaagacacctgcacagttgacccagctaccaatcaaaatcttcagtatttcttggaccggttttatatgaaccgcatctctactcggatgctgatgacccagcatatccttatattcagtgactcaaagacaggaaacccaagccacatt

SEQ ID NO: 784 - DNA, 1822 bp, Mesocricetus auratus
agagacaggcgctcagtaagaagtgacagctgtggggacagtatgctggccaaaggactttccttgcgctcagtgctggccaaaggctgccaacctttcttgagccctacctggcagagttcagtgctggctactggagggggagctaatatctctaccaatagccctcgtcccttcaatgagattccttcccccggtgacaatggttggctaaacctgtaccacttctggagggagaatggcacacacagaatccattaccatcacatgcagaatttccagaagtatggccccatttacagggagaagcttggcaataaggattctgtttatattctggaccctgaagatgcagcacagctctttttaagcgaaggtccctacccagaacgatatcttgtgcccccctgggtcgcctatcaccagtattacaagagacccataggggtcctgtttaagagttcagaagcttggaagaaagatagacttgtcctaaaccaggaagtgatggcacctgaagccatcaagaacttcgtgcccctgctggaaggtgtagttcaggacttcatcaacgtcttgcacagacgcatcaagcagcagaagtctggaaatttctcaggggacatcagcgatgacctgttccgctttgcctttgagtccatcaccagtgttgtatttggggagcgcctggggatgttggaggagattgtggaccctgagtcccagcggttcatcgatgccatctaccagatgttccacaccagtgtccccatgctcaacctgcctccagaactttttcgattcttcagaactaagacctggaaggagcatgcagctgcctgggatatgattttcaaaaaagctgatgattatacacagaccttctactgggacttaagacagaagcaagagttcagcaagtaccctggtgtcctttacagcctcctgggtggcaacaagctgcccttcaagaacatccaggccaacattacggagatgctggcaggaggcgtagacacgacctccatgaccctgcagtggagcctttatgagatggcacacaacttgaaggtacaggagatgctgcgggcagaggttctggctgcccggcgtcaggcccagggagacatggtcaagatggtgcagttggtcccactcctaaaagccagcatcaaggagacactgagactccaccccatctctgtgaccgtacagaggtatcttgtggatgacctggtacttcgaaattacaggattcctgccaagatgttggtgcaggtggctaactatgccatgggccgagaacccagcttcttccccaacccaaacaagtttgacccaactcgttggctggaaaaaagcaaaaataccacccacttccgttacttgagctttggctggggtgttcgtcagtgtctgggccggcggattgcagagctggagatgaccatcttcctcatcaatgtgctggagaactttagaattgaactccaaagtctccatgatgtggggaccaagttcaacctcatcctgatgcctgagaagcccatcctcttcaacctccagcctctcaagaaggaccttgggacaaccacgaacagatagggtggcactgtctgaacttcagactggagtcacatggggagatggcccagtgggggcatttgggtgggtgtctctgtatctccagaaaaacctgctcctttggggtggttcttagctctcagtggccaactgcttaggttagccaggccctcctctccttcatcctctctcctttacttaccctgaaggttaataaacacatgaactctgaaaaaaa

SEQ ID NO: 785 - DNA, 555 bp, Cricetulus griseus
  misc_feature (538)..(555): n is a, c, g, or t
gtggaaagtgttggagatattaaatcatgttgccatttattctcttttccacgctgcttcctctcatatttactgaatctgaacagcaactgtggttctgcaactcctccgatgcaactttttcctacagttactgtgatagcatgaagttccctttttcgattactgctgaaccctgtataacattgaagggaaccaatggatttttacatattaagttcatcccaaggagagacttaaaaaaattatatttcaacctctccatcaatgtcaactccatagaggtgccaactcgaaaagaaattatttgccacggatatgatgacaattattctttctgcaaagctctgaaaggagagactgtgaatacagtagtaccattttccttcaagggaatactatttcctaagggccaatacagatgtgttgcagaagccattgtaggggataatgaagaaaagttattttgtttgaattttaccatcattcaccaccctaatgtcaattagaataaattaagaatatatgtttttatttnnnnnnnnnnnnnnnnnn

SEQ ID NO: 786 - DNA, 311 bp, Mesocricetus auratus
cggggcagggagtccccttcccatcacccctgttaatgccacctgtgccacacgccacccatgccatggcaacctcatgagccagatcaagaaccaactggcacagctgaatggcagcgccggccccctcttcatttcctattacacagctcaaggggagccgttccccaacaacgtggacaagctgtgtgggcccaacatgacagatttcccacctttccatcccaacgggacagagaagaccaagttggtggagctgtatcggatagtcgcatacctgagtgcttccctgggcaacgtcacccggaatt

SEQ ID NO: 787 - DNA, 2521 bp, Cricetulus griseus
  misc_feature (642)..(676): n is a, c, g, or t
  misc_feature (1092)..(1113): n is a, c, g, or t
agaatgcccctggcgctgctcctgctcttgcccatcctgggttctgcaaaagctcaggttaatccagccatatgtcgctatcctctgggcatgtcaggaggccacattccagatgaggacataacagcttcaagtcagtggtcagaatccacggctgccagatatgggaggctggactctgaagaaggagatggagcctggtgtcccgagattccagtgcaacccgatgacctgaaagaatttctgcagattgacttacgtaccctccactttatcactcttgtggggacccagggacgtcatgcggggggtcatggcattgaatatgcacccatgtacaagatcaactatagtcgagatggcactcgctggatctcctggcgtaatcggcatggaaagcaggtgctagatgggaacagtaacccttatgatgtcttcctgaaggacctggagccacccattgtagccagatttgttcgccttatcccagtcactgaccactccatgaatgtgtgcatgagggttgagctttatggttgtgtctggctagatggcttggtgtcttacaatgctccagctgggcagcagtttgtactccctggaggctccatcatttatctgaatgattctgtctatgatggnnnnnnnnnnnnnnnnnnnnnnnnnnnnnnnnnnnagttgactgatggggtgtctggcctggatgattttacccagacccatgaataccacgtgtggcctggctatgactacgtgggttggcggaatgagagtgctaccaatggctacattgagatcatgtttgaatttgaccgaatcatgaactttactactatgaaggtccactgcaacaacatgtttgctaaaggtgtgaagatctttaaggaggtccagtgctacttccgctctgaagccagtgagtgggaacctactgccgtctcctttccccttgttctggatgacgtgaaccccagtgctcggtttgtcacagtgcctctccaggaccgaatggctagtgccatcaaatgccagtaccattttgccgacacatggatgatgttcagcgagatcactttccaatcagatgctgcnnnnnnnnnnnnnnnnnnnnnnttgcccacctctcctatggcacccacaacctatgatcccatgcttaaagttgatgatagcaacactcggatcctgattggctgcttggttgccatcatcttcatcctgctggctatcatcgtcatcatcctgtggaggcagttctggcagaagatgctggagaaggcttctcggaggatgctggatgatgaaatgacagtcagcctttccctgcccagcgagtccagcatgttcaataacaaccgctcctcatcaccaagtgaacaggagtccaactctacttatcatcgaatctttccccttcgccctgattaccaggagccatctagactgatcagaaaactcccagaatttgctccaggggaggaggaatcaggctgcagtagtgttgtgaagccagcccagcccaatggacctgagggtgtgccccactatgcagaagctgacatagtgaatctccagggagtgacaggtggcaacacctactcagtgcctgctgtcaccatggacctgctctcgggaaaagatgtggctgtggaagagttccccaggaaactgttaactttcaaggagaagatgggagaaggccagtttggggaggttcatctatgtgaagtggagggaatggaaaaattcatagacaaagattttgccctatatgtcagtgccaaccagcctgtcctcgtggctgtgaagatgctccgagcagatgccaacaagaatgccaggaatgattttcttaaggagataaagatcatgtctcggctcaaggacccaaacatcatccgtctcttagtcgtgtgtatcaccgatgacccactctgcatgatcacagaatacatggaaaatggagatctcaatcagtttctttcccgccacgagcctctgagttcttgttccagcaatgccacggtcagttatgtcaacctgaagtttatggctacccagattgcctctggtatgaagtatctctcatcccttaactttgtccaccgagatctggccactcgaaactgcttagcgggcaagaactacaccatcaagatagctgactttggaatgagcagaaacctgtacagtggtgactactaccggatccagggccgggcagtgctccctatccgctggatgtcctgggaaagcatcttgctaggcaaattcaccacagcaggtgatgtgtgggcctttggggtgactctgtgggaaactttcaccttttgccaggagcagccctattcccagctgtcagatgagcaggttattgagaatactggagagttcttccgagaccaagggaggcagacttatctccctcaaccagctatttgccccgactctgtgtataagctgatgctcagctgttggagaagagagaccaagcaccggccatcattccaagaaatacacc

SEQ ID NO: 788 - DNA, 2318 bp, Mesocricetus auratus
  misc_feature (2089)..(2121): n is a, c, g, or t
gcagatgccaacatggcaacggttggggttggcggatccaccgcggcgaccgggccaggggccgtgtccgctggcgcgctggagcctgggtccgccacagcggctcaccggcgcctcaagtacatatccttagctgtgctggtggtccagaacgcctccctcatccttagcatccgatatgctcgcacactgcctggtgaccgcttctttgccaccaccgctgtggtcatggctgaagtgctcaaaggtgtcacctgtctcctgctgctcttcgcccagaagaggggtaatgtgaagcacctggctctcttcctccacgaggctgtgctggtgcagtatgtggacacactgaagctcgccgtgccctctctcatctataccttgcagaataacctccagtatgttgccatctccaacctgccagccgccactttccaggtgacctatcagctcaagatcctgactacagcgttgttctccgtgctcatgttgaaccgcagcctctcacgcctgcagtgggcctccctgttgctgctcttcaccggtgtggcgattgtccaggcacagcaggctggtggcggtggcccacggccactagatcagaatcccggggcaggactagcagctgtggtggcctcctgtctctcttcaggattcgcaggggtatactttgagaagatcctcaaaggcagctcaggttccgtgtggctgcggaacctacagctaggcctctttggcacagcgctgggcctggtggggctctggtgggctgagggcactgctgtggcccgtcgaggcttcttctttgggtacacacctgctgtgtggggtgtggtactaaaccaagcctttggcgggctattggtggccgttgttgtcaagtatgctgacaacatcctcaagggctttgccacctccctgtcgattgtgctgtccactgttgcctccattcgcctctttggcttccacctggacccattatttgccctgggcgctgggctcgtcattggtgccgtctacctctacagccttccccgaggtgcagtccaagccataacttctgcttctgcctctgcctccgggccctgcattcaccagcagcctcctgggcagccaccaccaccgcagctgtcttctcgaggagacctcatcacggagcccttcctgccaaagtcagtgctggtgaagtgagagctggtggtggttgggagagctggggcggggggtgggggttgggtttgaggggggttagcttctgctggtccagaagttgttgccaggcctgacttgtggggttggagggcttttttttttctcccacacttctagagggatatggaagtagggctgaatgtcacatgaacccttcctggtagatggactcccctctcctgaaggagctgcttcctttgccccaggctatcctctttgggaacagggttggggtaccgctattcccggctttccctcgtgaccctctgctggaaatgtcctgtctctcatgcctgggacagttcatcccagccatcctacagactggacaaaagcccagcagttcttcagtaacgactaatgactactcgtggggttccatttcctattgtatgaggccttctctcgtgcaccattaccctggatcatgtcaacagcttgggctctgctgtggctttggggcagtttccctggtacagagacccttgaagatcggccttttgtaagtgcctggagtgaggacagaggcacaagctgagaattgggcagcagttcatcttggggaaggtgcaataagcaccgttcactttttaatagttggggcatttgtgataatcagattaatgatccagagtgttgggaaaatgggaaggggagatctttgaagtgactgaatcttgtgtaattgaagagacagaaatgaaggattatcttctgggacatccagagaggaaaaataaagctgccaatgcactttcacagccccattggctgtttaaacacccttacttcatggcgggtatcagaattgatgaattgtggaacctgcacccctgcgctccccaaagcttactaactccttaactgtatccaagannnnnnnnnnnnnnnnnnnnnnnnnnnnnnnnngcgtgtgtatgtgtgtgtgcgcgcacacataaatacacgcatggaaggtgcctgggctgtctttgctatatgtaaataggaccattggatctttatttttgattaatttgttctgatttgggggggtgttgttttctaaggaactgtaatgaacatgtcaggatacccaatgccaaataaagatgttgtatttattt

SEQ ID NO: 789 - DNA, 2470 bp, Cricetulus longicaudatus
ggccgcgccgcgtcgaacgtcacgccttcgcgccgaggccccgccccgggtgaggtaaaatggccgcagccttggcggcgagtggaatgcttcccacagcgggcattataattgattaggtttctgatatccagatctgttcctaagacgtaaattgacaagaccacatttctgtgcaaacattgaggagctagttggcaacatgaaggtcttctgcggtcgtgccaatccaaccacaggatccctggaatggctggaggaggatgaacactatgattaccatcaggaaattgccaggccagaagagggcatcagattccattggagatggctgtgagccaccatgtggttgctggtaattgaactttatctggaagagctgccagtgctcctaacctctgaatcatctctccagctcctatctcagaattgattaaggaaattcttcaggtcatcctatgcggatatgctacatgacaaagacagaaatataaaatattaccagggtatccgggcagctgtgagtagggtgaaagacagaggacagaaggccttggttcttgacatcggcacgggcacaggtctcttgtcgatgatggcagttactgcaggtgctgacttctgctatgctattgaggtttttaagccaatggctgatgctgctgtgaagattgtggagaaaaatggcttcagtgataagattaaagttattaacaaacattccactgaggtgacggttggaccagatggtgacttgccatgtcgtgctaacatcctggtcacagagctgtttgacacggaactgattggggagggggcactgccctcttatgagcatgcgcatagacatcttgtgcaggaaaattgtgaagcagtgcctcacaaagcaactgtctatgcccagctggtggagtccagaaggatgtggtcatggaacaagctgtttcctgtccatgttcagaccagtcttggagagcaggttatcgtccctccctcagaactggagaggtgtcctggtgcaccttcagtctatgacattcagctgaatcaggtgccatctactgacttcactgccctcagtgatgtactaccaatgttcagtgtggacttcagcaagcaagtcagtagctcagcagcctgccatagcaagcagtttgtacctctggcatctggccaagcacaggtggttctgtcctggtgggacattgaaatggaccctgaggggaagatcacatgtaccatggcacccttttgggcacagacaaacccacaggagcttcagtggcgggaccactggatgcagtgtgtatacttcttgccacaggaggagcccgttgttcagggctcaccccgatgcctggtagcccaccatgacgactactgtgtgtggtacagccttcagaggaccagcgctgatgagaatgaggaagtttaccaagtgcgccctgtgtgtgattgtcaggctcacttgctctggaatcggcctcggtttggagagattaatgatcaggacagaactgatcagtatgcccaagccctgaggactgtgctgatgccaggcaccatctgtctttgtgtcagtgatggcagtctgctctctctgctggcccatcaccttggggcggagcaggtgtttacagttgagagttcggcagcttcctatagactgatgaaaaggatcttcaaggctaaccacttggaagataaagttagtatcatcaagaaacggcctgagttgttaacatctgcagacctggagggtaagaaggtctccctcctcctgggtgaacccttcttcgccaccagcctgctgccatggcacaacctatacttctggtatgcccgtacttctgtggaccagcacctggaacctggagctgtggtgatgccccaggctgcttcactgtatgctatgatcgtggagttcagggatttgtggcggatccggagcccttgtggtgactgcgaaggttttgacgtgcacatcatggatgatatgattaagcactccctggattttcgagagagcagagaggcagaaccccacccattgtgggagtacccctgccgcagcctttctgagcctcagcagattctgacctttgatttccagcagcctgtgccccagaagcctgtgcatgctgagggctccatggaactgagaagacctgggaagagccatggtgctgtcctgtggatggaatatcatctgactccagacagcacagtcagcaccggcctcatgaatcctttggaagacaagggggactgctgctggaacccccactgcaagcaagctgtgtacttcctcagcaccacagtggatcccagagtgcctctggatggccctcagtctgtcagctatgctgtggagtttcatcccctcactggagacatcaccatggagtttaggcttgcagacaccttgaactaattccctcattgagaaattaaatggccaataggctgc

SEQ ID NO: 790 - DNA, 471 bp, Mesocricetus auratus
cgcctactatcctgctcttacctcttggccatccctgctaggagatatgctggctgatgccattaactgcttaggattcacatgggcttccagtccagcgtgcacagagctggagatgagcgtcatggactggctggtgaagatgctggggctccctgagtacttcttgcatcaccatcccggcagccaggggggaggcgtcttgcagagcactgtcagcgaatccactttgattgccctgttggctgcaaggaagaacaaaatcctagaaatgcaacagattgagcccgatgctgacgagtcctctctgaatgctcgtctcattgcctatgcctctgaccaggctcactcctcagtggagaaggctggtttgatttcccttgtgaagatgagatttctgcctgtggacgacaacttctcactccgaggagaagctcttcagagagccatcgaggaagacaagcaacaggg

SEQ ID NO: 791 - DNA, 387 bp, Mesocricetus auratus
ccttcctctcctactacaccagagtccttcctcctgtggctgatgactgcccaactcccttgggtgtgaaaggaaataaggagcttcctgattcgaaagaagttctggaaaaagttcttctcaggagaaagttcatccctgatccccaaggcacgaatatgatgtttgcattctttgcccagcactttactcatcagtttttcaagacagatcagaaacgaggacctggcttcacccgaggactgggccatggggtggacttgaaccacatttacggtgaaaccctagagagacaacataaactgcgccttttcaaggatggaaaattgaagtatcaggtcattggtggagaggtgtatcctcccacagtcaatgacactcaggtag

SEQ ID NO: 792 - DNA, 1185 bp, Cricetulus griseus
atggcgctgctggacctggcccaggagggaatggccttgttcggcttcgtgctcttcgtggtgctgtggctgatgcatttcatgtccatcatctacacccggttacacctcaacaagaaggcaacagacaagcagccgtatagcaagctccctggtgtctctcttctgaaaccattgaagggggtggatcctaacctaatcaacaacttggagacattctttgaactggattatcccaaatatgaagtactcctttgtgtacaagatcatgatgatccagccattgatgtatgtaagaaactgcttggaaaatacccgaatgttgatgctagactatttataggtggcaaaaaggttggcattaatcctaaaattaataatttgatgccaggatatgaagttgcaaaatatgatctcatatggatttgtgatagtggaataagagtcattccagatacattaactgacatggtcaatcaaatgacggagaaggtgggcttggttcatgggctgccttatgtagcggacagacagggctttgctgccacattggaacaggtatattttggaacttcacacccaagatcctatatctctgccaatgtcactggcttcaaatgtgtgacgggaatgtcttgtttaatgaggaaggatgtgctagatcaggccggagggctgatagcctttgctcagtacattgctgaagattactttatggccaaagcaatagctgaccgaggttggcggtttgcaatgtctactcaagttgccatgcaaaactctggttcatactcaatttctcagtttcaatccagaatgatcaggtggaccaaattgagaattaacatgcttcctgctacaataatttgtgagccaatttcagaatgctttgttgccagtttaattattgggtgggcagcccaccatgtgttcagatgggatatcatggtcttcttcatgtgccattgcctagcatggtttatatttgactacattcaactaaggggtgtccagggtggcacactgtgtttttcaaaacttgattatgctgtggcttggttcatccgagaatccatgacaatatacattttcttgtcggcattatgggaccctactataagctggagaactggtcgctacaggttgcgttgtggaggaacagcagaggaaatcctagatgtataa

SEQ ID NO: 793 - DNA, 2454 bp, Mesocricetus auratus
  misc_feature (412)..(428): n is a, c, g, or t
  misc_feature (1738)..(1799): n is a, c, g, or t
  misc_feature (1840)..(1840): n is a, c, g, or t
gacgacatagactggttacatagccgcaggggcgtgtgcaaggtagatctttacagcccaaaaggacaacaagatcaggaccgaaaagtgatatgctttgtggatgtgtccaccctgaatgtggaagataaagattccaagggtgctgctggttccaggtctgaaggcgaattagatctggagaatctggaagaaaaagagattattgtgatcaaggacactgaaaaacaagaccagtctaagacggagggttccgtgtgccttttcaaacaagctccctccgatcccataagtgtcctcaattggctcctcaatgatctccagaagtatgccttggggttccaacatgcattaagcccctcagcctctagctgtaaacataaagtgggagacctagagggtgactatcacnnnnnnnnnnnnnnnnnctgctacagtgtgtacgctgatcaactaaatatggattttttgaacaaaggacctcaaagcctacgcctagaaatggcggcatcaaaaaacaccaacaataaccaaagtccctcaaatcctgcagccaaatctcctagcaatcaaaggtcagttgccacctcagatgcagaatgctctatggacgatctttccttctatgtcaaccgattgtcttctctggtaattcaaatggcacgaaaagaaatcaaggacaaattggaaggtggaagcaaatgcctccatcattcaatatatgcatccccaggagaaaaggggaaaaccagtccccgaagcgctgtcagcaagattgcttctgagatggcccatgaagctgtagaactgacctcagcagaaatgcgcggcaatggggaggaatgcagggatggccggaaaacctttctatatagcgaattatctaacaagaacaagtgtggagagaagcagatgtgcccaaaagatagcaaggaatttgcagattccatcagcaaggggctcatggtttatgcaaatcaggtggcatctgacatgatggtctctgttatgaaaactttgaaagtgcacagctgtgggaagccaattccagcttgtgtggtcctgaagagggtactattaaagcacaccaaggaaattgtgtctgatttgattgactcatgcatgaagaacttgcataacataacaggggtcctgatgacagactcagactttgtttctgctgtcaagagaaatcttttcaatcatggaaaacaaaatgcagcggacatcatggaggccatgctaaagcgtttggtcagtgctcttcttggtgagaagaaggagactaaatctcagagtctggcatatgcaaccctaaaagctggaactcatgatccaaaatgcaagaatcagagtcttgagttctcagctatgaaagctgagatgaaaggaaaagataaatgcaaagtgaaaacagatccatgctgcaagtcactgacaagtgctgaaaaagtcggcgaacatatcctcaaagagagcctcactatgtggaaccagaagcaaggaaaccagggcagggtgactaccaacaaagtgtgtactactaaagatgagaagagagaaaagctcagtccttctacagattcactggccaaagatctgattgtctctgcccttatgctgattcaataccatctgacccagcaagcgaagggcaaagatatatgcgaagatgaatgccctggttcctccatgggatatatgtcccaaagtacacaatatgagaagtgtggaggtnnnnnnnnnnnnnnnnnnnnnnnnnnnnnnnnnnnnnnnnnnnnnnnnnnnnnnnnnnnnnncgcatgtgcgaaggaaactcaactggattcccacaagctgnatatgtcaaatatggttctgtcactgattcagaaacttcttagcgagagccctttcagctgtgatgatctacctgaaggtgaaaataagcgttctgatcctagatcaagcaaaactggtcccatggccaagagacctgaagatcaatgcccagacagttcagaacaggacttcatcagtgggatgaagcaaatgaaccgccaatttatagaccaactggtagaatccgtgatgaaactgtgcctgatcatggctaagtatagcaacaatggagcagccctggcagagctggaagaacaagcagccatggcaggtggtagctccagatgcggccgtgaaggtgcaatgtcacagtatcaagatgctcctggccctgaagttattgtcaacaatcagtgctctacaagtaacttgcagaagcagctgcaggctgtcctgcaatggattgcagcctctcagtttaacgtgcccatgctctacttcatgggagatgacgatggacaactagagaagctccctgaagtttcagccaaggcagcagagaaagggtacagtgtcggcgatcttcttcaggaggtcatgaagttcgccaaagaacgacaaatggatgaagcc

SEQ ID NO: 794 - DNA, 2794 bp, Cricetulus griseus
  misc_feature (1765)..(1782): n is a, c, g, or t
  misc_feature (2276)..(2310): n is a, c, g, or t
gaaaggctgcctttgggcacgtgtgttgcttcctctggctccggcgcctttccccgtccggtgggtcttatatgtggtataaggcgtaaggatgaaggcgagaagaaataaaaagcaggtcccaagctttcgaaagttgataaaaactagtaaagtgaaacttgaatacaaactaaaaaataagcaatttaaacaacaaagtactatcaagaagtaccgaaaagagcagaggaaactaaggcaagctgtaaaagatgctgtgtctaaaaaacccttcccattggaggacccaaagagcaaacgaccagttaaagggatggagagggaagaggaggacgaggaagaccaagcccttccgttagatatgatggatgacgatgacttacagctgatgaaagatttgggacaaaaagcatcttttctcacaagagatctttcttctagtgagccagttcatatcaagaaacgaaagcatgagagtgtgatagataaatatgaaaaaatgccaagaaccctgcaaactgcaccagagaaggagttgattcatttgctgcccatcaaggataaaagtgggataatcccacagacgagggagaagccagtcacggacatccagcaagaagaagaggatgaagaagagctggaagttgaggaagaggtcgttgagaaccccattcaagagctcaccatagaagaacatttaattgtgagaaagaagaaactacaggaaaagaaaatacagattgcaaccttggcatcttccatactatcagatccggaaagcaatattaaaaaactgaaagagttgcgttccatgctaatggagcaggaccctgatgtggctgtcactgttcggaagttggtgataatttcactgatggagctatttaaggacatcactccctcatataaaatccggcctctaactgaagcagaaaaatctaccaagattcgtaaagaaacccagaagttaagagaatttgaagaaggcctggttagccaatacaaattttatttggaaaatctggagcaaatagttaaagactggaagcaaaggaagttgaagaagagcaatgtggtatccttaaaggcctacaaagggttggctgaagtggctgtgaaaagcctgtgtgagctgctggtggccctgccccattttaactttcacaacaacatcattgtcctgattgtccccttgatgaacgatgggtcaaaattggtatctgaaatgtgttgtgaagcagtaaagaaactctttaaacaagataaattaggccaagcttctcttggtgtaattaaagtgatttctggttttgtaaagggcagaaattatgaagttaggccagagatgctaaaaacatttttatgcctgcgaatcaaggaagtagaagtgaaaaaagacacagaggacattaacaaaccaaaaaagttcatgactttcaaggaaaagagaaaaactctatcaagaatgcaaagaaagtggaagaaagcagaggagaaactggagcgggaacttcgggaagctgaagcttcggagagcaccgagagaaagctgaagctgcacacagagactctgaacatagtgtttgtgacctacttcagaatattgaagaaggcccagaggtcacctcttctgccagcggttctagaaggtcttgccaagtttgcacatcttataaatgtggaattttttgatgatttattagtggttcttcataccctcattgagtctggtgacctgagttatcaagaaagtcttcactgnnnnnnnnnnnnnnnnnntattctttctgggcaaggtgatgttctaaatatcgacccgatgaaattctatacacatctctacaaaacgttgtttaaattacatgcaggtgctaccaacgatggtattgagattgtactccactgccttgatgtcatgctaagcaagcgcagaaagcaggtttctcatcagcgagctcttgccttcatcaagcgcctttgtacgcttgctctgcaggttcttccaaattcaagcattggccttttagcaactaccagaatactgatgcatacttttcccagaacggatctgttgcttgataacgagtctcagggcagtggggtgttcctgcctgagctggaggagccagagtactgtaacgcccagaacaccgcgttgtgggagctgcatgcacttcggagacattaccatcctgttgtgcaaagatttgcagttcacctacttgctggggcaccgtctgaaggctccgaggccctcaagcctgagctgagcnnnnnnnnnnnnnnnnnnnnnnnnnnnnnnnnnnncatggcagcaatgacattcaaccctcctgttgaaccttcaaactccaaaaagaaggataaacttttacaaggggactcatttttgaatgaagatttaaatcaactaatcaaaagatattgcaatgaagttactactgagataccactggatttcaccaaatgtttgaaaacatctgtacagtagtacaaaggtgaagagtcagtggactgtcttatatatctgtatgtgtctgtgcagctacacgagggcctttttctttgtgttgaaggaaaacttcctaaggatgactataggatgactgaagcagagcccacagaagacactgctgttggtttgctgtttatggcttgcttttatgtacagccccggccaacttgctcaggagtggcactgtccactatgggctgggccctaccacattagtcactaattctataaatgccctacagacatgcccacaggcaagtctgatggaggcagcaa

SEQ ID NO: 795 - DNA, 4184 bp, Cricetulus griseus
  misc_feature (1319)..(1366): n is a, c, g, or t
  misc_feature (1681)..(1702): n is a, c, g, or t
  misc_feature (4164)..(4184): n is a, c, g, or t
tgctgagtggcgctgccatcgtgatgaaccggacgagccccgactcggagcggcctccgggttccgagcccgtgtgggagcggccctggtcggtggaggagatccgccgcagcagccagaactggtcgctggcggccgatgcaggcctactacagtttctacaggaattctcccagcagactatctccaggacccatgaaatcaagaaacaggtggatggattaattcaggagaccaaagctacacattgtcgtctgcacaatgtcttcaatgacttcctcatgctttctaatacccagttcattgagaaccgggtgtacgacgaagaagtggaggaacaggccctcaaggctgaggcagaaaaatcagaacaggagaagactcgggaacagaaagaagtagacctgatccctaaggtccgggaggctgtgaactatgggttacaggtgctggatagtgccttcgagcaacttgacataaaagcggggaactcagactctgaggaagaagatgccaatgagcgggtggaactgatccttgaaccaaaggatctctacattgaccgccctttgccctatctcattgggtcaaagctcttcatggaacaggaagatgtggggcttggagaactgtccagtgaagaaggctctgtaggcagcgaccggggaagtattgtggacagtgaagaagagaaggaagaggaggaatcagatgaagattttgccagccgtagtgacaatgatcaaaaccagcacaccacccggatgagtgatgaggaagaggatgatgatggtgacctgtttgctgactctgagaaggagggggatgatattgaggacattgaggaaaataccaagtctaaaagacctacatcttttgctgatgaactggcagctcggatcaaaggagatatgtcaaatcagctcaaagaggaacagatagcagatggaaagcctcagaagacaatgaaggagaagaaggaaaagagaacacctccagacgatgaagaggacatcttgtttccaccccccaagttgactgatgaagacttctcaccgtttggctctagaggtggtctcttcagtggacagggacttttcgacgatgaagatgagagtgacctcttcagggaaacctcccgggatcggccagcacaagctcctgttagtgaagaatcttcatctcccaaacctggaaagaaaatcccagcaggggctgtttctgtatttttagacacttctgccccatccctgaaggagttccagaaacatgagcagcccactccagggaagaacccacatctgccaactcctgctggnnnnnnnnnnnnnnnnnnnnnnnnnnnnnnnnnnnnnnnnnnnnnnnnttgtaacaaacctcccaagactgacaaagtcaagtccacctccattatctttgatgatgaggaaggagatctgttcagagaaaaaccagcacctttgccagtggcttctgtgagtcaggcagatgaaaatacaacacgggcagataaaacgatcaccttaccttccagcaaaaacccgaagctagtgtcagaaacaaagactcaaaaaggcttgttctcagatgaagaggactctgaggatttgttttcttctcaaaattcaagtaagtcaaaaagtgcatcccttctgtccagccagctccccacatcaggctnnnnnnnnnnnnnnnnnnnnnnagaggataatctttttgggagtgcaccagctaagaagcaggtttcatctcagcaaccccagagtcaagagaaaccaaaaccttcagaacagcccaaaaagaaagcatctgccttgttgttcagcagcgatgaggaggaccagtggaatattactgattcacataccaagttagcaactgacaggaagtccaaaggagaactgtgggactcagggaccatccaaggccaagaagtgaaggctgtgaaaaagaccaacctatttgaggaggacgatgatgaagctgatctgtttgcaattgcgaaggacagccaaaagaagactcagagaacgtccctcctctttgaagatgatgatgatagcggaagctctctgtttggctttcctcctgcatctgttcctcctgcaacaatgaaaaaagagagcatctctaaggtgccgtcattgtttagtgatgaggaggagaatgaggtaccatcccgtgtgaaatctgtggatgtgaaggttggtaatggcaaagaggctgatgtggctaaagtgacggagaaggaaggacttttgactgcatctgatcaggaagcagctggaccttctgatttattttcttcatctccattggacaaaggaaccaagggtagaaccaaaaccgtccttagtttgtttgatgaggaagaggataaagtggaagatcaaagcaacacccatgtgtcgaagaatgatgcagaaaagggtctcaaaactgatggacgccccaagagcacaggcgtcttccaggatgaagagctgcttttcagccacaagctacaaaaggacaatgacccggatgttgatctttttgctggcaccaaaaaaaccagggtgtcagtgccacttgatgggagcctgtttggagatgatgaagattatgaccttttcagctctgccaagactcagcctgtggtaccagaaaaaaagggagcactgaaaaaagatcggcctgtttctctaaagaacgaggaagctcccgagtctactgaaggtagcaaagagaaaagcttatggaaagcagaaacaccacaggattcttcaggtctcactccatttaaaagcagagagccatccagtcggatcgggaaaatacaagcaaatttagcaattaatccagcagccttgctgcccacggcagctctgcagatcccaggaacaaagcctgctttatgtgaattagcttttccttcatctgaacctggaaggagccatggcccggaaagcgtgccgactcttgctgggagtgaggaggctggtgtgagcttcgatcttccagcccaggcagataccttacacagtgcaaacaagagtcgtgttaaagtgagaggaaagcgtaggccacagacccgcgctgctaggcggctggctgcccaggagtccagtgagagtgaggatatgagtgtctccagaggacctgttgcacagttggccagtagtcccatcttaccaaatggccatcaacctcatctgcagcccaggatggccagtggagagatcagctctgagaaagccatggccccagctgctccaccttgggaaagtggtcctgcattgtctgcagtggacagaagcttttttgtggcgtctctgcctcagactggaaatgaggctgacctttttgattctggggacatctttccaaagagcataggatcacagtccatggagggaacaaaagtcaaggcagcagagaccccagcccacttgtcaggaggaagtaaagagaagagcctcgtgttccctgctctcagtgaggccagcagtactgacgatctcttccagactgtcaaaccaagaccagcaaagaaaaggaacccttttcccctccttgaagatgaggatgatctctttgcagatcggaaaggaaaaaagaatgagttgaaatctgacagccatcaggacattatatcaaaaacacaagacatttttgaggatgatatatttgctacggaagctgtgaaaccttttcaaaaaaagagagagaaggagagaactttggaacccaacttatttgatgataatatcgatatctttgctgacttaaatgtaaaacccaaagaaaagtccaaaaagaaagtggaggccaagtctgtgtttgatgatgacacagatgatattttctcctctggtctccaggctaagaagtccaaacccaaaagccaatctgcagaggccacatctgaactaagatctgatcacaaagtgtccaacatttttgatgaccccctgaatgcctttggaagccagtagagcatatggggtcttcatagttcatcttaccattctatttccagttagtgatgctgtcttctacactctgtcttcactggattccaaaagcaaatactgaaacaactagttcaactgttactcaatgtaactaatatttttctgcactgactttatgcttaaggttacaaataaaatacatgcttcnnnnnnnnnnnnnnnnnnnnn

SEQ ID NO: 796 - DNA, 156 bp, Cricetulus griseus
ccagaaaaggtgttggttgatatagacagcaggacggtggccatggaagtcggaatccgctaaggagtgtgtaacaactcacctgccgaatcaactagccctgaaaatggatggcgctgaagcgtcgggcccatacccggccgtcgccggcagtca

SEQ ID NO: 797 - DNA, 266 bp, Cricetulus griseus
gacttccatggccaccgtcctgctgtctatatcgaccaacaccttttctggggtctgatgagcgtcggcatcgggcgccttaacccggcgttcggttcatcccgcagcgccagttctgcttaccaaaagtggcccactaggcactcgcattccacgcccggctccacgccagcgagccgggcttcttacccatttaaagtttgagaataggttgagatcgtttcggccccaagacctctaatcattcactttaccggataaaactg

SEQ ID NO: 798 - DNA, 507 bp, Mesocricetus auratus
gagcaatgcccgccagtgccatgccactcctgttgatcatgggcctccttgtcttgatttggaattgtgagagcacatcttcaataccaggtcctggctactgtctgggaattgggcccctcatttcccatggcaggttcttgtggatggggattggaaatgcctgcaactactataataagatgtacggggagttcatgagagtctggatcagcggagaggagacactcattatcagcaagtcctcaagtatgttccatgtaatgaaacacagtaactacatctccagatttggcagcaaacgtggactgcagtgcatcggaatgcatgagaatggcatcatatttaacaataatccagacctttggaaaacaattcgccctttctttatgaaagctctgacaggccctggtctggttcggatggtaacagtttgtaaggagtccatcaagcagcatttggacaggctggatgaagtcaccgacaactcaggctccgtggacgtgc

SEQ ID NO: 799 - DNA, 771 bp, Mesocricetus auratus
  misc_feature (277)..(295): n is a, c, g, or t
  misc_feature (672)..(686): n is a, c, g, or t
atggaagggaagtggttgctgtgtatgttactggtgcttggaactgctattgttgaggctcatggtggacatgatgatgacatgattgatattgaagatgatcttgatgatgttattgaagaggtagaagattcgaaatcgaaatcagattccagtactcctccatctccaaaggtcacctacaaagctccagttccaacagggggagtttattttgctgactcctttgatagagggtctctatcagggtggattttatctaaagccaaaaaagatnnnnnnnnnnnnnnnnnnnccaaatatgatggaaagtgggaggtagatgaaatgaaggacacaaagcttccaggtgataaaggacttgtactgatgtctcgagccaagcatcatgccatctctgctaaactgaacaagcccttcctgtttgacaccaagcctctcatcgttcagtatgaggttaattttcagaatggaatagaatgtggtggtgcctatgtgaagctgctttccaagacctcagaactcaacttggatcaattccacgacaagactccccagccagatgtgaaggaagaagatgggaaggaagaagagaagaacaagggggatgaagaggaagaaggagaagagaagcttgaagagaaacagaaaagtgatgctgaagatgatggnnnnnnnnnnnnnnnagatgaggaagatagaaaacctactgcagaggaggatgaaatcttgaacagatcaccaagaaacagaaagccacgaagagagtga

SEQ ID NO: 800 - DNA, 2457 bp, Cricetulus griseus
  misc_feature (1154)..(1170): n is a, c, g, or t
  misc_feature (2152)..(2208): n is a, c, g, or t
cttttcctgaccactctggtgcccctcgtcctggcgccccgacctcctgaggaaccgggctctggctcccacccgcgacttgagaagcttgattctttgctctcagactacgatatcctctctttgtctaatatccagcagcactctgtaaggaaaagggacctacagtctgcgacgcacttagaaacactgctaactttttcagctttgaaaaggcattttaaattatacctgacatcaagtactgaacgcttttcacaaaacttcagagttgtggtggtggatgggaaagaagaaagtgagtacagtgtaaaatggcaggacttcttcagtggacacgtggttggtgagcctgactctagggttctagcccacataggagatgatgatgttacagtaagaatcaacacagatggggcagagtataacatagagccactttggaggtttgtcaatgacactaaagataaaagaatgttagtttataagtctgaagatatcaaggatgtttcacgtttgcaatctccaaaagtgtgtggctatttaaaagcggatagtgaagagttgcttccagaagggctcatagacagacagccatctgaagagtttgttcgtcgagtgaagagacgagctgaacctaatcccctgaagaatacttgtaaattactggtggtagcagatcatcgattttataaatacatgggccgaggagaagagagcaccacgaccaattacttaatagagctaattgaccgagtagatgacatataccggaacacttcatgggataatgcaggatttaaaggttatggaatacagatagaacagattcgaattctcaagtctccacaagaggtaaaacctggtgaaagacacttcaatatggcaaaaagttacccaaacgaagaaaaagatgcttgggatgtgaagatgttgctagagcaatttagctttgatatagctgaagaagcatctaaagtctgcctggctcatcttttcacataccaggattttgatatgggaactcttggcttagcttacgtgggttctcccagagcaaacagccatggaggggtttgcccaaaggcttactacagcccaggtgggaagaaaaacatctatttgaatagtggtctgactagtacaaaaaattnnnnnnnnnnnnnnnnnacaaaggaagctgacctggttacaactcatgaattgggacacaattttggagcagaacatgatcctgatgggctagcagaatgtgccccaaatgaggaccagggaggaaagtacgttatgtatcccatagctgtgagtggtgatcacgagaacaataagatgttttcaaactgtagtaaacagtccatctacaagaccatagaaagtaaggctcaagagtgcttccaggagcgaagcaacaaggtctgcggcaactccagggtggatgaaggagaagagtgtgacccaggcatcatgtacctgaacaacgacacctgctgcaatagcgactgcactctgaagccaggtgtgcagtgcagtgataggaacagtccttgctgtaaaaattgtcagtttgagacggctcagaagaagtgccaggaggctattaatgctacttgcaaaggcgagtcttactgcacagggaatagcagtgagtgccccccaccgggagatgctgaagatgacactgtgtgcttggacctcggcaagtgcaaagctgggaaatgcatcccgttctgcaagagagagcaggagctggagtcttgtgcgtgtgctgacaccgacaactcatgcaaggtgtgctgcaggaacctttccggcccgtgtgtgccctatgtcgatgcagagcaaaagaacttatttttgaggaaagggaagccctgtacagtagggttttgtgacatgaacggcaaatgtgaaaaacgagttcaggatgtaattgagcgattttgggatttcattgaccaattgagcatcaacacttttgggaagtttttggcagacaacatcgtagggtccgtcctggttttctccttgatattctggattccattcagcattcttgtccactgtgtggataagaaactggacaagcagtatgaatccctgtctctgtttcatcacagtaacattgagatgctgagcagcatggattcggctnnnnnnnnnnnnnnnnnnnnnnnnnnnnnnnnnnnnnnnnnnnnnnnnnnnnnnnnnctgcagccagtctccatgatgccgccagtgtctgcggctccaaaactggaccaccagaggatggacaccatccaggaagaccctagcacagactcgcatgtggacgacgatggctttgagaaggacccctttcccaacagcagtgcagctgctaagtcttttgaggatctcacagaccaccccgtcaccaggagtgaaaaggcggcctccttcaagctgcagcgtcagagccgagtcgacagcaaagag

SEQ ID NO: 801 - DNA, 306 bp, Mesocricetus auratus
ttggtatgaagcgagatcactagaacacaccttgcctgggagcagagagacgctgaaaaggaagctgagtgggggcagctgtgccagccctgtcactagtccgagttcaaagagggatgctcacttctgcgcagtttgcagcgattatgcatctgggtatcactatggcgtctggtcgtgcgaaggatgtaaggccttttttaaaagaagcattcaaggacataatgattatatctgtccagccacgaatcagtgtaccatagacaagaaccggcgtaagagctgccaggcctgccgacttcgcaa

SEQ ID NO: 802 - DNA, 328 bp, Mesocricetus auratus
tttggcatgaagccctacacctctttccaggagctcacaggggagaaagagatggccgctgagctggaggagctatacagtgacatcgacgctttagagttctacccagggctgctgctggaaaagtgccagcccaactccatctttggggagagtatgttagagattggagctcccttttccctcaagggtctccttgggaatcccatttgttctccagaatattggaagcccagcacattcggtggtgatgtgggcttcaaccttgtcaacacagcctcactgaagaaactgatctgcctcaacacaaagacctgcccgtatgttt

SEQ ID NO: 803 - DNA, 3727 bp, Cricetulus griseus
  misc_feature (1657)..(1678): n is a, c, g, or t
  misc_feature (1892)..(1925): n is a, c, g, or t
  misc_feature (1927)..(1966): n is a, c, g, or t
  misc_feature (2688)..(2711): n is a, c, g, or t
  misc_feature (3426)..(3458): n is a, c, g, or t
ttcctaagaagtacttacctgctaccagtccagctcctcatgagggcagggcctgaaaatgggcggatgcaatagtggcaatgggaaaaatcaaacacaggggtacttcttagttttgttttagtaaaaatcgacagtgaggaagcacatcccaggcaaaaatgcaggtcccagcaggggatgtaaggagtaggcgaggatgtaggagcaggccatgccttgatggtcaggaaaatcttgcagcctgactgactagcagccaaagtgctgctttattcatacacaatttagtaagtagggatacattcatattgttccaaaacataaatcatatcagttttgtttttggacatgtgtttcacttactattgcttatcttttagtcatcattaataagctatgacagaacagagttaccatttctaataattttccctcaagttttgacagcattgttaaacagagttaccattgctaatctttaaccccataacccaatttttaagaatctagagatttgtgacagcctgttctcagactggtagcttttgtggctacaaggacactagaccaaaacaaaatcttaaagctagcctgggcatattaccatgcctcaagaagtgtattgttaactcttaatgatcagagtacccaagaaaaatcctcaggccaaaactcctgcacttattattcaaattctgcataatacaatgttcaaattttaaatctttatagaatttgtctagatgtctaatccccacattctgttgttccttggtcatacaacaccacagtggttctgcatgtactaacttttctaagaaaggaaggtcctgacatcaggtttttctatcatctttccactctgtactttgctcatcaatataagtctctgtgtagggctaatctaacttaattaactcagatcacataattgcctgagtgtatagtgggaagaagcttgcattctgatctgtggccaactcctctaacccaccgaatcttgttgaccttttgagtttactttgttttggttatcttgttcctgagtatgtacagggacggatgtttcaaggatgtctcatagcctcataaagagacctctggtttctttatgtgtgtcacaatctctagtgtgtaaggaaagaccttcaagtagataaggagatctccctaaagtgagttggggggtagggtggaaaatagtatattcaggactgtcctggggaagcttagacacagcattcctgggaaaaggcataaatgattcataagaaattttccatcaatccaatatccccaaattgcacaaatattaaaaatctcccaagtatgggacaggtggcacagcagccatcatgcagctcagcattgctgaatctttgttaagcagctgtactggctttatgacttttgccattcccattagatatggctgtgccgcttacctcagactgcagtctttactagagacacagaactgctttacactgccatcacacgtctttgaggtaaataagatgataatttggaccatggtcagtgggccaaatagtaaactcattttttagagcatcattgcaacatatttaccaatttatttatgtttttcctatctatatctggttttagaaactaatgaccaacttgagtaggnnnnnnnnnnnnnnnnnnnnnnaaagataaaagtgtttttacctttgaaaaagacttctgctgactccttatttggaatatataaaagtgcacatttaaaataatggccgagtcattgcactttttgaaaattaggtttttgtagtagagatgcatgatgataattaaattttaaaaatatacaaatatatttttcctgtagtgttactttacttgattattactatgttttcctnnnnnnnnnnnnnnnnnnnnnnnnnnnnnnnnnngnnnnnnnnnnnnnnnnnnnnnnnnnnnnnnnnnnnnnnnntgagagctcttggaactctctttggccaggctggcctttaactcacagagatccacctgcttctgcctccctaagtgctgggagtaaaggcatgcaccacgaccagttggcttttaattacttttgtgtgtgtgagatactggagattgaactcacagtcttgcacacttggttggcacaccctccacaaccaaactgttttcctaaccttatgtttgtttttaaagcacaaataagtttgcatgatttgggggtacattttatatagattgttagtcagctattggactggaatttaatgaagtcagtaggtatctgggatatgaagagtaattgggctaaatttgaatgaaaaatgtaggtactctttgctctacaattcatggtatttattggagtctattgctgccctcagccctatgacctcatggtccctatgtataactataattatataattgcttgataggaacttgggtaggagaaaacaaatgtatcatctaataggaataaatagctaggaataattagcaataaaaccaacacaaaattgtacaatgaaatttcagtgttttctgaaatgaatagagataatttattttcagatttatagtattagcatggccaatttgtttctgtattttcactattttattctgagcattttggctttgtttatggttaatcctcattgttacaaataagtgaagtaacttaagcannnnnnnnnnnnnnnnnnnnnnnnaaaaatggggtatgttgatctgttgtgtccctcttaaatataacctctacaacttcattctctagaactgtgtcatctatcatcctctaaaattgaacaggtatggcatttagggcagaaattaatgtgcagatgaaatgaaggttctgcaagtaaattcaaagggaaatgactatgaagtgtacaaagaacagtagctgctgcacagtgatcactaacctctgtgtcccctgtcatatttgtcatactttacatcttaaccagacttgggaaatgtggcatttcaaggcagcatgctattatttcaagactggtattttaagactttttttttaaggtcttttgtgttaacactttccttttcacagtatatgaacaagaaaaccccatacttgagaaagtctgtcaaatgtcatgttccagctgcaatagcaactatctttgcagaatagtggcatataagatgttattctttcataaaacaaaacccttagtgagtgagtttaaggtataaattacacaataaagttttaatgaactgtattttgtaaattaatcattaaaaggactattatccatttttagtgtaaaaataagtaatattctattttggtccaattaaagtgaggattgtagtatcttcactgtttttttcttctttttcatttgtatgtgtatgtgtgttcccatgtccatgcacttacatgtagaggannnnnnnnnnnnnnnnnnnnnnnnnnnnnnnnnccatgcatttttttatgtaggccagaagtcagtgaccttgatccccattccaccttaacgttttgagacaagctgggagggttgcccagcaagcccctaggattgtctcagctcccacctctgtagtcactgtcataagccactcactgtgcttggctttacatgagtgatggagatctacattcagatatctatgatcgagtagctgaaatttaccagctatgtgtctcccaagttcctcctccctgctttcctaagaaaaagaattc

SEQ ID NO: 804 - DNA, 714 bp, Cricetulus griseus
cacaaagcctctggatcgagaactgatagcccggtttcatttgagggcacatgcagtggacatcaatggcaatcgagtggagaaccccattgacattgttatcaatgtcattgacatgaatgataacagacctgaatttctgcaccaggtttggaatgggtctgttccagagggatcaaagcctggaacatatgtgatgacggtcactgctattgatgcagatgacccaaatgccctaaatgggatgctgagatacaggatcctgtcccaggctccgagcacgccttcacctaacatgtttacaatcaacaatgagactggggatatcatcacggtggcagctggtctggatcgagagaaagtgcaacagtacacattaataattcaggccacagacatggaaggcaatcccacttacggcctttcaaacacagccacggcggtcatcacggtgacagacgtcaatgacaatcctccagagtttactgccatgacgttctacggcgaagtccctgagaacagagtggaagtcatcgtagccaacctaactgtcactgacaaagatcagccccacaccccggcttggaatgcagtgtacagaatcagcggtggagaccctacaggaagatttgccatccatacagaccccaacagcaacgatgggctcgtcactgtggtaaaaccaattgactttgaaacaaataggatgtttgt

SEQ ID NO: 805 - DNA, 764 bp, Mesocricetus auratus
  misc_feature (481)..(481): n is a, c, g, or t
ctgagccattacgtttctcggaacaatgacgacatcattttctgggtcatcggagcagttgcgaagagatgcccagagggagacgtctagaccatccgagggaattcgtcaaaggcagtaacgtgcttaagacctgacttttaaagtgaatgccagtgcgtgacgatcccagctccctgtacagttcctagagctcctgggagtgcatggccagtgacacaatgctttactggtgtgtgagaattggatgtagtgaacatccagaaaaggcagacaaaagaagaaaatgcagtgctggctaggtgttggagatgggtctttacatagctctggctgtcctcaaacacatccatcttggctctcgagtgctggggattgtgtgtcaaccaggccggctattatgaatagagcatgagatacagaaagttgtttgaattgaatccaataaatggaagcactcagtctcttaatcctattgggnttaaaatatagattggattaaggctgggtttggagtgaacctttaggactatggcaatgtttaagggatgtatgctaatggttgtcctgtcgcacatgctcgacaaaacgtaatttgatcccaagcagtgccatctctgttcattttcttccctggtctaaatggtaattcccatcctgaaaatggtgggtgacattttgtggcagtggagttccattataatccacatttccttgtccagcagtgctctctgtaaatgctgaaataaaggttcagttgcaac

SEQ ID NO: 806 - DNA, 253 bp, Cricetinae gen. sp.
  misc_feature (146)..(164): n is a, c, g, or t
gatcgtggactgcatggcctggtgatataggcagtccttccttggcgtcactcttgtgggctgcacttctcccctggaaatctgaggaccccactccactggacagccccatgcttacactgactacagcgcaggaaggaatgctnnnnnnnnnnnnnnnnnnnaccagagacatggtttaatagccaaccatctactgaccaggctagctatgtcgcagtgtctcatcagcaggaaggggtcaccgccagta

SEQ ID NO: 807 - DNA, 210 bp, Cricetinae gen. sp.
gttgcctttgagcggaaaatgtctgcttgtagccacattctctggcagtgctgctgagggtgagttcattcaagagcacctgcgcctgtactgggtccggtagttgaagagacacatttggatattcacccaggctttgattcagctgaaagaccgaggggcaaccacagcagccttttgtaaccaaagtgcccagatgccatcgtgatc

SEQ ID NO: 808 - DNA, 261 bp, Cricetinae gen. sp.
  misc_feature (194)..(217): n is a, c, g, or t
gatctggcagttgcttctgttgaaatgtctttctgcccatgacatccatcaaaggctttcaagcatacctgaccttggtattccataggagaccaggatgtgaatggacctggcaatggatatgaaggcctttgtaaaaaagtagacgctctgtgttttcaggaagaaacaagagatggatgagttcatccagnnnnnnnnnnnnnnnnnnnnnnnnccagttctgagcttagattcgcagttacacaataacagaattga

SEQ ID NO: 809 - DNA, 153 bp, Cricetinae gen. sp.
ctaatcgatgagtaattaactgttgggccgtatctctaatgtcttccgattactccgcgggacgttccttcctacgccatgaccgatatggacgtaaaactatccgatagataaatcctcgagtttccgaaagaggatgcacccgcggagatg

SEQ ID NO: 810 - DNA, 652 bp, Mesocricetus auratus
  misc_feature (566)..(594): n is a, c, g, or t
gccttgggcctaatttgttatgagagacaattatctgactcatgaaaaaccattgttccttcttcatcgctaactacgtttaacaggtgagacagccccattaatgttccacaaatcagtataaagcagaagtcagaaatcagttttatatcatcccttgctaacctaatgacaacctacaccaaacacataaaatattaaaattaagcttagaggctattaaagttaaacgccttatttaattgtaacaacaaatacaaaagaaaatcatggaaaccagaccacaagatggctctgttacgcagtcatcgtggtgattcagaatacgtttatgttaaagctggccatgacagtgcattattataaccccagcactcagaagcaggcaaaagcagagcaggatggttacttagagtttgagaccaatttggtttacatagttagctccagattagccaagactactatgaaatctcctttttgtaactgaggaccaaacccaggaccttgttcttgataggcaagtgctctaccaatgagctaaatctccaacccaggatctaacnnnnnnnnnnnnnnnnnnnnnnnnnnnnnatgaatacaacatcctgcctctacatatgtctgcacgccaggagagggcaccagatct

SEQ ID NO: 811 - DNA, 652 bp, Mesocricetus auratus; identical to SEQ ID NO: 810
  misc_feature (566)..(594): n is a, c, g, or t

SEQ ID NO: 812 - DNA, 803 bp, Mesocricetus auratus
ttgctgcagatactactgaccagacaagctgttgaccaggcacccccccaatactcccccaatgtgctcattagagatagcagttgagaggacactcccatttttggtgccctgtccatagcttccctgactcttccaccaccccaactcccaatctgagggaccgggaggtgcgaggcaggaaaaatattggattctttagagaagactagaggtgaccagtgactgtggcccagtaattagaactgtggtggcacaagtctggccccacatccacccaatccaaaactgataaggatattttgaaaaacaggaaagcagtacctgtctgatccagctctggtataggtaggagtgagtcctgaactgctggattacagactggcttgagccacagaagatgatggaccagagtaaagtatcatcacctgctcacaaggcatgcttcactagagaataattctaaagaggtgccatggaggcagcaggacaaggcacaagcagtctgggtgggggtcaagccagacctagtgccacagaacaagagagcaatctgtgactagtagttagggactttgtggatgggacaaggggcatgggggaagaaatgaaaatattcttccaattactttccagttctcctttagggacagcttagaattatttgcactattgagtcttcatgttcccacttaaaaacaaacagatgctctgaaagcaaactggcttgaaatggtgacactttgtcccacaagccaccaaatgtggcagtgtttagaactacctggatctgtatatacctg

SEQ ID NO: 813 - DNA, 3418 bp, Cricetulus griseus
  misc_feature (227)..(308): n is a, c, g, or t
  misc_feature (1680)..(1694): n is a, c, g, or t
cagaaggaggtagaagaaagaccagacaaagacttcactgagaaggggtcccgtaacatgcccagcttgtctgctgccacgctggcttctctgggtgggacttcctcccggagaggaagtggagatacctccatctccatggacaccgaggcatccatcagggaaattaaggactcgctggccgaagttgaggagaagtacaagaaggccatggtctccaatgcccnnnnnnnnnnnnnnnnnnnnnnnnnnnnnnnnnnnnnnnnnnnnnnnnnnnnnnnnnnnnnnnnnnnnnnnnnnnnnnnnnncgagtcccagagacagtatgaggagaagaacaaggagttcgagagggagaagcatgcccacagcatcctgcagttccagtttgccgaagtaaaagaagccctgaggcaaagggaagagatgcttgagaaacatggaataatcctaaattcagaaatagccaccaacggagaaacttcagacacactgaatggagttggttatcaaggccctacaaagatgacaaaagaagagctgaatgccctcaagtcagcaggggaggggacactaggaaaagccaaagaagtggagttgaaaaaggaaattgtgcagagtatggggaaaggaggaggaaccttacagaatactgagcaacaacagcccagacccaacccaataaaggattgtgtggaccaaggggtgtcacatcccggtgagaatgcccaggaccagaaacccactgaagacagtgctctgtccccaggaccactagcaggggccaaatgtgagcaacaggttcggagccaagctcaagagaacacttctttcctccaagacccagagcagattgagtcacgtgaggtcacagaccagccagatggtaggaccagaaactccttggaacagtccaactgcctgggaggtctagacagtgaagagtcaggacccgctgccttgggtatcaaaaatcaaagtgaaaactctataggtttggggcaaacatctgaaggtgacgaggtgagctgtacagactcaagggatgcaggtggaaaccacacagagaatgtagtacagactgccactggggaacaagtgggtacagtagcctcaggtcctttggagcaccacaaagacacagtgagtcatgatagaagaagtgtgaatgaaggggcagagcagagcttggagagagaactcagccaagaagtagctgagccggaggaggccctcattcagagcccaccaacaagtaaggaaaacactgttagaaagaccggagacaagaagcccatccaggcagaagtccaggccaccactggggctcccatagtgcagagtggccatcaggacacaagcgtcacaggtgccacacatgcaccacttgatgagaaagaacccggcaaagaaaagagcgagcagcaggcagaggccttggactcaccacagaagaagtctaagaacaggaagaaaaagaacaagaagaagaaacctccagcctcagtggaaacctgcaaagatgccagcaaagagttaaactgtcagaacacggacgcgcatgacctggaggaagaagagtccatccagttccctgacaaaaaacagacagcagaaacccagagcaaagagaccaaaaacccagaacaaaaaatcacagcaggaagcagtgaacatgtnnnnnnnnnnnnnnntgctgaaaatgagtttaatggaaaacagaaccaaggggaggaagatggtgtaaacacccgggcaggggatggagacacgttaatgtgtgaggcggatgcagcgcagtcggtcagcaccagtgctgagggtgaggaaactgaagagcgtgatgcagatgaccctgccggtggtcccagggatgtcttggatcagaatagtccccaatgcaaagaagaggaaatctccccgatgaaaaagaaaggtcccccaaagagaggaagtgaggagggacatgtgctgtcccaacatccaggccagatggaggagaaggccatagatggttgcagcatagacaacagtgacctgtcaggggagctggggggctgcaattcagaaagtggagtgcaggccagaggggaggttgagaatagcaagagtaaggaggattgcaccatgtcatgaggaggcagaggcagcaggcagacggggcgaccgagtttcagagagggccaaggactcaacacactaagcccaaccttaagaattctacccttcaactctactgcccaggttcacgaaatgttccagtttctgtgaacgtaccacgtgtcaatcaagtatcaacgactttaagttatagactgttacttgtagatttgtattcaaccattggtcatgtagacaccattgttttcagtttcagttctagctgagagcattccattagcatcaggtgacaccatgtcctgtcatgtctgcattccagtcttaagggcaaaacgtaaccatttgcttcaggccgggatgaatgttgactgtacttgaccaaatgtatcagcatctagttgaagtgaccaaacagcatgcttagatttctgtgtcttgagcagtgaatagtcaaactaccatgtctcattaaagtagatgtatcttcatgtttgatcttaatgtgtacgtcataacctgtgtggtattgtatttaaaggagttagatggataagtagcaggtaggtcactgggtgagaggaccagcacctcagggtagagattaattactgtagggattcaaacagttatcaaataacacagggagactacgtgcctttctttacctcgcctaagtgctgaattttgcaccaatgctcttggatcttattgccaatggtacccaaattaattttatccaagatctttatttcacttcacatgggtaatatgataaattcattttatacaaatattttatttttatccttttctgttaatgacaagttgaaattatatttcctactttagtgtttaggagaaagtcattaatttttttaactttaaagttatcttcctgtctgaatgtctacttattattaaaaaaaaaaacagtacaacacattgtttgttcttatgcaaaggactcattagacttgaatccaacattttgtgtttggtataaatatttttatttgttgtttctcagtattttctttttggaaagttattttacctgcctgaaggaaataatgtattttctatataaagaagcagttagaaaaaattatcataaagttgcattgaaaagtaattgcaaggccatgtactgtatgactactgttgacatgttacgggatcatgtgaattcatactactgctacaaggtagagtggaacgcaaaaagaccaaaccctcagtaaaatttgaggcaaactgaaatgtcatataattgaaataaaaacattttataatttta

SEQ ID NO: 814 - DNA, 454 bp, Cricetulus griseus
cacctagtgtgtacccagcaccatgctaagtgctgtggggaacacagaagaaatggaagacacagtctctgcccgctgtgctcctatctagaagtggctgcgtcacaaggaggggggatgaccgcagtgtctaccccataccccgtgagtggcttgggatccctttgctacatgtcagtggcaccccagacattcaccccctcccagccccacccagccttggggatcgacaaagccatggttgggggaaggaaggaggagggggcgaggaggcagatgaagggacttcattgtctcaagttctgtatgaccgaccccatgaaaagccccggggaggggagtcatggggccctgctgaccttccactgcctgtgggaacctcctccgaacaaggggcagtgttggactgacgtcaatgtggggcttggcctttcctcttgttccccattttcag

SEQ ID NO: 815 - DNA, 7887 bp, Mesocricetus auratus
  misc_feature (444)..(466): n is a, c, g, or t
  misc_feature (4577)..(4594): n is a, c, g, or t
  misc_feature (7245)..(7273): n is a, c, g, or t
gggtggaaggatttcatggcaggctctatgggcctcagagatccaggtctagggacctgaatacacagaatgtctcagtactgcatatttcattccatactccagagtatttctttttcatttttcaaaaaagtggattgtcaggaatgtttccagtaacatgctttatttgaaaattgattgttgacaatttcccacatatgtaatatactctgaaaaaccttctctctcatgtctaaactctttaacataatcttgtaaaggcctgctgtgcacaacaagtccttttcaagtagaagggagttggctgcctaatgtttttccaaccgcaaactatcagtggcccttggtaagaaacaaatgtactattacaggagtccagttctcttccataacttctgccagacagctaatggctagattatgccaggtataaacaaatannnnnnnnnnnnnnnnnnnnnnncaatacatgactagtttaacacagagtatcagtaaagagacagtccagtaaaaatggggctgggacaggtaaataataattttaagagataacacaaaacacacatacacacagagaaggagagacacacatacacacacagagagagggtggcagagacagagagatgagcccaaagacaacatttgtttggattgtaaaaaatgtatatcaaatctggaaaacagtgtggagcattctgagtcttctaaaaataaatatgtactgtgtgactcagctgtacttcaccttgtaatatgcctaaatgacttgaaattctatttcacagatactttctcatccatgttgattgctactgtattcactacagctaggaaaaggaaacaaattaaatgttctatagctatctaatggacaatgaaatagtggtaatacacacgttgtaataacattccatgataatgaaaaaaggaaatcatgacatttgtagataaactgcaggcatgaaaaagtatcctactgagtgaggtaccccagacctaagaatacaaaagtggcatgttatgtttcttctgttattcctagctctaaatcttccagagaaaactaagacttcatttgagaccttgaaactctcatacatgtaacagcatttactgaaataagtgttcactaaattaaagacattacagggtgaacatattgtaagtattagagggaggaggaaagggaagtgattaatgatgaaaatattttataatctcaaaaataaaatataaagataataatgtgatgtaatttaaagaaagagtcacaaagaccaactaatgccttataatggtgtagtgggaaaacaggttgtcaatccaaaataccagtgggtgaatggtcggttattccatgtgttatagaggaaatcgatggaggataaacagtactgtagaatcctggatttcttcttggttgtcactaaaaaaggatcacaagacactatggctcagcataacacaggtattggttttaatgtgtaaacactgcaactgggcagggagagcctttgtttagcaaacataaaggaatattttcagcctgaatgtagagccccttatcacaattagttttgttagtgtcattatttttatagactgtttcatttgatttggttcttttaattaatgatatttttatttatttcgaggaatgggagcaattttcctactgtatgtactgttaaacttcagcaactcatgcagcactgtacagttgttgaatggttgttgaattcaatgtacaagaagaataaagtagtcaatgtatggaaagtattttaagaagcacagtgacctttacccaacagtatagttctggaagggaaattattatttgtatgctcaaacaagatagttctttgtttctaacaggaatgctcaattttcagacaaacataacctgaccttactgctaatcacattagttttgagatatgaggtcatacatcatttggcagggccaaagaggaaacactagacagatgtagcttagtgtagatcaaactgattggttccgtgaaactccctctaactatctgtataaaaagctttgtcagttgagttcttttcaaccactcacctcttcgagcttctgtggaaaagcaaagtcaggcaccaccatggtaaagattctggtgctggctttggtctttagtctggctcatgctcaggattttgcagaggtaaattcatttgctctattcatatatcttagcttcatcaacagcatatttctgtggatgtgacacatcactcagttagtccatgcaagactatatttaagaaataagttttctgactgtcacagaggtacagtttacctattagattcctctcactgaaacaattggaataaggaaacaatgggtgatatttgcagagcataagagggcaaaacatgagcacttctgcaaagtctcagctcaaaatgttctatgttgattaaatcatcatattaccctgagttattctacatccctagaactaatcttgaactaatgaacaaaatattattcattgacatttatagtgagtttacataattccaagaactgggaccagagatgtgaatttataccactggtatatagtttttctttgcttcatttgcctttgttgcttttttcagcttcaaggaaaatggtataccattgtcattgctgctgacaatcttgaaaagatagaagaaggaggaccactgagattctattttcgtcatattgattgttataaaaactgcagtgaaatggaaatcacattttatgtcatgtaagcaaattgtcaagcttgtaaattgagcagactatttatgcattctgcaacctttatgttaagcttacagggcatgttctgtttctggttgtgaaaatgaagctcatctttagcattgtgttaacattattcccagttgatcattgtctccaatttcgtgagtgtttcccttaaaaagcctagttgttggaagaatgttgttgaatgttatagtcaaatattggatgcaggggaatctaagcttccaatttctagtaagtcatcaggaatatgtgagccttttggtaaaagctgtgcatgttatgttattcaatctatgatgtcatgaaatagtcctccacaaatagtcgagaaaaatctaatttgcgattccctttctctgaagctctagaaccaaacattatctctctgacatttggataactgtattcattgaaagactgcatgacaccataagaactaaaaatgcttagaactatttctattttttaggttagcaataaaagtacttaacacatgcataataaattgtgtacatattatatcattggacaagcacaagagaatatttgaaatcacattcatttaataataaagtttggaagagagacaaattagagccttcatagcattaacaaaatgagaacaaatgaaggaatttatctgtatgattaataacaagatgatactatctagacaagttttaggaaaagtgaggtaagcatacatattttggtcctagctctgtacactcttaacagatgctagtgcactctgaagttcgttataacacttgaaggtctttaagatgaattcaaattttacacagaaaaaattatggtttctctgtttggtttttagtacaaacaaccagtgctccaagaccacagtcattgggtacttgaaaggaaatggaacctaccaaacccagtgtaagtacaggatctgtgtgtttcctttatgaacaaagcaatgctgatgtacatattcatgttgatacttcagacacccataggtgcatggatttaggaaaattttggctacttttaaagttatcaatccttccaatgaactgagatatgcttcatagtcagataacattgtacgtcatctgaagtttacgtggagaagaacactgttacagaaaggtgtgagtaatcataggaaaatatctccaaatagtttgaatgcatgaaaatttatttccagttagtattcagaagcttttctttcatatggtgtctcagattgttactggatgtgtctgccagtcactaataggactcagtgacctgaatatctttgcaaacttcatgcctcatgtcctcaagtacttacattgtgggtgttatctgtcattcttgatttctagaacatttaaatgaacagtgcgatttcaaagattatttctctcatagtttgtagagatcataacatttagataatcagatgataaatttcaattttaaaaggcagttagttgaagatctggttaagattttcatgctgagtacttcaaactttaatatttacttaaacaatggcaacactattcaactgaatcaatcacaatttgatgtttagtttgatttaaatgaacagagggcacattcttgtggcaggtctcatgctctactaaatttacatgtatattaaaaagcagtcctgcaatataaaatgaacacaccctataaatccttttattttcatgtggaactacttctcatatttaataaatgttagagagtggaaataatccatgcatgcttgcattccaatgagcacgcatnnnnnnnnnnnnnnnnnnaggcatacagaaacagatagatagacagataggcaattgcacacaatagcaatgtctgtcaaacacaaaaagtccatcctactttcaagatgacaacttttgtacacatgacaaattactatgttctatttttccacatggaaacatttgcccactgagtatttccatggtatggcaccagatatttacacattgaggaaatcaacaagtggcctttgggatctggttaaaagcagacagaatatccaacagattgttcccaaagttttaacacaagaaaatcagagggagattggagtatccgtacttaggattcatatcagatttgaagagcagaaatgtttgctcaaaatactttgatgaaatatcccaaatgaaggactacaggaatagctttgtacagatgtgtcatatgataatagataagagatgattgctagagtctgggcctccattaatcttcagcagtgatactcagttttgaaatatttcctttattacagttgaaggtaacaatatatttcaacctttgtatataacatcagacaagattttctttaccaacaagaacatggatagagctggccaggaaacgaacatgattgttgttgctggtaagaatggtagtggtttctctgaaataatagcagggtcactgaagactaggggcaacagcagaggctcttgggagagtttatgttcatgtttcctcagtggaaagagtaaggcaaataatattttcccaaagtttagaccattttgagtattatatgatcaagtgtgtactaaatttaaacatgatccttatacttttggttttgaactcagcctaaccaacagtggagaggctacctcaaatgcccttccccgatattgtgattgatgaattccttgtatgccatcctagaaccttcatgcagtggctgaaggaagcagagtcagacacacacagctaaacactgaagtcaactcctggaacccagttgcagaatgggaggagtaatgagcaaaggggttaagacttggcagtcatggaaacagcagaccagatcaagggggagctcatggacaccagactgattgttgagaggccaacatgggactgatccagataccctgaatgtagctgccagtgaggaggcatctacagtctttggggcctcaggcaacagatagcatttatccctggcatccagatggactttggacaaccattctacaggaagggatgttgtcacagcctggacacatgggggaaggcctaggccctgccatggatgatatgacagtcttgggagatccctcaagaatggcctcaccctccttggagagtggagtctggattgagtggaaagttgtagcagacttgaaggggacaggggaggaggggagggagagtgagctgggattgatatgtgatgcaagattgattctaatttaaatttaaaaaacaaacacacaaaaaccatgatccttagtgaatagactcggtgagttgtgaaggttccactggcatgcatttttgtctctttgctgacatatttttgaacatttagaggactaagatgagtgaattctctagaaaggtagttattcttttttggtgcatcatgtaacaatggaacatgatgtcataccacaagttagaggtctttcaacgtgtccatggaacactgggaaaattacaactgtaattgactgtattgacccatccaggacaggtgaatttggtgaagttaggatttttccattgccaataacagtgggacactaaggaaacaatgtaaattttgctgaattcaactgaccatgtcattgacattgtccttcatgcaatgtaggaaaaggtaatgctttgacacctgaagaaaatgaaatacttgtgcaatttgctcatgaaaagaaaattccagtggaaaacattctcaatattcttgctacaggtaacatcaatgaatatcttttagctataatatatatatttataaatttacatatagatatatatattgagttgtctatctgtctgcctgcctgtctgtctgtctgtctagtcagatgcctgattcatattgtatctagtcgtattgtctttcaggtgtcctttccagcaataatcattggggaaactgttcctatattcttataacacttctgtcactccttaccccactcacgttctttttcagatacttgtcctgaataaaggccttctgtaggtgagtaaaagttgaaggcatgatagccatactgatatttgaatcgatttttcctcctaacaagaaaattagaaataagtcttgacaaaggatgaaaggaactcaaaagtaagcaatataaagagagaatatcattcttcttttaaagctgaaaatgttacaatgttaaaagtgaaaggtagaataatttatgtataagacaatattaagttcttttattcagaattgataatatttttatatttagtaaatttacatcaaaaatgttacttgttatttgaaaaatcgtactttacttatgattgtgaaatataatttgtcacagatacaccacaagcatgtttatattttcaatatattctgtgaaacctcaatctacattttcatgtgggggacacagaatgacattattcactataaactgtgctcatnnnnnnnnnnnnnnnnnnnnnnnnnnnnnttccaggaaatgagctgtttgtgtacaatcacttctgtatactctataatgagatatctaatgttacattcatgcactcttaaaacgactatgttcaaccatgttttaatttttgctttcatgctgccaaggtgagaacaggatggcaattatgcatcatattctcttgatcatggaatcagcatcacaaataaatcaccatttcattctacatgaattgtcccatctcctgtagagccaggataccacatatcaaattcctggcttagctttcctttcccatcacatgatgtattacctgttcttattttttgactgattaaataaattgtttcaagaaacaataaatgcctcgcaaaatgtatctcattcaaaaagcccataaatagtcactaagataattacaataatcactccggtgtaacaaatgatatccgcatcattacaaactattgtagtaattgaaatttcatcattcctggatagccatgggcaagaacagtgcagaagtgaagtttatgttgtgttccatatttactttcagttttaacttgagatttgcagttgaatggttctaacacactgaaataatttgtataacaaactctgtggtt

SEQ ID NO: 816 - DNA, 1691 bp, Cricetulus griseus
gaaacagacagctgagaccctgttgtctctgtcacctgctgaaactgccaacctcaaggaaggaatcaatttttttcgaaataagactactggcaaagagtacattttatacaaggagaaaaaccacctaaaggcatgcaagaacctctgcaagcaccaaggaggcctgttcataaaagacattgaggatttagacggaaggtccgttaaatgtacaaagcacaactggaagttagatgtgagcaccatgaagtacatcaaccctccagggagcttctgtcaggacgagctggttgtcgaaatggatggaaacgatgggcttttccttatagaattgaatcctcctaacccttgggactctgatcccaggactcctgaagagttggcttttggggaagtacagataacatatctcactcatgcctgcatggacctcaagttgggagacaagcggatggtgtttgacccttggttaattggccctgcttttgcccgaggatggtggttgctacatgagcctccatctgattggctggagaggctgtgcaaagcagacctcatttacatcagtcacatgcactcagaccacctgagttaccccactctgaagcagctttcccagagacgaccagacattcccatatatgttggtgacacggaaaggcctgtgttttggaatctggaccagagcggtgttcagctaactaacatcaatgtggtaccatttggagtgtggcaacaggtagacaaaaatctccgattcatgatcttgatggatggcgttcatcctgaaatggacacatgcattatcgtagagtacaaaggtcataaaatactcaacacagtggattgcaccagacccaatgggggaaggctgcctgagaaagctgctctaatgatgagtgattttgctggaggagcatcaggctttccaatgactttcagcggtggaaaatttactgaggaatggaaggcccagttcattaaggcggaaagaagaaagcttctgaattacaaagctcagctcgtgaaggacctccagcctcgaatctactgtccctttgctgggtattttgtggaatctcatccatctgacaagtatattaaggaaacaaacatcaaaaatgacccgattcaactcaacaatctcatcaagaaaaactgtgatgtggtgacatggaccccacgacctggagctactcttgacctgggcaggatgctgaaggacccaacagacagccagggcatcatagagcctccagaagggacaaaaatttacaaggattcatgggacttcggcccatacctgagcaccttgcactctgctgtaggagatgaaatcttccttcactcgtcctggataaaagagtacttcacttgggctggatttaagagttacaacttggtggtcaggatgattgaaacagatgaagacttcaacccttttcctggagggtatgactatctggtggactttctagatttgtcttttccaaaagaaagaccaagcagggagcatccctatgaagaaatccgtagccgtgtggatgtcgtcaggtacgtggtgaagcacggtctgctgtgggatgacctgtacattggcttccagacccggttgcagcgggaccctgacatataccatcatctgttttggaatcattttcagataaaactccctctaacaccaccca

SEQ ID NO: 817 - DNA, 1077 bp, Mesocricetus auratus
cgcaatctgctgctagccctctgcctcttcctggtcctgggatttttgtattattctgcttggaagctgcacttgctccaatgggaagactccaattcattgcttctttcccttgactccgctggacaaacactaggcacagagtatgatcggctgggttttctcctgaagctggactctaaactacctgccgagctagccaccaagtacgcaaacttttcagagggagcttgcaaacccggctatgcttcagccctgatgactgccatcttccccaggttctccaaaccagcacccatgttcctagatgactcctttcgcaagtgggctagaatccgggagttcgtgccaccttttggaatcaaaggtcaagacaatctgatcaaagccatcttgtcagtcaccaaagagtaccgcttgacccctgccttggacagcctccactgccgccgctgcatcatcgtaggcaatggaggggtccttgccaacaagtctctcgggtcacgaattgacgactatgacattgtggtcagactgaattcagcgcctgtgaagggctttgagagggacgtgggcagcaagaccaccctgcgcatcacctatcctgagggtgccatgcagcgacccgagcagtacgaacgagactctctctttgtccttgcgggcttcaagtggcaggacttcaagtggctgaagtacatcgtctacaaggaaagagtgagtgcatccgatggcttctggaagtctgtggccactcgagtgcccaaggagcccccggaaatccgcatcctcaatccgtacttcatccaggaggccgccttcacgctcattggactgcccttcaacaacggcctcatgggcagggggaacatcccaacccttggcagtgtggcggtgaccatggcactacatggctgtgatgaagtggcagtcgcaggctttggctacgacatgaacacacccaatgcacccctacactactatgaggctgtgcgcatggcagccatcaaagagtcctggacgcacaacatccagcgagaaaaggagtttctacggaagctggtgaaagctcgcgtc

SEQ ID NO: 818 - DNA, 967 bp, Mesocricetus auratus
  misc_feature (699)..(713): n is a, c, g, or t
gtaggttcctggccatgctggctctggtctttgtcgtcgtcatggtgtggtactccatctccggagaagatacgtactttgatctcttttatcttcccaactcagagaagaaagagccatgcttccagggtgaggcagagaggcaggcctctaagattttcggcaaccattctagggaacagcccatcttcctgcagcttaaggattatttctgggaaaagataccatctacctatgagttgccctttgggaccaaaggcagtgaagaccttcttctccgggtgttagccatcactagctattctatacctgagagcatacagagcctccggtgtcgtcgttgtgttgtggtggggaatgggcaccggttgcggaacagttcactgggaagtatcatcaacaagtacgatgtggtcatcagattgaacaatgctcctgtggctggttacgaggcagatgtgggctctaaaaccaccatacgtctcttctaccctgagtcggcccacttcgaccccaaaatagaaaacaacccagacacgctcttggtcctggtagctttcaaggcaatggacttccactggattgaaaccatcttgagtgataagaagcgggtacggaaaggtttctggaaacagcctcccctcatctgggatgtcaaccctaaacagattcggattctcaaccccttctttatggagnnnnnnnnnnnnnnnctcctgagcctgcccatacagcagtcacgaaagatcaagcagaaaccaatgacaggtctgctagccatcaccttggccctccacctctgcgacctggtgcacatcgctggcttcggctacccagacgcctacaacaagaagcagaccatccactactatgaacagatcacgcttaagtctatggcggggtcagggcacaatgtctcccaagaggccctagccatcaagcggatgctagagatgggcgctgtgaa

SEQ ID NO: 819 - DNA, 690 bp, Mesocricetus auratus
agagagctgacagcatgaaggtcctcctgctgctagcagccttgatcatggtctttggcccaatccagatccaagggagtctagctgagttaaatcgaatgatctggcaattgacaggaatgagagctgggttaagttatgccttctatggttgccactgtggcctgggtggcagaggatcccccaaggatgcgacagattggtgctgtgcggctcatgactgttgctacgaccgactggaggaccttggctgtggcacaaaatcactggactacaatttcaagtattcaaggggcgaaatcacctgctctgtaaaccaggacttctgtgggcaacagttgtgccactgtgatagacttctggctgaatgtttagcccagcaccagaagagctacagttggaagtacctcatgggtatcaagaaatcttgcgaaggagagtcacccagctgctcagagagccgcttttttttcacatagcccaacccagtccccccagggataaagaaagcattcctctccttccctagacaccttctgtagagacaccaaagcctgaatgcatcagctgatcttccccaccacgccactaccttgggctaacagattgcccacatccatccttcccttcacatccaacttcctgccttgcagtatcaaggggctgttacaaataaagtaattcatcaat

SEQ ID NO: 820 - DNA, 93 bp, Phodopus roborowski
tacatgcacacactggtacagaatctggttaacaacgggtatgtgcgggatgagactgtgcgggccgcgccctatgactggcgtctggaaccc

SEQ ID NO: 821 - DNA, 93 bp, Mesocricetus auratus
tacatgcacacactggtacagaatctggttaacaatgggtatgtgcgggatgagactgtgcgggccgcaccctatgactggcgtctggagccc

SEQ ID NO: 822 - DNA, 390 bp, Mesocricetus auratus
aaccagactaatgctgccagagcagcctgctctccagacatactaaggacaaatggggaggcaccagaagaaggaggagcagatatggactgtgatggctctccgttgcctaaagacagttctgagtcggtgaatggctataaagaatataaagaaaaagtaaacagtggaagcttaactcaagcatcacaaagggggaagtctgtggaagatggagtaacacagagaagcagtgacttgccagtagagacaacagaccatgaggacgccagcaaaggtcaccccttcttgacaaacgaggagctggctgccctgccagtggtcagagtccctccttcgggcaagtacactggcactcagttgcaggccaccatccgcacgcttcaaggc

SEQ ID NO: 823 - DNA, 489 bp, Cricetulus sp.
tgtagcaagcaggtcatggaggagctaagccaaggagactacttcatgaaagaaatagacactcataagtattactccagagcgtggcaaaaagcccacttaacctggctgaaccaagaggggaccctcccagagaacatgaccaccgcacacgccgtggccatcttggtctacacctccaatcgcaatgtgagctctgactttgctacagctatggccagggccggggcatctcccgggcagtacagacagtcattccacttcaagtatctgcactactacctcacctcagccatccagctgctgaggaaagagagctccacaaagaacagggacctgtgctatgaggtccactatgggatgaagaacgtgaggtttgaagtcaatgtcggtgccactgtccgattcggccagttcctttctgcctccctgctaagggaggagacacgggtgtctggaaaccaaaccctgtttactatggttacatgc

SEQ ID NO: 824 - DNA, 821 bp, Cricetus cricetus
  misc_feature (445)..(460): n is a, c, g, or t
gccgagtgttgcggccagaagcggagtctcagccgggaggcgctgcagaaggatctggatgacaagctctttggacagcatcttgcaaagaaagtcatcttaaacgccgtgtctggtttcctaagcaacccgaagcccaagaagcccctgaccctctccctgcacgggtggacaggcacgggcaagaacttcgccagcaagatcatcgcagagaatatttacgagggtggactcaacagtgactatgtgcacctgtttgtggccacgctgcacttcccccacgcctccaacgtcaccctgtataaggaccagctacagatgtggattcgaggcaacgtgagtgcctgtgctcggtccatcttcatctttgacgagatggacaagatgcacgcaggccttattgacgccatcaagcctttcctagactattatgacgtggtagacnnnnnnnnnnnnnnnnaggccatcttcatcttcctcagcaacgccggggcagagaggatcacagatgtggctttggatttctggaaaagtgggaagcagagggaagaaatcaagcttagagacatggagcatgccctggccgtgtcggtcttcaataacaagaacagtggcttctggcacagcagcctcattgaccggaacctcattgattattttgtccccttcctgcccctggagtataagcacttgaaaatgtgtatcagagttgagatgcagtcccgtggctatgaagtagatgaggacattataagcaaggtggctgaagagatgacattcttccccaaggaggagagagtcttctctgacaagggctgcaa

SEQ ID NO: 825 - DNA, 1515 bp, Cricetulus griseus
  misc_feature (566)..(583): n is a, c, g, or t
  misc_feature (1273)..(1292): n is a, c, g, or t
tgggaagttacttagcacggttccgggtttcctagtgccccacccgcccttcctagcacagctacaggatcttggtcccttggttccttggttgctctgtgctgcaggtgaaggaaacccttgtctgttggtcccttctgggtcagtcctgggcgcatctgccctcctctgctgactccgccccgcatctttaaagacccgcctcgcgtcagagctgacccaccgcgcggctgccagtcagaccctccggacctgcgagagcctcaggctgcagaaatcgccacgcctcactcggtccgtacccagtgggcatcttggggatctgggcggtctccggttccccacgcgtgtgtctgtgtgtctgtctctctgtgtgataagctctttgcagcctgcctggcagttccagcgcaccaagtgtcttgtgtgccctttggctgacgctgagcttggagcggccttagtgagctcctagcccgcctgaccctgcctggcgaggaatacacatacttggcccctgcaaggggttgctggcattttaaatctacaggagcttgaggcctatnnnnnnnnnnnnnnnnnnttcagaaagccagtcccgaggcctctttttgcaaaggtagatgtggggagccagccagatccttgatgatttctttaattttaacggggaaggggatattgagttcttaatgaaggcttttgaaacccgttgtaaatctgaaggggtgataaactgtaagccgtcttggggagaacagattgctttttgggttgcctttttgtctgatacatttgttttgagcctgctgaccagctgtttctgaacttcattttctcagcctcaacagtgatttgagcccgcttttagctcccctccgcctgccttggcttgtttctgtgcaagaacagctgcttggcccctagattagagaaaggggtctcctcccctttcccaagaaagcctcttctatgtgctcagcgatggggagcggggaacctaatattgctggcaagaaaaagaagtacctcaaggctgccctgtatgtgggtgacttgggccctgaagtgacagaggacatgctttataagaagttcagacctgctggccctctccgcttcactagaatttgccgtgacccagtgacccacagccccctgggttatggttatgttaacttccgctttcctgcagatgctgagtgggccttgaacacaatgaactttgatttaattaatggtaaaccgtttcgcctcatgtggtcacagccannnnnnnnnnnnnnnnnnnntggagttggaaatatattcatcaagcacttggataaatccatagataataggaccctgttttatttattttctgcttttgggaacattctttcctgtaaagtagtatgtgatgacaatggctctaagggttatgcctatgtccactttgatagccttgctgctgccaatagggctatctggcatatgaatggagtctggctcaacaaccgccaggtgtatgtc

SEQ ID NO: 826 - DNA, 952 bp, Mesocricetus auratus
  misc_feature (523)..(549): n is a, c, g, or t
  misc_feature (935)..(952): n is a, c, g, or t
gtcgccagcgtccacggtccggttcccaggcgctcggctcgagcccgcgcgctccccggatagacgcggacgctgcagggtgccgggggagcggaggagccgctcacggaccaggctgcggcaatcttaacggccagcggaggacctccctgccactccgcgtcggggctgtgagaggaggacaagggcatgctgggcggcggcagcgacgcgggcctggccaccgccgcggcgcgggggcaggtggagaccgtgcggcagctcctggaagccggcgtagatcccaacgccgtcaaccgcttcgggaggcgcccgatccaggtcatgatgatgggcagcacccaggtggcagagctgctgctgctccacggagcggaacccaactgcgctgaccccaacactctaaccagacccgtgcacgatgcagctcgggagggcttcctggacaccctggtggtgctgcacagggcaggggcgcggctggatgtgcgggacacctggggccgcctgccggtggacctgnnnnnnnnnnnnnnnnnnnnnnnnnnngcagtctatctgcatgctgccactggggactgaacgacccgcaagtcttccaaaactccaagcctatgcaggaaggtaaagccaatgagaaataacttccgaagtgttttcctgcatctgggtctggatctggccctctattctcaccctgaagccaaagggatccccaatttgatttagtattgtgtgacgttctgggagccccttccttttcaggtgtaaaataacaagggaagttcttgaatctccacaacatgatggtgcagtgggaattggagaatgtgcttggtgactgacaatagggagggagcagtcagtacctccctccccctgtgacctccaaatgcagataatccacagtctagaaggaaaccctggagactagnnnnnnnnnnnnnnnnnn

SEQ ID NO: 827 - DNA, 1335 bp, Cricetulus griseus
  misc_feature (1312)..(1335): n is a, c, g, or t
tgccagagcgcgtgggtccttgggtcaggtcaaagggtcgaaggtgcagcgcgtgacccaggatcctagcaggctcggagcaggagcatggcgtcgtcggggtcggtgcagcagccgcggctggtgctgctgatgctggtgctggctggcgcggcgcgggccagcctctacttccgtccgggccggacctgctaccacccccttcgcggggaccagattgcccagctggggcgcaggacttaccctcggccgcatgagtacctgtccccatcggatatccccaagaactgggattggagaaacgtgaagggtgtcaactacgccagcatcaccaggaaccagcacatcccacagtactgcggctcctgctgggctcacggcagcaccagtgccatggcagaccgcatcaacatcaagaggaaaggtgcgtggccctccaccctgctttccgtccagaacgtcatcgactgtggcaatgctggctcctgcgagggaggcaatgaccttccggtgtgggcatacgcccataagcatggtatccctgacgagacctgcaacaactaccaggccaaggaccaagactgtgacaagtttaaccagtgtgggacctgcaccgaattcaaagtgtgccacaccatccagaactacacccgctggagagtgggtgactacggctccctgtcgggtcgggagaagatgatggcagagatatacgccaatggtcccatcagctgcgggataatggtgaccgagaagatggataactacacaggaggcatctatgccgagctccaggagcagacctctatcaaccacatcgtctctgtggctggctggggtgtcagcagtgatggcattgagtactggattgtccgtaactcatggggtgaaccctggggtgagaggggctggatgaggatcgtgaccagcacctacaaaggaggcacgggtgccagctacaacctcgccattgaggaggcctgcacatatggggaccccattgtttaagtacacgtctctggaaacaatgttgtaaaccatgccagggatggatggggtgattaacactggacagctagaaacagtgcttgtggacatgacgaccagtgtggactgcagaagccatcccaagaagagatggtaaaggaggagcccacctccccgttgccctcaggatcagaggcctgccttcagccacctggggaagacagctatggtctacaacagttctgatctcaccctaggatcgatccatgggagagggtaacaattccaggatgcctaagtgatgaataaagtatccggattcccnnnnnnnnnnnnnnnnnnnnnnnn

SEQ ID NO: 828 - DNA, 226 bp, Mesocricetus auratus
agccagcgaaggtacctgatgatccaccttccatggtcttcaagcagatggagctaggtggccaattcttgaaggcagcggaggactatggagtcacgaagactgacatgttccagactgttgacctcttcgaaggcaaagacatggcagcagtgcagaggactctaatggctttgggcatcttggccgtgaccaagaattatggacacgctggtggacacgctgg

SEQ ID NO: 829 - DNA, 437 bp, Mesocricetus auratus
  misc_feature (267)..(319): n is a, c, g, or t
gtccagagagctggcaagtgaggacccagcacactggcgcacgtactgtcccatccaggcgtctattcctctcttcctcgcccatgtctgtcctatagctctcttgggctgtacctgctgcccttggcctctggtgatccaagttcaccacctgtccatcacagacattactaactcctggatcattccttctttccaaccctgctatgcttccttctaaggtgcttgatatcccccctgtcatctctctggacccagttcatattnnnnnnnnnnnnnnnnnnnnnnnnnnnnnnnnnnnnnnnnnnnnnnnnnnnnnggtcatccctagctgctttctgcttcatagtctctgaccagtccctgcacaaacaaatctgtggtaaactatctccctgattgccctgcccagccctggaggatgctggaaggtggac

SEQ ID NO: 830 - DNA, 419 bp, Mesocricetus auratus
acatgcagtgatcacagctccttgcaaaatcacccgccccgttcgtctgcttcagttccgcttcttgataagactgcgtgatgcctgaaagcttcataagctttaggatgatgatcgaaccgagtgacttgtaggtctgtaacaatgagaagctcagatcatgggagtctcaacagaagacatctaaagctgttctgtctctatatgtaagactctggacaccaagcgttttcagctaggttcagcacggaagttagttaacctgttgccctgtcacctgggaaggggttcactccatcccatctgtccagccatctatccatcaatccatctatccttccatccatccactcttctatccattcatccattcatccatatcttcttcctatccacccatccatccatccacccaccca

SEQ ID NO: 831 - DNA, 1197 bp, Mesocricetus auratus
acctttttgctcctgcatctggtcccggtggcgctcagcctgtctacctgcagcaccctcgacatggaccagtttatgcgcaagaggatcgaggccatccgcgggcagattctgagtaagctgaagctcaccagccccccggaagactatcctgagccagacgaggtccccccggaggtgatttccatatacaacagtaccagggacttactgcaggaaaaggcaagccggagggcagccgcctgcgagcgagagcggagcgatgaagagtactacgctaaggaggtttataaaatcgacatgccgtcccacttcccctctgaaaatgccatcccgcccactttctacagaccctacttcagaattgtccgcttcgatgtctcgatgatggagaagaacgcttctaatttggtgaaggcagagttcagagtctttcgtttgcagaatcccaaagcgagggtggccgagcagcggatcgaactgtatcagattctcaaatccaaagacttaacgtctccaacgcagcgctacatcgatagcaaggttgtgaaaacgagagccgagggcgaatggctctccttcgatgtgacggacgccgtgcacgagtggcttcaccacaaagacaggaacctgggatttaagataagtttgcactgcccctgttgcaccttcgtgccatttaataataacatcatcccgaataaaagcgaagagctcgaagccagattcgcgggtattgatggcacctcccaacatagcagtggtcatcaggagactataaagtccactaggaagaaaaacagtgggaagacccctcatctcctgctaatgctgctgccctcctacagactggagtcacaacagtccaatcggcggaagaagcgtgctttggatgctgcctattgctttagaaatgtgcaggataattgctgcctccgccctctttacattgatttcaagagggatcttgggtggaaatggatccatgaacccaaagggtataatgccaacttctgtgctggggcatgcccgtatctgtggagttcagacactcagcacaccaaggtcctcagtttgtacaataccataaatccggaagcttctgcttctccttgctgtgtgtcccacgatctggagcctctcaccatcctctactacattggcaacacacccaagatcgaacaactttccaacatg

SEQ ID NO: 832 - DNA, 898 bp, Mesocricetus auratus
actggccattcatccacagttgacatccgtcccgagccagccaacgagaagactccactgtcagcaccatgaatgccagtgctatcctccttttctgcctcatcctgctgagtctgagtgggactcaaggaatccctctttcaaggacagtccgctgctcctgcatcaaaatcgatgaccgaccggtaaaaccgagggccttgggaaaactggaaattattcctgcaagtcaatcctgcccacgtgttgagatcattgtcacaatgaaaaagactgaagagaagagatgtctgaatccagagtctgaggccatcaagagtttattgaaagcagttagccaaagaaggtctaaaagagcctcttaaccagagagaagccgatcaccgcagtgctgtagccgacggacaggcagcggaaagcccgtctctccatcacttctttatacgtcggcctatggctactcctaattgtccctggttcccctgaaaggtgaccagccatggtcacatcagctgctatccctagtgacatcaggtcactattctccaggacgatgggcagctcctcgtcctgagacaacagtaactccagtgacaagagtccccaactctactaagagctggtcctgagttctcatacagacagctgcaatgtttctcctggcgctgtactatataagctacgctgaggtgctacacttttagccttgtgccaagctctacctgctcctcaccctccccaccttaaagtgtgttagcagatctgtccagttctgagttacctgggttctttaatttcaaatacagtcgcaataagactaccacctgcctgctcctacggacaaactttacttcatggcttacagctaccttcccaaggaaacttcataactcagagt

SEQ ID NO: 833 - DNA, 871 bp, Mesocricetus auratus
  misc_feature (623)..(637): n is a, c, g, or t
tcacccacggctgggactcagagttgaaggttgaactccaccttcaggcagaatgaggctcagcatagcagccctgcttctcctgctggccagctgcctctctccaggccacggtatcctggaggccaattacacaaccttaaagtgtagatgttccggaatggtctcaggcgttatccatccaagcttcatagaacaaattcaggtcagatatcgtgggaatggctgcccaaaagatgaagtcctgatctccactaagaataagaaaatcgtatgtgtgaatcctcaagccaaatggctccaaatagtgttaaaacttttacggagcaaaactatgtcttcaacggtcacagcgccagtgagtaagagaaggactacctctacctaaaggccctatccaccaaaggacacctgcaccctcctttattccctgctctgaattctagctgtgctcttagttgaagaatttccaagaaaataacttccttttgcaaacaaacatgactgtctgtaaggaaagccctgcaggagctgaaagggttaacccgagctcctttgcatactcaacctccattcttgtccaaggatgggagtttagttacaacccacttggcctgtgtttnnnnnnnnnnnnnnnctttaatgttaaaccgtcctaagttgtagaggaatggaaactcacatgtaaaacgtgaacctgtaccttgtattaacaagaaatatatggggtgtacatccatcgtttcacatgcttaggaaaagcagctttccagaagtttcctgggcagctgatgcagttccaacctaacacgatgcagagtgaaaagccccatgaagaaaatagagtcctacttttaaaggtttcttgtgt

SEQ ID NO: 834 - DNA, 321 bp, Cricetulus griseus
  misc_feature (201)..(201): n is a, c, g, or t
tgccattttcgttcggtcgtgcctctggattacatggtcttcttcagtttcatcacctggatcctcatccccctcattgtcatgtgcatcatctacctggacatcttctacatcctccgcaacaaactcagtcagaacttgtctggcttcagagagactcgggcattttatggacgggagttcaagacagcaaagtccctntttctggttctcttcttgttcgctttgtgctggttgcctttgtccatcaacaacttggtgtcctactttaacgtcgatataccagagcctgcaatgtgcctggggatcctgctgtcccat

SEQ ID NO: 835 - DNA, 561 bp, Cricetulus griseus
tacttcggttgcatgaaggctgcgcccatgaaagaagcaagcatccatggacaaggcagcttggcctacccaggtgtgcggacccatgggactctggagagcgtgaatgggcccagggcaggttcgagaggtctgtcgacatccctggctgacacttttgaacatgtgatcgaagagctactggatgaggaccagaaggttcggcccaacgaagaaaaccataaggacgcggacttgtattcttcccgggtgatgctcagcagtcaagtgcctttggagcctcctctcctctttctgctagaggaatacaaaaattacctggatgctgcaaacatgtctatgagagtccggcgccactctgacccagcccgccgtggggagctgagcgtgtgtgacagtattagcgagtgggtcacagcggcagataaaaagactgcagtggacatgtcgggtgggactgtcacagtcctggagaaagtcccggtatcaaaaggccaactgaagcaatatttctacgagaccaagtgtaatcccatgggttacacaaaggaaggctgcagg

SEQ ID NO: 836 - DNA, 305 bp, Cricetulus griseus
tacattacattctctttgattgttcttgttattatgctgttttgtgaacctgtagaaaacaagtgctttttatcttgaaattcaacaaatggaaagaataagcatagaataatgcattctatgtagccatgtcactgtgaataacaatttcttgcatatttagccattttaattcctgtttgatttttacttctctgttgctacgcaaaatgatcaaaggaaacttcagttttacaatctgtatgcctaaaagcgggtactaccctttattttactgacttgtttaaatgattcgcttttgtaag

SEQ ID NO: 837 - DNA, 993 bp, Cricetulus griseus
ttcaggggtagtcccttccaggaaaagatgactgcaggagacaactcccagttggtgccagtggtagacacaacaaatatcacagaattctacaacaagtccctctcttcatacaaggagaatgaggagaacattcagtgtggggagaactttatggacatggagtgcttcatgattctgaaccccagtcagcagttggccatagccgtgctgtccctcacactgggcaccttcacagttctggagaacctgctggtgctgtgtgtcatcctgcattcccgcagtctccgatgcaggccttcctaccactttattggcagtctggcagtggctgacctcctggggagcgtcatttttgtctacagctttgttgacttccatgtgttccaccgtaaagacagccccaatgtgtttctgttcaaactgggtggggtcacggcctccttcacagcttctgtgggcagcctgttcctcacagccatcgacaggtacatatccattcacaggcctctggcctataagaggatcgtcaccaggcccaaggctgtagtggccttttgcctgatgtggactattgcaatagtaattgctgtgctgcctctccttggctggaactgcaagaagctacaatctgtttgctcggacattttcccactcatcgatgaaacctacctgatgttctggattggagtcaccagcgtgctgttgctgttcattgtgtatgcatacatgtacattctctggaaggctcacagccatgcagtccgcatgattcaacgtggaacccagaagagcatcataatccacacatcagaagatggcaaggtgcaggtgactcggccggaccaagctcgaatggacattaggctggccaaaaccctcgtcctgatcctggtggtgttgatcatctgctggggccctctgcttgcaatcatggtatatgatgtctttggaaagatgaataagctcatcaagacagtgtttgccttctgt

SEQ ID NO: 838 - DNA, 298 bp, Cricetulus griseus
  misc_feature (122)..(140): n is a, c, g, or t
gtagtatgaagcttcagagtgcaaactgaagctgaaaccgtggaccatcgggagatcatgtccagcttctaaacacagactccacggacaaaagctcttctcttttgtgtttcttttacgtnnnnnnnnnnnnnnnnnnnaaaccacacggactggggactggggatgaccaaatgttcttctgtaacaactgagtattgaatttccttggacaaccgaaaatagctctgtatccacaacaacaaagaatctcctattcctgacaggcagagttgaaccatgatacacaacttaaaca

SEQ ID NO: 839 - DNA, 774 bp, Cricetulus griseus
gactacctgaatggtcctttcacggtagtggtgaaggagtcttgcgatgggatgggggatgtgagtgagaagcatgggagtgggcctgcagtcccagaaaaggcggttcgtttttcattcacagtcatgagaattacgatagatcatgactccaagaatgtgaaggtgtttgaggaacccaaacccaattctgaactgtgttgcaagccattgtgtcttatgctggcagatgagtccgatcacgagaccctgactgctatcctaagccccctcattgctgaaagggaagccatgaagagcagtgaattaatgcttgagatgggaggcatcctcaggactttcaagttcatcttcaggggcactggatatgatgaaaaacttgtccgggaagtagaaggcttggaagcctctggctcagtctacatctgtacactttgtgatgccactcgtctggaagcctctcaaaatcttgtcttccactccataaccagaagccatgctgagaacctggagcgctatgaggtttggcggtccaatccctatcacgagtcagtggaagaactccgggatcgggtgaaaggggtctctgccaaacctttcatcgaaacagtcccttccatagatgcactccactgtgatattggcaatgcggctgaattctataagattttccagctggagataggggaagtgtataaaaatcccaatgcctctaaagaggaaaggaagagatggcaggccacactggataaacatctccggaaaaggatgaac

SEQ ID NO: 840 - DNA, 444 bp, Cricetulus griseus
aagatttatatcatgtctgttgcttgcaagaacaacaaaaaagttactttccgttgcacagagaaagatttagtaggagatgtccccgaagccagatatggtcattccattgatgtggtatatagtagagggaaaagtatgggtgttctcttcggaggacgatcatacatgccttctacccagagaaccacagaaaaatggaatagtgtagctgattgcctgcctcatattttcttggtagattttgaatttgggtgtgctacatcatatgttcttccagaacttcaggatgggctgtcttttcatgtttctattgccagaaatgatactatttacattttaggaggacactcacttgccaataacatccgccctgccaacctgtatagaataagggtagatcttcccttgggtagcccagcagtgaattgtacagtcttgcca

SEQ ID NO: 841 - DNA, 426 bp, Cricetulus griseus
tcttgccaggacatccttctgtccagtgcaccctctggacctcaatttcccttcaaaggggtggatgatcgtgagtcctggccctctgtgttttataatagaacctgtcagtgctctggcaacttcatgggattcaactgcggaaactgtaagtttggatttgggggatcaaattgcacagagaagcgactcttaattagaagaaacatctttgatttgactgtcccagaaaagaataagttctttgcttacctaaatttagcaaaacatactatcagcccagtctatgtcatccccacaggcacatatggccaaatgaacaatggatcaatacccatgtttagtaatataagcgtctatgacctctttgtatggatgcattactatgtgtcaagagacaccctgcttggaggttctgaaatctgg

SEQ ID NO: 842 - DNA, 204 bp, Cricetulus griseus
ctgactgtctacccttgcatgatttgtgggaagaagtttaaatcgagaggtttcttgaaaagacacatgaaaaaccatcctgaacaccttgccaagaagaagtaccgctgtactgactgtgactacactaccaacaagaagataagtttacacaatcacctggagagccacaagctgaccagcaaggcagagaaggccatagaa

SEQ ID NO: 843 - DNA, 97 bp, Phodopus sungorus
ttcagggcctgcatcctggagatggtgtgcaggaagcccatgacagacgaatccaacatatctggctctcagaagacacaagtttctactgtctctt

SEQ ID NO: 844 - DNA, 110 bp, Mesocricetus auratus
ccgggcctgcatcctggagatggtatgcaggaagcccatgacagatgaatctgacatatctggctctcagaagacacaagtttctactgtctcttcagcaaaggttgaat

SEQ ID NO: 845 - DNA, 121 bp, Cricetulus griseus
  misc_feature (95)..(96): n is a, c, g, or t
gcccacacccgcggtggagggcgcagtggcctcgggagcgctggccgacccggccactgccgctgcagacagacgcgcatccagcatagctgctnnaggctcaaggccaaggagcatgccg

SEQ ID NO: 846 - DNA, 459 bp, Mesocricetus auratus
  misc_feature (87)..(113): n is a, c, g, or t
ttgaggccagattcggaagccagccagagcccacagtatggctttgactccttacctcagaagatctgtttaatctgtggagatgannnnnnnnnnnnnnnnnnnnnnnnnnncacctgtgggagctgcaaggtcttctttaagagggcgatggaagggcaacataactatttatgtgctggaagaaatgactgcattgttgacaaaatccgcagaaaaaactgcccagcatgtcgcctgagaaagtgctgtcaggctggcatggtccttggaggtcggaagtttaagaagttcagtaaggtccgagttatgagagctctcgacggtgttgctgtccctcagtcagtgggacttcccaatgagagccagcccataggccagagaatcaccttctcaccaagtcaggaaatgcagcttatccctccgctcatcaacctgctcatgaccattgagcccgat

SEQ ID NO: 847 - DNA, 1472 bp, Cricetulus longicaudatus
  misc_feature (312)..(362): n is a, c, g, or t
ccatgccaagggagaggaaggagagagatgcccaggaccacggcggcatcagggaagaaggtggccctgactcctcggtgcgctccaggaaaaggaaggcgaatgtggccgtttttttgcaagatccagatgaagaaatcgccagagttgacaagactgtgaaaagccaggatagcagtcagccttgggatgataattcagcctgtgtggacccatgcgctttcacccccacccctaataaagaagaggacgatgagcttgagtaccccaagactgcgtttcagcctcggaaaatcaggccacccagggccnnnnnnnnnnnnnnnnnnnnnnnnnnnnnnnnnnnnnnnnnnnnnnnnnnnatgttaaacaaggagaagatttacctaagagatgagcactttctgcaacgccatcctctcctgcaggcaaggatgcgagcagttcttctggattggctaatggaggtgtgcgaagtctataagcttcacagggagacattccatctggcgcaagacttctttgatcgttacatggcatcacaacaaaatatactgaaaacacttttacagctcattgggatttcagctttatttattgcttctaaacttgaggaaatctaccctccaaagttgcaccagtttgcttacgttacagatggcgcttgttccggagatgaaattctccagatggaattaatgatgatgaaggcccttaagtggcgtttaagcccaatgaccattgtgtcctggctgaacgtgtatgtccaagtggcttatgtcaatgacacaagcgaggtgctactgcctcagtacccacagcaggtctttgtgcagattgctgagcttttagatctgtgtgtcctggatgtcggctgcttagaatttccttatggtgtccttgctgcttctgccttgtatcatttctcctccatggaactgatgcagaaggtttcagggtatcagtggtgcgacatagagaaatgtgtcaagtggatggttccgttcgccatggccttccgggaggtgggaagctccaagctcaagcacttccggggagttcccatggaaaacgcccacaacatccagacccacgccaacagcttggatttgctggacaaagcccaggcaaagaaagccatattgtcagaacagaacaggatccctcctcctcccagtggggtcctgacacccccacccagcagtaagaagcagaacagtgaggaggagacagaatgagcaaacctgccaaagacagtgttgtggaagcagctgcctggagctcctttgctgcctaggaggttgggagcccctgctgatgctctgcggaaaggcgtatctcttccagagcagcgggcgtcttcaaaatggcctcggacagaagtgcttgtatggaatgctagttgttttaacaatagggttgaggacaccagccacctccagaacgccgctgagtgctccagaagctgctaa

SEQ ID NO: 848 - DNA, 190 bp, Mesocricetus auratus
gctggggaaagacacaaattgttctacagcagtgcttattagcttggtcacaaccggaaagttgcttaagttcacaaagacacatcccttttctaatgaagcagaaaacaacttctctggctgctttctgatgagggttaagtacagacattgccaagataaaattttaccatgtaactcctaaagctct

SEQ ID NO: 849 - DNA, 241 bp, Mesocricetus auratus
gatcacgtgcgtcagcccatcctcctcagactttgatgagtccttaaattctctcaaatatgccaacagagcacggaacattagaaacaagcctactctaaactttagccctgagtcagaccggatggatgagatggaatttgagattaagttgcttcgagaagctttgcagagccatcaggccagtatcagtcaaactagccagaccccctcagagggtgcttctgaccacaatcggatc

SEQ ID NO: 850 - DNA, 221 bp, Mesocricetus auratus
gcttcaaggaaatagtgctgcaaacaagaaccttctttgaagatgagcaagatgacgtgagactgactgccatcttcttatttgaggatttagcgtccctaacaggaagaaggtggaagctattttttgctgaagaagtaaaaaagagcatgacttccttccttctccacctctgggacccgaaccctaagattggagctgcttgccgtgatgtcttgatc

SEQ ID NO: 851 - DNA, 205 bp, Mesocricetus auratus
gatcctggctgtgaagccagccaaagagatgagttcattattgaaaagttaaagtcggctgtgagcgaaatagcactgagcaggagcaagttacaggacgagaaccagaagcttctgcaagagctgaagacgtgtcagaggcagtgccaggccatggaagcaggactgtcagaggtgaagaatgagttacagtcacgcgatgatc

SEQ ID NO: 852 - DNA, 142 bp, Mesocricetus auratus
gatcgagccatcagagggaaaagagcagtggaagaagaacttgagaagatttaccgtgaaggcaagcaggatgaaggtgattacagaaaactggaagaaatgcaccaaagatgtcttgctgcagaacgttcaaaagatgatc

SEQ ID NO: 853 - DNA, 178 bp, Mesocricetus auratus
  misc_feature (25)..(39): n is a, c, g, or t
gatctgaagaggacgtttaaggagnnnnnnnnnnnnnnncggacactgaggacaaaggcaaaatgtctagaagatgagcgcttaaggactgaagatgagttgtcaaaatacagggaaattatcaatcgtcagaaagctgagattcagaatttactggacagagtgaaagtggcagatc

SEQ ID NO: 854 - DNA, 212 bp, Mesocricetus auratus
gtgactgcgcaccacaactttccttcggagacctcataggaccgggagtgtttccagccttgcgggccaccccagccttctgcaaagcctcgcccatgccgcctgcgttttcagggtcctgctcagctctgaccctgaagtcatctccagtgctttcctcttcttctaagggccatggcatggcttcatgtaatacagatttggggcagatc

SEQ ID NO: 855 - DNA, 1858 bp, Mesocricetus auratus
  misc_feature (1072)..(1095): n is a, c, g, or t
gcggccgccttacaaataccatctctaagacagcggtccgcgtctgcgcctctgggtcctcctcatccggcggagccttcgctcccgtgcaggagtttctttctccagagccgagtctgcctgtgaagcgaagatagctgtccccctgcctcggtgaagactccgaagtcatgtctaccggaccctttccatcttcgagaagagaggagagttctgtttcagcacccagttttaggttcagtcagaggaagatgttaaacctacttttggaaagaaacacttcttttacccaagatttccccagatctccaggagacaagcttctcgactcgacaaacctaagcattttatctggagggaccccaaaacgttgccttgatctttcaaatcttagcaatggagagatgtctgcttctccgcttatcacttcggctgacttcgatgacaccggttccttggattcctcaggaccccaggatgtgcagttaactgagaagaaccatcaccaggaccctatgaaaggcatcccagttcagcttctctgtagtactccaaacgctttggaccatagccacagaaagaaagatgcagtgcgtggcttatctgcaaataaagaaaacataaacaccaatctaaagacattgcagtgggagtcacctaggatcccaaggtttcaaaacacgcctggagatcctctggcttctccccttcctttgctgggaaatggagtctcgatggacactgaagtgaggtctctggggagtcccatcactgcagttcccaagctgagtaaaaatctaaatctagaagaccaagaagagatttcagaggagccaatggagttttccctggaagaccacgataccaaggagtgtgtgcttccaacggtgtcagggaaacaccaagatctgaagtacatcaccccagacacggtggctgctttactgtctggaaagttccagggtctgatcgagaagttttacatcatcgattgccgctacccgtatgagtaccttggaggacacatcctgggagccataaacctgtgcagccagaaggaactgcacgagtnnnnnnnnnnnnnnnnnnnnnnnnctctggacatccagaaaagagtcatcattgtgttcctctgtgaattctcctcagagagaggcccccgaatgtgccgttctctgagaaggaaagacagagctctgaaccagtatccagcattgtactacccagagctgtatatcctcaaagggggctacagagacttctttccagaatatacggagctgtgcgaaccccagggctactgtcctatgcaccaccaggaccaccaggctgagctgctgatgtggcgaaaccagagcaaagcccaggaaggggagcggcagctttcggagcagattgccctcctgatgaagaagggtgtgagcctcccatagtgggtggtggtggcgcacacctttaaccccagcacccgggaggcagaggtaggaggatctctgcgtttgaaatcagcctgtctacgacacagcaagttccaggacagccagagctacaaggaaaacatctcagaaaaacaaaaaacaatttctgtcaagtatggagcagatgcctgttgcctgtgtgcttgaaaggtggacctagaggacctgaagctcagttcaaggccagcctcagctcctggattccctagctcactaaatggaaacaaaaccgaaaggcatagtaaccattgctctggaaccaagggaaagtttcatttgtattcttgaactggtgttggtggtaaatgtttgtattcctaagaggtcatggcaggaagatgatgagttaaagaacaagataaagtctgtggtgcggccgc

SEQ ID NO: 856 - DNA, 8703 bp, Mesocricetus auratus
  misc_feature (279)..(291): n is a, c, g, or t
  misc_feature (293)..(321): n is a, c, g, or t
  misc_feature (331)..(349): n is a, c, g, or t
  misc_feature (402)..(414): n is a, c, g, or t
  misc_feature (417)..(446): n is a, c, g, or t
  misc_feature (1384)..(1455): n is a, c, g, or t
  misc_feature (1728)..(1776): n is a, c, g, or t
  misc_feature (2778)..(2795): n is a, c, g, or t
  misc_feature (3235)..(3257): n is a, c, g, or t
  misc_feature (3287)..(3340): n is a, c, g, or t
  misc_feature (3342)..(3362): n is a, c, g, or t
  misc_feature (4001)..(4025): n is a, c, g, or t
  misc_feature (4437)..(4454): n is a, c, g, or t
  misc_feature (4895)..(4922): n is a, c, g, or t
  misc_feature (7677)..(7701): n is a, c, g, or t
  misc_feature (7861)..(7903): n is a, c, g, or t
  misc_feature (7932)..(7949): n is a, c, g, or t
  misc_feature (8381)..(8418): n is a, c, g, or t
cagctggtcaacggatcaagaagcaaaggggaatccattcctgagggagtagcaatagggacctggatgagattatggccatggggctagacagatgtcaaaatggacagacgtattcttggcctgtgtaatcttgctcaggtcgccccagcccacactacagattctcattctcattctcattctcctcgtggggtacttcttgcacagcggcaaatgtcaagagagatcctcctctgattcccacaacctctgcacataaaaagcacatctgggccnnnnnnnnnnnnngnnnnnnnnnnnnnnnnnnnnnnnnnnnnngaggcaggcnnnnnnnnnnnnnnnnnnntccagcctggactaccaagcgagttccaggacagcctccaaaacaatacagannnnnnnnnnnnngannnnnnnnnnnnnnnnnnnnnnnnnnnnnntcacatctggaaccactgtgcctaggaggtgtaccctctatcaggtgcatcctccaggtagatgcctgggagacttgattcttcattccaccattttaaccctgctcagtgtcacctcaggcagcattcccctggccaccccatttgcagttgttatcacttttgtttctgttgccccctttttttgcaccatgccagtctctgtgttttgttgcttatcacctgtctcccccaccagagggtaaactccgtcaaaggcattgctagattcgttcctagtgcccagagcatagtaggaccttgcaaattggtgagcaatgcagtagaatgggaggtgagggagtggatgaggtttttttgttttgtttcactttgtttcccccccccccctggttttggtcacagagcagatggcagcattatttcttggtttgggatctcacaatggagggaaactgaagatgttagctagggacagattgagctgagttaacaagtttagcttttctccttagacatcttactttgggagccctattcagggcccagagtgcctgcaaaccagccagctaggctgccggtggtgctgggtgtcctgccactaaaaatgtggacacacgctgtcaggccttgtcaggctttgctctcaggcagaagccaggctctgcacgcaaacctggccctttgcaccgcccgactctgtttagtcgcacccttgcaaagcttagaatacttctatctctcaagccccaccccaacgccccaagacagactggccctttaagagcctcaccccccccccccccccgccttcccctcccgctgctagcgtgactgcactgggacccgcgcccggttgtgagctgagtagctgggtggctgcgcgcgggcctccaggacttctcacgctactcacgggcacctcgcccccagccagnnnnnnnnnnnnnnnnnnnnnnnnnnnnnnnnnnnnnnnnnnnnnnnnnnnnnnnnnnnnnnnnnnnnnnnncgtgcgtgcgcaccgagctcccctccactatgtgcccctgatcctcctgccgactcgcgtggatcccttcctccactctttcctccactgttcgcagctagttccacagctacccgccacttgatttctctttgtggtctgcttctatatgcaaaacattagcaagaccctgagctgcaagaggggtctctccttgtagattgcctaaggtgaccctagaggtgcgatctgcaaccctctatcatccccacccctagatcaagcagcatgaannnnnnnnnnnnnnnnnnnnnnnnnnnnnnnnnnnnnnnnnnnnnnnnnactggtcttcctgtccgtgacctcggggctggggtcgttgtgcttctcacgcgagcttggactcaggaaccagagaaggaaagtcaccaagtcaccacccagcagctcttcctccaccagcctttcctggcatccattagcttgaagtgggagagagaattttacacattcagtgttttcgggcacaaaaatagtggaatggaatctcctccgttgcccggaatggaggccccaataattgctttgtaggctgtcataggatttccccctcgaacccctccttcaacagaattctatgctgttcatggagaaccttgaaagtggtggtgaccccagccttcactttttagtgtgcccgcacctatattagctgtccttataatggcttcttgcctatctcccccacccccacccacacctagagcactccctaaggctgcccctcccgctgtcccaccactgggctccaaggaagagggcgtggcacagacacagagtcctataaaggtggtggtgccttcaccctgaccctgcaggttccttggatctttccctgatccactttggggtatcctgagagcacacttttagttcagcacctcctcacaaccaacggtgagtactgagggctcctggcttgcccctccttccccagaaaggggaagtttggatgaagggctgctgggtagccctccatgataagagactaggatccttttttgtggtcatgcaaattccttagaggagaaagtgagggcagagaactaaaaggacttccgaagttccagtagctagcgtcagatctttagatgcaaatgaatatcctctactctcaggttaacttcattgcctcactaatcagtgggggtgggggcttccccattcttgcacatgtagccccatcctcaggactgccagtgggggaagagggctgctgtctggctgggtagggtggatacagaggagacacactgagtttttcctagctgtactctgtcttannnnnnnnnnnnnnnnnngagcctccaccctcccaaaggtagcatgtcagagctgagagtttctggatggcttcagaagaacctggggcaccaaccctcggctcaggggttcccagccccatcctttctgggatacaacctgcttgatagactgttagctggtggaaacacaagttgcatttcccctggctcttctatcttacaaagactagaagcccttaggataccaattatgttgaaggagaaaccattgtgaccagaatggcagtatcccacttcactgaaggaattgagtctcttgtatgtttgagagttagtcctccaggaagccccctctcacttcaaggtgactgtactatttggggtaggaattgtacatcttgccttctgtggttcagatcttcttttcccaggatctgtaacctctgaatcgggcaatcttttgtttgtttatttgnnnnnnnnnnnnnnnnnnnnnnnattgttttggaggctgtcctgaaactcgcnnnnnnnnnnnnnnnnnnnnnnnnnnnnnnnnnnnnnnnnnnnnnnnnnnnnnncnnnnnnnnnnnnnnnnnnnnngcaccaccaacacccggcataccttttctagaacaagcctaaagagaaagtgtcctcttagtttttgttgtgttgagatccactcttggcttttctgatttcagtcagtagtttccttacagccctagtctgatgggaatcttccatttatttttttgctttctaacacctgcaaaagtgggagaagctcaggctattcattcatgagaactgagcacaacaaaaagcctggcttggattgctcctactaggagcatttgtggctgcttttaaagtgtggctcagttgaactcaaagaactaaagctgagagaaatgtggcttgggtgttaattttctgtaccctctcccattcctgtctactactgggttcatgtgggattctgtataccttgagatgaacagaaaaacctgataactaatttttccccaaagggaggcacctgtgatagtaactcggcattccctggaactttccctaagagctttgagtcctggccctgtcactgttactgaatgacttgggcaagtcagtgacccaactgcaggtttatttccctgttagagtatgaaatgaggctgacggagcaaatgatctctatttccctatcggatggcttccctaaaagtggcgggtaannnnnnnnnnnnnnnnnnnnnnnnnatgtgctaattgtgcatttattggaatgggttgggagttggaagctgtatttagacacagaggttgtttaagatcatgctgcctggatggggagatggctcagctgttaaaggctaggctcacaaccaaaatacaagatgatgctgcttggtggatgtaaaactgattttaggaaatacgaagtaaatgacagcattggggttaatggaaaccaaagacactggaagtcactgtttgaaatctcaccacagaagttaagagaggttttctggaagtagctgtgtaactttgagaatgttacttaccctttctgagtcttactacagccttcctcataggcttagggctaaggttgaataaaaaatcactgtgtgtgtgtgaggagtatgatcaaaccaaaccacacttagcnnnnnnnnnnnnnnnnnntctctataagagagttcagttcaggctggagagatggctcagaggttaagagcactggttcctcttccagagaacctgggttcacttcccagcacccacatggcagctcacaactgtctgtaattccagctctagaggacctgacatcttcatagagacattcatgcaggtaaaacaccaatgcgcataaaaataaataaacttaaaaagagagagttcagttcacctgaccccagctttctgtgtgtggagaaaagagaactgtggaatttttggcatatggtggcagctcaacaatctctgtctccctccatgcctagtgagcagctctaggctccttttttccttggccagcatgcgaccctttaagatattcgtctctcccctcaatctgatggcctgtcttttctttcttcttgtctcacctctcagcagccgtcnnnnnnnnnnnnnnnnnnnnnnnnnnnntaaacttcatgtcagccacagagctactcctggccatcactgtcttctgcctgggattctgggtggtcagagctttaagaacccaggtccccaaaggcttgaagactccaccagggccctggggcttgcccattcttgggcatgtgctgaccctggggaagaacccacacctgtcgctgacaaagctgagtaagcagtatggggatgtactgcagatccgcattggctccacacctgtggtggtgctgagtggcctggacaccatccggcaggccctggtgcggcagggagatgacttcaagggccggccagacttctacagtttcacacttatcactaatggcaagagcatgaccttcaacccagactgtggaccagtgtgggctgcccggcggcgcctggcccaggatgccctgaaaagtttctctatagccttagacccagcttctgcatcttcttgctacttggaggagtacgtgatcaaggaggctgattacctaattagcaagttccagaaactgatggcagaggttggccactttgaccctgataggtatttggtagtgtcagtgaccaatgttatctgtgccatgtgctttggccaacgttatgaccatgatgaccaagagctgcttagcatagtcaatctgagcaatgagtttgggaaagttaccggctctgggtacccacctgacttcatccctatcctccgctacctacctaactcttccctggatgccttcaaggacttgaataagaagttctacagcttcatgcagaagtcagtcaaagagcactacagaacatttgagaaggtagagtctggggagaggcaggtgcttgtcggaggctcccatgggccccttatatcatcacattcaactttgaagccagtagcagagtgtaccccatcttcagcaaccaatggaacttctcttggccatttcttccatgcatccatcagacgagagccaccgaagaaggggagccctgggcagttcttactggatcaggaagaatttaaaaacctgtctcctggtctcatggtagaaaaaaattaaaggtcattctacttatcaagagtgtcaggctctgtgcctctagggtcccttgagttaaaaggggcaacaaccagtactctgaggtaggaaagagacttggagaggcaacgagaagctaggacagcagcctcagagtgtcacctcctgaacaaaggtgctattgactttgaggggccaggcctagatacaggtctgtctggacttgggatatgtctcaccttgtgctcctttgcccccagggtcacatccgggacatcacagacagcctcattgagcactgtcaggacaaaagtttggacgagaatgccaatgtccagttgtccgacgacagggtcattaatatcattgttgacctctttggagctggtatgtgctcttcagtgtatcatttctgagctcaggtgccccaagccgccacataactaacttctccctctgttctatcctgttcagggtttgacacagtcacaactgctatctcttggagtctcatgtacttggtgacaaaccctggggtgcagagaaagatccaggaggagctaggtaggtggtgactccattcaagggactctaagtaggacactgtgataaagtctgggcaacccctttaatactcttgaatccccatgttctacagacacagtgattggcaggagtcgaaggccccggctttgtgacagatctcagctgccctatctggaggccttcatcctggagactttccggcattcttcctttctccccttcaccatcccccacaggtcaggccatagagtcactgatattcgatattaggccttagttagtatacacagccagctggggctcctgagaggggcatggcatgggaaacagggggtagatttcccctacggccctgagcctgactgagcttcctctttctccagcaccacaagagataccagtctgtgtggcttctatatccccaagggacattgtgtctttgtgaaccagtggcagattaaccataaccagtaagttgatggggcagtggaaactccctgggtgcactaggtccatcctctcctgagctgcagaacccattgccatttggggactgacctaattgatgcttataagctcctgaacatctacttcaactgtctctctttgcttacagggaactgtggggtgacccaaacaagttccggcctgaaaggtttctcacctccagtggcactctggacaaggtcctgagtgggaaggtcactctctttggtttgggcaagcggaagtgcattggggagaccattggccgattggaggtctttctcttcctggccatcttgctgcagcaaatagaattcactgtgtcaccaggggagaaggtggacatgactcctatctatgggctgactttaaagcacgcccgctgcgaatacttccaagcgcagacacggtcctctgggcctcagcatccacaagcttagactgccctgtgtggtcaccagagcagggggctgttccagggatttaacttcactcagaaacacagactctgggcttgtgcttgcctcctgatttggtcttgcttctccgcatgctgatcacagacactgggcacagcagagacccactggaacatcagagtcttcccaagttcaccagcaactaggggggcctgaaagggaaaggaggtccctgggcctcagaaaactcctgcagagtccccnnnnnnnnnnnnnnnnnnnnnnnnngaaaaatgcttagagcatggtcatgccaggatctgtcaggcttagaggagctgtccagaatagagggagaagacatcttaaaatactgccacaggcctgtccacgtttgccaggcattggtggtgcacacctttaattccagcactggggaagcagacgnnnnnnnnnnnnnnnnnnnnnnnnnnnnnnnnnnnnnnnnnnncgagttccagaacagcctccaaaacaatnnnnnnnnnnnnnnnnnncaaaaaccaaaataaacatgctgccacagaagtgcttctgccatttactagggctggacagctttcccacatgggtctaggacgatgtctgtggtgatcacctttatttgtccagggtactcctgtccttgcaaaagcccccgttcctgctctggaagtgctgtgtcttgtgtctaggaagatccaagaacagagggacagactttctgggcagtaggaccaggtcaagagtaaagggatgactcttgagacaagagtcttgtgcagctcagattgcctctgagcctgctgtgtattgatcgtgaattacttacttttttaatgcttttactgacataccaagtgctaggatacagtcattggtctctcttctttactgtataaaatgttcatttaaaaaatgtttgtaccagctgggcggtggagatgcgnnnnnnnnnnnnnnnnnnnnnnnnnnnnnnnnnnnnnncgatttctctgagttcgagaccagcctggcctacaagaactagttctaggacaggcctccaaagccacagaaaaaccctgacttgaaaactccccccccccaccgcaaaaaataaatgtttgtacctaagaccttttattttggcccatattttgcttatgcatttgtattagtcatatcttaagagtttagatcaatgcatttactattacagagaaaaccctaactcaagtatccagaaatatataggaactacctacctgagctaaataaaatattacctgg

SEQ ID NO: 857 - DNA, 9724 bp, Mesocricetus auratus
  misc_feature (9)..(61): n is a, c, g, or t
  misc_feature (188)..(211): n is a, c, g, or t
  misc_feature (234)..(314): n is a, c, g, or t
  misc_feature (465)..(498): n is a, c, g, or t
  misc_feature (751)..(769): n is a, c, g, or t
  misc_feature (1004)..(1038): n is a, c, g, or t
  misc_feature (1053)..(1144): n is a, c, g, or t
  misc_feature (1934)..(1966): n is a, c, g, or t
  misc_feature (2154)..(2197): n is a, c, g, or t
  misc_feature (2260)..(2298): n is a, c, g, or t
  misc_feature (2644)..(2690): n is a, c, g, or t
  misc_feature (2964)..(3028): n is a, c, g, or t
  misc_feature (3319)..(3336): n is a, c, g, or t
  misc_feature (4537)..(4584): n is a, c, g, or t
  misc_feature (4709)..(4781): n is a, c, g, or t
  misc_feature (5958)..(6055): n is a, c, g, or t
  misc_feature (6257)..(6289): n is a, c, g, or t
  misc_feature (6698)..(6712): n is a, c, g, or t
  misc_feature (8335)..(8349): n is a, c, g, or t
  misc_feature (8404)..(8487): n is a, c, g, or t
  misc_feature (8650)..(8666): n is a, c, g, or t
  misc_feature (8668)..(8694): n is a, c, g, or t
  misc_feature (8706)..(8738): n is a, c, g, or t
aagcttaannnnnnnnnnnnnnnnnnnnnnnnnnnnnnnnnnnnnnnnnnnnnnnnnnnnngtatctgtgtgccttggtgctcacacggaagtcagaggacatctttcaggatctagacttggcagcaaacatcttaacccacttagccatgttgacatcccagaatttgtgtatatgtatatgtaannnnnnnnnnnnnnnnnnnnnnnngtatttttttattttttctccgnnnnnnnnnnnnnnnnnnnnnnnnnnnnnnnnnnnnnnnnnnnnnnnnnnnnnnnnnnnnnnnnnnnnnnnnnnnnnnnnntacctctgcctcctgagtgctggaactataggtgttcaccaccattgccaagtttataatttttttttggttttacgagacagggtttctctgtattgttttggaggctgtcggtccagcctggccttgaatttacagagatccgcctgtnnnnnnnnnnnnnnnnnnnnnnnnnnnnnnnnnncgccaccaccaagtttgataatttttaaagttgtaaattttttatctgttgtgtgtgtataagaaagagagagtacacatttgccaatatgtgaactgccaaggcacacatgtgaaggtcagaggataattcctcccaccatgtgagtcctggggattctactcaggtcaccaggcttgctggcaaacacctttacccgctgagccatctcaacaaacaccaacatgtaggggtttttgttttttcttgactnnnnnnnnnnnnnnnnnnncttttgttgcaggtatcatgatacctcacccctaaagcatgcagcaacctcctaagaacaagaacattgtcccacatgtgacagtttgagaacagcccccatagctcatacattagaataattagttccctgttagtggaacagcttaggaagtattaggaaatgtggccttgctggggaaattgtgtcactgggggtggattttgaggtttcaaaactccacaccaagcccaannnnnnnnnnnnnnnnnnnnnnnnnnnnnnnnnnnggaggctgtcctggnnnnnnnnnnnnnnnnnnnnnnnnnnnnnnnnnnnnnnnnnnnnnnnnnnnnnnnnnnnnnnnnnnnnnnnnnnnnnnnnnnnnnnnnnnnnacgcccggccaccaactcaatcttgatctctctctgcctgctgcctgtggataagcatgcaaagctctcagctactgcttttgtgacatgcctgtctgcttcctgccatggtgatcatggactaatcctctaaaactgcaaccaaatccccaattaaatgctttatttcataagagttgcctgggtcatggtgtgtcttcacagaactagaacagtaactaagataccatgtaagtatgatcgtatgtcacatctgagaaaattagtattcactcaagaatctagcttattctccaggccatgtccatgagtcctcaattatctttccaaaaatggcttctgtaaaacatagactccaagttcatatatggcatttaatttttttggagagttactatatagctctggctgtcctagaacttactacctagaccaggctgaccttgaactcatagagatatagctacttacactgccccagtgctgggattaaagaggtatgctaccatacccagccctgcatttgcttacattcttttgcttcttggttctggaatttgtctagtcaacaataatgttgagtagaagagtccaagatggctgccacaaggagcaattcattccatacatttgtttcattgactattaatttcttactgtcatacacaaggaaggtatagagagaatctctttaaaattctaaagaaaataaaagttggagggagaagtcaagacacagttcagtggcagagtcctcgttaagtatgtttgtggatgtaggttcaatttnnnnnnnnnnnnnnnnnnnnnnnnnnnnnnnnntaatgggacatgttgaggtagctaggacatacttgtgatggttaatctccaatatcatctagagtgatctagaagattccccttaggacatagctttccaaaaagattaactgaggacaggagacccatcctgactgtggaccatgccatggaccacaccatccctaggcttccggccctggttgaannnnnnnnnnnnnnnnnnnnnnnnnnnnnnnnnnnnnnnnnnnntctgtacatatgcatatgtgtatagagactttagcatcaccattcatctctctctgcattctnnnnnnnnnnnnnnnnnnnnnnnnnnnnnnnnnnnnnnnctgctgtgacttccctgccaccatggactacacgccaaaattgtgatccaaaataaacttagttttgttagtagtttgtcacatggagaaaagtcactatctgccttcacagggaacatgagctacccctagttggcctgggctggggtctagacatgtccctttcttgtgagtacagtggcttaattttcacacccaggactctgccctgtctatgaaagagttgtattcctccatcctgaaccctaaaataccatggatatttatctccaaggacccataacctcttctgacccaaaagaattattccccaacctccagtaggaggtggagttgaggaataatnnnnnnnnnnnnnnnnnnnnnnnnnnnnnnnnnnnnnnnnnnnnnnntttgatatcaagtgacccagacagttgggccagtccggagaggacagtgttataaaaggcccctcatctgaacccaggagtactggactgactctcacaactctgagacctgcagcccctgcccttcaggtatgtctgtgtgtcttttctgatcatggcatctgcttctatatcctaaatgatatcagagatggagaaatgggaaccctgtgggaactgagggaggtctgaggttttgttccttgtttctcaggcctgaaccttagtttctcannnnnnnnnnnnnnnnnnnnnnnnnnnnnnnnnnnnnnnnnnnnnnnnnnnnnnnnnnnnnnnnncctgcctgcctgcctgcctgcctgcccaaatgcctgcccaaatgccacagctcagagaaaaactttcaggcgtcagttgctagttctccttccaccatgtggatcaaactcgggttgtcatgcttggtaccaagtgctgtgaaccactgagtcatctcactgggccctgttttttgttattgttgttgtttgtttgagtcagggtttctctgtgttagctttggagtctgtcctggaattctctctgtagaccaggctggcctcaaactcaaagagattctgctgtctctnnnnnnnnnnnnnnnnnngttaaagtcatgtgccaccaccacctggcactagcccctgtctttaattaagcagtttcaacgaggctaactctaatgacagttgcctggagtgaaaaggtaggggagagaatacttgcctgaggaggtgaatgaagactcatatttggaggggatgcccctgcttggtattgatagagcaccattgagggaagggaataccagaggacattggtaccatcccagggacactgaccttctgcggcttgggcaagggggtatcttttgttccctgggtgtgtagaaggtaccaacaggaatcccacactgtgttggaccttttggcagaaagcctagcaaacactgtgattgggctgttgagaagctgtctttacttcattgttttggagtgatcatttgcatccattctagtctcagaattggaaatgaagaagaggcagacaggggagcctggggtgaaattcagacattaagttgataaatgcaaggttcttttgatgcccttgaattttgtgatgggggaaggaaaaattcctgagggaccaggacatatgacagggtataccttcactttcctggccgaaagctaagcataggatgtatgcctactgaatgagtgagcaaaagaatcaatggaggctcagaatccacccataaccaccccatccttccatttctcctacagctggtacacatggcactgtcccagtacacctccttgtccacagagctagtactggccactgccatcttctgtatagtattttgggtggccagagctttaagaacccaggtccccaaaggcttgaagactccaccagggccctggggcttgcccattcttgggcatgtgctgaccctggggaagaacccacacctgtcgctgacaaagctgagcaagcagtatggggatgtactgcagatccgcattggctccacacctgtggtggtgctgagtggcctggacaccatccggcaggccctggtgcggcagggagatgacttcaagggccggccagacctctacagtttcacacttatcactaatggcaagagcatgaccttcaacccagactgtggaccagtgtgggctgcccggcggcgcctggcccaggatgccctgaaaagtttctccatagcctcagacccaacctcagcatcctcttgctacttagaggaccatgtgatcaaggaggctaannnnnnnnnnnnnnnnnnnnnnnnnnnnnnnnnnnnnnnnnnnnnnnncgaacccgtcaaccaggtggtagaatcagtggctaacgtcattggagccatgtgctttgggaagaacttcccccggaagagtgaggagatgctgagaattgtaaagggtagtagcgactttgtgnnnnnnnnnnnnnnnnnnnnnnnnnnnnnnnnnnnnnnnnnnnnnnnnnnnnnnnnnnnnnnnnnnnnnnnnnaggtttaagaacttcaatgataactttgtgctgtttctccagaaaacagtccaggagcactatcaagacttcaacaaggtgagactgggaggcaggttgtaaatcccatcgccaacacaagcccagaatacacccctcaaatcctactccaaagtactcagacttgccatggcctaggaaggctccaagccactcagagcaactgtgtgccctgcagccgcccctccctgttccttacagttccctctgggggcttctccaagccccagaaaacaaaggcacgtgctttgctatatgggggtgtcattaattcaaaggctgttgttgtgcaggaacttgaacctcaatggggctaagctccggcttccttccctgtgttcacatttacttcttcctcctctgaaacccgacccctggggttatgggaaagaagggtcagcggcacatgaaacgactatgctctgttcagagctgatgccagttcaaaaatctgagcccccagcccagtgcctggaggccaaggcagttcccatgtcctggggatatatcaaatggaatggggcatgatctcagatctggccctcaaaatgccaaagttcccctaaacttgtgtccttgtagaacagtatccaggacatcacaggtgctctattcaagcacagtgagaactccaaagacagcggtggcctcatccctcaggagaagattgtcaacattgtcaatgacctctttggagctggtaggagccacactcctgcccctttatccatcagctactatttatccatacccaccctgtcaactaactcaccaaccacatgtcaggtgacacaggacagacacctgtcctaggatcaaggtgtgacctcatgctgtgccactaactcctgggagaaactcaataaagtccctctcctttgggcttccccacctggaaagtaaaagggttcaggctgctaattccagccactgactatgaaaacaatgtgctttaggttcttgtttgtttgattggttttacttttggatttggttggttctgacttgttttgtttaagacaaggtattacctctgtatcccaggctagcctcaaacttatggcaattctcctgcctcagacttctcagtgttgggattctaggtataagccaccatggttggctttcaagttactgnnnnnnnnnnnnnnnnnnnnnnnnnnnnnnnnnnnnnnnnnnnnnnnnnnnnnnnnnnnnnnnnnnnnnnnnnnnnnnnnnnnnnnnnnnnnnnnnnnttcccctgatgccttttctccttcaccataccccctgctgccccaggatttgacacggtcacaacagccatcaccctgagcattttgctccttgtgacatggcccaatgtgcagaggaagatccacaaggagctgggtatgtgttgctcccaatcctgcagtcagagaagccttcaggctccaggtcacttgttgatctgcnnnnnnnnnnnnnnnnnnnnnnnnnnnnnnnnngtgtttatgtgcctactatgttaagtcctgggaacatggcttgtccagataaggttgtgggggtggggattatgaggtctcagaaccatgagaaaacataggccaacacagagtgacactagtataacagggatacataggcatagagcagacagagcatcccacgagctctgcctgtgctttgcagacacagtgattggcagggatcggcaaccacggctttctgaccgacttcagctgccctatatggaggccttcatcctggagctctaccgatacacatcctttgtccccttcaccatcccccacaggtaaggccccttttctgtgccccctaagttttcatactgtccctccacccaggccctcagctccaggctcacctcaggctgcatctccttcctgaacnnnnnnnnnnnnnnngacccgtagcctcaggtctatcacctgctatggtctcagcagtcacttgcctccactcctgtttgctccctgtggatatcttctgccggccagtccctcctcactgtccctcacaagggtaatccagccgcctgccaatttagcttaagctggaccttctgcctggaaagacatctacccagctcctatactctacccttgcccaaagtcaagcctgactcatgtgtccccttccatccagaagactcttttggttgttcatccaccaagtaaagcttcatccacagatgatttgtagggttgtgagagtgaagatttccctctgctcacaccttagcctagctattcctggtacaaaagcagcaggctccccagggaaaaccccaaccactgaattcttggctgcagagattgccccggtgcacatctgagcacaaggagaatctagtaagtgttgaagctgaagggcacgatcccagaaaaaggaaggataattccccccatgttccctgcccttcatgtgacctcccggtatggggcttggagactgtggtagtcacacactgggatggagtggagtgaggaataagccacaccacagcgtctccaagccctgaactggacagagctctcttcccccctcagcacaacgagggacacctcactgaatggcttctacatccctaaggatcgctgtatcttcataaaccagtggcaggtcaaccatgacgagtgagtacatagccctgatgggaaagcggattgctcagcaatcagaaaggttgtctgtcccttcacgaactgctcatataaggaacaacatctcgttgctagatagcctattccaagtgacaaactgttcctcaagttcggtgtcagaagaacttactaggtatctggtgtagatggcaaatgcctgcaatacagcccactcaggaagctgaggcaagaggattacagtgagttcaaggttcaaggctagtctggacttcttgggaagttttaggctagcctaggctacacacctgtctcaaggaaggaaggaaggagagaggcagccagagaggcaggggggatggaattgcagttgaatagataataaggatagctcaaatgacttgtgggaatggtctaaagatgtccttggaaaactctactctcctttgtagatgggccatccatccaaaccaggacatattgaacacaagaacaccatccatatgtatattgtcaatttttagtccagagtaagaagcataagccgaggaagacagtgatctcccctgctactggcctattgggaataggagggaggaaacgttccccttctttcagttttcttttgatacagcattatttccttgagtttacaaatgagaacaggagctatagctcactggtaggatatgcgatgtggaagactctaggttcaattcccagaaccacatgttttaaaaaggaactaaaccaaatgaatataaaaccactatcacccattgggtgctggtttcacatgtcttcaatcccagcactcgggaggcagaggctggtgggtctctaagtttgcagccagtctggtctacagagtgagttccaagacaaccagagctacgcagagaaacnnnnnnnnnnnnnnncaatgcaacaaaacaaaatactgtcctggaccatgggaatggtccagcaggtaannnnnnnnnnnnnnnnnnnnnnnnnnnnnnnnnnnnnnnnnnnnnnnnnnnnnnnnnnnnnnnnnnnnnnnnnnnnnnnnnnnncctctgacctccacatgcacacaaagtaaataaataaaaatatcatttaaaaaattaaaaataatcaaaatccactatctttaaggttgatcattttattcacatacacacacacatacatacatggttttttaagataaggtttctctttgtatatttggannnnnnnnnnnnnnnnncnnnnnnnnnnnnnnnnnnnnnnnnnnnccagagtccaannnnnnnnnnnnnnnnnnnnnnnnnnnnnnnnncatgagccataactgccaggcaagagttttattttaaaaaagcactaacttggctggaagtgtggctctgttggtggagtgctggcttgcatgcacatggccctgggttcgatcacaagcacatgcctgtaatctagcacttgggaggtagaggcagaagggtcagaatttcaaacaaggggacctaggcttacacaggtcaactttagacccatgagacccagtctcaaagcaaacaaactccaaagaaccataacaaaaggagataaaccatgtttggtaccttcccctcgggctgttggtactgtcgctcttttcttacactgtgctctcacagaagctgggagaacatagctaccctttcctcccagagtccaccctgctcaggtcctacctgttcctcttgcagaaagcagtggaaagacccctttgtgttccgtccagagcggtttcttactgataatgacacagtcatcaacaagactctgagtgagaaggtgatgctctttggcttgggaaagcgcaggtgcattggggagatcccggccaagtgggaagtcttcctcttcttagccatcctgctgcagcagctggagttcagcgtgccaccgggcacaaaggtggacctgacacctacctacgggctgaccatgaaacctcagacctgcaaatacatccaggcgtggccacgtttttccaaatgaagatggctgaggcaggggaggaggcatccatggggctgtcacctctgtttctttccctttctttttaaataacagcttttttttggagtacaattctttcaccaaataattcacctccaatcaaatagaatattgtctgtcatatacccccaaacctatacccattaagatttatgactattcatcctaacctgtctcccttgctccaccagatgctaatgtagtttttgactcgataaatttgcctactctagtcccatcacataaactcaatgatctatg

SEQ ID NO: 858 - DNA, 1556 bp, Mesocricetus auratus
atggatccagtcctggtcctggtgctcactctctcctgtctactgctcttttcggtctggagacagagctctgggagagggaggctccctcctggccccactcctctccctcttattggaaacatcctgcagatagatataaaggacatcagcaaatccttagccaacttctcaaaagtctatggccctgtgttcaccctgtattttggcacgaagcccactgttgtggtacatggatatgaagcagtgaaggaagctctggaagaccttggagaggagttttctggaaggggtaacttcccaattgttgaaagaatgaatagtggccttggaatcattttcagcaatggaacaaaatggaaggagcttcggcgcttctcacttatgaccttgaggaattttggtatggggaagagaagcatcgaggattgcattcaagaggaagcacgatgccttgtggaagagttaagaaaaacaaatggctcaccctgtgatcccaccttcttcctgagctgtgctccttccaatgtgatctgttcagttgtttttcacaatcgttttgattataatgacaagaattttcttaacttgatggagaaattaaatgaaaactttgaaattttgaactccccatggttgcaggtctgcaatgttatccctgccttccttgattatctcccagggagccataacaaagcacttaaaaattttgctgaaataaaaagttatattttgaaacgagtgaaagaacaccaagaaacactggacatgaacaatcctcgggacttcatcgactgtttcctgatcaaaatggaaaaggaaaaggacaatccacactctgagtttactactgaaagcttgatggctactgtggctgatgtgtttgtagctggatcagaaaccacaagtactaccctcagatatggactcttgctcctcctgaagcacaaagaggtgacagcgaaggtccagaaagagatcgatcatgtgattggcagagacaggagtccctgcatgcaggacaggacccgaatgccctacacagatgcaatggtgcatgaggttcagagatacgttaacctcatccccaacaatgtgccccatgcagctacctgtaatgttaaattcagaaattatgtaattcccaagggcacggacttaataacatcattgacttctgtgctacatgatgacaaagaatttcccaaccccaaaatatttgaccctgcccattttctggatgagaatggaaactttaagaagagtgactactttatgcctttctcaataggaaagcggatgtgcatgggagaggccctggctcgcatggagctgtttctgcttctgaccaccattttacagaattttgatctgaaatctttggctgatacgaaggacattgacactaccccagtggccagtacttttggctgtgttccaccttcataccagctgtacttcattcctcgctaaagaacagactggcggttgctatgcaggtgtatgtgatatggtccatgcccttcccactattagggatacctctctcatatctc

SEQ ID NO: 859 - DNA, 567 bp, Mesocricetus auratus
  misc_feature (173)..(191): n is a, c, g, or t
ggaaacacaacctgggaagatggtggcggtgaagacctgctctctgctgctggtgttcctcttcctggcggtcgggctgggggaaaaagaagaggttcaattcagatcccatgctaaattcggtagcccccggcctcgaggcccgaggtatgcagaggggactttcattagtnnnnnnnnnnnnnnnnnnnacaagatccgccaacaagactttgtgaactggctgctggcccagaaggggaagaagaatgactggaaacacaacatcacccagagagaggcccgggccttgcagctggcaggacaatctcagagcaatgaggagacagaggggcagcagagctccttgcccaagaaccccagtgacgaaggtgtgctgagggacttcctgattcgggagctgctggcctggatggtggaccaaacagagctctccctgcccaggtttcagtgacggacctagctcagagcaggactggactctgccctttgcttgcccagctcctcgttccgccctggtccaaagtctccaagagaaccaaaccaataaagtcttgagctgaagta

SEQ ID NO: 860 - DNA, 404 bp, Mesocricetus auratus
gtcccgcgctcgtcatgtcggcctcggtggtgtcggtcatctcgcggttcctggaggagtacctgagctccactccgcagcgcctgaagctgctggacgcctatctcctgtatatactgctgaccggggcgctgcagttcggctactgtctcctcgtgggcaccttccccttcaactctttcctctccggcttcatctcgtgtgtgggcagcttcatcctagcggtttgcttgagaatacagatcaacccccagaacaaggcggatttccaaggcatctctccagagcgagcctttgcggatttcctctttgccagcactatcctgcaccttgtcgtcatgaacttcgttggctgagctgctcccatttccttaggcacggagttggaggttggcagaatgttc

SEQ ID NO: 861 - DNA, 2694 bp, Mesocricetus auratus
  misc_feature (2548)..(2565): n is a, c, g, or t
gctcgcggcacctgggcttcgctcctcccgcccgcagcgcctgctccgcgcgtcggccgccagggtcccgcgcagcccgggagcggcgggcgcagggggacgctctgccgccgacggatcccgaccggagccgcgatgccgggcagctcgagacagtcgggtcgcgaggcgggctctgccctgctctcgctgcagcaggaggaccaggagaatgtcaaccccgagaaggcggctccagaccagcgggcgcgggcggccctgaagaccgggaacgcgcggggaaacgcaccgcagcagagactcaaggctcggcgggttgcacctcttaaggacctttctataaacgacgaacatgtcgctagtggtccttcatggaaagcagccagtaaacagcccgccttcactatccatgtggacgaagaagaggacacccagaaaatcccacctgagcacaaagaaatgcggtgtgaagatgccctggcctttaatgctgctgtctctttacctggggcaagaaaaccactggtacctcttgattatccaatggatggcagctttgaatcaccacatgctatggatatgtccattgtcttagaagaggaaaagccagtgagtgttaatgaagtacccgactatcatgaagatattcacacataccttagggaaatggagattaaatgtaagcctaaagtgggttatatgaagaaacagccagacatcactaacagtatgcgggccatccttgtggactggctagttgaagtgggagaagaatataaattgcagaatgagaccctgcatttggctgtgaactacattgatcggttcctctcttccatgtctgtgttaagagggaagcttcaacttgtgggcactgctgctatgctgctagcttcaaaatttgaagaaatataccccccagaagtagcagagtttgtgtatattacagacgatacctattccaagaagcaggttctgagaatggagcacctagtattgaaagtccttgcttttgacttagctgcaccaacagtaaatcagtttcttaaccagtattttctgcaccagcagcctgcaaactgcaaagttgaaagcttagcgatgtttttgggagaattaagtttgatagatgctgacccatacctaaagtatttgccatcacttattgctggagctgcctttcacttagcactctatacagtcacaggacaaagctggcctgagtcattggtacaaaagactggatataccctggaaagtcttaaaccttgtctcatggaccttcaccagacctacctcagagcagcacagcatacccaacagtcaataagggaaaagtacaaacattcaaaataccatggtgtttctcttctcaacccaccagagacactaaatgtgtaagaatgaaagactacctttgtttaaaatgggagtcactcagaggtcacaatgtacagtttttgtcttgggttttaatttcacaaatcatttcacaaagtagatggtatagccacagacaaattatggtatccattgcttttttaaatggtttttaatttgtatatctttttgtacatgtgtctatcttagatatttggctaattttaattggtttgttaacatatcgagaaaccaaatatcaagacaaaaaaaacaaaggaaccacgaaatctagacaagtcaaagttaatttgagataatgactgataatgtcacttagaaaggctaacttgggtttattgttcagtgggggtagaaagagcttcctaaaggaaatatttcagggaaactgacattgattattctaagcaactgaaccaaattgctgacttggtcatgaaataagcaaaactagactctcagggttgcagagattcccagacacattgagctctactatttatcaactttttcaaataaaattttacatggaaggaagattttgtgcaacagaaaagttgtaaagaaagtttatccaaagcataattttaaagacaaaacaatttatgaaacagtcagcccttataatggattttcaaataaaaaatacccagggctgttaaagcactgaataaatatccttttagtagtttatatacaaaacatcactttagctttaattagcagttctcttctttctcctccttttcacttggcttctacttggtgccttttcttttgcactggtggtctgagctctgaaaataaagtaatgaatgccacaactcagtgtatgtgcactgaatcctggaccggattgctagaactctgaaggcatcctgttttatagacatagacagatttttatgtatatttgaaagtaaccagaaatctgttaccttattttctttggagtcttgtctggttccaaaatgatcatttcttcttcttcgctatctgacagcactataggggcacctttaagaaaatacccaaaacttatcaatatcattagtcctagtgctcaagccttcccttcttgcctggaggcagcatatacaacatactctttccaaaaattttgtaaaaaagtcatgttttctgtagnnnnnnnnnnnnnnnnnnaaaagagaactcatgtaggccaagacggtctagtttattactaccagggctaaccatgaaaaatgtagaaaacttttgtttgcccatattaattatatatatgtaaataaagcatgcaaattaatcatt

SEQ ID NO: 862 - DNA, 843 bp, Mesocricetus auratus
  misc_feature (1)..(46): n is a, c, g, or t
nnnnnnnnnnnnnnnnnnnnnnnnnnnnnnnnnnnnnnnnnnnnnnaaccggagaggagtgagcagagacagcgagcatcagatcgtgccccgacccacaccggcatgggctccttctccatcaccgtgggcttcttcctcctcctggccttttggcttccgggccatattggagcgaaccctgtgtacagtgcagtgtccaacacagatctgatggatttcaagaacctgctggaccatctggaggagaagatgccgttagaagatgaggtcgtgcccccacaggccctgagtgagcagaatgatgaagcgccaggggcagcgctcagctctctccctgaggtggctccctggactggagaggtcaacccacctcagagagatggcggtaccctggggcgcagcccctgggacccctccgatagatctgctctcttgaaaagcaaactgagggctctgctagctgcccctcggagcctacggaggtccagctgcttcgggggtaggatcgacaggattggagcccagagcggactaggatgtaatagcttccggtaccgaagataacagccagggaggaaaggcagccagattcgctgggggcagattgcagaagaccccaagccccgtggtgtgtcacgcagcttggtctcattgtcactgaggtgtggcgaacaccctgctggagctgctgcttcctgtcttcatctatcacgacccatgctacatgtagatgagtggttttggggggctctccctctccagccctgcatattaaagtagatcctcacccctttcagaaagcagttggaaaaatttttttgaataaacttcagcaccaag

SEQ ID NO: 863 - DNA, 2500 bp, Mesocricetus auratus
  misc_feature (147)..(186): n is a, c, g, or t
gtcagagcccagaagcaccatggctgtttttggtgtcaccattgccttgctggtatgggtggccaccctcctgattgtatccatctggaagcagatctacagcagttggaacctgcccccaggacccttcccacttcctatcttggnnnnnnnnnnnnnnnnnnnnnnnnnnnnnnnnnnnnnnnncctcaccaagctggcagagcgcttcgggccagtattcacactgcacctgggctcaaagcgtatcgtggtcctgcatggctacaaggctgtcaaggaggtactactgaaccacaagaatgagttctctggccgaggggacattcctgtgttccaagagtatatgaacaaggggattattttcaataatggacccacatggaaggacgttcgacggttttccctaagcatcctccgtgactatgggatggggaaacagggtaatgaggcccgcatccagagggaggcacacttcctgatggaggagctcaagaagaccaatggtcagccttttgaccccacctttctggttggctgtgcacccttcaatgtcatttcggacatcctctttcacaaacgttttgattacaatgacaagacgtgtctgaggctcatgagtttgttcaatgaaaacttctacctgctaagtactccctggatccaggcttacaataactttgagaattatctacgatacctacctggaagccatagaaaaataatgaaaaatgcatctgaaataagacagtacacacttgcaaaagccaaggaacacctccagtcactggactccagctgccctcgggatgtgactgactgtttgcttatagaaatggagaaggaaaaagacagccaagaacccatgtacacaatggaaaatatttctgtgactttggctgacctgttctttgcggggacagaaaccaccagcacaaccctgagatacgggctcctgattctcatgaaatacccagaggttgaagagaaacttcatgaagaaattgacagggttattgggccaagtcgtgtccctgttttcaaagacaggctggagatgccatacatggatgctgttgtgcatgagattcagagattcatcagtcttatcccctccaacctgccccatgaagcaacccgagataccatgttccgaggatatgtcatccccaagggtacagttgtgattccaaccctggattcccttttatatgacagtcaagagtttccagatccagagaaatttaaacctgaacattttctaaatgaaaatgggaagttcaagtacagtgaccatttcaaggcattttctgcaggaaagcgtgtgtgtgttggagaaggcctggcccgcatggaattgtttctgctcttgactgctattctgcaacattttaatctgaagtctctggttgacccaaaggatattgacctcaatcctgtcacaattggttttggctgtgtcccacctgaatttaaactttgtgtcattccccgctcctaagacctggaaactgcctgtctcaagtgaaaagtcaacacagacatcattattatccctaaaaatgtgactttgttttttaaaaatcctaagcatatagagttcctatcatgaaatgaaacagaaaataaataaaatctcaattatatgttagctgtggatttagtgaggaggaccttgtccccttggctatataaaagttccccagtgagtaaacaccattccatagccaacagtacagcatcttcagtcagtctgtcccttacttctcttgaggaatgtgggatgatcctgttaggaataaagcgtgaggaaccttggcggattccatggcaagtgagggtgaccgaggcaggggtacaaacacaccaggcagatagagcttaaatgagaagttttattagaaagggaagtgggagagagaaaagaggctcagatacaaagagaggacagaagagtagagggatacaggaaaagtcctgtctgccccaggggaacagtaggaaagagagaggggaaagggagacaggaaagagagcataagtggatggaagtctttcttttaaagggttcctttgcacctgggctgaccagggtactgactgcattctgccaggtgacaagggcaggccagcataatgcctgaatccttacagatcctggttatctgcctatctcaagaccctgaatttaaatatatattcaaagttctctgatgggggatgtctttctgtatatatgtttctcttattggttgaataataaaacactgattggccagtagccaggcagaaagtataggaggcactaccagatcaggataattctgggaggaggaaggcaaagagaagccaccagagaagatgccatgtagtggttgggaatataggacactgaagcattctccacgtggaaatacatagattaatacttatgggtaaataattaagacagagctagccagtaagaagcctgagctattggccaaacagtttaataatt

SEQ ID NO: 864 - DNA, 484 bp, Mesocricetus auratus
  misc_feature (16)..(51): n is a, c, g, or t
ggaaggcaatgagatnnnnnnnnnnnnnnnnnnnnnnnnnnnnnnnnnnnngtttgtgagggagacctacgacttcgacatcgccgtgctcaggctgaagacccccatcatattccgcatgaacgtggcccctgcctgcctgcctgagaaggactgggccgaggccacactgatgacgcaaaagtcaggcatcgtgagcgggtttggacgcacgcatgagaagggccgccagtcacacatcttgaagaagctggaggtgccctatgtcgaccgcaacacctgcaaactctccaccagcttcaccatcacgcaaaatatgttctgcgctggctatgacgccaagccggaggacgcctgccagggggacagtggcggcccccacgtcacccggttcaaggacacctactttgtgactggcattgtcagctggggagaggggtgtgcgaggaagggcaagtatgggatctatacgaaagtcacggcc

SEQ ID NO: 865 - DNA, 469 bp, Mesocricetus auratus
attggaggtcccacccaggggcgaaggatgccactctgggtgttctttgtaatcctcaccctcaccaatggctcccactgttcaccgtccccatcactgcccttcaggattcgtcgatatgcagatgccatctttaccagcagctacagaaaagttctgggccagctgtctgcccgcaaactgctccaggacatcatgagcaggcagcagggggagaggaaccaggaacaaggacccagggtacggcttggccgtcaggtggacagcatgtgggcagaccacaggcagatgtctctggagagcctcttggcagccctgctgcagaagcacagcagggactcccaaggatgaagtcttcagcagaggctccagccacccgtacctcaaacacaactggacccagttacttctgcttcatttctgaccctctccttcctgtaaatacaataaaacccccatcctgatctgc

SEQ ID NO: 866 - DNA, 5660 bp, Mesocricetus auratus
  misc_feature (1844)..(1865): n is a, c, g, or t
  misc_feature (3170)..(3186): n is a, c, g, or t
  misc_feature (5580)..(5607): n is a, c, g, or t
gttgctgtcgggccaggctgggctatgctgttgcccgcaacgggtgccagcaggtctgccgccatcatgtcagacacggacagcgatgaagattcctctggaggaggcccattttctctaaccgggttcctgttcggcaacatcaatggagcagggcagctggagggcgaaagcgtcttggatgatgagtgtaagaagcatcttgcaggcttgggggctttgggactgggcagcctgatcactgagctcacggcaaatgaagaattggctgggactgatggtgccttggtaaatgatgaaggatggattaggagtagagaagatgctgtggactattcagacatcaatgaggtggcagaagatgaaagcagaagatatcagcagacaatggggagcttgcaacctctttgtcactcagcagattatgatgaagatgactatgatgctgattgtgaagatattgattgcaagttgatgcctcccccacctccaccgcctggaccagtgaagaaagagaaagatcaagatggtcttactggtgagaaagtggacttcagtagttcctctgactcagaatctgagatgggaccacaggaagcagcacaggcagaatctaaggatggaaagctgactctaccattggctgggattatgcagcatgatgccaccaagctgttgccaagtgtcacagaactttttccagaatttaggcctggaaaggtgttacgctttttacgtctttttggaccagggaagaatgtcccatctgtttggaggagtgctcggagaaagaggaaaaagaagcaccgtgagcctattcaggaagagcagatccaggaggaagagtgctcagtagaattggaagtcaaccagaaatctctgtggaactatgactatgctccacctccacctccagagcaatgtctctctgatgatgaaatcacaatgatggctcctgtggagtctaagttttcccagtcaactggagatacagataaagtaatggatactaaaccaagagtggcagaatggcgttatggacctgctcggctgtggtatgatatgctaggtgtccctgaagatggcagtgggtttgactacggcttcaaaatgaggaagactgaacatgaacctgcaataaaatgcaaaatgatgacgaaattaaggaaacttgaagaaagtaatggcattgatcttctggcagatgaaaacttcctaatggtgacacaactgcattgggaagatgatatcatctgggatggggaggatgtcaagcacaaaggaacaaaacctcagcgtgcaagtttggcgggctggcttccttccagtatgactaggaatgccatggcctacaatgttcagcaaggttttgcagccacactagatgatgataaaccctggtattccatttttcccattgataatgaagatctggtatatggacgatgggaggacaatatcatttgggatgctcaggccatgccccggattttggagcctccggttttgacgcttgatcccaatgatgagaacttgattttggaaatccctgatgaaaaggaagaagctacttctaattccccttccaaggagaataagaaagaatcatctctgaagaagagtcgaattctcttaggaaaaacaggagtcatcaaggaagaaccacaacagaacatgtctcagccagaagtgaaagatccatggaatctctccaatgatgaatattactatcccaagcaacagggtcttcgaggtactttcggagggaatattatccagcattcaattccagcagtagaattacgacaacccttctttcccacccacatgggacctatcaaacnnnnnnnnnnnnnnnnnnnnnntctaaaaaagtactcctttggggcactatctcagccaggtccacactcagtccagcctctgctgaaacacatcaaaaaaaaggcaaagatgagagaacaggagaggcaagcctcaggtggtggagagatgttttttatgcgcacacctcaggacctcacaggcaaagatggagaccttattcttgcagaatacagtgaggaaaatggaccattaatgatgcaagttggcatggcaaccaagataaaaaactactataagcggaaacctggaaaagatcctggagccccagattgcaaatatggagaaactgtttattgccatacatctcctttcctgggctctctccatcctggccagttactacaggcatttgagaacaatctttttcgcgctccaatttatcttcataagatgccagagactgacttcttgatcattcgaacaaggcagggttactatattcgagaattagtggacatttttgtggtgggccagcagtgtcccttgtttgaagttcctggtcctaactccaaaagggccaatacacacatccgagactttctacaggttttcatttatcgcctcttttggaagagtaaagataggcctcggcggatccggatggaagatataaaaaaagcctttccttcacattcagaaagcagcatccggaagaggctaaagctatgtgctgacttcaaacgtacagggatggattcaaactggtgggtgctgaagtctgattttcgtttaccaacggaagaggagatcagagctatggtctcaccagaacagtgctgtgcttactatagcatgatagctgcagagcagagactaaaggatgctggctatggagagaagtccttttttgctcccgaggaagaaaatgaggaagatttccagatgaagattgatgatgaagttcgtactgctccttggaacactacaagagctttcattgctgccatgaagggcaaatgtctcctggaggtgacaggagtagcagatcctacaggctgtggtgaaggattctcctatgtgaagattcccaacaaaccaacacagcagaaggatgataaggaacctcagccagtgaagaagacagtcacaggaacagatgcagaccttcgtcgcctgtctctaaaaaatgccaagcaacttcttcgtaaatttggtgtgcctgaggaagagattaaaaagttgtcccgctgggaagttattgatgtggtacgtacaatgtcaacagaacaggctcgctctggagaggggcccatgagtaaatttgcccgtggatcaaggttttnnnnnnnnnnnnnnnnngagcgttacaaagaggaatgtcagcgcatctttgacctacagaacaaggttttgtcatcaactgaagtcttatcaactgacactgacagcagctcagctgaagacagtgactttgaagaaatgggaaagaacattgagaacatgctgcagaacaagaaaacgagctctcaactctctagggaacgggaggaacaggagcggaaggaactccagcggatgctactggcagcaggctcagcatcagcaggaaataatcacagagatgatgacacagcttcggtgactagccttaactcttctgccactggacgctgtctcaagatttatagaacatttcgagatgaagaggggaaggagtatgttcgttgtgagacagtccgaaaaccagctgttattgatgcctatgtgcgcatacgcaccacaaaagatgaggaattcattcgaaaatttgcgctttttgatgagcagcatcgagaagagatgcgaaaagaacggaggaggattcaagaacaattgaggagacttaaacgaaaccaggaaaaggagaagctgaagggtcctcctgagaaaaagccaaaaaaaatgaaggaacgccctgacttaaaactgaaatgtggagcatgtggtgccatcgggcacatgagaacaaacaaattctgccccctttattatcaaacaaatgctccaccttccaatcctgttgccatgacagaggaacaggaggaggagttggaaaagacagtcattcataatgataatgaagaacttatcaaggttgaagggaccaaaatcgttttaggaaaacagctaattgagagtgcagatgaagttcgcagaaaatctctggtcctgaagtttcctaaacaacaacttcctcccaagaaaaaacggcgggttggaaccactgttcactgtgactatttaaatagacctcacaaatccatccatcgtcgccggacagaccctatggtgacactgtcatctatcttggagtctatcatcaatgacatgagagatcttccaaatacataccctttccatactccagttaatgcaaaggttgtaaaggactattacaaaatcatcactcgaccaatggatctacagacactccgtgaaaatgtgcgcaaacgcctctatccatctcgggaagaattcagagagcatttggaactaattgtgaaaaatagtgcaacctataatgggccgaaacactcactgactcagatttctcaatctatgctggatctctgtgatgaaaaactcaaagagaaagaagataagttggcacgtttagagaaagctatcaaccccttgcttgacgatgatgaccaagtagcgttttcttttattctggataacattgtcactcagaaaatgatggcagttccagattcttggccatttcatcacccagttaataagaagttcgttccagattattacaaagtaattgtcagtccaatggatttggagactatacgtaagaatatctccaagcataaataccagagtcgagagagctttctagatgatgtaaaccttattctggccaacagtgttaagtacaatgggtctgagagtcagtatactaaaactgctcaggagattgtgaatgtttgttaccagacattaactgagtatgatgaacatttgactcaacttgagaaagatatttgtacagctaaagaagcagctcttgaggaagcagaattagaaagccttgacccaatgactccaggaccttacacaccacagcctcctgatttgtatgataacagcacatccctcagtgtttctcgagatgcctctgtatatcaagatgagagcaatatgtctgtcttggatattcccagtgctacttcagaaaagcagctaacacaggaaggtgaagatggagatggtgatcttgcagatgaagaggaaggaactgtacaacagcctcaagccagtgtcctgtatgaggatttgcttatgtctgaaggagaagatgatgaggaagatgctgggagtgatgaagaaggagataaccctttttctgctattcagctaagtgaaagtggaagtgactctgatgtgggatctggcagtataagacccaaacagccccgtgtgcttcaagagaatacgaggatgggcatggaaaatgaagaaagcatgatgtcctatgagggagatggtggggaggtttcccgtggtttggaggatagcaacatcagttatgggagctatgaggaacctgatcccaagtcgaacacccaggatacaagcttcagcagcatcggtgggtatgaggtatcagaggaggaagaagatgaggaagagcagcgttctgggcccagcgtactaagccaggtccacctgtctgaggacgaggaggacagtgaggatttnnnnnnnnnnnnnnnnnnnnnnnnnnnngactctgatgaatgaggcttcctttaagcctcttcagtaagccgacagcaacg

SEQ ID NO: 867 - DNA, 1911 bp, Mesocricetus auratus
  misc_feature (504)..(518): n is a, c, g, or t
cagagacttagttctgagattcaaccatgccactcaatagatttccttgctggcgatatgctgtggcctgtggactcctgcttctccttgtccatgtgcatggacaggactcagtcagccccatcaggaacacacacactgggcaggtgagaggaaaacttgtctatgtgaaagagggggtaaccggtgtctacgccttcctgggaattccctttgccaagccacctgtaggaccactgcgctttgccccacctgagccccctgagccgtggagtggtgtgagggatgggacttctgagccagccatgtgtctgcaaactgattttatgaggccacaaatttcgaaggagaggaagattatcctgcctaccatctctatgtctgaggactgcctgtatctcaacatctacacaccagctcatgcccatgaaggttctaacctacctgtgatggtgtggatccatggtggtgcacttgttatgggaatggcttccatgaatgatnnnnnnnnnnnnnnngctactgaggatatagttattgtctctatccagtatcgcttgggtatccttggcttcttcagcactggagacgagcatgccagaggaaattggggttacctggaccaagtggctgccctacactgggttcagcagaatattgcctcctttggaggcaatcctggccaggtcactatttttggagtgtcagcaggtggcacaagtgtgtcctcacttgtcgtgtcccccatgtccaaaggactcttccatggagccattatgcagagtggagtggctctgctgcctgaccttatctctgacacacctgaggcggtctatacaccagtggtggccaaccaatctggatgtgaggccaaggattcagaggccctggtacactgccttcgagagaagactgaagcagaaattctggctatcaaccaggtcttcattatgacccctggtgtggtagatgggattttcctacctcggcaccctcaggagctgttggcctctgtggatttccaccctgtccccagcatcattggtgtagacagtgacgagtgtggctggggagtccccttgttcatgggccttgatcatgtcataaagaacataaccagagagaccctgccagcttttctgaagagcagagcagaacacatgatgctgcctcctgaatgtagtgacctgctaatgcaagaatacatgggggatgttgaggacccccagaccctccaagcacaattcagagagttgatgaaggacttcatgtttgtgatccctgcactaaaagtagcatattttcagcgttctcatgctcctgtctacttctatgagttccagcaccagtccagcttcatcaagaataaggatgccaggccatcccatgttagggctgaccatggtgatcatgttgcctttgtgtttggctctgacttctggggcttaaaaattgacctcactgaggaggagaagctgctgaacaagaggatgatgaagtactgggccaactttgcaagacatgggaaccccaacagtgagggtctaccctactggcctgagttggtccacgatgaccagtacttgaagctggatattcagcctgctgtgggccgggccctgaagtctagaaagctgcatttttggacgaagattcttccacagaagatccaggagctaaagggggctcagggcaagcattcagagctttagtgacctctgacagtacagatgcacagggtgagggcagatggagtaatcctgagattacaaaatccagttaattatttttatgtactccaacactcacattagcctttctaaccctcagtacttgcccttttagaaatgtatgacaatccttctatgtggtactaatccttctggatccattttattagatttaataaac

SEQ ID NO: 868 - DNA, 1066 bp, Mesocricetus auratus
  misc_feature (105)..(125): n is a, c, g, or t
  misc_feature (212)..(256): n is a, c, g, or t
cactaggaaaagtcttgagtgctgacgacagtgagaaccatggaccagaacaacagccttccaccttatgctcagggcttggcctccccacagggtgccatgacnnnnnnnnnnnnnnnnnnnnntccaatgatgccttatggcacaggacttactccacagcctattcagaacaccaatagtctatctattttggaagagcagcaaagagnnnnnnnnnnnnnnnnnnnnnnnnnnnnnnnnnnnnnnnnnnnnngcagtagcaactgcagcagcctcagtacagcaatcgacatctcagcaatccacacagggtgcctcaggccagactccacagctcttccattctcagactctgaccactgcaccattgccaggcaccacccccttgtacccttcacctatgacccctatgacccctatcactcctgccacaccagcctccgagagctctgggatcgtaccccagctgcaaaatattgtatccacggtgaatcttggatgtaaacttgacctaaagaccattgcacttcgtgcccgaaatgctgaatataatcccaagcggtttgctgctgtcatcatgagaataagagagcctcggacaactgcgctgattttcagttctgggaaaatggtgtgcacaggagccaagagtgaagaacaatccaggttagcagcaagaaaatacgctagagttgtgcaaaagttgggctttccagcaaagttcttagacttcaagatccagaacatggtggggagctgtgatgtgaagttccccataaggctggaaggccttgtgctgacccaccagcagttcagcagctatgagccagagttatttcctggcttaatctacagaatgatcaaacccaggattgttctccttatttttgtttctggaaaagttgtattaacaggtgctaaagttagagcagagatttatgaagcatttgaaaacatctaccccatcttaaagggattcaggaagaccacatagtggctgccatgtcctgcctcccctacacacttgttttttaaagccagtcagttttggtaccactgatgg

SEQ ID NO: 869 - DNA, 1234 bp, Mesocricetus auratus
  misc_feature (876)..(891): n is a, c, g, or t
aagtctgcagctgcttctggcagggaacttgtcccttgctcccacaccaagctgtgagaaattaagggacaagactccggagccatgctgggtctcgggaccctgttcctgctgctggctgcctgtcccgcttccagggctgaccctgtgcctgcacttccagacatccaggttcaggagaatttcaatgagtcccggatctacggaaaatggttcaacctggctgtgggttccacctgcccttggctgtcgaggattaagaacaagatgagcatgagcacactggtgctgcgagagggggcgaccggagctgagatcagcacgaccagcacccggtggcggagaggtgtctgcgaagaggtctctgggacatatgagaagacagacatggatggaaagttcctctaccacaaatccaaatggaacgtgaccttggagtcctatgtggtccacaccaactatgacgagtatgccattttcctcaccaaaaagttcagccgccaccacgggcccaccatcaccgccaagctctacggtcgggagccacagctgagagacagccttctgcaggagttcagggaggtggccctgagcgtgggcatccctgagaactccatcgtttttatggaggacagaggggaatgtgtccctggggatctggagcaaaagtccacttcacttctgagagcccggagggcagtgctgccccaagaaaatgagggatcagggactgggccactggtaactgatgtcctcaagaaagaagattcctgccagctcagctactccgaaggcccctgcctggggatgatagagaagtattactacaatggcgcttccatggcctgtgagaccttccattatgggggctgcctnnnnnnnnnnnnnnnnttcaactctgagaaggagtgtctgcagacgtgccggaccgtagcggcctgcagtctccccatagtccaaggtccctgccgtgcctacgtcgagctctgggcattcgatgcagcacaagggaaatgcgtccagttcagttatggcggctgcaaaggcaacggcaacaagttctactccgagaaggagtgcaaggagtactgtggcgttcctggtgacgggtatgaggagctcacacgaagctgaagatgccagtctgcaagccagaggctagccactgtccatcccagtgtgggctggcccaggtggtctgggtccaaataaaacaagcaagctgtcaactcct

SEQ ID NO: 870 - DNA, 2786 bp, Cricetulus sp.
  misc_feature (132)..(151): n is a, c, g, or t
  misc_feature (1560)..(1607): n is a, c, g, or t
  misc_feature (2217)..(2276): n is a, c, g, or t
  misc_feature (2561)..(2580): n is a, c, g, or t
tgtcgggcgagcctgggcagctgtggctggagaacagactgggagattgggagctgggactgggctcaggtgagcactgactgaggctggtgttgattctgccccgggaccctccaacccagctgcccccgnnnnnnnnnnnnnnnnnnnncctcaaggatgcccctgcggcctcggcttctgctcctgtgtctgtgggggctgctgctccagcaggcggagacagactcagaggggcagacgacgggggagctgtaccagcgttgggagcgctatgcccgggagtgcgaggagaccctgacggctgcagatcctccctcaggcatggtctgtaacgggtcctttgatatgtacgtctgctgggactacacggccgccaacaccactgcccaggcgtcctgcccctggtatctgccctggtaccgccacgtggctgcaggctacgttttccgccagtgtggcagtgacggccagtgggggccctggagagatcacactcagtgtgagaatccagagaagaacggggcctttcaggaccaaaggctgatcctggagcgcctgcaggttgtgtataccgtgggctactccctgtccctgggcactctgctgctagccctgctcatcctaagtttgttcaggcggctgcactgcactcgaaattacatccacatgaacgtgttcttgtctttcatgcttcgggcggtggccatcctcacccgggaccggctgctgcctaccctgggtccctaccctggggaccggacccttaccctgcggaaccaggccctagccgcctgccgcacggcccagatcgtgacccagtactgcgtgggtgccaactacacttggctgctggtagagggtgtatacctgcaccatctgctggtgatcgtgggaggctcggaaaagggccacttccgctgctacctgcttcttggctggggggcccccgcgcttttcgtcattccttgggtgatcgtcaggtacctgctggagaacacgcagtgctgggagcgcaacgaggtcaaagccatttggtggatcattcgcacccccatcctaataaccatcttgatcaatttcttcatcttcatccgcatccttggcatccttgtgtcaaaactcaggacgcggcagatgcgctgcccggactaccgactgcggctggctcgttccacgctgacgctggtgcccctgctgggtgtccacgaggtggtgtttgcccccgtgacggaggaacaggctgaaggcaccctgcgcttcgccaaactggccttcgaaatcttcctaagttccttccagggatttctggtgagcgtgctctactgcttcatcaacaaagaggtgcagtcggagatccgccggagctggcgccaccgcgtcctgcatctcagcctccgggatgagcgtccctgtccgcacgcggagctcggcccccaggccctgccctcgcgttctgcaccccgggaggtccccatcaccggcagcaccttgccctcggggccgctgcacgggcctggagaggaggtcttggaaagttactgctagaggcggagccannnnnnnnnnnnnnnnnnnnnnnnnnnnnnnnnnnnnnnnnnnnnnnnaggatgccctgcgaacgggaaagatggagaagggcctccgagcctcgcctggggacagcaggggcctgcagatggagagatgggcagggtgtggaaactgggcttccagcccaggtgcactgaaaatttcttctcattttgtgtacgactgttctgcccgcatggacgtatgtgcgcctcgtgcccgaaggaaggccttccctatgcctgaagggcagaagatcccctggggctggaactccgtgtctgcagcccggagtgcagcagaggtgtctgtgtcctcctgctccacaaggacggattatgagggggcaggttgtgaacgggaagcccggtgtgaggaatgcaggcggctggaccaggagggagaccacagagcggtgatggatttgctgagggatgccgggagagggatcaaaggagactgctgtgacaaacacggagatcagagggctcttggtttggggtgggagtgcaccgaacgaagttaggctgtgggagcagggtactgagggttaaataagagcaggcttctgccgaaccctgctgaatccaggcagccagccgcactgctggcagttaggacacacccttccaccccccagagagnnnnnnnnnnnnnnnnnnnnnnnnnnnnnnnnnnnnnnnnnnnnnnnnnnnnnnnnnnnncctcctcagctggtagggggtgctggactttccccagagagccctgccccggagccgacactgcactccgcacctcgggctttggcttccggtgcagctggaggccctggtaaatcaagcctgaggatcagtagcttctttatggggtgggagacgcagctggaaagggaggtgactagggagagtgtgatgagtaggggtcagctgaagccacaaggaagcatgaacatcacactgccactgtgccctaaggggatcttgattggaaactatttaagacacacnnnnnnnnnnnnnnnnnnnnttaacgttgtgtgtatgagcctgctgcccctctagaaaggtcacaccgaaagtgtaaagctgggacacctatgatcagtctgggcacttggtggcgcgcgcgggggggggggggtgacgttgagttgaaggtcatcttgacagaaagcaagttgaatatttaaactttgtgacaccttatctcaaataaacagtaaaagtagcagg

SEQ ID NO: 871 - DNA, 1006 bp, Mesocricetus auratus
ctcttgcaaagggtcctgcagcagggctgtagcccgtgagatagatctaagagactatgaaagtcagcaaaagcagcttgaacaggtcattgctaaagacttgcttccttcaaaagacaggcagtacttgccagcaataaaaatgtctccagttcccgacttgattcctggaagtttcaagagccaacttcaggaggcccctccagagtggaaggcattaacagaaatgcggcagatgagaatggagctggagaggcccgtcaagggtggggattcgcacggtccttctcgaggtgactctccaactcacagaccaagggcagaggccgaaaaccccacaaactctggtggatctgggttttggcgtcctgggagctccgggactggaagtgaaggaaatctgaaaaccgaggacacagagtttgagggaggctctagaccttcaagttataggccaagtagctcaggctctgggaaccccatgcctagcaaccctgactggggcgagttttcagagttcacaggaagtagcagcccggcaataaagaaagagtaccacactggaaaactgaccacctctaaaggagataaagagctcgtgatcggaaacgagaaagccacctccactagcaccagcacaagcacgacacgtcgttcatgctctaaaaccattaccaagactgtgataggtcccgatggtcaccgagaagtggtcaaggaagtggtcacctccgatgatggctccgattgtggtggcaccggagacttaggcatgacccacggttttggtggcaggtttgatgaatttgcccacaggttccccgaccaagctgccttttttgatagtcacttcgattctctctcgtctaactacaaagaagttggcagtaagacccacactgcaggctctgattcggacatcttcacagacttaacagacccgggctcccatgtgcctgagtacccttccagtagcaaaacctcaactgtcagaaaacaagtcacc

SEQ ID NO: 872 - DNA, 8305 bp, Mesocricetus auratus
  misc_feature (380)..(393): n is a, c, g, or t
  misc_feature (2765)..(2793): n is a, c, g, or t
  misc_feature (3654)..(3668): n is a, c, g, or t
  misc_feature (5428)..(5445): n is a, c, g, or t
  misc_feature (6451)..(6469): n is a, c, g, or t
aggagagagaggcgtctcaagatggcggctcccagagcctcctgcccgagcttttaagcgggagcatccgggcaaatagttagagcggcagcgctcagtggcctccagattctcgggagtaggtgctctgcagttttgagaagctttaaaggacacgagccgattgagaagggggggaaagagccaaagggaaggaggatagttaagatggcggcctccatggagtcgtccaccgctgtctaaggagccgcttctccgtgaaagctgccttagacgaaagggggtgtgtgaagaattaagggtctccttcccgctcagtgacttattcccactgcatccttaagcggaactatggcttcggctgtgtcccccgccaactnnnnnnnnnnnnnnctgcagccccgctggaaacgagtggtgggttggtcgggtccggtgccccgaccccgccacggccaccgtgccgtggctatcaaggagctcatagtggtgtttggcggcggtaacgaaggaatagtggacgaactacacgtgtacaacactgcaaccaaccagtggttcatcccagctgtgagaggggatattcctccagggtgtgcagcctatggctttgtgtgtgatggtactcgcctgctggtatttggtgggatggtggagtatggaaaatacagcaacgacctctatgaactccaggccagtcgctgggaatggaagagactgaaagcaaagacacccaaaaatgggcctcctccatgtcctcggcttggacacagcttctcccttgtgggcaacaaatgctacctatttgggggtctagccaatgatagtgaggaccccaagaacaacattccgaggtacttgaatgacttatatatcctcgaactgcggccaggctctggagtggtagcttgggacatccccatcacttacggagtcctgcctccacctcgggagtcgcatactgctgtggtgtacactgagaaggataataagaaatcaaagctggtgatctatggagggatgagtggctgcaggctaggggatctttggaccctggacatcgagacactgacatggaataagcccagccttagtggggtggcaccccttcctcgaagcctccattctgcaactaccataggaaacaaaatgtatgtatttggtggctgggtgcctcttgtcatggacgatgtcaaagtggccacacacgagaaggagtggaagtgtaccaacacactggcttgtctcaaccttgataccatggcttgggaaaccatcctgatggatacactggaagacaacattcctcgagctcgagctggtcactgtgctgttgccatcaatactcgtttgtatatttggagtggccgtgatggctaccgcaaggcctggaacaaccaggtctgctgcaaggacctgtggtatctggagacagaaaagccaccacccccggcccgagtacaactcgtacgagctaacactaattcactggaggttagctggggtgcagtggcaacagccgacagttaccttctgcagctccagaaatatgacattcctgccacagctgctacggccacttcccctactcccaatccagtcccatctgtgcctgccaaccctcccaagagccctgcgcctgcagcagctgcacctgctgtacagccactgacccaagtaggcatcacacttgtgccccaggctgccgctgcacccccaagcactaccaccatccaggtcttgccaacagtaccaggcagctccatttctgtgcccactgcagccagggctcaaggtgttcctgctgttctcaaagtgactggtcctcaggctacaacaggaaccccactggttactatgagacctgctggtcaggctggaaaagcccctgtcactgtgacctccctgcctgctagtgtgcgaatggttgtacccacacagagtgcccaggggacggtgattggcagcaacccacagatgagtgggatggctgcattggctgctgccgctgctgccacacagaagattcctccttcctcagcacccaccgtgctgagtgtcccagccggcaccaccattgtcaagacagtggctgtgacacctggcacaaccactcttccagccactgtgaaggtggcctcctcccctgttatggtgagcaacccagccactcgcatgctaaagactgcagctgcccaagtggggacatctgtgtcctctgctgccaacacatctacccgccctatcatcacggtacacaaatcaggcaccgtgacagtggcccagcaagcccaggtagtgaccacagtggtcggcggagtcaccaagaccatcaccttagtgaagagccccatctctgtcccaggaggcagtgccctgatttccaatctcggaaaagtgatgtcagtggtccagaccaaaccagttcagacttcagcagtcacaggccaagcctctacaggccctgtgactcagatcatccagaccaaagggcctctgccagcagggactatcctgaagctggtgacatcagcagatggcaaacccacaaccatcatcaccaccacacaggctagtggggctgggtccaagcctaccatcctgggcatcagtagtgtctctcccagcaccaccaaacctggtacgactaccatcatcaagaccattcccatgtcagccattatcacccaggcaggcgccacaggtgttaccagcactcctggcattaagtcccccatcacaattatcaccaccaaggtgatgannnnnnnnnnnnnnnnnnnnnnnnnnnnnatcactgctgtccccaagattgctactggccatgggcagcaaggagtgacccaggtggtgctgaagggagcccctgggcagccaggcgccatcctccgcactgtgcccatgagtggcgtccgcctggtcacccctgtcactgtctctgctgtcaagccagctgtcaccacattggttgtgaagggcaccacaggtgtcacaaccctaggcacagtgacaggcactgtctctactagccttgcaggagctggggcccatagcaccagtgcctctctggccacacctatcactaccttgggcaccattgccactctctcaagccaggtgatcaatcctactgccatcacagtatcagctgcacagaccacactgacagctgctggtgggcttacgacacccacaatcacaatgcagcctgtctcccagcctacccaagtgactctgatcacagcacccagtggggttgaggcccagcctgtacatgaccttcctgtatccattttggcctcacctactacagagcagcccacagcaacagtcaccatcgctgactcaggccagggtgacgtacagcctggcactgtgacactggtgtgctccaacccaccctgtgaaacccatgaaacaggcaccaccaatacagctactaccactgttgtggctaaccttggaggacatcctcagcctacccaggtgcagtttgtttgtgacagacaagaggcagctgcttctcttgtgacctcagctgtgggacaacagaatggtaatgtggtccgtgtctgttcaaaccccccttgtgagacccatgagacaggcactaccaacactgccacaacagccacttcgaacatggctgggcannnnnnnnnnnnnnnccccccttgcgagactcatgagacaggcaccaccagcactgccactacagcaatgtccagcatgggcactgggcaacagcgagacactcgtcatacctctagcaatcccactgtagtgcggatcactgtggctcctggggcactggagagaacccagggtactgtgaagcctcagtgccaaacacagcaggccaatatgaccaacaccaccatgactgtgcaggctaccagatctccgtgcccagctggcccactgctcaggccaagtgtggcactggaggctgggaaccatagccctgcctttgtacagctagctcttccaagtgttagagttgggctgagtggccccagcaacaaggacatgcccacagggcaccagctggagacctatcatacttatacaaccaataccccaaccacagccctctctattatgggtgctggggagcttggtacagctcgattgatccccacatctacttatgaaagcctccaggcaagctctcccagcagcaccatgactatgacagctctagaggcactgctgtgcccttcggctaccgtgacccaagtctgctccaatccaccgtgtgagacccatgagacgggcaccaccaacactgccactacctccaatgcgggcagtgcccagcgggtatgttccaacccgccttgtgagactcatgagacgggaaccacacacacagctaccactgccacatcaaatggaggtgcaggccagcctgagggtggacaacagcctgccggtggccgtccctgtgagacacaccagaccacttccactggcaccactatgtcagtcagtgtgggtgccctgcttcctgatgccactccctctcatggaaccttggagtctggcttagaggtggtagcagtgtccaccgtcacctcccaggctggtgccacattgctggcttctttcccaacacagagggtatgctccaaccctccttgcgagacccacgagacaggcaccacgcacacagccaccactgtcacctctaacatgagctcaaaccaagaccctccaccagctgccagtgaccagggagaggtggtgagcacccaaggtgacagcgcaaacatcaccagctccagtggtatcacaacaactgtgtcatccacattgccacgagcagtgaccactgtgacacagtctacaccagtgccaggtccctctgttccgaacatctcatcactgactgagaccccaggggctctgacttccgaagtccccatcccagccacgataacagtgaccatagccaacacagaaacttctgacatgcccttctctgctgttgacatcctgcagcccccagaggaactccaggtctcaccagggcctcgtcagcagctgccaccacggcaactcctgcagtctgcctctacccccctgatgggggagtcctccgaggtcctgtcagcctcccagacccctgagctccaggccgccgtggatctgagcagcactggggacccatcttcaggccaggagcctaccagctctgctgtcgtggccactgtagtggtccagccacccccacccacacagtctgaagtagatcaattatcacttccccaagagctgatggctgaggcccaggcgggtaccaccacccttatggtaacagggctcaccccagaggagctggctgtgactgctgctgctgaagcagctgcccaagctgcagccactgaagaagctcaagccttagccatccaggctgtgctccagnnnnnnnnnnnnnnnnnnatggcaggcactggggagcccatggatacatctgaagcagcagcagcagtgacacaagcagaactgggtcacctttcagctgagggccaagagggtcaggccaccaccatacccattgtgctgacacagcaggagcttgcagcccttgtgcagcagcagcagcagctccaagaagtccaagctcaagcccagcagcagcaccacctccctactgaggctctggccccagccgacagtctcaatgacccatccatcgagagcaactgcctcaacgagctagctagtgctgtacctagcactgtggccttgttaccctcaacagccactgagagcctggctccatctaacacatttgtggctccccagcctgttgttgtagccagcccagcaaagatgcaggctgcagctaccctaactgaagtggacaatggcatcgagtccctgggtgtgaaaccggacttgccacccccacccagcaaagcccctgtgaaaaaggagaaccagtggtttgatgtgggggtcattaagggtaccagtgtaatggtaacacactattttctgccaccagatgatgctgttcagtcagatgatgactcaggcacaatcccagactataaccagctgaagaagcaggagctacagccaggcactgcgtataaatttcgtgttgctggaatcaatgcttgtggccgggggccctttagtgagatctcagccttcaagacgtgtctacctggtttcccaggggctccttgtgccattaaaatcagcaagagcccagatggtgctcacctcacctgggagccaccgtctgtgacctccggcaagatcatcgagtactctgtgtacctggccatccagagctcacaggctggtggtgagcccaagagctctaccccagcccagctagccttcatgcgagtatactgtgggcctagcccttcctgcctcgtgcagtcctccagcctctccaatgcccacattgactacaccaccaagcctgccnnnnnnnnnnnnnnnnnnncccgcaatgaaaagggctacggccctgctacacaagtgaggtggttgcaagaaaccagtaaagacagctcgggcaccaagccagccagcaagcggcccatgtcgtctccagaaatgaaatctgctccaaagaagtctaaggctgatggtcagtgaagaagctggccagcatctggatcctccagacccctctgcttcaggaacgccctatagggcctggcccaccctcccaccctgcccacccagcctttgcacttcaccctcaccagccactggctaccattcaatctccccccctttccctctctttttacaataaagaaagcacattttatcattgctgttgggaggaagcagaaggcagattggaaagagcgatgagtaagcaaatgagtgcaagttgtgctccttccttttccccacctgctgccctccctgagctgagtatgactagacagttcggagactttgggaagagaaattaaagctgaaaacaaagaagatagtacccacacttaagcctgcacttgtttgcagctcatcgcccttggcctgagaggcagccaaaggctggaggggggaggagtatcccccaagttccctcaggctttccccagcaaagtctgtctggttctattgtgttgtgttctatcactgtgatttccaggcaccttccatcccttctacaggcttagacagatctgtcttgcccagtaaccccatcggaagtataacacatctcagagacctttctgctaccacttaacacctctctcccttcctctttacaaaaagatgaggggaaagaaagaaggagccttgattagtctgagcagtggctgtgaaatcctcccaatgggcacagagtgccccccagtgatcctggctttggcccaccttgcttgagcctgggggccacatcaacaactgctgcatttgttgtatttttaagttgaaattaatgaagttaacattttttattgtaattttagctttagtgtgtgggggcttatccctttttgttagctgtgtacagaatgtgtatcgtattttctttcttccattttccccccttggctaatcattggcagggatcttttgcggaaaagctgagagagcagctagggcaggagagaaacagagtgtcctgggtaggacctggaagaccctgcctagttccattttcctgttactagacccctgcctacttttggaacagtgtgagacattgacctttattcccctgtgggttagcacttgacatgtagaggcttgcccttgaatgtggagtccaccttcatcagcatcactctcagagactgaccttgaacaatacagcaggggaaggaaacaagtggaacctggccaccttgaaagcagcccaggaagggggtgggtatgccatgtatcccacagaggctgggggtaggtacatgacacaaactcagtaattaatttcatagcattgcccccaagcactggattttttttctctccaggacccaagttttaggcggtgagtaatgcttgcaagcaagttactgaagaacttagaaatggacagccaatgtgttcagccactcaggcccataccccctgaggcctctagtgtattgtatcatatttctctgtggaaaatgtcatgtttagtcaagttggagccctctcgcctggcccctttgttttccctatcctttctcccaagcacccattgatttctcttctgagaacagtactaccccattcatctattgtagagtaatccctgtgactcaatattaccatagtgcgatgttgttttgtgctattttgaacaattaaaagacttttttgaaat

SEQ ID NO: 873 - DNA, 1378 bp, Mesocricetus auratus
atcagctctgggacaggcaagctaaaaatgaagccctccatctcatgggggatcctgctgctggcaggcctgtgctgcctggtccccagcttcctggctgaggatgcccaggagacagatgcctccaagcaggatcaggagcaccaagcctgctgtaagatcgctccaaatttggcagacttttccttcaacctataccgggagctggtccatcagtccaatacgaccaacatcttcttctctcctgtgagcattgccacagcctttgctatgctctctctgggcaccaagggtgtcactcacacccagattctagagggcctggggttcaacctcacagaaatagccgaggctgaggtccacaaaggcttccataacctcctccagaccttcaacaggccagacaatgagcttcagctgaccacaggcaatggcctgttcatccacaacaatctaaagctggtggataagttcctggaagaggtcaagaacgattaccactcggaagccttctctgtcaacttcacagactcagaagaggccaagaaagtgatcaacggttttgtggagaagggaacccaaggaaagatagttgatttagtgaaggaccttgacaaagacacagttcttgccctggtgaattacattttctttaaaggcaagtggaagaagcccttcgatgcagacaacactgaggaagctgacttccacgtggacaagaccaccacggtgaaggtgcccatgatgagccgcctgggcatgtttgacgtgcactatgttagcactctgtccagctgggtgctgctgatggattacctgggcaacgccactgccatcttcatcctacctgatgatggcaagatgcagcatctggagcaaactctcaacaaggaaatcattggcaagttcctgaaggacagacacacaaggtcagccaatgtacacttccccaaactgtccatctctggaacctataacttgaagacagccctggatccgctgggcatcacccaggtcttcagcaatggggccgacctttctgggatcacagaggatgttcccctgaagcttggcaaggctgtgcataaggctgtgctgaccatcgatgagagagggacggaagctgcaggggccacatttatggaaatcatccccatgtctgtgccccctgaggtgaactttaacagccctttcattgccataatatatgatagacagacagcaaagagccccctctttgtgggaaaagtggtggatcccacacgttaatcacaattctcagtcagatgtcatcttttctggattgggtcccctccccagtgacattaaacacaggctgtcctggcccacccatgcctgagtgcttctgcaaatgctc

SEQ ID NO: 874 - DNA, 1848 bp, Mesocricetus auratus
  misc_feature (667)..(697): n is a, c, g, or t
cacagctaccctgtagcaacacagacttggactaggagccgaccatgacactggaaagctttccctgctggctgaatgctgtaacctgtgggctcctgcttctctttcttcatgtgcaaggccaggactcacccagtcccatcaggaacacacacacaggccaggttagaggaagacttgtccatgtgaaagacactgaagttgatgtccacacattcctgggaattccctttgccaagccacctgtaggaccactgcgctttgcaccccctgagccccctgagccatggagtggtgtgagagatgggaactcctttccagccatgtgtctacaaaacgatgatatgatgaattctgagggtctgaagatgataaaactcatcatgcctcccatctctatgtctgaggactgcctgtatctcaacatctacacaccaacccatgcccatgaaggctctaacctgccggtgatggtgtggatccatggtggtgctctggttgtaggaatggcttctatgtatgatggttccatgctggcagccattgaggatgtggtggttgtcactatccagtaccgtctgggtgtcctcggctttttcagcactggagatgagcacgccagaggcaactggggctacctggaccaagtggctgccctacgctgggnnnnnnnnnnnnnnnnnnnnnnnnnnnnnnnccccggccaggtcactatttttggagagtcagcaggtggcacaagtgtgtcttcacatgttgtgtcccccatgtccaaaggactcttccatggtgccatcatggagagtggagtatcagtgatgcctggtatcatctccagctcctctgagatggtttacacaatagtggccaatctatctgattgtgcagctgtgaacacagagactctggtgagctgcctacgaggcaagagtgaagcagagattctggctattaacaaggtcttcaagatcattcctgctgtggtggacggggagtttctaccaaagcatcctcaggagctgttggcctctgctgattttgaccctgttcccagcatcattggtgtcaacaatgatgagtatggatggcttgtgcctgtgatcatgggctctgctcaggaaataaaagaaataaccagagtgaccctgcctgcaattctgaagagcacagcaaatcagatgaagttgcctcctgagtgtggtgacttgctaatggaagagtatatgggggacaatgaggacccacagaccctccaagcacagttcagagagatgatgggggacttcacgtttgtgatcccttcactccaagtagcacattttcagcgtgcccatgctcctgtctacttctatgagttccaacatcggcccagcttctttaaagataccaaaccaccacatgtgaaggctgaccatggtgatgaatttttcttcgtctttggcaacctattatgtggcataaaatttgcttccactgaggaagaggaactcctgagcagaaagatgatgaagtactgggccaactttgcacggcatgggaaccccaacagtgagaatctaccctactggcccatgttggaccacgatgaacaatacctgcagctggacattaagcctgctgtgggacgagccctaaaggccagaaggctgcagttctggaccaaaattctgccccagaagatccaggagctaaagggcactcaagagaggcaccaagagttgtagtaccctgtttgaagaaaggcatgtggccttcatgaagggtgggttctgtctgaagtttggaaagacttttgatcctaacatgcatataagaattaataaaggatatggccatgcatttttaaaa

SEQ ID NO: 875 - DNA, 1868 bp, Mesocricetus auratus
cacaatgtggctctaccctctggtctggatttctcttgctgcttgcacagcttgggggcacccatcttcaccaccggtggtgaacactgttcatggcaaagtcctggggaagtacgtcacgttagcaggatttgcacagcctgtggctgtcttcctgggagttccatttgccaagcctcctcttggatccctgaggtttgctcctccacagcctccagagccatggagcttcgtgaagaatgtcacttcctaccctcctatgtgctcccaagatgcagttggaggacaggtgctctcagaactcttcaccaacagaaaggagaacatccctctacagttttctgaagactgtctctacctgaatatatacacccctgccgacttgacaaagaacagtcggctgccggtgatggtgtggatccatggaggaggactggtagtgggtggcgcatctacctatgatggactggccctctctgcccacgaaaatgtggtagtggtgaccattcagtaccgccttggcatttggggattcttcagcacaggggatgaacacagtcgggggaattggggtcatttggaccaggtggctgcattacactgggtccaggataatattgccaactttgggggcaacccaggctccgtgaccatctttggagagtcagcaggaggtttcagtgtctctgttcttgtgttgtctcctctggccaagaacctcttccacagggccatttctgagagtggtgtggccctcacttctgctctgtttacaaaagacgccaagcccattgctgagctggttgctactctttctgggtgtaaaactaccacatcagctgttatggttcattgcttgcgccagaagacagaggaagaactcatggagacctcacaaaaaatgaatctttttaaattggacctacttggaaacccaaaagagacctaccccttcctccctaccatgattgatggagtgttcctgtcaaagagtccagaagagatcctggctgagaagagtttcaacactgtcccctacatggtgggcatcaacaagcaagagtttggctggatcattccaatgattatgggctatccactctctgaaggcaaactggaccagaagacggctaactccctcttgtggcagtcctacccaacagttaaaatccccaagaatctgattccaatggccactgagaagtatttaggagggacggatgaccctgccaaaaagaaagacctgctcctggacttgattgcagatgtgatatttggtgtcccatcagtaatggtgtctcgtggccacagagatgccggggctcccacctacatgtatgagtttgagtatcgtccaagctttgtatcgaacatgagacccaaggaagtcacaggagaccatggcgatgaaatcttctcagtatttggatctccctttttaaaagatggtgcctcagaagaggagatcaacctcagcaagacggtgatgaaattctgggccaactttgctcgcaatgggaaccctaatgggggagggctaccacattggccagagtatgaccagaaggaagggtacatgaagattggtgcctcagtgcaggcagcccacagactgaaagacaaagaagtgattttttggactgaactcagggccaaggaggcagcagagaggacaacacacagagaacatgctgagctctgatcccaagttccagctatgtttgagagcctggagccaagtaagaggtatgccacagatggtcctgcagagacataaggcttattatctttagggccacacaattgtttggtgttttgtacaaatgcattaaagaggatccttgttgcttcaacttgtaaaaataaaa

SEQ ID NO: 876 - DNA, 8751 bp, Cricetulus sp.
  misc_feature (64)..(64): n is a, c, g, or t
  misc_feature (70)..(70): n is a, c, g, or t
  misc_feature (531)..(555): n is a, c, g, or t
  misc_feature (600)..(620): n is a, c, g, or t
  misc_feature (717)..(717): n is a, c, g, or t
  misc_feature (837)..(837): n is a, c, g, or t
  misc_feature (1071)..(1071): n is a, c, g, or t
  misc_feature (1218)..(1218): n is a, c, g, or t
  misc_feature (1974)..(2001): n is a, c, g, or t
  misc_feature (2011)..(2040): n is a, c, g, or t
  misc_feature (2082)..(2116): n is a, c, g, or t
  misc_feature (2811)..(2825): n is a, c, g, or t
  misc_feature (2922)..(2946): n is a, c, g, or t
  misc_feature (3248)..(3272): n is a, c, g, or t
  misc_feature (3330)..(3358): n is a, c, g, or t
  misc_feature (5140)..(5140): n is a, c, g, or t
  misc_feature (5378)..(5395): n is a, c, g, or t
  misc_feature (5528)..(5549): n is a, c, g, or t
  misc_feature (5666)..(5686): n is a, c, g, or t
  misc_feature (5705)..(5742): n is a, c, g, or t
  misc_feature (5779)..(5801): n is a, c, g, or t
  misc_feature (6060)..(6083): n is a, c, g, or t
  misc_feature (6088)..(6148): n is a, c, g, or t
  misc_feature (6151)..(6163): n is a, c, g, or t
  misc_feature (6193)..(6233): n is a, c, g, or t
  misc_feature (6261)..(6322): n is a, c, g, or t
  misc_feature (6329)..(6377): n is a, c, g, or t
  misc_feature (6380)..(6407): n is a, c, g, or t
  misc_feature (6423)..(6462): n is a, c, g, or t
  misc_feature (6490)..(6607): n is a, c, g, or t
  misc_feature (6610)..(6636): n is a, c, g, or t
  misc_feature (6652)..(6692): n is a, c, g, or t
  misc_feature (6720)..(6803): n is a, c, g, or t
  misc_feature (6813)..(6838): n is a, c, g, or t
  misc_feature (6841)..(6867): n is a, c, g, or t
  misc_feature (6894)..(6923): n is a, c, g, or t
  misc_feature (6930)..(6943): n is a, c, g, or t
  misc_feature (6945)..(6974): n is a, c, g, or t
  misc_feature (6983)..(7068): n is a, c, g, or t
  misc_feature (7071)..(7097): n is a, c, g, or t
  misc_feature (7113)..(7153): n is a, c, g, or t
  misc_feature (7160)..(7173): n is a, c, g, or t
  misc_feature (7175)..(7213): n is a, c, g, or t
  misc_feature (7230)..(7297): n is a, c, g, or t
  misc_feature (7301)..(7327): n is a, c, g, or t
  misc_feature (7343)..(7378): n is a, c, g, or t
  misc_feature (7390)..(7403): n is a, c, g, or t
  misc_feature (7405)..(7428): n is a, c, g, or t
  misc_feature (7463)..(7527): n is a, c, g, or t
  misc_feature (7572)..(7611): n is a, c, g, or t
  misc_feature (7619)..(7631): n is a, c, g, or t
  misc_feature (7633)..(7685): n is a, c, g, or t
  misc_feature (7687)..(7700): n is a, c, g, or t
  misc_feature (7712)..(7756): n is a, c, g, or t
  misc_feature (7759)..(7771): n is a, c, g, or t
  misc_feature (7801)..(7841): n is a, c, g, or t
  misc_feature (7869)..(7934): n is a, c, g, or t
  misc_feature (8495)..(8526): n is a, c, g, or t
agatctcagctctgggctctatgtttttaatttggagaattacttggtttgggctttttttgtngttgtnctgtttttgtcgttgttttggtttctgaagactgagtttctccgtgtaaaccctagttgtcctggaacttgcatcaaactcacgagatccccctgcctttgcctcctgaacactgtaattaaaggtgtgtgcaccacagtgggcttggttttgtttctggaaacagggtctcactgtgtacccctggctggcctggaacttgctatatagatcagtctgcctctgaagtgctaggatcaaaggtgaatgtcaccatgctatgtctcagctggtgaaaggcctcaaccttccctcccaagttctcaccattccctgtctttctatcctgcctcagaacaacgattgtacagcagttagggtggagtctgtttaacattactgacctccactcttaacaatgacatatttaagactaggcagtggtggcctacatctttaatcccagtaccactccaggagannnnnnnnnnnnnnnnnnnnnnnnngtgagacccacctgatctacagagttaattccaggacggccaggnnnnnnnnnnnnnnnnnnnnnccagaaaacagaaaacaaaacaaaaaccccaaaccaaaaaccaagtaattctccaaattttccaagtttggaccgcatacagagttgacggtggagnatgcctgggtcttgtgtcagctgaggccaagtccagcctctatgcttgttcataaccagaaagcagaacacagcagcaccctgtttttttgttgccctataagctgaggcttgcccttgnccttggtaaccttgtgtggttatacaacccatgacaaaacagacttctggcttcattcctacttccttttgggggagaaaaacagcacctgacccttgtgcttagtcccggttccctattacaaaaacagtcacacgccaggtgtgaccttcagaccaggccgacccagctgcagcaaccagccccacccccatcgggaagcttggggcccagccctgccctgctcagcccatnccacgcaggtgtcctcagtcaatccctccctgttgccgggcccctatctcagtccccattggtgccagctttgaagcagtcgtccctggtagcctgcaaaggacggatccgtgtgtggaacgaactgcaaacggaatccagtgagtnacaggccttctagcacgttcgagcacttcccattctaggtcaggaggtttgggattttagggctgtgacttaatacccaagtcctgaggccaagtaggacatggagacatcagagtccctttcagaaaatagaccagcagctgtgataatctgcccccaaggtctctgtaggggacatttggggacacaggattccatgtggatggcagtgcctgtcactgtgacatatctatgaatgtctctggcctctgtgactagtattatccccttctttcccatcagagttgtgacagctttgctgaagggctcactcctggctgggaagctgtgttggggtgcagccgccagctctgaggtgagggcatttctcctatcctgtttgccctgtgtccatgaggagcaggtcacctctgctagtggtgagacacagtgctgatggattattaaaaataaagcaaaataaaaaaaaaattggattggaagtgaagaggggactgggtagaggtgtccaggaaggagttgcagggaggaaatgggagaggtatgataaaaatacaatatatgtatgtatggaattctcaaagattattataaaatatatattttaaaatgagaagctggagctgggcgtggtggctcacaccaacttttaatcccaacacttgggggcagaggtaggtggatttctggggagttcaaggagagccagggctacacagagaagccctgtcttgagccaggtggtggtggtgtatnnnnnnnnnnnnnnnnnnnnnnnnnnnngaggcaggcnnnnnnnnnnnnnnnnnnnnnnnnnnnnnngtacagagtgagttccaagacagcttccaaaataatacagannnnnnnnnnnnnnnnnnnnnnnnnnnnnnnnnnngccctgtcttgaaaaatcaaaataaataataaaaatacatcatggggtttcaatatagtttcatacctgtaatataatgcattttggtcatgtttgttggaaataagaatcttacttatcccccattgttctcttcccccagaccctctgaacattccttcctttccatgctaacccttggccaggtccagccctccagccttcctcctcttctactccctcccctctgaaatcaagactgtttggccttgaaccttctagaaagaattggcctgcacagaaatctgtctgagaaaccactggggtatcccagagaatgacattttctcagtggcatatgacttcattcatggaaaaccacagaaattagtctgtttttaacaatatttctgatgttgaattattatgaattcctaaaccggaggaaccagacaatcttgaaatctcaacacctgggtggtagaggtaggagcctccctgcaagttagaccccagcctggtctacaggatgagttccagggcaacctggtgaccctgtctcaaaaaaccctcaaaaagtgttgggattagtggcatgcaccaccattcccaccaaaggtttatttttaataatatgtgtgtgagtgtgtatcactatgagtatatgtcaacatgtgtcaatgtccccagggacatttaaagagcccctgaagctnnnnnnnnnnnnnnntatgaactgcctgacatggctaatgggaattgaactcagattttctggaagttatacctgctcttactgctgagccatgtctctgaagaccccaggnnnnnnnnnnnnnnnnnnnnnnnnntattttctgtatagccctggctgtcctgaaagcactctctatatgtagaccaggcttgcctggagcttggatatccacctgcttctgcctcaggaatggtgggattgaaggtgtgcaccaccacatccgctaacatgcacaattcttaatgggtttatatcttatttaatgaatgaaaggtttgggggatggatgtagcttaatggaaaatgactgaagatttcaattaaaaatctggggcttagctgcgcggtgggtggtgcctgcctttagtcccagtactggggaggcagaggaaggannnnnnnnnnnnnnnnnnnnnnnnntggtctataacgtgagttccaggacagccagagatacacagacaaaccctgtctcacnnnnnnnnnnnnnnnnnnnnnnnnnnnnntctgggacgtaggcttggtgtggtggcacacattttgattccagcacttggaaggaagaggcctgcatggtctacatagcttgtttcaggcaaccagagctacatagtgagatcctgtctcaacaaaaataaaataatctaaggcttcaaagggttcaatctcttaggtagctaaatatgaacaaaatttgggaaatgtgaccttttccttagtgacagtcagatagaaccttctcgagtgcaaggacaccaagtgcaaacaggctcaagaacagcctggaaaggtctagtgctatggggcttcaggtcgaatgccaactgttttcaagaactgtgtggatttttctgcctgtaacgaattcagattcatttttcaaaactcggggagagttttccccctttataatttttttttttaaatttattaaactttgtttcgttccccttgttttgagaattgcagagtgatccaccctgtcacagtgccagggagctcagggatgggcccaggggcctggcggggctgaaggggctggggaagcgagggctccaaagggaccccagtgtttcaggagccaaagccctaggttcctagaacgcagaggccaccgggaccccccagacggggtaagcgggtgggttctggggcgcgaagcgtactgcgcatgcctcgaggtccgctccggccgcgctgatccaagccgggttctcgcgccgacctggtcgtgattgacaagtcacacacgctgatccctccgcggggccgcacagggtgacagcctttcccctccccacaaagccccctactctctgggcaccacacacgaacattccttgagcgtgaccttgttggctctagtcaggcgcctccggtgcagagactggaacggccttgggaagtagtccctaaccgcatttccgcggagggatcgtcgggagggcgtggcttgtgaggattatataaggcgactccgggcgggtcttagctagttccgtcggagacccgagttcagtcgccgcttctctgtgaggactctgccgccgccgctggtgaggagaagccgccgcgcttggcgtagctgagagacggggagggggcgcggacacgaggggcagcccgcagcctggacgttctgtttccgtggcccgcgaggaaggcgactgtcctgaggcggaggacccagcggcaagatggcggccaagtggaaacctgaggggataggcgagcggccctgaggcgctcgacggggttgggggggaagcaggcccgcgaggcagctgcagccgggaacgtgcggccaaccccttattttttttgacgggttgcgggccgtagtgcctccgaagtgagagccgtgggcgtttgactgtcgggagaggtcggtcggattttcatccgttgctaaagacggaagtgcgactgagacgggaaggggggggagtcggttggtggcggttgaacctggactaaggcgcacatgacgtcgcggtttctatgggctcataatgggtggtgaggacatttccctgactatagctttccctcagttgtaggacagggtttgggcctcggcctcgggttaggctctccagagtgggcaggaaccggaaatccagaggggggaaaagtgagcctaaattgagttttgtttcttgtcctatatggtttagagagagactcgctgcaaaaccgtggctggcctggaactctagaccagaaccctggcctttgccgacccacatgattagattcaaggcctgtgccaccagcccaggctttantattatggtctgggatttctgcgatttcatccctggtgttttgggatgatgacttgtgggtcttccctcctcccccttactgtttctgtccatggcgtgtgttctaacccaagtttgttcttttgggggggtgggagggttgcgataaaatgggatctatctctgccctcccaacttgagatctgcctgtcagaagtctcagtgctgagaataaaggtgtgcattggctcagacctcnnnnnnnnnnnnnnnnnntattttgtaggaagtctgtagtccttacttgatacataagaccagacaggatctgatttcctgcctatgaatggtagatcctctcagtgactgcagtgtgaatggggaccacgcttttctccaaactatgcannnnnnnnnnnnnnnnnnnnnntgactttcagccactggtactgcaatatccactcaccatttattatatggaccaggttcaccatgcctaggtggctttgcttttgagacacggtttctctgtgtagccttggttatnnnnnnnnnnnnnnnnnnnnnaattatttttggtttttcnnnnnnnnnnnnnnnnnnnnnnnnnnnnnnnnnnnnnnggcacttgctccggagaccaggctggcctccaactcnnnnnnnnnnnnnnnnnnnnnnngactgctgggattaaagtaaagccattctgcaaccctgaataccactcaataggtttcttatttgaaatgtggttttatgatttttatttctggatttagaaaagaaatcttcagacagaagtcttcagacagaaactagctgtagtttggctgtgtgaactaaattggcatccatttcacagcaatccaactgttagtaccataccacgaatatttgtcattcctgacctgttttttgtttgtgtgtgtgacagacannnnnnnnnnnnnnnnnnnnnnnngacannnnnnnnnnnnnnnnnnnnnnnnnnnnnnnnnnnnnnnnnnnnnnnnnnnnnnnnnnnnnaannnnnnnnnnnnngagggcatcccccctgaccagcagaggctnnnnnnnnnnnnnnnnnnnnnnnnnnnnnnnnnnnnnnnnntccgactacaacatccagaaggagtctnnnnnnnnnnnnnnnnnnnnnnnnnnnnnnnnnnnnnnnnnnnnnnnnnnnnnnnnnnnnnngaaaacnnnnnnnnnnnnnnnnnnnnnnnnnnnnnnnnnnnnnnnnnnnnnnnnnaannnnnnnnnnnnnnnnnnnnnnnnnnnntgaccagcagaggttnnnnnnnnnnnnnnnnnnnnnnnnnnnnnnnnnnnnnnnntccgactacaacatccagaaggagtctnnnnnnnnnnnnnnnnnnnnnnnnnnnnnnnnnnnnnnnnnnnnnnnnnnnnnnnnnnnnnnnnnnnnnnnnnnnnnnnnnnnnnnnnnnnnnnnnnnnnnnnnnnnnnnnnnnnnnnaannnnnnnnnnnnnnnnnnnnnnnnnnntgaccagcagaggttnnnnnnnnnnnnnnnnnnnnnnnnnnnnnnnnnnnnnnnnntccgactacaacatccagaaggagtctnnnnnnnnnnnnnnnnnnnnnnnnnnnnnnnnnnnnnnnnnnnnnnnnnnnnnnnnnnnnnnnnnnnnnnnnnnnnnnnnnnnntgagcccagnnnnnnnnnnnnnnnnnnnnnnnnnnaannnnnnnnnnnnnnnnnnnnnnnnnnntgaccagcagaggttgatctttgccgnnnnnnnnnnnnnnnnnnnnnnnnnnnnnntccgacnnnnnnnnnnnnnngnnnnnnnnnnnnnnnnnnnnnnnnnnnnnnaggggtggnnnnnnnnnnnnnnnnnnnnnnnnnnnnnnnnnnnnnnnnnnnnnnnnnnnnnnnnnnnnnnnnnnnnnnnnnnnnnnnnnnnnnnaannnnnnnnnnnnnnnnnnnnnnnnnnntgaccagcagaggttnnnnnnnnnnnnnnnnnnnnnnnnnnnnnnnnnnnnnnnnntccgacnnnnnnnnnnnnnngnnnnnnnnnnnnnnnnnnnnnnnnnnnnnnnnnnnnnnngatgcagatctttgtannnnnnnnnnnnnnnnnnnnnnnnnnnnnnnnnnnnnnnnnnnnnnnnnnnnnnnnnnnnnnnnnnnnaaannnnnnnnnnnnnnnnnnnnnnnnnnntgaccagcagaggttnnnnnnnnnnnnnnnnnnnnnnnnnnnnnnnnnnnnccctgtccgacnnnnnnnnnnnnnngnnnnnnnnnnnnnnnnnnnnnnnnaggctcaggggtgggatgcagatctttgtgaaaannnnnnnnnnnnnnnnnnnnnnnnnnnnnnnnnnnnnnnnnnnnnnnnnnnnnnnnnnnnnnnnnaagatccaggacaaggagggcatcccccctgaccagcagaggttnnnnnnnnnnnnnnnnnnnnnnnnnnnnnnnnnnnnnnnntccgactnnnnnnnnnnnnngnnnnnnnnnnnnnnnnnnnnnnnnnnnnnnnnnnnnnnnnnnnnnnnnnnnnnannnnnnnnnnnnnngcaagaccatannnnnnnnnnnnnnnnnnnnnnnnnnnnnnnnnnnnnnnnnnnnnaannnnnnnnnnnnncagggcatcccccctgaccagcagaggttnnnnnnnnnnnnnnnnnnnnnnnnnnnnnnnnnnnnnnnnntccgactacaacatccagaaggagtctnnnnnnnnnnnnnnnnnnnnnnnnnnnnnnnnnnnnnnnnnnnnnnnnnnnnnnnnnnnnnnnnnngaccatcaccctggaggttgagcccagtaacaccatcaagaaaagcaaacaggaagatggacgcacctttctcactacactgtctagaaagagcacaccttgtgcttgttcttgggcttgaggggaggtgttttaatttaccccatcttttaagttgttaacaagtttcattgcactttgaataaagttcttgcattcccaaaggtgttggatctcgttttagctttagtttgttggttcctgattgtagaggctatcaagtttgtgtcatcagtctatgttaattaccattaggtaataatgatgaagctgtaagggtagttattttcagtgtaaatgggcttaacatttgaaagattagttatatgtgcctgggtatttgattttatgtagttatgtgcactctgtcccttgtgtccagtacagaaaaggatattcagtctggagttaagatgtagatgagctgccgtatccctgcaggcaactgtacttagtcttctacatgacaacaaataatttgtatttttccaaaacaggcttctctatgtaagagccctagcnnnnnnnnnnnnnnnnnnnnnnnnnnnnnnnnctagcctcaagttcacctgcctctgcctccaaagtgcttgtattaaaggcatgtgctgctactacctgccaagaggaacaaattcttaggaaccatctttccagtcctggtaggtgatattacaaatataggctttgttttttctttttttttaatcatgtgaaattgtacatttctgtttgcatatgtattatcctgggcagggatacatagctgtgttagatc

SEQ ID NO: 877 - DNA, 2421 bp, Cricetulus griseus
  misc_feature (552)..(569): n is a, c, g, or t
  misc_feature (824)..(902): n is a, c, g, or t
  misc_feature (1069)..(1085): n is a, c, g, or t
  misc_feature (1162)..(1198): n is a, c, g, or t
ggcgcaggctctgtcactgacaacgggggactctcacgcagactccagtgccaccatgactgaggctgtagcagaagaagtgtctcttttcagcacaacggacgtggttctgttttctctgattgtgggggtcctgacctactggttcatctttaggaagaagaaagaagaggtgccagagttcagcaagatccaaacagcgaccccatcagtcaaagagagcagcttcgtggagaagatgaagaaaacgggaaggaacattatcgtattctatggctcccagacggggactgctgaggagtttgccaaccgcctgtccaaggatgcccaccgctatgggatgcggggcatgtctgcagaccccgaagagtatgacttggccgacctgagcagcttgcctgagatcgacaagtccctggtagtcttctgcatggccacgtatggcgagggtgaccccaccgacaacgcccaggacttctatgactggctgcaggagactgatgtggacctcactggggtcaagtttgctgtgttcggccttgggaacaagannnnnnnnnnnnnnnnnnccatgggcaagtatgtggaccagcgactggagcagctcggcgcccagcgcatctttgagttgggccttggtgatgacgatgggaacttggaagaggatttcatcacatggagggagcagttctggccagccgtgtgcgagttcttcggggtggaagccactggggaggagtccagcattcgtcagtatgagctcttggtccacgaagacattgatgctgccaaggtttacaccggcgagatgggccgcctgaagnnnnnnnnnnnnnnnnnnnnnnnnnnnnnnnnnnnnnnnnnnnnnnnnnnnnnnnnnnnnnnnnnnnnnnnnnnnnnnnagggcactgagcggcacctgatgcacttggaattggacatctcagactcgaagatcaggtatgaatctggggatcatgtggctgtgtacccggccaatgactccaccctggtcaaccagatcggggagatcctaggggctgacttggatgtcgtcatgtctctaaannnnnnnnnnnnnnnnnccaacaagaagcacccgttcccctgccccaccacctaccgcacggccctcacctactacctggacatcaccaacccnnnnnnnnnnnnnnnnnnnnnnnnnnnnnnnnnnnnngcctcagagccctctgagcaggagcagctgcacaagatggcgtcatcctcaggcgagggcaaggagctgtacctgagctgggtggtggaggcccggaggcacatcttagccattctccaagactacccctcactgcggccacccatcgaccacctgtgtgagctgctacctcggctgcaggcccgctactactccatcgcctcctcctctaaggtccaccccaactcggtgcacatctgcgctgtggctgtggagtatgaggccaagtctggacgagtgaacaagggcgtggccaccagctggcttcgggccaaggagccagcaggagagaacggccgccgggccctggtgcccatgttcgtgcgcaaatctcagttccgcctccctttcaagtccgtcacacctgtcatcatggtgggtcctggcacagggatcgcccccttcatgggcttcatccaggagcgagcctggcttcgggagcaaggcaaggaggttggagagacactgctatactatggctgccggcgctcggatgaggactacctataccgcgaagagctggcccgctttcacaaggacggggccctcacccagcttaatgtggccttttccagggagcaggcccacaaggtctatgtccagcacctgctgaagagagacagagagcacctgtggaagctcatccacgagggcggggcccacatctacgtctgcggggatgctcgaaacatggccaaagacgtgcagaacaccttctacgacatcgtggccgagtttgggcccatggagcacgcccaggctgtggactatgttaagaagctgatgaccaagggtcgctactccctggacgtgtggagctaggagctgccacccgcccaccttgctccccgtaatcacttccctaactcccttctgccgacctccacctctggtggtcccttgcgtggcctcgacacagggaggccaagggaccgactcctggcctgactgacacccttctgggccgctcggctgagcccaacccactgtaccaggcaggcggcccagtcccagggcacatggcgagaggagccagccacctctggtgatgggtgccttaggccctcggcagctgtacagaggggcttttctctccagagctgaggtgcagccccaccagtgatttttgaatgagtgtaaataattttaaataaccgggcccttggaataaagttgttttctgt

SEQ ID NO: 878 - DNA, 3888 bp, Mesocricetus auratus
  misc_feature (1124)..(1139): n is a, c, g, or t
  misc_feature (2115)..(2136): n is a, c, g, or t
gaattctccataaatgtgtactgcaacacccaccaaagcaactattagtatgactaaataagaacacccacttacagcagaggttctcaacctgtaggtcacaacccttttggggttacacagaaggtttctggtatagcagatatttatattatgatttataacagtagcaaaactgcagttacaaagtagcaaagaaaattattttatggttgggggttgccacaacatgaggaaatgttttaaagggtcgcagctttaggaaggtttgagaaccactggcgtaaggtctctgccctgcctgatatactgagtattcaagacactctccccattctttcttctctctcagccgcactctatcatctgctacttaattgggtaaatctgagacgcccgcccacttgtccacacacatgatgaccatcaggctcaatcagcccaccaccagtttttgtaaagaaaatgtatgccctcatgcccatgtgtttcacacactacagatgcctgtgtttgtgttacaacgacagaggcgagtcttggcgtctatactgcagggacctcaaacgtggcaataacacctggcgatatacaaggacaggtccatgatcccaggcctaggtccccatcctttgtgtcgctgtcctgcctctaaggagcagcttcggagggtagagtgggcacctcatcgtgggatccaggactctcaggatctggtcacagatttggcaccagcagagagcagtcatgagaatttctgagaaggaagataaagattgaccaggccagctctgtggtttccagccctcctctggaactataaaagcaggggccaggcaggtgcacaccagaggctgacctcaagctgcacccacgggaaaatgctggccctactcttcctgttggcccttctcttgcctcctgaagccggagctggtgagtttggcctctgtctccccatcctctgactttttcagcaactgccccaaatccattcacttgggtaatagagaccctaaaatgaggcaaggtcctttacatgttagttagtccaggagaaatctcttaggtcaagtaagaatgaaaaatgaactcgcccttagaccatttcatcaaaatgctcnnnnnnnnnnnnnnnntcttctctggctttccattagcattggggaggacagcaaagcagagtctaaatgaacaggcagttcagaaacctgaatgagcgctgtgctctgacatgtagggtgatgatggacagggaggacgggagaggcaagatcaacgggtggaaagatcaaagaatgctcggaggggcctgagccccatgacggggggaggggggagggggaagcctggggggagacactcggggagcggccactcagcttcggcccctcttcctctgccagcacggtgtcctgcaagtctgtgactagggacgcggggttctttgttccagaggagattattggtggtgtggagtcaaagccacactcccgcccttacatggcccatttggagatcgtcactgagagaggctttactgccagctgcggggggttcctcataacgccagaatttgtgatgacggctgcacactgcaaaggaaagtaagaggcctctttctcttcgtgtgaagaagcgcacgaaccagagttacaaagcctgaggagcggccccagctctgcacatctccagaggggctcctacgtacacccagaggacaaagggacacaaagtcactcattgaaccattttatttgtacctccattttcagagggcagagctttaggcagggctccggtagggataaactactgctttcctcttgtcctgatgtccccagagctctcagtcaccagctggggtgtaactcaatgacagagtgcctgtccaccacgtgcaaagctcaatgccaatactggggtggctagttctcagtcctgtctttccctgagttcgttccttctgggaaggctgggagccctgtctcaagtccaatcagagtctctctagcggctctgctgtgggatagggaagaccctggtgtcctctgctctgaaatgagtccccatgagcccagaactttctactgcctctcttctctctcaacagannnnnnnnnnnnnnnnnnnnnnctcatgatgtgagcaaggcagaatccacacagcagaagataaaagtcaaaaaacaaatcgctcacccaaactacagcttctactccaacctgcatgacatcatgcttctaaaggtgccattgttatttttcttgaccttttttacttccccctccttaactctcctcctgcctcaggccttggaattttctcttgtccaacccacttcctcagaacccaccccagagttccatgtccttgccaccccagtggaaaggacccatgtccaagacagcatccttctctccttcccgccccccccccgcagcttcaaaggaaagctaagaagacccctgctgtggacacaatccccctgcctagtccgtctgactttcttaaacctgggaaaatgtgccgggcagctggctggggaaggactggagtgacagagccaacgtcagaaaagctgagggaggtcaaactgagaatcatggacaaaggggcctgtaaatactatcaccactacagttatgacttccaggtctgcgtgggcagccccacgaaggtcagatcagcatacaaggtgagtgctcacctgctgttcctccagcctcaggagacagtgtttgtggagggagcagaccaaacagctctccactgttgtgactgacgccagggttcttaggctcccagcactctgggaactgaaattctccctctaggtctcatttccatgtccaaaccctgactgcacccttcccatgggctccaaagagaagaagggagtgaagggagaccatctaagcactgggtcaagacctaaggggaaaaaaatccctaacttagactcacaaagagagggaactccttttactctgggactagctatggagaggggtctataggtggggacgatgattttgttcatggtctgctttttctaatccacagggagactccgggggacctcttctgtgtgctggggtggcccatggtattgtatcttatggacgtggagatgcaaagccccctgcagtcttcacccgaatctccccatacgtgccctggattaatatagtcataaaggcaagcagttgaagagccagcctgagttagggcctccaagccagagctcttctggtacccctgggggttaaaagagggtccccagcctgccccagcctgtcccagcctgcccctgagaggatctcaaagacacaccattctctggtgctctattgttccctgtaatgcacctcaataaagatgtgaccaccagctgccagagactcgctccttgctctaaactgactcagtccctcacccacagccaggtcctctctgagctgagtggagaattgtttagggctactctctggtcaagctaacaatcttgactactgatttcctggcacagggtgcaccactgcggattgctgagcgtgatctaacatacatgggtgtgtactgtaagttttcacatccagagtaattcgcactgccgttttcctgcactgtcctttcttctcctctgtccttgtcctcatctcttctctccacaaaccccatgccctagccagaacatcttttccacatcacagcaaattcccatgtgtagtcagagatggccatggatagcttgtgtccccaacacttgtcccatcgtcaccaccctctcaaaatcgcacctgcgactagaggagagcctgccctcggaagtccctggaaggtgtctgtggctgcagcagccacaacctttcatccctttctaga

SEQ ID NO: 879 - DNA, 517 bp, Mesocricetus auratus
gagctcaggaaggacactgacttaattctgctcgccttcccaccagatcctcctgccggcttttgtgttccttgggctggagggagaggactgctgtggctgctggagttgtgagaactatggcaagagatgcacagtaagtctcctctgcgcagcctcctgggcaaaggctccattcctgacgtgggcctggcttacttcctgcctcttctctccccagatgctttcttccataatggctgctctcattggcattgcgggatccggctactgcgtcatcgtggcggcactgggtttggcagaagggccaaagtgcggtgattcccacggcatgtggaactacacctttgccaacactgacggacagtatgtaattgttctttacctagcaatactttcttaaccgccacacataaaaccaagtcatctctctgtccatccacccaatattaccttacaacagctcatttagtgtgtaaggatggataggcaaccatcaacccggacaaattctaga

SEQ ID NO: 880 - DNA, 293 bp, Mesocricetus auratus
tcatgagatacctctaagctacagtcatgtgcctgaagtttctcttctgaccacaggtaccttctggatcccactacgtggtccaagtgccatgagcctaagaatattgtggagtggaatgtgacgctattttctaccctcttggcgtttggtggacttgaattcatcttgtgtcttattcaagtcataaatggagtgcttgaaggcatgtgtagctattgctgctcccaccaacaggtgagaatttgtgtgacaacgttgaggtctagccccgtagtgttcagttgccacaa

SEQ ID NO: 881 - DNA, 387 bp, Mesocricetus auratus
acctcaccaatgagccctttcacaatctctccctccctaatgacatctacacccaccgtgtagcctgtgtggagatctggccttccaaattgaaccaactcctcttttccacatcattgtttatgctccagtattttgttcctctgggttttattcttatctgctacctgaggattgttatctgcctccgaaaaagaactaagaaggtggacaggaggaaggaaaatgagagccgcctcaatgagaacaagaggataaatgtgatgttgatttccattgtagtgacctttggtgcatgttggctgcccttgaatatcttcaatgtcatctttgactggtatcatgagatgctgatgagctgccaccatgacctggtatttgtaattt

SEQ ID NO: 882 - DNA, 1972 bp, Mesocricetus auratus
  misc_feature (588)..(607): n is a, c, g, or t
tggcactcacagctggagagagaacacagaggggtacattgctgacagagaagcaacgatggacctgacttcagttctctcactggaaacctgggtcctcctggccatcagtctggtgctcctataccgacttgggacgcataaatatgacatttttaagaaacagggaattcctgggcccaaacctctgccgtttttaggaaatgtattgaattactacaagggtatatggacatttgatatcgagtgccataaaaagtatggaaaaatatgggggttgtttgaaggtcaaagacccctgtttactgtcacggacacagagatgatcaagaacgtactcgtgaaggaatgctattctatcttcacaaaccgacgggattttggcccagtggggataatgagtaaagccgtctctatatctaaggatgaggagtggaagaggattcgagccttgctgtctcccaccttcaccagtggaaaactcaaagagatgttccccatcattgaacagtacggagatattttggtgaaattcttgagaagagaggcagagaaaggcaaccctgtcaccacgaaagaagtgtttgnnnnnnnnnnnnnnnnnnnnatcacaagcacggcatttggtgtgagcgtcgattctctcaacaacccaaaggaccttttgtggaaaggcaggaagctgttaagatttgatttttttgatccattgttcttgtccgtagtactctttccgttcctcatcccaatatatgagaagttaaatgtctccatgttcccaaaggattccataagttttttcagaaaatttgtggacaaaacgaaggaaaatcgcctggattataaccaaaagcaccgagtggatttccttcagctgatgatgaactctcatgacaattccaaagactcccacaaagctctctctgacatggagatcatagcccagtcaattatctttatttttgctggctacgacaccaccagcagcacactttccttcgccctgtatttactggccactcaccctgatgtacagaagaaactgcaggaggagatcgatattgctctgcccaataaggcacgtcccagctatgataaggtgatggagatggagtacctggacatggtgctgaatgaaaccctcagattgtacccaattggtagtagacttgagagagtctgtaaacaagatgtggaaatggatggtgtgtttgttcccaaaggctccatagtgatggtaccagtttttgctcttcactatgacccacagtactggccagagcctgagaaattccgccctgaaaggttcagcaaggagaacaagggcagcattgatccttatatattcctgccctttgggaatggacccaggaactgcattggcatgagatttgctcttatgaacatgaaacttgctctcactaaagtcctacagaatttctccttacagccttgtaaagaaacacagatcccaatgaaattaagccgaaaagcaatgcttcaaccagaaaaacccattattttaaaggttgtgccacgggatgcaatcataactggagcgtgactttccctcaaggacttctcttgtgttccttgagaatgtggtgtctaagaaaattggaaccttgaacttacttcatgaataaaatgcaaatgaagatgaggcttaatcaactgactctgatgcatggttatggattcagtatacccattgagctttctcagtgttaacacagagtaccatctaatgtaaaatgaataagtcagtgacagaatgagaaattcatcttctatggtgctcatgggaccatgtccatgcacatctgattggctccatcaacttcttttgagctcttttgagagtagccatgcctctgcaatttgatcaataataattttaaaagcaaatacgaaccatcatgacaactcttattgtaaaaaatattccacaataaatgtacactaagcatgt

SEQ ID NO: 883 - DNA, 2896 bp, Mesocricetus auratus
  misc_feature (936)..(952): n is a, c, g, or t
  misc_feature (1754)..(1777): n is a, c, g, or t
tacacgtttgggaagtgagagcctggagaccatggacggcgccgcggtggggcttcgggtgctgctgggcctgggcctggtgtccctcctcactctcgaggccatgcctgctgcgtggggcttggccacaacgggcagacccagggccagagagaaacggcaggccgtggatacaacgcctgatggtgtgctggtcaagagcttgaaagtcaactgcaaagtcacctctcgcttcgcccactacatcatcaccagccaagtggtcaacaggcagcccaatgaagccagggaggtggccttcgatgtggaaatccccaagacggccttcatcagtgacttcgccatcacagcagatgggaacacattcatcggagacataaaggacaaagccagtgcatggaaacagtaccgcaaagccatttcaggggagaacgccggccttgtcaggacctcgggcagaaatatggaacagttcaccatccacatcaccgttggagcccagagcaaggccacattccaactcacctacgaggaggtgctgaagcggagacttacgcagtacgacattgtcatcaaagtcaagcccaagcagctggtgcaacatttcgagatcgatgtggacatctttgagccccaggggatcagtaagctggatgctcaggcctccttcctcagcaaggaactcgctgctcaaaccatcaaggagtctttctcagggaaaaagggccacgtgctcttccgccccacggtgagccagcagcagcagccctgccccacatgctccacatcctggctgaatggggacttcaaggtgacttacgacgtcaaccgggacaagctctgtgacctcttggtagccaacaactactttgcacacttctttgcccccaaaaacctgaccaacatgagcaagaacctggttttcgtgattgacannnnnnnnnnnnnnnnnggccagaaagtgaagcagaccaaggaggctctactcaagatcctgggggacgtgaagccaggggacagctttgatctggtcctctttgggtctcgagtgcaatcctggaagggctccctggtccccgcgactcaggccaacctgcaagcagctcaggacttcgtgcgacgcttttccctggctggagccacaaacctgaatggaggcttgctccgaggaatcgagatcttaaacaaagctcaaggaagccacccggagctcagcagccccgcctcaattctcatcatgttgacagatggagagcccacggagggggagacggaccgttcccagatcctcaagaacgtccgcaacgctatccggggcagattcccgctctacaacctcggctttggccacgacctagactttaacttcctggaggtcatgtccatggagaacagtggatgggcccagaggatttatgaggaccatgatgccacccagcagctacagggcttctacaatcaagtagccaaccccctgctgaccgacgtggagctgcagtatccccaggattcggtcttaagtctaacgcagcaccgacacaaacagtactatgatggctccgagatcgtggtggccggacgtattgctgaccacaagctgagcacttttaaggctgacgttcgggctcgtggggagaggcaagagttcaaggcaacctgcctggtggatgaggaagagatgaagaagctgctccgagagcgtgggcacatgctagagaaccacgtggagcggctgtgggcctacctcaccatcnnnnnnnnnnnnnnnnnnnnnnnnaagatggagggggaagagagggccaacctgtcatcccaggccctgaagatgtcgctggactatcagttcgtgacgccgctgacctctatgacgatcagaggcctgacggacgaggatgggctggagcccaccatcgacaagaccccagaggattctcagcccttagtgaaggtgggacccagaaggacgttcgtgctgtcggccacgcagccttctcctacagcccgcagctccgtggtctcaaagctgccgaaccaagtgacaggcgtggacaccgacccccacttcatcatctatgtgccccagaaagaggacagcctgtgcttcaacatcaatgaggaacccggggtgatcctgagcctggtgcaggaccctgacacaggcttctcggtgaatggacagctcattgggagcaagcccagcaggcctgggcagcatgaggccacatacttcgggagactcgggatctcaaatcccccatcagattttcagctggaagtgacgcctcggaacattacactgaaccccagctctggtgggcctgtgttctcctggagggaccaggccacgccgcagaaagacggggtcctggtgaccatcaacaagaaaaggaacctggtggtgtctgtggaagacggagccacctttgagattgtcctgcacaggacgtggaaggggagtgccgcccaccaggactttctgggcttctatgtgctggatagctcccggatgtcggcccggacgcgggggctgctggggcaattcttctgccccctggattttgaagtatctgacatccgcccaggctctgaccctatgaagttagatgccacgatgcgtgtgaagaatcggcagctggcagtcaccaggggcttacaaagagactacagcaaggaccccagacatggaacagaggtgtcttgctggttcatccacaacaatggagctggactgattgatggagttcacactgactacattgtcccggacatcttctgagccctccagctagtccgcacctgagactgcatctgaggagggagaggagggcatcgaattaaccccaccctcctgagcgtcctggccctttgtgatttcattaaagagaggctgtgtcca

SEQ ID NO: 884 - DNA, 3102 bp, Mesocricetus auratus
  misc_feature (1504)..(1539): n is a, c, g, or t
  misc_feature (1698)..(1733): n is a, c, g, or t
  misc_feature (1975)..(2002): n is a, c, g, or t
tacacgtttgctctcctcgacagaataaagttgctgtgaacttgtttcagtaggagagggattctccccagaccacctcctctagagcgcttggcacagctatccagcaaaatgcagcgacttgcatgcgttctcatctggctatttcttttggaagaacaagccttcgaaatccccgcaaatgagtactctgaattcgcaggatacagcaatcttgtggaactggccccagacaaattcccatttgtgcaagagaacagaagatatcagagaagccttcctgaagaatcaggggagatgacggacaatgttgatcaagtaactctttatagctacaaagtccagtccactattacttctcggatggccaccactatcatccagagcaaactggtgaacaattccccacagtcccaaaatgttgtgttcgatgttcaaatccccaaaggagcctttatctccaacttcaccatgaccgttaatggtataacatttacaagcacgattagggagaaaaccgtgggccgagctctttattcacaggcaagagcaaaaggcaagacggccggatgggtgaggagcagaactcttgatatggagaacttcaacaccgaagtaaacatcccgcctggggcaaaggtgcagtttgaacttcattaccaggaaatgaagtggaggaagttgggatcctatgagcacaagattcatctgcagccaggaaggctggccaaacacttggaggtgaacgtgtggattgttgaactgcaagggatgagatttcttcatgttcctgatacatttgaaggccatttccaaggtgttccagtcatatcaaaaggacagaagaagtcccatgtctccttcaagcccacagtagcacaacagagaaaatgccccaactgcacctatactgcagtggatggagagctggtggtgatgtatgacgtcaacagagaagagaaggttggggagcttgaggtatttaatggatattttgtgcacttctttgctcctgagaacctggacccaattcccaaaaacatcctttttgttattgatgttagtggctctatgtggggaataaagatgaaacagactgtagaggcaatgaaaaccatactggatgacctaagaaccgaagaccaattctctgtggttgatttcaaccataatgttcgaacctggagaaatgacttagtgtcagctactaaaacacaaattacagatgccaagagatacattgagaaaatccagcctagtggaggcacaaatatcaacgaggcacttctgcgagcaattttcattttgaatgaagccagtaacttgggaatgttaaaccctgactcagtctctctgatcgttttggtttctgatggagatccaacagtgggtgaactgaaactgtccaaaattcagaaaaatgtgaagcagaacatccaagataacatctccctgtttagtttggggataggatttgatgtcgactatgattttttgaagagannnnnnnnnnnnnnnnnnnnnnnnnnnnnnnnnnnntatgggaaccgtgacacatcctctcagctcaagaaattttacaaccaggtctctactccactgctcaggaatgttcaattcaactacccccaggcatcagtgacagatgtcactcaaaatagcttccacaactactttggaggttctgagatagtggtnnnnnnnnnnnnnnnnnnnnnnnnnnnnnnnnnnnntcagagcatcatcactgcgacttcgactaacacggaattggtcttggaaaccttgagccagatggatgacctggaggattttctatcaaaagacaagcatgcagaccctaatttcaccaaaaaactatgggcctatctcacgatcaaccagctgctagcagagagaagtctggctcctacagctgccatcaaaaggaaaatcacaaaaacaatcttgcagatgtctctagaccatcatattnnnnnnnnnnnnnnnnnnnnnnnnnnnnagaatgaagctggggatgagcgcatgctggctgactccccaccacaggaccattcttgctgctcaggtgcgttatattatggcaccaaggttgcctcagcttccatcccatcatgggccagtccatcccccacaccagtgatggccatgcttgcagtaggagcgaaccgacttgagtccactccacctccacatgtgattcgagtggaaaatgacccccacttcatcatttacctaccaaaaagccaaaagaatatctgtttcaatattgactcagaacctggaaaaatccttagcctggtgtctgatccagaatcaggaatcctagtcaatggccagcttattggtgccaaaaaggcagagaatggaaaactaagaacctactttggaaaattgggattttatttccaaaaagaagacatgaaaatagaaatcagcacagagaacatcaccctgatcaacggttcttctacaactagcttgttctggtctgatacagctcaccttgggaatcagagggtgcttatctccgtgaagaaaggaaaatctgtgactctcaccctaaataaggagatgttcttttctgttctgctacatcatgtgtggaagaagcatccagtcaatgtggactttctggggatctaccttcctccaacaaacaagttttcacccagtgcacatggactcttagggcagttcatgaataagccaaatatccacatcttcaatgagagaccaggaaaagatccagaaaaaccagaggcaagcatggaagtgaaaggacataagctgactgttaccagaggcttacagaaggactacaggacagacatagcgtttggaacagacgttccctgctggtttgtgcacaacagtgggaaaggattcatcgacgggcattacaaggattacctcgtacctcagctctatagctttctcaaacggccttagcggtttatggttttggaaattatatgtgtacattttcttcccttgataggttttgcagttattcctgagctctaacaattcaaaacaaatccagatattgcagtggtctaaaaggcctgctaatccacctgaagaaaataaatatttgca

SEQ ID NO: 885 - DNA, 2777 bp, Mesocricetus auratus
tacacgttatgtggtggccctaccttgtcttggccctactctctggcttggaggcctctggctttccgagaagccccctccggctgctagggaaacggagcctcccggaaggggtggtcgatggcgtcgaggtctacagcaccaagatcagctgcaaggtgacctcccgctttgcgcacaacgttgtcaccacgagggccgtcaaccgtgcagaccaggccaaagaggtttcctttgacgtggagctgcccaagacggcctttatcaccaacttcaccttgaccattgacggtgtcacctaccctgggaacatcaaggagaaggaagttgcccagaagcaatatgacaaggctgtgtctcagggcaagacggctggactggtcaaggcctctgggaggaaactggagaagttcacagtgtccgtcaatgtggccgcgggcagcaaggtcacttttgagctaacctatgaagagctgctcaagaggcataaaggaaagtacgagatgtacctcaaagtccagcccaaacaactggtcagacactttgagattgatgcgcacatcttcgaaccacagggcatcagcatgctggacgccgaggcctcgttcattactaacgacctcctgggaagcgccctcaccaagtccttctccgggaaaaaggggcatgtgtctttcaagcccagcttagaccaacagcgctcatgccccacgtgtacagactccctcctcaacggggacttcaccatcgtctatgacgtgaacagagagtctccaggcaacgtgcaggtagtcaacggctactttgtgcacttctttgcgccccaaggccttccagtggtgcccaagaacatagtctttgtgattgatatcagcggctccatggctgggcggaaaatccagcagaccagggtagcccttctcaaaatcctggacgacatgaagcaagacgactatctgaacttcattctgttcagcacgggtgtgaccacctggaaagacagcctagtgcaagccacccctgcaaaccttgaggaggccaggacatttgtgaggagcatcagcgatcaaggcatgaccaacattaatgatggactgctgaggggcatccgaatgctgacagatgcccgggagcagcacactgttccggagaggagcacctccatcatcatcatgttgacagacggggacgccaataccggtgagagcagacctgagaagatccaggagaatgtccggaaagccatcgagggcaggttccctttgtataacctgggctttggcaacaatctgaattataatttcctggagactatggccctggagaaccatggggttgcccggcgcatttatgaagattctgatgccaacttgcagctgcagggcttctacgaggaggtagctaaccctctgctgacgaacgtggaggtggagtatcccgagaacgccatcctggacctcaccaagaacagttacccccacttctacgacggctctgagactgctgtagcagggcgcttggcggacagtgacatgaacaactttaaggcagacgtgaagggccacggggccttgaatgacctgaccttcacggaggaggtagacatgaaggaaatggacgcagcgctgaaggagcagggctacatttttgggaactacattgaacggctctgggcctacctcactatcgagcagttactggagaaacgcaagaacgcccatggggaggagaaagagaacctcacagcccaggccctggagctgtccctcaagtaccattttgtgactcccctgacccccatggtggtgaccaagcctgaggacaatgaggaccagacgtccattgctgacaagcctggggaagacgccccctacgcagccacgtccacggcctacttgaccagccaccagtctcctccaaccccctactattatgtggacggggaccctcacttcatcatccaagtgccaggaaaaaacgacaccatctgcttcaacatcgacgagaaacccggcaccgtgcttcggcttatccaggacccagtcacaggcatcactgtgactggacagatcattggagataagggaagtagcccttactccaggacagggaaaacctattttggcaaactgggcatcacccacgcttggatggacttccggattgaggtgaccacagagaagatcatcctggggactgaagacgaactgagcacgttcagttggctagacacggtcacaatcacacagactgggctgtttgtagcgatcaacagaaagaagaacatggtcgtgtcctttggagatggggttaacttcgtgatcgttctacaccaggtttggaagaaacatccgcttcaccaggacttcctagggttctacgtggtggacagtcaccggatgtcagcacggacacacgggctgctggggcaattcttccgcccctttgactttgaagtgtctgacgtccgcccaggctctgaccccgcaaagccagatgccacaatggtggtgaagaaccatcagctgactgtcacaaggggctcccagagagattacaggaaggatgccagtgtcggcacaaaggtcacctgctggtttgtccacaacaatggggaagggctgattgacggtgtgcacaccgactacatcgtccccagcttgttctgagtgacgggtcaccccgctgcggaagtggaaggcctggatggtccggagcaaggccgcgggaacgggcttgtgggaagggccaggacaataaagccagcttgtaaacca

SEQ ID NO: 886 - DNA, 390 bp, Cricetinae gen. sp.
aaagttttcgaacgttgtgaattggccagaactttgaagagattgggtatggacggttaccgtggtatctctttggctaactggatgtgtttggccaagtgggaatctggttacaacactagagctactaactacaacgccggtgaccgttctactgactacggtatcttccaaattaactctagatactggtgtaacgacggtaagactccaggcgccgttaacgcctgtcacttgtcttgttctgctttgttgcaagacaacatcgctgacgccgttgcctgtgctaagagagtcgttagagacccacaaggtatcagagcttgggtcgcttggcgtaacagatgtcaaaacagagacgtcagacaatacgttcaaggttgtggtgtc

SEQ ID NO: 887 - DNA, 1371 bp, Cricetinae gen. sp.
  misc_feature (1)..(39): n is a, c, g, or t
  misc_feature (515)..(618): n is a, c, g, or t
  misc_feature (706)..(770): n is a, c, g, or t
nnnnnnnnnnnnnnnnnnnnnnnnnnnnnnnnnnnnnnnctcaaactcacagagacctgtctgcctctgcctgccgctgagtgctggtactaaggcgagcaccaccaccacccagcaacacattgttgtttttaaaggggagaaaatgaacaaagcactcagctgctactcaagtgagttttgagcagagacatctccttgcatcacttctcttataggtatcccaacacccaagtttcctgtgataactacagtcacatacgctgtgtgaagactcttgtctcagacctgtgtgtcctctgcctgttttctcctatctctgtgggtgccctgcctcagaagtgctattatttctgtttaccagatgggaaaatgaggagcaaatacttgagtgaatgtcttgacgtcttgcttcccacagcagccggctcaggatctaaatgcaagtctatccaacttgacaactcgaccagtccatccagtttgtaagctgttgttcttgggcgctagatgcnnnnnnnnnnnnnnnnnnnnnnnnnnnnnnnnnnnnnnnnnnnnnnnnnnnnnnnnnnnnnnnnnnnnnnnnnnnnnnnnnnnnnnnnnnnnnnnnnnnnnnnnatttcttttataatttaggactctggggtcagattttggtagagagaaaagaaacgaggatgatggtcctttttaaagtgttggaaannnnnnnnnnnnnnnnnnnnnnnnnnnnnnnnnnnnnnnnnnnnnnnnnnnnnnnnnnnnnnnnntacaaagaagttttaataagggacacccagttctgagcttagaggcagaaaggtagcatttgttcatacccacacatacacatgatacacatgtgcacacatgcattcacacatttccatgtcctatctttagccccaattcatgcctgtttctggtccaggacaatgccagctttagaaggagttgcctctaaactcccactcactagggaaaaaaaatagtggccgcacccacacttcccggcagccccagatatgctgcctactcacctttagaaggcttctcagcgcccaaacaattctccaaaccaaagcttcctgtctcattcttcagctttccattagcaaaatgagttaccaccagtctctgcggaggccttagcttttcatcctcactattcatggggctgaaatccaagaagtgccatcccaaggaactctgacaagttgaagccaagttctaagagaaatactttgcaggtgagtgtctctcctccctgcctggctgctggccaggacagagcagtgagatgatgggaggggccgctggagcgcccactcccacagaacatttattatcttccagacagagttcatctta

SEQ ID NO: 888 - DNA, 1118 bp, Mesocricetus auratus
  misc_feature (328)..(342): n is a, c, g, or t
  misc_feature (486)..(521): n is a, c, g, or t
cagagcttgggcacagaacacatccaaagttcccaagtgggctccttcgtctgcacctgctcacctgctctccgctcagtcacagcagcaggcagaaaaaaaaatgaagaacatttacattgtggctggattttttgtggtgctggtgcaaggcagctggcagcattcccttcaggacacggaggagaaatccagatcattcccagcttcccagacagacccactcgaggaccctgatcaaataaatgaagacaagcgccattcacagggaacattcaccagtgactacagcaaatacctggactcccgccgagcccaagattttgtnnnnnnnnnnnnnnncaccaagaggaacaggaacaacattgccaaacgccacgatgagtttgagaggcacgctgaagggacctttaccagcgatgtgagctcttacttggagggccaggctgcaaaggaattcattgcttggctggtgaaaggcagagnnnnnnnnnnnnnnnnnnnnnnnnnnnnnnnnnnnnaagaactcggccgcagacatgcggacggctccttctccgatgagatgaacacgattctcgatagtcttgccaccagggacttcatcaactggctgattcaaaccaaaatcactgacaagaaataagtgtgtcagcattcacaaccatcttcacaacttctcccgccagtcacctgggatgtagatttaagttctatacatttaagagctatatttttgaagctgcattgctttgcatgtggatgaatacatttccctttagcattgtgtagccaaaagattgtaaatgaaataaagtatttccaggatgttgataagataacaacttcacgatatgaaagtgctggattcacattttccctctcattttaaaggtcccaccctgtttatgtgtagcagcgagattattcttctgtgatataaattgtaaatcattattacagtcacgacacctgcattgtaataacagaagacatgacagcctggtagccgcagtggtgaacctggagagagagcttcttccttgagtcctttatcataaatgcactcagctttcaatgtatcggggatagatttaaataaagattccatccttctt

SEQ ID NO: 889 - DNA, 304 bp, Cricetulus sp.
cagatctggaaatggaccccaactgctcctgctccaccggcagcacctgcacctgctccagttcctgtggctgcaaagactgcaagtgcacctcctgcaagaagagctgctgctcctgctgcccagtgggctgctccaagtgtgcccagggctgcgtctgcaaaggggcatcggacaagtgcacgtgctgtgcctaatgggaggacgatgccgcctcccacgtgtaaatagtgcccggagctctaccctgtttactaagtccccttttctacgaaatatgtgaataaaaaaccaatgtgattct

SEQ ID NO: 890 - DNA, 4862 bp, Mesocricetus auratus
  misc_feature (50)..(71): n is a, c, g, or t
  misc_feature (85)..(252): n is a, c, g, or t
  misc_feature (466)..(494): n is a, c, g, or t
  misc_feature (834)..(861): n is a, c, g, or t
  misc_feature (883)..(1048): n is a, c, g, or t
  misc_feature (1348)..(1369): n is a, c, g, or t
  misc_feature (2171)..(2247): n is a, c, g, or t
  misc_feature (2406)..(2441): n is a, c, g, or t
  misc_feature (2724)..(2754): n is a, c, g, or t
  misc_feature (2857)..(2883): n is a, c, g, or t
  misc_feature (2997)..(3031): n is a, c, g, or t
  misc_feature (3475)..(3495): n is a, c, g, or t
  misc_feature (3849)..(3879): n is a, c, g, or t
  misc_feature (4059)..(4110): n is a, c, g, or t
  misc_feature (4362)..(4396): n is a, c, g, or t
  misc_feature (4557)..(4862): n is a, c, g, or t
cacgaagaacttgttatggagtttgctttcaacatgacaagattagccannnnnnnnnnnnnnnnnnnnnncctggactgcttgnnnnnnnnnnnnnnnnnnnnnnnnnnnnnnnnnnnnnnnnnnnnnnnnnnnnnnnnnnnnnnnnnnnnnnnnnnnnnnnnnnnnnnnnnnnnnnnnnnnnnnnnnnnnnnnnnnnnnnnnnnnnnnnnnnnnnnnnnnnnnnnnnnnnnnnnnnnnnnnnnnnnnnnnaaaagtcttctggacacattgtggcctgtgggctgaagatggatgtcccgacattacagcagaattaacatataatggcatgtaaacgggtgcacatggattacctggtctacaattacatggctctctactaccatctcctctttatctaacaccaaagaacagactattccatcttctatttctatgataaactgcatactgggaaatcttnnnnnnnnnnnnnnnnnnnnnnnnnnnnnacatccctactgggtgagctaactccctacacaattaaacaaatcaatcaactaagtgttatgcatgtaacatcatgccaataacacaatgaacataattttgcacctttagtctcagtgacaggaagaatatggacaaaattatacaggtatgtagaagcaaatcctcccacaatcatacctaataggtcagagtcagagttatgtcaataacagtgtcttaaacaatgataggccttaaaggacaatagacttattgatagaactatatatctaatgtctagactttgcctgtatcacttaaactattgttgtcaaaatttcacattgtaccatagannnnnnnnnnnnnnnnnnnnnnnnnnnnggctagagtcccaaagaaaagnnnnnnnnnnnnnnnnnnnnnnnnnnnnnnnnnnnnnnnnnnnnnnnnnnnnnnnnnnnnnnnnnnnnnnnnnnnnnnnnnnnnnnnnnnnnnnnnnnnnnnnnnnnnnnnnnnnnnnnnnnnnnnnnnnnnnnnnnnnnnnnnnnnnnnnnnnnnnnnnnnnnnngccttgttggcagagcacggttcagagctcaaatgcaggtatgaagtaggggaaaggatggtacagtggcatgagacttgaacaacaaactgaagttcaggactgggaggaaaggagaaagatgaacaagaaactgatgcaaaaaataggagaacaaatattagaaaacttatattatcattttgtctgttgatctttacaattggtatcatttaagaatataatcttgcaacaaaataacacaagtgcatttgtcaaaataacattttgttggtggatgatggaagacagtgttagagnnnnnnnnnnnnnnnnnnnnnncacaattcttaatatgctatgagaagcagggtttaattatgttaactttggtgtttggaggatagagaaaaatgaaagaagtaaacatataccagaaatatttttgagaaaagaaaaagataatgaatttgaaaatttgtacaaaaggagcaagaaacatcaggggataatttttgaagactattttagtgtatgtgtgtacatatatagatattgatatagctgtagatagacactaagagagagggggagagtttgcatgcttattacattccagtcagaggtcaactacatacaactacacacatagacatagagagatatatttaaaaattctttcagtgcacaattgtctgtgttggtgtatatgtgtgtgagagagagagacacagagagaaacacatacagagagagacagagtgagagagagagaaagagcatacttatttacattccagtcagagaacaactattgggaggaagttttctctttctaccatatgattaaaaaaattggtttcaaatcatcagcaagtactttttatccaatgagattccttactgcacctatttcactattttagtgttgcataggcaatatgcattgttctatacatggtgtttaaaagaaagtttattcacattttcgcgaataaaatgtcagtgaatataccacataggaagtggaggtcataaataaaagcataaataatgtaaaccagttgtagtgacagaagagtgacgaacaaaggattcatgaccatggtggggaaacccacagaaacagctgacctagggaagnnnnnnnnnnnnnnnnnnnnnnnnnnnnnnnnnnnnnnnnnnnnnnnnnnnnnnnnnnnnnnnnnnnnnnnnnnnnnggtagaaggccagggcagaattatggggcctcttatagtggaatcagtattttctgtttagtgcaaaaaatggagtaagggagcagattccctattgaggtctacactatcagcctaaatacagcagggagggcctatgtcccaccccaaatgatgtgnnnnnnnnnnnnnnnnnnnnnnnnnnnnnnnnnnnntcattggggagtggataggaagtattatggggatgggggagagatatgggaggataggagagagaggttactgggattgatatgtaaaataagatttttttcaaatttaatttaaaatatgaaacagaagaaataaaacagtactgaaattaaaaaaatactagaatgtacatgaacaaaaagagaaagataataaggaatcgaatagtggctgcacctgaacataaaaacaattatgtgaagcattagagacacgcactaccagataaaatcactagtgatnnnnnnnnnnnnnnnnnnnnnnnnnnnnnnnaagcctgagaatgtcataattaaccttaaacttgctttatgcttatttcctagcgaccatttatgaagactctatatcacaactttcaggtaaagccagattnnnnnnnnnnnnnnnnnnnnnnnnnnntttattgttttaaatattcggacatgtaaagtctctgaatcattttgttttttaatgaaattaatgtgttacagcttcctctgatataggcagtaaaaattcccaacattgtcnnnnnnnnnnnnnnnnnnnnnnnnnnnnnnnnnnnggagaaagccaggttttatgaaaggaactttgtgtctctcccacagattgaagtaatgtcttgcatatgatgagaatattgggtttcctcatttaaattccataatggcactctttcaccagtgagtccacacagaattacatgctcaaaccaaatagctgactaatgtgtaaaaagacactgcaaaaaaattgaatgaaatgtcttgtcgttcctttcctacatttgtttcttgttctccattacaacaggggcctgaacagcatgatatatttgaggaaagaacatttctgtcacaattttgccagtgtgccactttttaacagtaacatttacaaattgtactattttcttcacttctgtctgaaattgtaaggaacacaatatcacatttcatgcacaaaattttagaaaaacattggtcaaagaattgagacataagannnnnnnnnnnnnnnnnnnnnaattaagctcagaagtagccatggacatagacctggaagggtacctaggagaaagagaaggtgtgaactagtactctatttatcggtacccctgcagaggaagagcagcaaggccaagaccctggtcaacttcaccagagacctgggcaattccccccacaaccttctgcatctgatgaagaaggtgatgatgatggtgaagaagatggaaatgcaccagagggaccaccacagcaaggaggtgaccaccagaaacctcgccctcctaaacctggaaaccagcaaggcccaccccagcaggaaggccagcagcagaatcgccctcctaaacctggaaaccaggaaggcccaccnnnnnnnnnnnnnnnnnnnnnnnnnnnnnnncctaaacctggaaaccaggaaggcccaccccagcaggaaggccagcagcagaatcgccctcctaaacctggaaaccaggaaggcccaccccagcaggaaggccagcagcagaatcgccctcctaaacctggaaaccaggaaggcccaccccagcagggaagtgaggagcagtcaacttcnnnnnnnnnnnnnnnnnnnnnnnnnnnnnnnnnnnnnnnnnnnnnnnnnnnntcagatacattatcattcaaaccaacccccaaactccatagatcagcaacatcttcctaaaggcatatatacttatgaatattaaatggctcctataacttaggattctatgatttctgtgatataaactctatgtcaaatgccttaactcttattacataattagaaatctatagaaaacaaagagaatcttcaggaaatgctgcaattttacattgtgttttcattctccatgactttttaacaattcannnnnnnnnnnnnnnnnnnnnnnnnnnnnnnnnnnaatgtcatttcaatggaacaatgatgttgtaagtgtaccttcaacattctaataaaacatttagcacgggattactctttgctgtttcttctgagcatgagtgagtgaaatctgggcatgtggccacatgcaaggtgattatagacaaagtcttaaagttnnnnnnnnnnnnnnnnnnnnnnnnnnnnnnnnnnnnnnnnnnnnnnnnnnnnnnnnnnnnnnnnnnnnnnnnnnnnnnnnnnnnnnnnnnnnnnnnnnnnnnnnnnnnnnnnnnnnnnnnnnnnnnnnnnnnnnnnnnnnnnnnnnnnnnnnnnnnnnnnnnnnnnnnnnnnnnnnnnnnnnnnnnnnnnnnnnnnnnnnnnnnnnnnnnnnnnnnnnnnnnnnnnnnnnnnnnnnnnnnnnnnnnnnnnnnnnnnnnnnnnnnnnnnnnnnnnnnnnnnnnnnnnnnnnnnnnnnnnnnnnnnnn

SEQ ID NO: 891 - DNA, 282 bp, Mesocricetus auratus
gagggccaaagcctcaaggaggagatggctcgccacctgcaggagtatcaagatctactcaatgtcaagctagccctggacatcgagattgccacctataggaaattgctagaaggcgaggaaaaccgcatcaccatccctgtacaaactttctccaacctgcaaatccgagaaaccagcctggacaccaagtccgtgtcagaaggacacctcaagaggaacatcgtggtaaagacagtggagatgagggatggtgaggtcattaaggagtccaagcaggag

SEQ ID NO: 892 - DNA, 2089 bp, Mesocricetus auratus
  misc_feature (2015)..(2074): n is a, c, g, or t
gggcggactctaaaatgaatcccgatctggacaccggccacaacacatcagcacctgcccaatggggagagttgaaagatgccaacttcactggccccaaccagacctcgagcaactccacactgccccagctggacgttaccagggccatctctgtgggcctggtgctgggcgccttcatcctctttgccattgtgggcaacatcctggtcatcctgtcagtggcctgcaatcggcacctgcggacgcccaccaactacttcattgtcaacctggccattgctgacctgctgttgagtttcacagtcctgcccttctccgctaccctagaagtgcttggctactgggttctggggcgcatcttctgtgacatctgggcagcggtggacgtcctgtgctgtacggcctccatcctgagcctatgtgccatctccattgatcgctacattggggtgcgctactctctgcagtaccccactctggtcacccgcaggaaggccatcttggcactcctcagtgtgtgggttttgtccacggtcatctccatcgggcctctccttggatggaaagaaccagcgcccaacgacgacaaggaatgcggagtcaccgaagaacccttctatgccctcttttcctccctgggctccttctacatcccactcgcggtcattctggtcatgtactgccgggtctacatcgtggccaagaggaccaccaagaacctggaggctggagtcatgaaggagatgtccaactccaaggagctgaccctgaggatccactccaagaactttcatgaggacaccctcagcagtaccaaggccaagggccacaaccccaggagttccatagctgtcaaactttttaagttctccagggaaaagaaagcagccaaaaccttgggcattgtggtcggaatgttcatcttgtgttggctccccttcttcatcgctctcccacttggctccctgttctccactctcaagcccccggacgccgtgttcaaggtggtattctggctgggctacttcaacagctgcctcaaccccatcatctacccgtgctccagcaaggagttcaagcgcgccttcatgcgtatccttgggtgccagtgccgtagtggccgtcgccgccgccgccgccgtcgtctgggcgcgtgcgcttacacctatcggccgtggacgcgcggcggctcgctggagcgatcgcagtcgcggaaggactccctggacgacagcggcagctgcatgagtggcagccagaggaccctgccctcggcgtcgcccagcccgggctacctgggtcgcggagcgcagccaccactggagctgtgcgcctaccccgaatggaaatccggggctctgctcagtctgccagagcctccgggtcgccgcggtcgcctcgactctgggcccctcttcactttcaagctcttgggagagccggagagcccgggcaccgagggcgatgccagcaatgggggctgcgacgcaacgaccgacctggccaatgggcagcccggtttcaagagcaacatgcctctggcacccgggcacttttagggtcccttttctttcccccacacacaccccaggggggaggacaccattgtggggggcgggggcatgggggggagtgtcagccccgggtagacacagggtcgcaagggtacaaggggggaggggggcggggagaggggcagctgcttttctggcaggggcatgggtgccaggtacagcggagagctggctgcgcatgctgagagcctggggacccacccccaacgctggccgggacttaagtctctctcttctctctctctgtatatatataaagagtccctctatacgtatttatctgtgggtacacgtgcgtgtgtctgtgcggtgaacgtgtgggctgcatggatgtgtgttgggggcctgcccacttgcgcgtgctggggcagagcgagtgtgtgccctggcaatgtcaggtttgttgtttgtctcttgacttgtacctctcaagccccnnnnnnnnnnnnnnnnnnnnnnnnnnnnnnnnnnnnnnnnnnnnnnnnnnnnnnnnnnnnaaatcatttctcgtg

SEQ ID NO: 893 - DNA, 2854 bp, Mesocricetus auratus
  misc_feature (194)..(213): n is a, c, g, or t
  misc_feature (1602)..(1619): n is a, c, g, or t
  misc_feature (2817)..(2835): n is a, c, g, or t
gaattcccccggatcctgctgcagtgttcgcggcggtaaccttgaactttcccagcgcggtgacacattctcctcgctttccccaccgcccggcctcctgcgccccccaccccgcctttttttaaaaaaagcatttcatcacccagcaccaccccaatccaacctataccgaaccctcgagcaccccaagcccnnnnnnnnnnnnnnnnnnnntgcaaaacagaaaacaaatcccccaaaccgggcgaccagcagcctacaccggcggcggccttggagagctcggccggcgcgcgcggaccgcaagagggttaaaactgtagattggatttcaccccgggaaatctagcacgccgagtgaacttgaatctttggctatttaaggaggactgggtttgttgcgaagttgcggtgatccggcgcagagccccgtcctgattgatcgcatcgccgctgggctcagatgactgtaaaatgaatagatgaaatcctcgcttctcgaagattttcttgggcatctccgggaaagtgcgttttaaggcgaagtcatgatgtattctcccatctgtctcactcaggatgaattccacccatttattgaggcgcttcttccacacgtccgtgcaatcgcctacacttggttcaacctgcaggctcgaaaacgcaagtactttaaaaagcacgagaaacgaatgtccaaggatgaggaaagagcggtcaaagatgagctgctcagcgaaaagcccgaaatcaagcagaagtgggcatccaggctcctggccaaactgcgcaaagacatccgccaggagtaccgggaggactttgtgctcaccgtgactggcaagaagcacccgtgctgtgtcttatccaacccagaccagaagggtaagattaggaggatcgactgcctgcggcaggcagacaaagtctggcgtctggatctagtcatggtgatcctgttcaaaggcatccctttggagagtaccgatggcgagcggctcatgaagtccccacactgcacaaacccagcactttgtgttcagccacaccatatcacagtatcagttaaggagcttgacttgtttttggcatactacgtgcaggagcaagattctggacaatcaggaagtccaagccacaatgatcctgccaagaatcctccaggataccttgaggacagttttgtaaaatccggagtcttcaatgtatcagaacttgtgagggtatccagaacacccataacccagggaactggagtcaacttcccaattggagaaatacccagccagccatactatcatgacatgaattctggtgtgaacctgcagaggtcgctgtcttctccaccaagcagcaaaagacccaaaactatatccatagatgaaaatatggagccaagtcctacaggagacttttacccctctccaaattcaccagctgctggaagtcgaacatggcatgaaagagatcaagatatgtcttctccaactaccatgaagaagcccgagaagccactatttagctctacatctccacaggattcttccccaagattgagcactttcccccagcaccaccatcccggaatacctggagtcgcannnnnnnnnnnnnnnnnncgaactccacctccaccctcaccgttgccatttccaacgcaagctatccttcctccagccccatcaagctacttttctcatccaacaatcagatatcctccccatctgaatcctcaggatactctgaagaactatgtcccttcttatgacccatccagtcctcaaaccagccagcctaacagcagtggtcaagtggtagggaaagtgcctggccatttcactcctgtcttggcaccctctccccatcccagtgcagtgcgacctgtgaccctgaccatgacagacactaaacccatcactacatccactgaagcctacacagcctcaggtacatctcaagccagtcgatatgtgggactaaacccaagagacccatccttcctgcatcagcaacagctgaggatttgtgactggaccatgaatcaaaacggcaggcatttataccccagtaccagtgaggatacattgggaattacttggcaaagtcctggtacctgggctagcttggttcctttccaagtgtcaaacaggacacccatcttaccggcaaatgtccaaaattatgggttgaacataattggagagcctttccttcaagcagagacaagcaactgaggggaaagaaaacacaacaatagtataagaaaattagggggaaaacactcaaagcaaaggaaaagaagactggacgaaagggagaaaggagagagactgaagaaagaagaccataagaccagcattgcagcactcacaatcactaattccctcaaggctgaaactataatgacacgaaagggttgatgatgtctcactgatgctagtctgcagcccctgcaacgtagcctttgttacatgaagtccgctgggaaatagatgttctttctctatgacaatatattttaactgactttctagatgccttaatatttgcatgataagctagttttcttggttagtattcttgttgtttacgcatggagtcactattcctggttatctcaccaacgaaggctaggaggcggcgtcacaggtgctggggacagagccatgagccagccattttgtgagcactctgatttcttaaagttaaaaaaatatatatataatatctcagtagcctttagttatccatacagatttattaaattttggcccttaacccagccttttccagtgtgtaacccagtttgaaattttnnnnnnnnnnnnnnnnnnntgaaaaataggaaaaaaaa

SEQ ID NO: 894 - DNA, 1816 bp, Mesocricetus auratus
  misc_feature (22)..(42): n is a, c, g, or t
  misc_feature (94)..(112): n is a, c, g, or t
cctttcacagcgcggcgcggcnnnnnnnnnnnnnnnnnnnnntggtggcgggcgagggcgaccggccgagcggcggcggcatggagtagacgcnnnnnnnnnnnnnnnnnnnacgccgagaggcagcggcgagcgcggcggcggcccggagcccgcggggccgagcctgtgagcgcggagcggcggtgggccgagcggggccgcgggccgggcgggcgccgcgcggcggaggccggagcagcggagccggagcccgagtgccagccagcgcgacgcccgcctgccgggcctgtcctcgccgcggccggcctccgcgctcgcgcccgggcgcccagcgatgtactccccgtactgcctcacccaggatgagttccacccgttcatcgaggcgctgctgcctcacgtccgagccttctcctacacctggttcaacctgcaggcgcggaagcgcaagtacttcaagaagcacgagaagcggatgtcaaaggatgaggagcgcgcggtgaaggacgagctgctgggcgagaagcctgagatcaagcagaagtgggcatcccggctgctggccaagctgcgcaaagacatccggcctgagttccgagaggacttcgtgctgaccatcaccggcaagaagcccccctgctgcgtgctctccaaccccgaccagaagggcaagatccggcggattgactgcctgcgccaggctgacaaggtgtggcggctggacctggtcatggtgattttgtttaaggggatccccttggaaagtactgacggggagcggctctacaagtcgccccagtgctcgaaccccggcctgtgcgtccagccacatcacattggagtcacaatcaaagaactggacctttatctggcttactttgtccacactccggaatccggacaatcagatagttcaaaccagcaaggagatgcggacatcaaaccactgcccaatggacacttaagtttccaggactgctttgtgacttccggggtctggaatgtgacagagctggtgagagtatcacagactcctgttgcaactgcatcagggcccaacttctcgctggcagacctggaaagccccagttactacaacataaaccaagtgaccctgggacggcggtccatcacctcccctccttccaccagcaccaccaagcgccccaagtccatcgatgacagcgagatggagagcccagttgatgacgtgttctatcctgggacaggccgctccccagcagctggcagcagccagtcgagtggatggcccaatgacgtggatgcaggccctgcttctctaaagaagtcaggaaaactggacttctgcagcgccctctcctctcagggcagctccccacgcatggctttcacccaccacccgctgcctgtgcttgctggagtcagaccagggagcccccgggccacagcatccgccctgcacttcccctccacgtccatcattcagcagtccagcccgtactttacacacccgaccatccgctaccaccaccaccacgggcaggactccctgaaggagtttgtgcagtttgtgtgctctgacggctcgggtcaggccactggacagcattcacaacgacaggcacctcctctgccagccggtttgtcggcatcggaccccgggacggcaactttctgaacatcccacagcagtctcagtcctggttcctctgattaagatcaacaaagaaacaacaaaatataaaaaaaaaaaaggactgttagtaaaaatatatcaaactgtttctttgtaaaattttatgtattgaggatataaataaatatctccttc

SEQ ID NO: 895 - DNA, 5000 bp, Cricetulus sp.
  misc_feature (1792)..(1809): n is a, c, g, or t
  misc_feature (4465)..(4492): n is a, c, g, or t
gaattcggcacgagcccgaccatcacatcattgagggcggtgagggggcacaggtacacagcaccagtccggttagtgtagccatcagccacagagaggtcccggggagcaccagccagaagcaggtagcgctgctgtcgctcggtttgccgatggagggcgaccgatgtagccgaaaaggctacccgggttcaccgcctccttcacctagctgggatccaaagagctaacaccgccaagggggcgcggctagcaccatctagggaaccgggtgccgggagtcgggcacggtgacctgtccacccgactagcgggagaatagatccacggaccgaatagatccacggacctggaaagaggattggagaagcgccaccccagagcagacgtgaagctgacccggactagggaaagaaattgcctaggactccgggctcagcggcgctgcgggcttgggtgtcctctggcggcgcctggagcaggtgaaccgttcgccacccccagtgccgagccctctcgtgttttcgcctggcccgggtgctcgcagccatgggcccaggcccccgctgcgcgcccggcgatcctggctggatgctcggagccctggccttgatggtggcggctagcggccggttcgccttcgccttcaacctggacacccgattcctggtggtgaaggaggcggtgaacccgggtagccttttcggctactcggtcgccctccatcggcaaaccgagcgacagcagcgctacctgcttctggctggtgctccccgggacctctctgtggctgatggctacactaaccggactggtgctgtgtacctgtgccccctcaccgccctcaaggacgattgtgaacggatggacatctccgagaaaagtgaccccgaccatcacatcattgaggacatgtggcttggggtgactgtggccagccagggccctgcaggcagagtcctggtctgtgcccatcgctacacccaggtgctatggtctgggatggaggaccagcgtcgtatggtgggcaagtgctatgtgcgaggcaatgacttgcagctggacccgggtgacgactggcagacctaccacaatgagatgtgcaacagcaacactgactacttgcagacgggcatgtgccagctgggcaccagcggtggcttcacacagaacactgtgtacttcggggcccctggcgcctacaactggaaaggaaacagctacatgattcagcggaaggactgggatttatccgaatatagctacaagggttcagaggaccaaggaaacctctatattgggtacacggtgcaggtaggcagtgccgtcctccatcccacatacatcactgttgtggcgggtgccccacggcaccaacatatgggcgctgtcttcttgctgagccaagagtcaggtggagacctgaagaggaagcaggtgctggagggcacgcaggtgggcgcttattttggcagcgccattgctctggcagacctgaacaatgatggatggcaggacctcctggtgggtgcaccctactactttgaacggaaagaggaggtagggggtgccgtctatgtcttcatgaaccaggcgggcacgtccttcccagatcaaccttccctcctgcttcatggccccagtcgctcagcctttggcatctctatagccagcatcggtgacatcaaccaggatggattccaggacatcgctgtgggagctccatttgagggcttgggcaaggtgtacatctaccacagcagctccgggggactcctcaggcagccccagnnnnnnnnnnnnnnnnnnaaactaggactgcctggcttgtccacctttggctactctctgagtggaaagatggatgtagatgacaactcctatccagacctgctagtaggaagcctgtcagaccacattgtgctgctgcgggcccgacccgtcatcaatattctccaaaggaccttggtggccaggccagctgtgttggacccctcgctttgtacacctacctcctgtgttcaggtggagctgtgctttgcttacaaccagagtgctgggaaccccagctacaggcggaacatcaccctggcttacaccctggaggccgaccgtgaccgccgcccacccaggctccgatttgcccgcagccagtcagctgtcttccatggtttcttatccatgccagagacgcattgccagactctagaattactgctgatggacaatgtccgtgataaactccgtcccatcgttattgccatgaactactccttacctttgcgcatgcccgatcgcctcaagctggggatgcggtctctggatgcctacccagttctcaaccaggcacaggctctagagaaccacactgaggtccacttccagaaagagtgcgggccagacaacaagtgcgacagcaacctgcagatgcgagcagccttcgtgtctgagcagctgcagcctctaagcaggctccagtacagcagagacactaagaagctgttcttgagcatcaatgtgaccaacacgccgagccgcgagcgcgctggggaagatgcccatgaggcactgctcaccttggaggtgccacctgctctgctcctgtcctcagtgcgcccatctgggacctgccaagctaatgagaccatcctgtgcgagctaggaaaccccttcaaacggaaccagaggatggagctgctcattgcctttgaggtcattggagtgactctgcacacaagggaccttaaggcacagctacagctatccacgtcaagtcaccaggacaacttgcagcccatgaccctgattttgcaggtggactacacgctccaggcctcactcagcttgatgacacatcggctgcagagcttctttggcgggacagtgatgggtgaggctggcatgaaaactgtggaggatgtgggaagtcccctgaaatatgaattccaggtgagcccagtgggagatgggctggcggccttgggcacactggtcctaggtctggagtggccctatgaagttaccaatggcaagtggctgctgtaccccacggaaatcatcatccatagcaatgagtcctggccctgccagccacctggaaaccttgtcaaccctctcaaccttatcctctctgaccctggagacaagccacattctccacagcgcaggcggagacaactggatcccgggggagaccagggctccccacctgtcacgctagctgctgccaaaaaagccaaatctgagactgtgttgacctgtgccagtggccgcgcccgctgtgtgtggctggagtgccccattcccgacacctcaaatgtcaccaatgtgaccgtgaaggcacgggtgtggaacagcaccttcattgaggactacagagactttgacagagtcagggtagatggctgggccactttgttcctgcgaaccagcatccctaccatcaacatggagaacaagaccacgtggttctcagtggacattgactcagagctggtggaggagctgcccgctgagattgagctgtggttggtgcttgtggccgtgagtgccgggctgctgctgctggggctcatcatcatcctgctgtggaagtgcggcttcttcaagcgagcccgcactcgtgccctgtatgaagctaagaggcagaaggctgagatgaagagccagccgtcagagacagaaaggctgaccgacgactactgaggggggccaccccccctgccccggcccacccggtgtgacttctttaagccgacccgctactaccggatcatgcccaagtaccatgcagtgcgtatccgggaggaggagcgctacccgcctccgggaagcaccctacccaccaagaagcactgggtcaccagctggcagattcgggaccgatactactgactccctccctgacatccctcccagcgctccctcctttcctatttatcataaattatgactctgacagtccaagggggccacatacttggctggcaccagcaggctcaggcatgtgcccctcttcagtgcaggcatgttttctggggccctagactcttcttcaagaccttgcagtgtggagcacagcacggccctgcacactggacacacacacagggcctgtgaagataccatggaggatgccatgtccaagcctctatctgtgccaaaaccaagccaaagcgcctctactgggagccacgaggaaaaggtccctgatgcggtgacctctctcttccacaccgatcccccatgagccattgtgcctggacggactttattgtccagaataaaactactgacgacaaggagacaatcagctgcaagtcctggcacccactggagagtagggccacaccagaggggatgttgttgtgacctgtatgctcagacccaaaagcaaagaactaaaaagcaagtccccagaatgagctttatgaatggatctccaaaaccttggctataggtggannnnnnnnnnnnnnnnnnnnnnnnnnnnaaagagaaaccatggacagcctggacagactgtgctggggctgacctggagcatggtggcatccttcagagagcagggtatcaatcctggcccagcagacactgggaggatgcagaggacatccttctgacccgtcctggcctcctcatcctgggcaaggcctggaagaccccacaagaccacgtgggggtgtaatacttgaatgtaaggcaggggagagcccaacccctgccccagctggccagacttactctgctcttttgaccacagagatggtattctgagctacctgtggctttctgagaaacctctccatgcctcacctgctccgctaggaactgcatccccattccagcagtggaggctgattcccgggtcctctccccgtccctacccacaggcaggcccactccccagctctgccccttcacggtactatagcagcttcctaccctgtgccttctttgtgtatgggcttctcactaaaataaataaacggttcccagtt

SEQ ID NO: 896 - DNA, 808 bp, Cricetulus longicaudatus
  misc_feature (67)..(67): n is a, c, g, or t
  misc_feature (210)..(211): n is a, c, g, or t
  misc_feature (510)..(532): n is a, c, g, or t
acaggaattctggcgtgcagtgggcgactcagaaacgcccaaaggtgctcccccgagacaagcggtnggactaccatggaaatgccaggacctcagcctctgggaagcgttaggaggttaaaagagatgagatcccttctaaagggctggagaagatgtcagtccaggtaggactaatggaaactttatcgcggttccaggggcctcggnncgactgagctgggaggggccgggaagctgggagtctggatggaggacgaagttggaggtgatgggaggtgggtgggcagaccgcagctcctgggcagacaagttcaggaaggacagccgttggggccgttggatactgggagctggcgctccgccctcttccctctcatccccccacccgcgcctcccaccaccgtcggcggcccctgcgcgtgcgcgcgcgcagacaccggttgccaaacattgcatcatccccgccccccgtcatccctccctcgccgcactctccttcgcccgccnnnnnnnnnnnnnnnnnnnnnnngcgcatgactcactcacctcctccgcggagcctcgtgacccaaagccacttccgggtccaagacaacgtagctctccagccagagggcggggcggaggcgggggccgagggggctcctgagtggcggatgtaggggtggggcggagtcagtgccagcgtgccgctttctgattggcaggctcctgggtcccgccccccaaaagaggggacgggcccgcataaaatatcttctctcggcgctgcagaggtcagtagcctgagtctcacacttcggtc

SEQ ID NO: 897 - DNA, 351 bp, Mesocricetus auratus
  misc_feature (330)..(349): n is a, c, g, or t
tcgaggcttggctgcgatgtggttgggtgtggccgcccccgcccctggctttcccagtttccacttggcttgaacgtactactgcttcagattgcaggaggagatgctccagagagaggaagcggagagcaccctgcagtccttcagacaggtttgtagccagcagcagccccacccacccaaaccactagcagttctaaaagttacttcgcccaggatttaaaaggtgcaaaacttcaagtcttcctgtaaagccccctggtggcagaaagtccacagatggaaaaactccactatttggatcaatccttgcaacatgaagtttttcgnnnnnnnnnnnnnnnnnnnngg

SEQ ID NO: 898 - DNA, 701 bp, Mesocricetus auratus
  misc_feature (34)..(79): n is a, c, g, or t
gatctgactgccttcttctggctttcatggtcannnnnnnnnnnnnnnnnnnnnnnnnnnnnnnnnnnnnnnnnnnnnnagtgcacttaaatacgtgcaggcaaaatagccacataaaatagaatgaaaaataattagtataaatagataagataaagaatagactttagtaccgccacatcatcttttctctctttaaaacaggatgttgacaatgcctctctggcacgcctcgaccttgaacgtaaagtggaatccttgcaagaagagattgcctttttgaagaaactgcatgatgaagtaagtgatgtcattactttagtaagcgaacaaggctaagctgcacccatattgtccacatctgacccctctctgtctgctttttcctcaggagatccaggagctacaggcccagattcaggagcaacatgtccagattgacgtggatgtttctaagcccgacctcactgctgccctgcgcgatgtccgccagcagtatgaaagtgtggctgccaagaacctccaggaggcggaggaatggtacaagtccaaggtatgaatgagcccaagggaatgataggatagcctcactctcaaacacctacctcaattcatcaataccccccagctctcctcagtagcagacttttgttgttacagtgtccttgtcactctcgatgcttcctgtagtatggcagaca

SEQ ID NO: 899 - DNA, 250 bp, Mesocricetus auratus
gatcactaagagagtgaaaagtcttggacatgagcaatctccctttctgatttcttcctgacagtttgccgacctctctgaagctgccaaccggaacaatgatgccctgcgccaggcaaagcaggagtcaaatgagtaccggagacaggtgcagtcactcacctgcgaagtggatgcacttaaaggaactgtgagtaccacccagcagcaaaggcagtgaatggtgagctcaggcgctctggtgaccagg

SEQ ID NO: 900 - DNA, 846 bp, Mesocricetus auratus
catctcaacaaaacagacatgggactcagcgcctaatgttctctgtttgaagctagtaggcacctgctattaagagaactagtgcacatggtttgtaaatgattctggggacaactggggttggcaaatcacatcagaagcccttctcccttcccacagaatgagtctctggaacgccagatgcgtgagatggaagagaattttgcccttgaagctgctaactaccaggacactattggccgcctgcaggatgagattcagaacatgaaggaagagatggctcgtcaccttcgtgaataccaagacctgctcaatgtcaagatggctcttgacattgagattgccacctacaggaagctactggaaggcgaggagagcaggtaggaaaggcagacttgtgcatgggaattaagtcatcaacagtctcttcaggtgcatctcatttaaccttgagactgtttccacaaggtatctgccctttccatagatgggaaacttaaggttgaaaaagaataactgtctgtggtcagagctaattaacagcagagctggtgttgaacccactaccatgccaaagtcaatactttcctctttgtaattcctctgattcatgcccctgtgaagaaaaatgcttgcagtattcaaaatgtactaatgagaccaactgtgggtagatgtttctgaatcagatctctaataatcacagatttcctagtggatgaaaattcaagtgtgtggacttgtttcttcttgtagaagtgcttcattaaaaaaatgtttctttgcttttttataggatttctctgcctcttcccaacttttcttccctgaacctgagaggtaagc

SEQ ID NO: 901 - DNA, 402 bp, Mesocricetus auratus
aagttaagtgtggattcagattgcttcttgctaatgatgtatacagtgaactactatctcagcctgagtgaagggggccttaggtactgtgtcttcaaacagatggtgctttgaaagattatgtatgagtaacatttaaacatctgcaaatataaactcataatgctttggacaaaatgattgcatttaaaaatttttatttttacttgcttttttaactcagaaactaatctggagtcactccctctggttgacacccactcaaaaagaacactcctgattaagacagtggaaaccagggatggacaggttggtatcttttagacaaaatatgtaaagggtaaaagaaaggataatgaataaatatagagccatttcaaatatgcctcggtcccctttaaa

SEQ ID NO: 902 - DNA, 640 bp, Mesocricetus auratus
ctgcaggagaaggccaccttgcctatgcctctccctataacccttgctgtgaagagtcaacctgcttgataaattatatctatttacaggtgtgtctccttacctgatttgacttatttcctttttgagcaggtgatcaatgaaacctctcagcatcatgatgaccttgaataaaaattgcacatactctgtgcaacaacgcagtaccagcaagaagaaaaaaagaaattcgtatcttaaggaaacagctttcaagtgcctttactgcagtttttcaggagcgcaagatagatttgggatagaaataagctctagtttctaacaactgacaccctaaaagatttagaaaaggtttacaacacaatctagtttacgaagaaatcttgtgctagaatacttttcaaagtatttttgaataccattaaaactgctttttcccccagtaattacctgaccaacttgttactgcttcaataaatcttcagaaatattacttggatgtgttattttataatatctaaacaaatctctttaattctattggctaatttactgagatcatacttgggttttaagttataggttcaatttgtttatgcttgcaatacagtttttaagttagccttttaaaagagagatc

SEQ ID NO: 903 - DNA, 1574 bp, Mesocricetus auratus
  misc_feature (228)..(244): n is a, c, g, or t
cgtgcccgtgtcgacgtggagcgcgacaacttgatcgacgacctccagaggctcaaggccaagctacaggaggaaatccaactgagagaagaagcagagaacaacctggctgccttccgagcggacgtagatgcagccactctggctcgcatcgacctagagcgcagaatcgaatcgctcaacgaggaaatcgcattcctgaagaaagtgcacgaagaggagatccgnnnnnnnnnnnnnnnnnttcaggaacagcaggtccaggtggagatggacatgtccaagccagacctcacagcggccctcagggacatccgggctcagtacgagaccattgcggctaagaacatctctgaagctgaggagtggtacaagtccaaggtttcagacttgacccaggcagccaataagaacaatgatgccctgcgccaggccaagcaggagatgatggagtaccgacaccagatccagtcctacacctgcgagattgatgccctcaagggcaccaatgactccctgatgaggcagatgagagagctggaggatcgctttgccagcgaggccagtggctatcaggataacattgcacgcctggaggaggagatccggcacctgaaggatgagatggcccgccacctgcgggagtaccaagacctgctcaatgtgaagatggccttggatgtggagattgccacctaccgcaagctgctggagggcgaggagagccggatcaaccttcccatccagaccttctctgctctcaacttccgagaaaccagccctgaacaaaggggttctgaagtccacaccaaaaagacggtgatgatcaagaccatcgagacccgggatggagaggtcgtcagcgaggccacacagcaacaacacgaggtgctctaagccagacactgtcctggtccccgtggtcactgcctcctgaagccagcctcttccactctcggatgtcacacccagccactttccttcactcacagaatctgacccttcctcaccgatcacccctttgtggtcttcatgctgcccaggaaacaccccagcacctctgcagaccttaccatgagtcctggctgtcggcagtcgcaagcctggctcttcagatagaacctagttcaagtcatggccctttccctcccacctttgtaacctcaggctctacgctttggctttggagatggtaccagagaaggtgttgggatctgtagggtcaggacagagctttatagacaccctcacattcgacccccagcctgggtcagagacagagtgaagcctctcagctgaggtgggggaggggctgaaaaaatgtccttgcgtcccctctctttcccatcccagcccaggatgggttagaaaagctggggctgtaagagggaacctgaaggtgctggatgtgggagcaggagattcagaaggagagcgggtgggtgagaagctggagggaaagaagagagaggcagagagtgggcccaggctggtgggagggccccacctctcacgcctgcccctcccactgcaggggccctggacagaaacaataaagagccaagcacaaacct

SEQ ID NO: 904 - DNA, 280 bp, Mesocricetus auratus
ttatggcaccgatgataactcaaagtgtgatatgggaagaagggttattgtaaaaagagctttctaaaatagtattttccttgtattaaatggaacttgtcttgttttttttcccccagtgaagctttgccctttttcctgcttttgattgacctttctagagcgagtgcactagcaaagtttgccctaagttcaaactctcaggtgagtcttctttaaaagcctgtagtgtgacattattcctctatatctgtttgcattcttaaaatgagttaatgag

SEQ ID NO: 905 - DNA, 166 bp, Mesocricetus auratus
tgtttggtttgtgcttcaggatgaagtaagggaaaatatagctcgcggaatggcaattctgggccccacattcacccttgatgctcttgtggaatgtcttgtaattggagttggcaccatgtcaggtttgtaaacaatttctattacaactaaggaggtcattaaa

SEQ ID NO: 906 - DNA, 437 bp, Cricetulus sp.
gtatgtcattgctctctatccaggggtgcgtcagcttgaaatcatgtgctgctttggctgcatgtctgtgcttgccaactacttcgtgttcatgacatttttcccagcgtgtgtgtccctggtccttgaggtaagaatggttttcctggtggcattagttaagagtatttctccttctgtcacttcaactaaatcagctgtgtatctcctaatgcattgctgacttactttgtagctttctcgggaaagtcgagagggtcgtccaatttggcagcttagccattttgcccgagttttggaagaagaagagaataaaccaaaccctgtaacccaaagggtcaagatgattatggtaatgacatttttcttgtccagtatttgtaatttcaatgtttcttatgctttgggtatttggagactttctgtgtttttagttt

SEQ ID NO: 907 - DNA, 970 bp, Cricetulus sp.
  misc_feature (863)..(877): n is a, c, g, or t
gtttgaatggtgatgggaacactgcttttattagccacataacaaactgatcatgataaggtgaggccaaggaagatagtgtctggtgatgcacttgagaggtgagaaggcagagggtgcacaattaattgaaaatttgtttcttcagtctttaggtttggttcttgttcatgctcacagtcgatggatagctgatccttcccctcagaatagcacaacagaacattctaaagtctccttgggactggatgaagatgtgtccaagagaattgaaccaagtgtttctctctggcagttttatctctccaagtaagttgactgaaccccacagtacgctgcactcttacatggttgcgctgtgacatttctatttctgatctggcctgttaattgttaatctgtttactctcacctaggatgatcagcatggacattgaacaagtggttaccctgagcttagcttttctgttggctgtcaagtacattttctttgaacaagcagagacagagtccacactgtctttaaaaaatcctatcacgtctcctgtcgtgaccccaaagaaagctccagacaactgttgtagacgggagcctctgcttgtgagaaggagcgagaagctttcatcggttgaggaggagcctggggtgagccaagatagaaaaggtactttgctgttctcttggtttcagttatcctgtctgagggtgcaccctgaagctgagttcgtttcaaggtgatgttgtctttttgcctctcacacagttgaggttataaaaccattagtggtggaaactgagagtgcaagcagagctacatttgtgcttggcgcctctgggaccagccctccagtggcagcgaggannnnnnnnnnnnnnnttgaactccccagtgagcctcggcctaatgaagaatgtctgcagatactggagagtgccgaggtgagggcgagggtgtgcactcacacttggg

SEQ ID NO: 908 - DNA, 416 bp, Mesocricetus auratus
atcacctaggagctgtgttgtttttgacttgtgaattggagttgttgactctcctgtcatctccttccctctttctcatttcttcagaaaggtgcaaagttccttagcgatgcagagatcatccagttggtcaatgccaagcacatcccagcctacaaattggaaaccttaatggaaactcatgaacgtggtgtatctattcgccggcagctcctctccacaaagcttccagagccttcttctctgcagtacctgccttacagagattataattattccctggtatgttatttgattaattaaggaggacttgctttgtagcttgaccctccactgctactttttaaatgtttttcatgtttttaaagtcatcgctgtaagagtccagcaggttaaagtttttgtttgttttccag

SEQ ID NO: 909 - DNA, 394 bp, Cricetulus sp.
ggctgcagggcaataggtgtaagttggactttgtctactttcaagtataagacaatctggacagggtaaggagatgaagatagatttggagacaatcaaaagaggctgaagtgttttctggattaatatgttcccattcttctgcttagcttggtggaggtgccagcagccgggtccttgcagatgggatgacccggggcccagtggtgcgtcttcctcgtgcttgtgattctgcagaagtgaaggcctggcttgaaacacccgaagggtttgcggtgataaaggacgccttcgatagcactagcaggtgtggaaattatgcttgttttctgtcatagctaaagctattgttgatagagtgcctcttataataactaatgtagcactgtcctgt

SEQ ID NO: 910 - DNA, 574 bp, Mesocricetus auratus
  misc_feature (2)..(17): n is a, c, g, or t
  misc_feature (46)..(64): n is a, c, g, or t
  misc_feature (466)..(530): n is a, c, g, or t
annnnnnnnnnnnnnnngagctagttccaggacaacctccaaagcnnnnnnnnnnnnnnnnnnngaaaaaccaaaaaatgaaatttctcatcttggattaaaataagaaccgtgtgtttacagatttgcacgtctacagaagcttcatgtgaccatggcagggcgcaacctgtacatccgtttccagtccaagacaggggatgccatggggatgaacatgatttccaaggtaagtgtagatctactgtatctgaaaggatggacacacccagaactcattgcttggtgcaggttggccttgaactcatggtgatgcttgtgcctctgctttcttgagtgctgggattacaactgtgcactactgtacccagccatattttttgttgatacactgtctatatattacatgcttaatggattaattgcttttacatgtttattaagccaggtgttggtgcgcacgcgnnnnnnnnnnnnnnnnnnnnnnnnnnnnnnnnnnnnnnnnnnnnnnnnnnnnnnnnnnnnnnnnnccagagtcgagtgccaggataggctccaaagcttcacagagaaa

SEQ ID NO: 911 - DNA, 270 bp, Cricetulus sp.
atccatcacacattttgtttgttttacttcttactagggcactgagaaagcacttctgaagcttcaggagttctttcctgaaatgcagattctggcagttagtggtaactactgcactgacaagaaacctgccgccataaactggatcgagggaagaggaaagacagttgtgtgtgaagctgttattccagccaaggtggtgagagaagtaagtggtggatgaatgtctatcctactttaaaggcttagtatctctaattgggctgggac

SEQ ID NO: 912 - DNA, 430 bp, Cricetulus sp.
  misc_feature (310)..(324): n is a, c, g, or t
atgctttccattaaaatggttgctttctttttgatgcccatctacatgtggcatttttggggcagttaaatgggggtcacatctacacccttgcttcctagaggtaaatgtgagtgtgtcttgcttgattcccctgggggagtatgtaaaatgtgcacactgtgctctaggtattaaagacaactacggaagctatgattgacgtaaacattaacaagaatcttgtgggttctgccatggctgggagcataggaggctacaatgcccatgcagcaaacatcgtcactgctatctacattgcatgtggccnnnnnnnnnnnnnnnttcctgttgtgtggtatttggattgtgttctgacaaataaagcttgcttagagtcagaaggcagagctagctactagctaaccgtagaggtttggaggattgtttt

SEQ ID NO: 913 - DNA, 369 bp, Mesocricetus auratus
tatttgactcctgctgattttattgttaccactttgctttctgctctgttggaagtgaaagtgaaagaactgtactgtatttttccttttctacttccaggatgcagcacagaatgtggggagttcaaactgtattactttaatggaagcaagtggtcccacgaatgaagacttgtatatcagctgcaccatgccatctatagagataggaactgtgggtggtgggaccaacctcctaccacagcaggcctgtctgcaggtatgtgtcttacacacaacaaaatggcctcaggcttcattgttctggtttattttctctttcttactgactaaaacacacttgggaagggagggcttatttcaactttt

SEQ ID NO: 914 - DNA, 144 bp, Mesocricetus auratus
tacatttttcaggacggtatgctctggtagttgcaggagatattgctatatatgccacaggaaatgccagacctacaggtggagttggagcagtggctctgctgattgggccaaatgcgcctttaatttttgaccgaggtgagt

SEQ ID NO: 915 - DNA, 183 bp, Mesocricetus auratus
tggttgtaacaggacttcgtgggacacacatgcagcatgcctatgacttttacaagcctgacatgctctctgaataccctatagtagatgggaaactctccatccagtgctacctcagtgcattggaccgctgctattccgtctaccgcaagaagatccgtgcccagtggcagaaaggtgggc

SEQ ID NO: 916 - DNA, 184 bp, Mesocricetus auratus
tcttctcttcagagggaaatgataacgattttaccctgaatgattttggcttcatgatctcccactcaccatactgtaagctggtgcagaagtctctagctcggatgtttctgaatgactttctcaatgatcagaacagagataaaaacagcatctacagtggcctggaggcctttgggtaaga

SEQ ID NO: 917 - DNA, 189 bp, Mesocricetus auratus
atactttttcagggatgttaagttagaagatacttactttgacagagatgtggaaaaggcatttatgaaggctagttctgagctctttaaccagaaaacaaaggcatctttgcttgtatcaaatcagaatggaaatatgtacacgtcttctgtatacggttcccttgcttctgttctggcacagtaagt

SEQ ID NO: 918 - DNA, 125 bp, Mesocricetus auratus
tcccttacacaggtactcgcctcagcagttggcagggaaaaggatcggagtgttctcttatgggtctggcttggctgccactctgtactcccttaaagtcacacaagatgccacaccaggtaagt

SEQ ID NO: 919 - DNA, 144 bp, Mesocricetus auratus
ttgctgttttaggatctgctcttgacaaagtgacagcaagtttatgtgatcttaaatcaaggcttgactcaagaacatgtgtggcgccagatgtctttgctgaaaacatgaagctcagggaggacacacatcacttaggtaaaa

SEQ ID NO: 920 - DNA, 182 bp, Mesocricetus auratus
ctttcccttcagccaactacattccccagtgttcaatagattcactctttgaaggaacatggtacctagttagagtggatgaaaagcacagaagaacttatgctcggcgcccctccactaatgaccacaatttgggtgatggagtgggacttgtgcattcaaacacagcaacagaggtcagt

SEQ ID NO: 921 - DNA, 1733 bp, Mesocricetus auratus
  misc_feature (328)..(345): n is a, c, g, or t
  misc_feature (474)..(493): n is a, c, g, or t
ttttcgttttagcatattccaagccctgctaagaaagtgccaagactccctgctaccgcagcagaatcggaatcagcagttattagtaacggtgaacactaagagctttgtggggtgtaaagcttcacagtggcttgaggctggggtggggtatggaaacagttggaggattgtatgtctggggacaattttaaagagtacatgttgcttaaatgtaatgtaactgaatgtaactgacacggagcctagaaaactattatgttcttggaaaagtctttgctgaacttgctaacacgcttcctgttgtgatctggccaatggttaatgnnnnnnnnnnnnnnnnnngggctctgtaaaactttatacctctctggacgcctatatgcatgcagtttagtttccaaacatggcatgaaccgagtgcttctgccaacaataagcggaggtactagtgtccaattttaaaaattgggnnnnnnnnnnnnnnnnnnnngtgtaagaattttgtactttaacaaatgaaggagtgcttgtagcttttgaaaaacttttctatgttggggattgtggaatttaaatgtcacacacaaatcctgcttgaaaatggcaaggcaaatatctttttcgaagacttgtaaatcctgaagagagaggtacggttctaggatcaaccatcggtgtgagaaaggttagccgtgaccagagagatgatcagagagatgctggctctgagcaggcctctgccacagcaaatggttcacgtggcgctgtaagcgcagctgggaactggtttcagccagttcaagtggctagtctctgcagcactcagacgctggtgtgagggaacttgttgccatcctggcaccctccttgcaaggctaaaatgtaatgtaggaaggatggggcagtgcattattaggtcacagtgttacaaacccagttcataggctggcagcttaaatccaccagacacctttttctttgtggtatgtgtatttttgtgttttgtttgtttttgtatctgttcaatgaaaataaatatatataacccacattttcacagagtgaaaatttcacatagtctgacaagccaaaaggaatattcatttcaagatctagaagtagaattcataacattttcccccttgactttcacttttaaaacaacaagatctaccacatgagatgagtaagaaaattcactaggagttctctgggtggttttggtgctgaacaatgacatgaccctcacagactgtaaaatagagatagttggaactaatgtacagaactaaatttttttaactttatttgctgttccattctgtgaagtttcagttatctaaactaaacacataaatgtgtaaaagtttcagattgcaaggtaatatgtaatgtagcatttgtaagatattcttgtcaatattaaccagtagaattttgatttgtacagttttaattggttaaaatggtttcattttaacatccactgctatagatgaataatgtaagttcagatttaaagaatggtggggaaatggtgcatgtaattcttttgcaagtattgagagttctgtatgttttgaaaagagtaatgttctggtgccaagaagtggattttctcagagtccattgccagcagtgggcaagcctggcgatcctggcacggagcgttaaccatacaccttactaatagcaaggtggataacttttaaataaagttttagacaaat

SEQ ID NO: 922 - DNA, 124 bp, Cricetulus griseus
  misc_feature (94)..(108): n is a, c, g, or t
ctttcttcttcccaggaacaccatggacgccctgccagcctgcctgctccgggatgtggcccaggaggccctgggtgcggctgtcattggcatnnnnnnnnnnnnnnntgtaagttggcttgaa

SEQ ID NO: 923 - DNA, 120 bp, Cricetulus griseus
caccaactttcccagttccctgacatcgtggaattctgtgaagtgatggccaatgcaggcaagacagtgatcgtggcagcattagacggaactttccagagaaaggtaaggtgtctcacc

SEQ ID NO: 924 - DNA, 150 bp, Cricetulus griseus
cccctgtatatataggctttcggcagcatcttgaacctggtgcccctggctgagagtgtggtgaagctgactgccgtgtgtatggagtgcttccgagaagccgcctacaccaagaggctgggcctggagaaggaggtaccttcttgtgct

SEQ ID NO: 925 - DNA, 695 bp, Cricetulus griseus
tggccctgtccacaggtggaggtgattggtggagcagacaagtaccactcggtgtgccgcgtgtgttactttaagaagtcctcggtacagcctgctgggccagacaacaaagagaactgcccggtgctgggacagcctggagaggcctcagctgtcaggaagctcttcgcccctcagcaagtcctacagcacaactccaccaactgagaggacctggggcctgccagctcctaccccaggttggattctcagagagcagaggacgggctgggactgccgtgcctgatggacaatgtgccctggagaggctcacccgcttctcacagccttttttagttcccttcttggttgctgagatgctttagcccagactagagccagcgcctgcctggtggttagggtttgacatccagccagaggtaggacaaagccacagggtgttgtgacacagaggtgctggcttcttccttcttggtggcttccagtctcaagggccccgcccccgagcaaggcttcacaaccctcactttgtgctgaagcttgacccacaatggcccctagcggtgtctttacaaagtggtgctgttcttgccctactcagagccccaagactcaggactcttggtgagagcctgtgcttcttgtgctatagtgtaaaatgaataattaataatattaaagtttctacttgagag

SEQ ID NO: 926 - DNA, 429 bp, Cricetulus griseus
cagtctatatccttccatcattcaggaatttaacatttgttttacaacagtacaacgagttgctttagaggtgcagaattcaactacagaggatgaggaacaggaacagatccctgagttgccagatccaaacttagatatgggcattttgcccagagagatccggaaattggtagagcggagaaaacaagtcaaacagctcatgaaacaacaagatttaaatccggaccttgttcttcagtatgacatccgacagaaggctttgaagctcacagcaaacagtatgtacggttgcctgggattttcctacagcagattttatgccaaaccactggctgccttggtgacctacaaaggaagggagattctgatgcatacaaaagagatggtacagaagatgaatcttgaagttatttatggagatacaga

SEQ ID NO: 927 - DNA, 1380 bp, Cricetulus griseus
tgaactgtatttcaaatgtcctgggaggaacatgacatagatttgatagctaaaagttcaaaatattgcatattcttttaataccacttttacaccggaatgatccatttatctactggaaatagtcctctttatttctgttctattttattattttttaaataaaagagataggccgatatacctgagaaactatgaaatatactaaagaaagctcctgcacaggggttctcgtcaaggaagggaaatttattgacgaggcagggtctgcattgtctaattggctattagatgcaatgcatggaatgtgtcctttaagtttgccacgagcagaaggccaagtgcagatctcatacaccagctctatatattgacgcttgggtgactgtgtagagaagcgacccttacaagtaagtatctgatgatggcggggatgtgagttcatcaactcgacctttgtgagaggaaacaagactgcatgcacatttgtttaacatttgtctagaaatacaacctgtttcgcaattgctcctgcaataatccatgcatgagtcaagctgggccgggagctggttaacctcttggtcaagctgactgactgggtgggactatgcctggcgtaggttgagcacaccagtgtagtccactgtcctcagaaagcccaggtgcagtcaagcagcggttccaggagcctgctcccatctccccaggcccgctaaactcggaatcgcttcttcccaattctacgactgggcggactttgcgaaggaaagcggaggtagagacgtgggaagtgggcttttcccaggaggggtccgctactcgggatgcccgagcctgatcggggggccagggcctcggaaatctgtggggaccaagtggacagcctaggtccctcccggagcccccgaaccggtgttgtcggcggctccagcccccgcggtggatcccgagccccgagccgcgggcctctggagcagcacgctggggccaagtggaacccgcagcggcggcgcagggcggggcagagcagcaggatccagagcccagctcaggtccacgtgggtgacccaggagctccgggatccccggggtgagttctctccaggcctgaccctgtgagcaccagggcgggactcctcacgctgggctctgcggggcagtaaggtcagcctagactccggccctgcggccatgcatttggctgacgactgtggtttctccccaggtcgtgatggagtttgaagaggactttagcggaagaaaagacaagaacttcttgaagatgggcagaaagaggtagggggatcgtttcactttcacacttaacgggtcttgtagtttgtagcctccagcgctgcactaaatgacgagtgtttg

SEQ ID NO: 928 - DNA, 1377 bp, Cricetulus griseus
gaattccagaaaatgtaagaacttcatatgcttcagggaaaaaaacaaggatgctgattccagaggtaaaagttgaaaatactatgtaccttttaaaatatcatttctcctctgaaatgccccattgtataggacgatcatccaagccaaaaaaacccaaaatgtatatatgtatatgctttaggaaaatgccaaacacactgaagaaaggcttccgcagaaaatttctaccagccttaaaaacataaaaagaaagcaatgctgtcagaagggggctttatggctttatgtcagcaggtccctgattgcttgctttattaactctagtaggtcagctcgctcaggtaaagtatccttctaggtatggctcaccagtgatccagctgtgcactatctaggcatatacacttctatatggagactaacctgaacgtgtaaagacaggtcctataatagtaagtgtctcacggaggattccagccacttctccaaagctcggggaagccaggaagcgcctccggtttggtttcgcaacctcgcctgcgggctcgcccaatcccgcccaccaggctggttggccacggggcgcgggggcggcggctggcgacgactttagtttccgagccttgggctccttccgcagcggctctagaagctcggccgaggctgaggccgctgcccctatctccccaggctccgctaaactcggaatcgctcttcccaatcccacgactgggcggactttgcgaaggaaagcggaggtagggatgcggggagtgagcttttcccaggaggggtctgctgctcgggatgtctgagcctggtcggggggccggggcctcggaagtccgtggggaccaagtggtcactgccccccaggtgctcccggagcccccgagccggtgttgtcggcggcgccagccccgcgcggtggatccgctgccccagctccgagccgccggccggtggagcagcacgctggggccgagcgacccggaggggcggggcggggcggggcagcaggatccagagcccagctcaggtccacgtgggtgacccgggaaacctccgggatccccggggtgagttccctccaggcccggccctgagagcatcagggcgggagtcctcaccgctgggctccgcggggcagtgaggtcagcctagactccgtccctgcggccatgcatttggctgatgactgtggtttctccccaggtcgtgatggagtttgaagaggactttagcgcaagagcagacaagggacttcttgaagatgggcagaaagaggtagggggatcgtttcactttcacacctaacaggtcttgtagtttgtagcctccctccagcgctgcactaaatgagtggttgttatc

SEQ ID NO: 929 - DNA, 10614 bp, Cricetulus griseus
  misc_feature (3259)..(3275): n is a, c, g, or t
  misc_feature (5144)..(5158): n is a, c, g, or t
  misc_feature (7997)..(8012): n is a, c, g, or t
  misc_feature (9210)..(9246): n is a, c, g, or t
  misc_feature (9309)..(9327): n is a, c, g, or t
  misc_feature (9601)..(9620): n is a, c, g, or t
  misc_feature (9622)..(9645): n is a, c, g, or t
gaattctaaacacatattaatatcaatgacttatatgtatgtatatatatatctaatatagataatgtatctagggatatatatatatgtatattttatctttcttccttttattctttcttctcccctctctgttcaacaccgaggaatagaatgcactgtggtgtcatactctgcttactcagcctcttattgacctctgagtcaatacagtgctgatgtacatctccaaatgccctcttttctcctaaccacagacttttacattcagtaatcaatttgacattgtcccatgatttacaaatgttcacaatagtatattgacctattgctgccttccaaggtcctctcccactcccaaacatcccaatatgaaccagcttttgcctatcttcttgtctcttactttaactcaatgtcattccctattcactttgctgtaatagatgctaccttgattctggtttttagcaccttaatttcgctctctgctcaggaactctgcctttgctgttccctcttctgggaacgcttttcctttgctgttatatctcttcaaaacagcttctctattcaatatgctcaagctgccttcagccctcaacagctctccctacctcattctagtccctccactagaatagaatcttcatgagagtagcgaacttccctatcttgctagtacccaaaggcagaaaaatctttaaagagttcctgggacatagaaaaagtgctcaattaatatttgtattaaatagggacctcaggtgtaactccgtggtagagcgtttgccttagagaagtagggccatgggttcaaattccagcacagaacaaaaaattgtgctgaataaagtttgggaggatgtgtagcagtttatagtgcaagtggcataagcagtaaataatgaatttgtatccacttttctagcaagaagtattttattctttatttgaaggataacaattggtaaagactgcattctcaaaataaactatggcttatggctacgtggaagatgagatagggagaaggtttttttttgatgatggcaaaataacatgtcatagtccacacgaaacacctgtgaagttgtaaacacacctagcaatcaaacaagaaaattgtcccaccctattatcattcttttggattggttgtggcatatttctggaaaatgatttaaattaattccttctaaaggtaacaacacaaacaaccactatcatgacgaaaagcttctgcctgtttcagtttacatcatgctcaatgtctacaacagacgtgctcatcttcagagtgtttacctctgctttttacacacattgaagcacaatgtgagctgctgtccctgggtctgaatgttatgtcagcacacaagggacagagcttcggcttatcaagtattgaagctctctgcttgttttggagcctcttctgatactatggacttagttcaaggctgggcaatactatttttttcttttttctaataggaggacaaatagttagttgtttgctttggtcatccaagttcaagttattggatcatggtcctatgtgtataaagagtctagtttgagcctttcaggggcagccttgctggctaagcacagactctcctcttgggagttttcctgctttgcaaaatgatgaccatctctttgatttgggggattgctatggtagtgtgctgttgtatatgggttatctttgacagaaggagaaggtatgtcttttagcttatttctagtgttttcactattatacagttccaaaaaaatactagtacattagtatttttatttaaaatttaaagccatgcttctttgactaaacctgacaagatgtagagtttccctttgaatatccacatacactgatggtaatgctgatcttgttaaacataactaaaaaaattataagtattgatgcatgtttgtgtgcacttctgtggagtacacctaagctgggaagggtgcatttggcaagggtgacgtttggaaaggatctttctctcacaataactggttatgcatatgctcttctgggttctctgttacatcaacattaaaatacaggaatacccttggcatatctttggcaaggtagactgtgtctgctgtcttagttttaataacttctttgccttttgagttatttgaatttatgcctgatcgtttccagttttagttgtcttaatgctaagaaaggacaaatcaattatatttagttattctaacaagagataactagtttacgttgaaaaataaattatcttataatttctaataaaaacatttaagagagttagaaatcagcgaattatagctgatgatctgccaatgtttacctcactcaacttcattttagatactttttcaagtgggattcctattctcttcaaatatccgcacagaattatagtccccttctttcagagtggggggaatcaaatgaaaggtttcatgtgtgctaggcaagagcaccaccgttgagccacacctccagaccccacaatgccaacatttttaaactatgtagagtttaaaaaactttagttctgtagccttttctattagctggtgtttcatgtcttcaaagaaaaggaaaactgaaacattttagacatatggacaaatgattccttgaacaagtctaagcactgatgatagcttcttttctacagtgagatcaagaatcttgttagccctgttgatacttgtagccctgtcacttggaaaagcaatcaattttatgatctagaaaatagagcttgcctaaagatcagagtgcagagctagtcacactagtcagccatacaggttaggcagtggtggcacatacctttaatccctgcagccactcaagttacccatagaagctgggtggtggtggtgcacacccttaatataaggtggagcacactttaatgtaaggtgggtagagtcaggagtgcagtgtattcagtctgcagtcacactgagaacaatatcaccccagtcttgttagaggtaagaactctctagtgattggctgctttgctcttctgatcttcagtttgaacttctgtctctgggtttttattattcgtgctgcagacatagacatagcaaacaatttaatgagtgattgatgaatgtagatatgtatgtacatattgtgctggatagactgtagatgggttggtggatgggttgatgagtgggtagatttagtaatcaccttcaccaatatcttagtaggctaaaaagcccnnnnnnnnnnnnnnnnngtggggtatccaacaaagaagtatctataaactgtagttatgtggtagaaataaggggtagaaaccagtaaaaattcggcttatgtacaaatgctaaacatgtaatttcctaaacctctcaatctgtctcacaggaaagcaggtgaacctcctttggagaatgggttgattccatacctgggctgtgctctgaaatttggctctaatcctcttgagttcctgagagcaaatcaaagaaagcacggtcatgtttttacctgcaaattaatggggaaatatgttcacttcatcacaaactccttgtcataccataaggtgttatgtcatggaaaatactttgattggaaaaaatttcattacactacttctgcaaaggtaactagtttttacagattttgcttgtttactagcctgtttatttattagtttatttagttgttccaatgttattagattgtaggataaagggaacataaaatcaggaagtctcttggtactaagcattaaaaagtcaaggtaaatgtgaatttgtgattgatgatgacatacacaaattaagcactttgtaagtactttctgagccagaagacactacaggaaggcacagactcataacatccatgctgccatctacacaacactcagagcactcaattaccacatcatgcacacgaactcgttcgttaagaagtcgacagtatatttaagcatcattcagatgttatcaagaatctctattctagagaaaacaacacttagctgaatttttacaagaaaatattagacatggtctctgtcttaagtagattaaagtctggctaaagtgcatctgcagagaacaaaaggtaaagataaaatcaatggcccattagtccagagaagcttacctgaaaatctgggatttaaacttgaccttaaaggaagagtatgtcttaagtttgactttgaaaaatgttatgaaattgtattgggaaggctagacagagaagtatgatatactttaatccatcttccagccatttcctaacacccaggtttagctgctccccctctgacgaatttcattttctaccaggcatttggacacagaagcattgacccaaatgatggaaataccacagaaaacataaacaacacttttaccaagaccctccagggagatgctttgcattcactctctgaagccatgatgcaaaaccttcaatttgttctgaggcctcctgatcttcctaaatcaaagagtgatgcctgggtcaccgaagggatgtatgccttctgctaccgagtgatgtttgaagctggatatctaactctgtttggcagggatacttcaaagccagacacacaaagagtgcttatcctgaacaaccttaacagcttcaagcaatttgatcaagtctttccggcgttggtggcaggcctccctattcacttgttcaaggcggcacataaggcccgggaacagctggctgagggcttgaagcatgagaacctctctgtgagggaccaggtctcggaactgatacgtctacgcatgtttctcaatgacactctctctacctttgatgacatggagaaggccaagacacacctcgctatcctctgggcctctcaggcaaacactattcctgcaaccttctggagcttatttcaaatgatcaggtggatagcaatttgagtgtttattcttcatagtgacagaaattaacaatttttaataaaccccccaaaagactagcagagctttctttgctgttggtcaagaatgtgatactcagtgcctgtgtttgacatatatatataacaaaagtagcattttgtaagaatatagtctcaccagaaagggatgtcccagaagccgcagaactnnnnnnnnnnnnnnnttgtcattaaaggtccccttgcccagtcttgcttttaactccatagtgttcttcttagtgtcaagttaaatctatgactgcagtcttcatcacaactttaaataatgactgacttgtcaatgtggtaagtgcagaggccacaccttactagtttgaacattcctgttttctgcggcctcacagatttacagcagagttgcaacatcaatttcatattacctatgaactacaaccatattttaagttcaacaactacttgttagtaacatttctgaggctcagttcactttaaccagataaaggagatttcaaacagctgccaacaaatttccatgcactgaatggaagtattctttatcgcacagttcaaaaataataacataaatattctgaagctgtggtatgaatttaaagagtaaatttgaatttctacttgggaattcaccaataccctgtaattgtatgttagaggaagtattcggaatgaattactctactcatcacacgaatgtctagcccttattagaatcattggtttatagagatctgaccaaagctttgcttttacatagcaacgcccctttaatgcttcttcataaattcaaggacatgaatccagttcagaatacagtacaagtaaatgacaatgccctttgcatgttcctggaaccacttcccttttcatgctcccatgctaacgcgatcacctcattaaaagaaatggagttcttatttacttgcagctctctgaataaggcaatatcttccatatgtctcttttcataggagtcctgacgcattgagagcagcctctgaagaagtgaatggagcattacagagtgctggtcaaaagctcagctctgaagggaatgcaatttatttggatcaaatacaactgaacaacctgccagtactaggtgtgttccctatgctatccctcactaacatgtcactagtaacaatgctcaacatataatgaatgtactatattcttgatatttttgcaacgctgcaacagtctaataactagggtcatcttcattttttctaacaaacaaggaactgagacccagagcgtgggacagtggcaaccctggcatagaacatttgatactcagttgctctaggtccttggcctcctttcttagtcctccaaaaccacaaacccagggttaaggaagcatggaattaatgtgaacaaagcaacaccattggtttgggcgatgagactgaggcttttcttcctttgtttctgtattttctagaatgcagtagtaccatgtattacagtaaaacagccatatttttgtgtcctgttctgtaaaggacagaagcccccatatgctttgagggcagtttagtttattagaagcaacagagcctagattcagcactgcctggtttgggacctccctttagacacctcccttttctcacctgtaaataaaggctaagtaagcatttgtgactgcatactcagtcatggcctgaatcctgggaacaaggcagctagcagctagaggctggaaaacaggactggacctcagcagctctactgcattacttcccctagaagcagggtgtggctacacaaaaccagacagataatgtatggctgaatgtagattcatgaaatgcttggaaagacatttacttatcagtatgtttaattcccaaaatggtcagcaacaattcacacaaaattgattataagttttttcaatttgcttagctgtttagtgtccagtagaaataagattactattctataaagtgacagatgttcatctagttcccattgatggtgaagaacattatgtcatcccaaaagatcgttaacttagatcgtggttctctaccttcctgatgttgtgtgacccccaactgtgaaattattttcattgctacttcacaactataattttgcttctgtcatgaatcataaagcaaatatctgtgttttctgatggtcttaggtgacccctgtgaaagggtcatttgactctaccccctacatgggttgtgatccacaggttgagaagcactgacttagattctcagattgcaagtagagcagcagaatttcgaagaacagcagtggcgacagaagctgctttgggcagttgtcatttgttagctttcattggctcattttgtatacagattttcggaagtatttcagactttatgttatgtagcctttagaggcaacagttcaggactggagagatggctcaagggttaagagcactggctgttttttcagaggacccatgtttgactcacagcacacacatggtggctcacagccatcatgactcctgttccaaaggatctgatgtcttcttctgacctctgcagacaccaggcatgcatacatgcaggcaaaatacccatcaatataaaaataaataactgggaaatatgcaaattctttaatatgcaaattcttctctccccaactgccatttcccatgctccaccctcatcccttccctcctctcttacttcttttgtttggaattctttagatagcatcatcaaggaggctctgaggctttccagtgcatccttgaatatccggactgctaaggaggatttcactctgcaccttgaggatggctcctataacatccgaaaagacgacatcatcgctctttatccacagttaatgcatttggatcctgcaatctacccagaccctctggtaagtttttctgctcatcaaagttatgtatcgaggtgacagtcacccaggaatgtatttgtaattacagctttgatttgatcattaaagtgaagccatagggattgtccctctttattgcggcaaatattnnnnnnnnnnnnnnnntgggtagaggcaagagttttgaacttttacacctaatattcatttcatagtttctgctagactatgttttcagtcataacaaaactaccaccttttttccccctcacaaagtaccctctcccaaatttacactaatggagggtaatgcatttgacttgatccttagagtagttgtttagagccattttgcttcttttgtctaactgaagaattagtctacaggtagaacaggaggtccctagagcttcttggtccaccagctcttcataagctctttccagtatcacctggttcagtgcttggtgtttgctaacttgtagaggatggatttattagtagaaaattactctttggatcctccaggtcaagaaggcaacaactttctatcataatagctcattggcttcttgtctctttgttgcagacttttaaatatgatcgatacctggatgagaacaagaaggcaaagacctccttctatagcaatggaaacaaactaaagtatttctatatgccatttggatccggagctacaatatgccctgggagactatttgctgtccaagaaatcaagcaatttttgattctgatgctttcatactttgaactggagcttgtggagagtcatgtcaagtgtcctcctctagaccagtccagggcaggcttggggattttgccaccattaaatgatattgagtttaaatataaactgaaacatctgtgacatgtggttggaagaagaggacactggatgatgttgctggactgcagcgagtctcactaaacaagcccttgggacaaatgctctcctttgcttcccagcaactgactgtgcctaggaaaagaactggtacccccggcaccactctctgttctcactgcctgagttcctgggtgttcagatagctgaggtcagagtttcaccactcttagaagcaatgtcttttgtttttattttcaaaatgaagatactccaattggcagattttttttcctaaggaaattgcttcatacttttatgaaaactgattaattatgaaaaggcttcaaattcacgttttagtgaaactgttatttttttcactagtgaagttcttcatgtgtgaacatatactataaaaacattttaagggatcatatcatgctttgcataaagggaaaggaaaatattattcaacttttttttttggtttttctnnnnnnnnnnnnnnnnnnnnnnnnnnnnnnnnnnnnnggcactcactctgtagagcaggcttggtcttgaactcacagagatctgcctgcctttgccttnnnnnnnnnnnnnnnnnnntcgtgcgtcaccaatgcctggctatttaactttttcgatgtctagtggtgagagctttgaaaatgatgctactgtgttgggaatactatgggaaattttgatgcttcgctgttacatttaaatttattgctgctggaaattgtcaccccagttttcaattgcccctctctctcccttttaatattcacactgatgagcagagttttttagagattaaaaagacctccccagagccctgtctctgatgtttttaagcctttaatctcagtactcnnnnnnnnnnnnnnnnnnnngnnnnnnnnnnnnnnnnnnnnnnnnatctacagatcgagttccaggcaagccggggctacagaatgagaccttgtcactaaaagaaataaataaggtcaattttatgtcacaactgattatgaatcattgtaaaggataaattgaaaaaaaagaactccacgggaatgaccatttaaatggtctattttagctaaaattaactatgaattatgtggagttcattaagtgtatgttgacgttatatgttcctttaaaatgtcttatgttttatctctgaatgtcttgtagatggagagcaataatagtgtttaaatactgagtcaataaggttttatctatgtactttaagagcattattagctgtgtcatttttactgatatatctaatatatttatatgtaaattatatttatcttttatcttatactacaaatataagtaaatattttaaaaccagtaactttaaaattacctacctttcagaaatgaaaataagaacatttgtgctttaacctttgaaatagaatgtttattcatccactgataagttaaaataattttatctgatttgtttcaagaaactcaaaaatattcaaagtaatcatgcactcaaaggtcttcgtaaggttacagaaaattcaataaaatcttttttgtgtagggactgagtcagggtctagaagatgcttggcaggtactccagtagtgagctggatccagaagattccttaaactttaaaatcttaacactaagtattatcacagagttattacctaagtagaatatttttcctttccttttcaattgacagagtcccacagcaacacagctggctgtaactcttcacatagcttgcgcaggctttgaactcactgtactcctgcctttccttttctaggaaattattttccacatcaagaaaatttaattgttccgatgaggtatagagtaacaaatttctgttatatattcatctgtattaaactgaattc

SEQ ID NO: 930 - DNA, 993 bp, Mesocricetus auratus
ttcccggtgctgggcctggactcccggggggtgggcggcctcatgaactccttcccgccacctcagggtcacgcccagaaccccctgcaggtcggggctgagctccagtcccgcttctttgcctcccagggctgcgcccagagtccattccaggccgcaccggcgcccccacccacgccccaggccccggcggccgagcccctccaagtggacttgctcccggttctcgccgccgcgcaggaatcggccgcggcggctgcggccgcggcggctgcggccgctgcagtggttactgcgcccccagcccctgctgccgcctccacagtggacacagcggccctgaagcagcctccggcgcctcctccgccaccccctgccgtatccgcgccagccgccgaagccgcaccccccgccgcggccgccaccatcgccgcagcggcagccaccgctgtcgtcgccccaacctctacagtcgctgtggcccctgttgcatctgtcttggagaagaagacaaagagcaaggggccatacatttgcgccctgtgcgccaaggagttcaagaacggctacaatctccggaggcacgaagccatccacacaggagccaaggctggccgggtcccttcgggtgctatgaagatgcccaccatggtgcccctgagcctcttgagcgtgccccagctgagcggggccagcgggggagggggagaagccggggctggcggaggcacaaccgcggttgcagccggtggcgttgtgaccacgaccgcctctggaaaacgcatccggaagaatcacgcctgcgagatgtgcggcaaggccttccgcgacgtctatcacctgaaccgacataagctgtcgcactcggacgagaagccctaccagtgccctgtgtgccagcagcgcttcaagcgcaaggaccgcatgagttaccacgtgcgctcacatgacggcgctgtgcacaagccctacaactgctcccactgtggcaag

SEQ ID NO: 931 - DNA, 4425 bp, Mesocricetus auratus
  misc_feature (1352)..(1385): n is a, c, g, or t
  misc_feature (2150)..(2169): n is a, c, g, or t
  misc_feature (3519)..(3557): n is a, c, g, or t
  misc_feature (3807)..(3841): n is a, c, g, or t
tttgggaccatggtcctggtcgactcctttaaaagtgtcgatagaagccactttggaaccaaccgtaaggactgaatttaacagtcacaaggcagcacacattaacacccaggcgcaataagcagtttgggtgctgggagagtcacagtacttcacagtagaaaccctgcccaattagcatacataatgtgcagggacattcacagctcgccctctgaaaagaccctctcctaccacatttcctgtcacacagaagttactcagggaatagtgctagaggccgccagctttgcgaagtggttagaaaacctcagtcccaggcacaccgtgctcacacaccgtgtgtaggtgcgtagcattgtgctgttctgctttaatctctagacctattcctgtatatccaaagttatggcttttcttccttggtcattaacaaatataaatggaattctgccttctgctggaccagagcttctgaaattgaatatgctcatgagtcaactatgagtcacctgaggcgtcttgggaacttcagaatggaggaagacccttctataatcatgacatcagaactgacctttgagcagtgagggatcaacaagggaagatctaagggacacagagagtatcgagggttcagggattagcgtttggggcaattgtctaaaagcaatctgggaagacggggaaggctgcagtgtgggcagtctgggaggggagaatgacagggccagggggcgctcaggagctacgcaggcccactaagcacgcattctgtgagagctacacctccagcttccataagcacattttgagcaagcaagggatataaactttctcaagaacattgattcaggagcacaagcactgggtaccaggtggcctgggcatggcagcagtggtggagacggtaaataatcagaatggcgacacatttagcggtagacttctgatgagttggatgagaacagatgaaattccctctgtttcggattgaagcactgggatcatttactaaggcttgaaatactaggcaagaagagcttggagaggcaacggttctgccacataaagacaattagtgcatttccaagctgagctgccaagcaggcagcgggatgtaaaatctagctgtaaatgatctttccaccttatcgcggtctccatggacccgtaaatgcctcagagtggacagttccctctttctcttgttccccgtgccttttcttactgacccttgcatgagtgccactctcactgccctgagtccccaatcatgtttgcaccccagctcaagctaatcacccctgaaataagcagcctgacatgtgcctgtgaggactgctattaannnnnnnnnnnnnnnnnnnnnnnnnnnnnnnnnntgcttgtctagcatacatgaatctctgggttcaatccccagcaggtcatcaagccaggtttgctagaacacatctgtaaccttggcattcaggaggtaaaggcaggaggataagagttcaaggccagcctcaattatataaaaagtttgaggccagtctggattgtgagaccctcagcaaacacacatggaacaaaaggaaacctagatgccaggtggagtatggtagcagatgcttctaacagcagcattcaggaggctaaggggagagggctgagagttccacgccagtgtagggtacacagggagaccctgtctcaagaaacaagaataacacctagatgcatggtttctgacatctgtctcattttccctatgagaattacttgtgcatattaatcgcccatggtggttaaagccctaaaatgcagaaacccactttcttcttttattttgacaatatcgtccatgctactcagcaatggcttagcacattcaatatgctgagaaagtagccatgagtgagcaggcattgctctgagatggctgtcaagctaacacagtcagagctaccaaaggcgggagctctcccaacccctaaaagacctgaagatagctatgctcttggttcagtgtctggagctataccgtgcaaagttaagggttacacacatgtacatcttgacatgtgcataactgctgtaggcaaacagcatccttcttaagaaaaatatgaatctaatcaaggaattcactgacaaaagcnnnnnnnnnnnnnnnnnnnnaagctctttcctaatgaaaatattacatttgtagtggtttaaagctcttacagaagctccacagaagtagatgctggcccactctgctttctgcctccatggaccagcattctgcctcagtcctggaatccaacattgaaccctgatgaccttacgctcttgtgtccactctgcccgtgagatcttgtgaaaaccagatccattcccataaattctatcacacatgctgtactgggtcctgaattctgaaaatggaaagaaatagtgacaagccaggcatcagatagtggggtcttgatatacaagctgacagacttctacaaaatgaaaggccacttgaagaatggtggccatggagggagggcctgagctcgggaggacgctggagatagacgctgacttctacagagcaagcagtgtgaccaaaggaaggaaagaatgtaggcgtggaaggtgttggaagacgtcaggagcgcaaggccaacagtgacagccatcaccaacgaggtatgtcagtcacaaaccgatttcggagtagaagtgctccaccgattttcttattagcttattccagtgaccctggcgtaggtatggctgtttcactcatttcacagatgatggggtgtggctggtaacttactcaggctaaccgagctaggaactagagctgagattgagttccagcttcactctcccaccttctggtcctgattcaggaacattcctcctatggagcctgccacggctgaggaacagatgtcacctgacaccccagagagtaaggtgttgaatgatgggctaattcagaagtgcatacaaagcccttgtgtgactgacctgtcagagctcggctatcatcaggaacactctcaccattgtgtctggccccacctaagcgattattttattgtctgccctttgtcatgagtaatgtcactttccattttaagcagggagcttcaggagatgaccacagtttcaaaccatgatttaaagctaagcgctgcctgggtagttactcactcccttcaagatgtggctggcacacaccctcctcagaacactgtggggcctgcttgcctgcctgagcttgaaggcaatctgaataccttggagtcagactaggcctgatgccagggtgtgtgacatctggcggcttggctggctgttcacctgaaatgctggcttcctgagttccctgtgtatactgtggctgtgttacttgttcatttgtgtggcatttgttgaggccctactatgggccaggcactctagttctctgctagagatcctaccagaagctgtacagctaccagtctggggaggataagcaggcagttatcgtaaaannnnnnnnnnnnnnnnnnnnnnnnnnnnnnnnnnnnnnnagggaggtttggggaccagcagccagaggaccggatgccacggtagacagaaaggacaaagaagagtgggctggccttctgaattataaacaaaccaaactaaagctggagagagagaagtttgtaaagcctgagtttgttccaagagtcaccaggaaaagcatggtggccagagttgcaatgcaggaaattttcactcagacaagacctgtgtggggtctgtgcgagtatgtgtatgtgggtgtgcacnnnnnnnnnnnnnnnnnnnnnnnnnnnnnnnnnnnaggagagaatgatggagacaggtggggttgatgatgctgggcagtcaagagggatgacaaatgtccagagaagcaggtagaagtaggaaggtggggaggggaaggctggctcggatgacctaagacattctgagtcacacagccagaggcctcgcttaaagggagcactgacttacaaaaggaagcaagcaccagcacagccaggctcctaaggaattcctggccagagacatcttcctacctctgaaggctctgccgtctcttcagaaaggcagccaggtgccagcaggtaagcagaaactgtgttctaagcctcctttgtgtttcggtgctcctggggccattctggagggcacagttcttgctgtatggcttgggtttatagaagcagctaactcagaacattggtcccgtgtggtaggcggaaaagcaatgggcatgagaacagtcaaccttgcatggctgtgcacaagccgtgatgcactgctatctgccttaaggtcccgatgtttgcacctgaaggacttgcgagagctgtgtccggacacacctgtgagcagggacagtgcagactgcgtaccaga

SEQ ID NO: 932 - DNA, 4990 bp, Cricetulus griseus
  misc_feature (4888)..(4948): n is a, c, g, or t
accatctggacccaagggtgaccgtggggagccgggccccccgggtcccccaggaccaggtattggtggcactggacaaggcgagcctggacttccgggtcttcctggaagccctggaccccaaggcccagcaggccgtgctggagagaaaggagagaagggtgactgtgaggatggagccccaggccttccaggacaacctggggccccaggtgaaccgggcctacggggaactcctggaattactgggcccaaaggtgaccggggacagacagggaccccgggtgagcccggagaaaagggtgaacggggaccgcccggtccagtgggaccccaggggcttcccggggttgctggccatcctggagtggagggtcctgaggggccaccaggacccgctggccgtagaggagaaaagggagagcctggtcgccctggagatcctgcagtgggtcctggtggtgctggagccaaaggagaaaagggagatgctgggcttcctgggcctcgaggagctgctggaatcaaaggggaacaaggcccacctgggttggcgcttcctggagaccctggccccaaaggagaccctggagaccggggtcccattggcctcactggcagagcaggacccacaggtgactcggggcctcctggagagaagggagatccaggacgaccagggcccccaggacctgttggctcccggggaagagatggtgaagttggagaaaaaggcgtcgagggaaacccgggtgacccaggtttgcctggaaaagcaggcgagcgtggccttcggggcgcacctggggtccgggggcctgcgggtgagaaaggtgaccagggagaccctggagaagatggacggaatggcagccctggaccatctggacccaagggtgaccgtggggagccgggccccccgggtccccctggacggctggtgggtgcaggaattggatccagagacaagggagagcctggacaggaaggtcctcgaggacccaagggtgaccctggcccccctggagcctctggagaaaggggcattgaggggcttcggggaccccccggcccacagggagacccaggtgttcgaggccctgcaggagacaagggtgatcgggggcccccagggctggatggccggaatggggtggatgggaaaccaggtgcacctggccccccagggccacatggtgcgtcaggcaaagctggggaccctgggagagatgggcttccaggccttcgaggagaacatggccctgctggtccccctggccctcctggagtacctggaaagacaggcgaggatggcaaacctggcctaaatgggaaaaacggagaacctggagaccctggagaagatggaaggaagggggaaaagggagattctggtgcccctggaagagaaggccctgatggtcccaaaggtgaacgtggagctcctggtgatcctggacttcggggtcctcccggtctcccaggacaggtcggtccccctggccagggtttccctggtgtcccaggaaatacgggtcccaagggtgaccgtggagagactggatccaaaggggaacagggccttcctggagaacgtggcctacgaggagaacctgggagcttgccgaatgcagagagactactggaaacagctggcatcaaggtgtcggccctgcgggacattgtggagacctggggtgagagctctggcagcttcctccctgtgcctgaacggagacctggccccaagggggaccctggtgagcgaggccctcctggcaaggagggttccatcggctttcctggagagcgtgggctgaagggagaccgtggagaccctggccctcaggggcctcctggtctggcccttggtgagaggggcccacctggaccacctggccttgctggggaacctggaaagcctggcattcctggcctcccaggccgggctggtagtgctggggaggcaggacggccaggagagaggggagaacgtggagagaaaggagaccgtggagagcagggcagagatggccttcctggcctccctggaccacctggccctcctggccccaaggtggccatcgatgagcaaggtcctggactctctagagaacaagggccccctgggctcaagggtgctaagggggagccaggtagtgatggtgaccacggacccaaaggagataagggtgcaccaggcattaaaggagaccagggagagcctgggaagaggggtcatgatggcagcccgggtctgccgggagagcgtggtgtggctggaccggaagggaagccgggtcttcagggcccaagggggacccctggcccagcgggtggccatggagaccctggaccacctggtgccccgggtcttgctggccctgcaggaccccagggaccttcaggcctgaagggggaacctggagagacaggacccccaggacggggtctgcctggacctactggagctgtgggacttcctggccctcctggcccttcaggccttgtgggtccacaagggtcaccaggtttgcctggacaagtgggggagacggggaagccaggacccccaggtcgtgatggtaccagtggaaaggatggagagaggggaggtcctggtgtgccagggttaccaggtctgcctggccctgttggacctaaaggagaacctggacctgtgggggcccctggacaggtgatggttgggccccctggagcaaaaggcgagaagggtgccccaggagacctggctggagacctgctgggtgagccgggagccaaaggtgaccgaggactgccaggaccaaggggtgagaagggtgaagctggccgtgcaggagagcctggagaccctggggaagatggtcaaaaaggggctccaggacgcaaaggtctcaagggtgagccaggaattggggttcagggcccccctgggccaactggtcctccagggatgaagggcgacgtgggctccccaggagctcctggtgttgttggattccctggtcagacaggacctcgaggagagacaggccagccagggcctgttggggagaggggtctggcaggccctccagggagagagggtgccccaggtcccttgggaccacctggaccaccagggtcagtgggagcacctggcgcctctggactcaaaggagacaagggagacccaggaacagggctgcccgggccccgaggcgagcgtggtgagccaggtgaccggggtgaagatggccaccccggccaagaaggacctcgaggactcatggggcctcctggcagcaggggagaccgaggggagaagggtgacactggacctgcagggctaaagggtgacaagggtgactcagctgtgattgaggggcctccagggatacgaggtgccaaaggggacatgggtgaacgaggacctcgaggaatagatggtgacaaaggacctcggggagacaatgggaatcctggtgacaagggctccaaaggagagcctggtgacaaaggctcagctggatcaattggagttcgaggactcccaggacccaagggtgagacaggtgacacagggatccctggtgagccgggagccccaggaaaggatggagcccctggtttccgaggagacaaaggagatattggcttcatgggtccccggggtctaaagggtgagagaggaatgaagggagcctgtggccttgatggagaaaaaggagctaagggagaagctggttttcctggccgccctggattggcaggacgcaaaggagacgcaggggagcctggtgtgccgggtcagtctgggtctcctggcaaagagggcctgattggtcccaagggtgacagaggctttgatgggcagtcaggacccaagggtgaccagggtgagaaaggagagagggggcccccaggagttgggggcttcccaggtcccagaggaaatgatggctctagcggtcccccagggccaccaggtggtgttggtcccaaaggccctgaaggacttcagggtcagaagggtgagagaggtccccctggagagagtgtggtgggggctcctggtgctcctggtgcccccggtgagagaggggagcaggggcgaccaggacctgctggccctcgtggggagaaaggagaagctgcactgactgaggatgacattcggggctttgtacgtcaggagatgagtcagcattgtgcctgccagggccagtttattgcgtctggatcacgacccctccccagctacgctgcagatacagctggtccccagctccaccatgtgcctgtgctccgggtctctcatgtagaggaggaaggccaggtaccccctgaagatgatgacgacttctctgagtactctgtgtattctgtggaggactaccacgaccctgaagttccttgggatggtgatggggatatcaagggctgggaccagagaggttcagacccctgctccctaccactggatgagggctcctgtactgcctacaccctgcgctggtaccatcgggctgtgcctggtggcacagcctgccatccctttgtctatggcggctgtggagggaatgccaaccgttttggaacccgtgaggcatgtgagcgccgctgcccaccccaagtagtccacagccaaacaacaggtgctgcctagggccgaagcctgcatgatgcactagatggtcagcagttcctggaggtggcagggctcagcggggtcctgccattctccgtttggtgctagagttctgtgtgcccgtgagcgtgtgtgcgtgtccaccatttcagtgacttggtcctgtgggtctagccttcccccttgtggacaaatccccattgtggtgcctgctttcctggcagatgactcacttgttgggggtggttgtgggannnnnnnnnnnnnnnnnnnnnnnnnnnnnnnnnnnnnnnnnnnnnnnnnnnnnnnnnnnnnctgtttcggggggagagcattaaagctgctgttttaaaaggc

SEQ ID NO: 933 - DNA, 448 bp, Mesocricetus auratus
tttctcagctaccaacatccttctcacccttgacaacaacgtggtaaatggttccagccctgccatccgcaccaactatattggccacaaaacaaaggacctgcaagccatctgtggcctctcttgtgacgaactatctagcatggtcctagaactcaggggcctgcgcaccattgtgaccactatccaggacagcatccgcaaagtgcagtaggctagtgcctagtgcctctgcttcatttgccagcccttgaagactcaccacctaggtggtcccatgggagactggacacactatgagccttcccctctttcagacggaagagaacagagagctggccagcgagctgaggcggcctcccctctgcttccacaatggagtccagtacaggaacaatgaggaatggaccgttgatagctgcaccgagtgtcactgccagctaaggga

SEQ ID NO: 934 - DNA, 1543 bp, Mesocricetus auratus
attcgcctccttaaaatgccactagaaactttctgcccggaattaccctaaatcagaatacacatacgccccaagcggccatctgaaggaagcacagtcgaactggggaagtactctgaactctggacttggacgagttgggaaaggccgaaccttggtgcacggcctgctgctgccctgactactgcacactgcaccctagtgatcagcagaggcagcctggaggggcaggcctgactgctgccctgactactgcactgccaccctagtgaatcaagcagagtcagggcaggagtggacggaaaccctgatggcacgggatctcccaccccaccaggatagacccaagaggcagcttccttattaaagggtcggacacattaaccttttcacttttatttttaaaccagacattctcaatctccaaatttctccgtcactgaggcattcaaggatacgggctttagtgaaagcccttaaacggcttaggtagtccaaaagtagcattcgtgtctgaggaccctcaagcggagcgcttccagcctccgtggcgcaagagcctaagctctaagtggctgcgtgggtgagactatttttctagaagttccagggctcctgtacccgatcagcgtcccccccccctgcaatttcagccccgatgcacgccaagcggcggagccgatgacaggaacctgtgtcgtcgttccccccaccccagcgcttcctgccccgatcattggccaggatcgattcccaggaatgcgagcgcccctttaaatggtctagggctcctctaccccagccagccatgcccggagtcagccggcctcttcggactggtgcaagcaatcccgacacagctaccagtcccgccagggcctctccgggagcaccggccgtccccgtgtctccaccagattcggcgttccttcactgcacctttgccgccgccaactcccggcttcgacggcccgggtgcacacaggtaagccaccagcgttcgctgcccagcacctggccagccaccttcaagcccctatggtgcagatggtcgagccgactccctacctcctgcttctcccggtctgcttgttcctaactgtcccttcattatgcccccgtctagccgctggaaagaactttcagagctggttctccagcttagggatcacaaataattcctcctggacgcctcaagattttctcaccaagcagttctttgggtgcctctgaccttacaaacatccatgtcccatccccaaataccattctaatcagcaccaatcccctcctctgcgttagtttttactaggtctaagtccttttgctttgcttttcagcacatataggaacacacacactcctgccctcaccgccttgccttcttgttacaggctcgctgctgggcacaaaggctccagcatggagctggcatggggactaggtgttcttttcctgttgatgtgtgtggaaatcgaattccagtgagtctccgattccctctctctctctctttctccctctccctccacccctctctcta

SEQ ID NO: 935 - DNA, 5993 bp, Cricetulus griseus
  misc_feature (859)..(873): n is a, c, g, or t
  misc_feature (2104)..(2110): n is a, c, g, or t
  misc_feature (2574)..(2595): n is a, c, g, or t
  misc_feature (2693)..(2711): n is a, c, g, or t
  misc_feature (2806)..(2837): n is a, c, g, or t
  misc_feature (4333)..(4394): n is a, c, g, or t
  misc_feature (4444)..(4466): n is a, c, g, or t
  misc_feature (5126)..(5126): n is a, c, g, or t
gaattctgtcctcatgatccggattaagggtgtgttttcactcctctatatcctcatagaaggagtatttccctcctcttgaaccacagcaaatccatcaaaaatcatctctaacggtggttcctttaatgtctggcttgtagttcattagaggggtagtcaagtttacaacaaaaaattgccatcacaatggcaggagtccatcactggttctttccctctctctgtgtctggatttaatttgaagatgtgacagttaatcttccactaaggccttagtgacattggaaaactgcagtgtgtctcccagtacattattctacccaaggagctataggcggacatattcagtgcaattagtctttatattcacacacagaagggatgctatttagccctcaaaaaagtgtactcaaaagatttagagaaaaattgatggatatcaaatgtatataagtttgaggtcacccaattgttgattgtttcactttttgtggagggtgacccccaggtcctaaataaatatatggagtattattacttacttaattataaatgcttggcattaacttgtcttgtttcttgctagctttcctcaacttaaattatccccatctacgttttgtctctggtccttttcttacttctataatcttgctttcactcttactccatggctgagtagcagggtagctagcccctgatgtcctcctctgttgggccccagcaaccacagggtctctgtgagttgcttatcaaccaataaccgcaggtgcatcctgttttctagtcctggctcacagtcccggccttgccccactggcatcaacatctagttgtgaaaacaccaactcttgcnnnnnnnnnnnnnnnaatgtgctgtaagtctgcatataaaactgctccctccctgcaataaagactgacacacacattctcttagcacaaatgattgtcaagctttcacctgatacattagacttgttcgtgcactcttccttctctgtcttttttttcttaaatcccagatttctccttctatttattctttccatctctcagccccacctattcttgtttctgcctcttctattggccattcagctctttattagaccatcaggtgttttagacaggcacaggtaacacagcttcacagagttaaacaaatgaaacattaaacaaaagtaatacactttaaaataatattctacacctcccctttttggtcaaaaaaggttttaactctaacaaagtataactacatacagcaaaaacagttatcgggtaaagttacattataatattcagttcctttattgtttaggatatttagagaaaataattcattatctatcctatcttagtgaatccaaagttttatccaaaatttctttctatcataactaagaaaaacaacgactataactatctagtcttcacctccatcaaagacccagaaggatgttatattatctaacaacagagacattaggctacctggacagtcacccaaagttcctctgcaatgttggggcatccaccttcagcctacaggcctaaagtatctggcagatgttatgaagcaggaattttggactgtcctgtcttattttggcaaagttcgttagtcactttccctcgtgtctggcagactcttctgtgaagtagggaattttgaaggactctcctgctttgttttgacagagatcaaccgtttttcctgtgtgtccttcatgtctataagcggtttcttcaatgatcatcatctctgaagtaaattggtactaccagtagtagatgtgtgtcattgtcatgaaaaaccctgtgttaacaaaacattttaaataccatattctgtggatatttggaatgtttgaagaccatctagtgattcaaaaaatatctctatatgatctgaaaacagcctaacatatctacaaatcggattattagatgactaactactaacttatgtttcctgattatcctaaatagttttataataatagctttcaaaaattagaattttacctaatatatttaaatgatctacataggtacaatatcttaaaagtagaaactatatagtgtgttgtaaaannnnnnntatacaaaagtcctttaaacaagagtagaaacatacagcgtaacaaatataactttaaatttgtatcaatacactatattcccctaaatgataacaaacatccatgacacaccaaataaccaaagacaatccccaaaccacaacgaaatcatgggaatgtagaccttgttttctcttcaatacttcctcctgtctgtggatgaagtgtctttagggtcccagagagaaaatttgagataatggccaagtcctgggaagacccactatagtctttgttcacagatatcacttatcaagattcaggaggtcctgactaaacaaacctgatccatattgtccctgaaagaatccacatcctctcattgcctgtgggaacaactccaaagcattttttatttccatttgaaaaatacattttttaggccgggcagtggcccacgcctttaatcccagcactcaggagnnnnnnnnnnnnnnnnnnnnnntgacttcgagaccagcctggtcactaaagaggtgtaaatggatagggttgagagacagtaaaaatagttttggccaggcagtggtagtgtaggcctannnnnnnnnnnnnnnnnnntcacaggaaggaggatatctgagtttgagaccaatctggtccacaagagcttgttccaggacagcttccaaatccacagagaaaccctgtctcgnnnnnnnnnnnnnnnnnnnnnnnnnnnnnnnnccacattttttaacttcctttttaaagttaagatacctctaaagtatcaaggttggttcagttttgcagtcaagttcacagctgttaactgcccctcaaccaatcaaaaattcaaaatcaacacaataacatacaggatccaaattcccagtgtatttcccttcttacatgtctcttttcttttatattattttacttctcttagagatggaaagacttcatttttaaaaaaattctttctgtgactgtctatacttattttctttcttaagcctacaccattgttaaacacactggaacctattgagggtttttccatctgtaccttttattattgcttatcttttagccttttcaattgccaagtacaaactttaaactgctaagtggtgtgtctgcagcattggtggctggctccatccacttcctcagctgtgaaagcaagacctaaagcacacagtcaggttggaagtctgggaccaacaactgtattcaacctccctagagttctagaatgatattgcttgcagtgtggcaggcatttttacttagatttttgttcctacttcacatactggctgcttaagtgctccgcagcaggcagaatcacttaaaggagctgtatccttttcttcaagctttctcaggccctatgtaaatttgaggcccatggtggtatgccaaaatattcttggttgttttattctttggggggccggccaccaagctcccaaataaatacatagagtcttattattttcttaagtataaatgctaggcctatcttggcttgtttcttgccagctttccttttattgccacctacctttgtcttctgggcttttacttttcttacttctatactcttactttcactcttaatctgtggcaaggtgtgtagtagggtgattgccccctgccttgtccctcttcggctccttctttttttctcccagatttctcctgctatttattctcgatacctgccagccccacctgtcctttctcctgcctctctattggctgttcagttttttattagaccatcaggtgttttagacaggcacagtaacaaagcttcacagagttaaacaaatacaatataaacaaaagtaacacactttaaaataatattctacaacattttcccttttctgtcaaaatggagaggcagactggataatgtaaattaagaaaagcaagtcaaaatgaggccgggtatagatagataataataggactctatgtgtgattgatttgagtgctgagtggtagacctcccaaagagcaaaaatatcatacaacacaaatgtgtatccattaaggttacttccattcataaggaaatctccctcttgtgttctgaggaaattactaactaggtctgcaagactcaaacaggacaaaaacatagactcacatacacacagcaaactgatctttgttcaagatgcttgaacaaagtttctgtttttaaaaaacagaaacttcagtcnnnnnnnnnnnnnnnnnnnnnnnnnnnnnnnnnnnnnnnnnnnnnnnnnnnnnnnnnnnnnnttagaggccagcctggtctccagagcgagtgccaggaataggctccaaannnnnnnnnnnnnnnnnnnnnnngaaaaacaaaaaacaaacaaacaaacaacaaaaaaatctccacttcttcacagcagactttctctgttattatctatgacggaaattaagcctggaagcatattctgtttgccatgtaatctggaggtttattcctgtctctgctttctctaatgtgcatatgacattttcatgttaataaactatttttaagaaaactcaatgatggaaggtatgtgatgtatggtcttctaactttctaaacagcaaaatcagttgcctgctacacttccttcctaactctaaaatgatggatgaccaggaacaaaaccagctgtgatcactatggatgcaggagggagggaaggaaagctggggggaggtggcatggcttatggttccattattattgtatggcagggattagcctgtgtaagtgttgtctaggtagtaacagccacagtatgttcaagcatgaaatggtactgacatgtctagcaatgtttcagtgttctagaaatgtttcaaaatttctatggtcacactgcaggtatctactatatctggccctgaaagtcattctcccacttttacttcaggaatccctgactttgggctttagatgtgtgtgtagggaacttcttttacaatgtgtgacacatgcgtcacttttagattggngctctccacaggctaatattctttatattttgactaacttgcatctgtgtttattcttcatctacaacacaattgaagttttctggtgggtattgaagggttgctgacactgtcagtataaggatgagaacttggtttccattagattgtatccacttattagaatttgttctaattagcattatattctctctagggcttatcacctagctaggcacaagcatatcaccaaattaacatcacttcagttacgatttcagtggaataaccccactttaaatccaatcaaaaaacgactgagaactctagaactctctgcggttattgctctgtgagcagctgtacctgatactctcactgcctcacctgatgactgggcctctacagctgctgcagccaccttgctcctgaggccttagactggaaatgcattctcttccttttaactgagtttctatctctttattctaccaataagagttaagatgctggttgaaaacctactacctcagagagaaagagcttcctgtacaccaggggaaatatgacaggagcttagaggactccactggaaaaaacactcagtaactattgccacagcacagatcttagatttcaggaaaccaatggacaaatttatgacattcgaaaggtttcctggaacatttatagttacaaaagagactcactaatcaaggcaagtttcagacacgctgcttgaacaaactgttggggttactccaaagagaaatttctaccattctgtgatgacattcttagcatttgtgagatgttcatgttgacattccaaaataattaacttagtattttccattaggcattcattaaagttggataggatctgaa

SEQ ID NO: 936 - DNA, 1157 bp, Cricetulus griseus
ggggacggagctaagaggagttgagttaaaagaagatggatgcacagagttcagctaaagtcaattcaaggaagaggaggaaagaggcatccagccctaatggagcaacagaggaagatggcattccttctaaagtgcagcactgctcagttggtttacggcagccggctcctttttctgatgaaattgaagttgactttagtaaaccctacgtcagggtaactatggaagaagcctgcagaggaactccttgtgagcggcctgtgagagtttatgcggatggaatatttgacttatttcactctggtcatgcccgggctctgatgcaagcaaagaaccttttccctaatacctatcccattgtgggagtctgcagtgatgagctcacgcacaacttcaagggcttcactgtgatgaacgaaaacgagcgttatgacgcggtgcagcactgccgctacgtggatgaggtggtgaggaacgccccctggacgctgacgcccgagttcctggcagagcaccggattgatttcgtagcccatgacgatatcccctattcttcggcagggagtgacgacgtgtataagcacatcaaagaagcaggcatgtttgctccaacacagaggacagaaggtatctccacatcagacatcatcacccgcattgtccgtgactatgatgtatatgccagacggaacctacagaggggctacactgccaaggagctcaatgtcagctttatcaatgagaagaaataccacttgcaagaacgggttgataaagtaaagaagaaagtgaaagatgtggaagaaaaatcaaaagaatttgtgcagaaggtggaagaaaggagcattgacctcatccagacgtgggaagagaagtcccgagaattcattggaagtttcctggaaatgtttggtccagaaggagcactgaaacatatgctgaaagagggaaaaggtcggatgctgcaggccatcagtcccaggcagagtcccagcagcagccctactcatgaacgctccccctccccctcctttcgatggcccttctctggcaagacgtccccatcttcctccccagcaagtctctctagacacaaggctgtgacctgtgacatcagtgaagacgaagaggactaacttttcatgcccgctccc

SEQ ID NO: 937 - DNA, 340 bp, Mesocricetus auratus
ggatattcctgcctggtaacctgattcggccgaagaagttttaatgctccattttgcctaaacacaatcttcctcaccattctctccctctccagggagtagagacatgtggagagcttactctgacatgagagaggccaactggaaaaactcagataaatacttccatgcccgggggaactatgatgctgccaaaaggggaccaggaggagcctgggctgctaaagtgatcaggtaacagaggccccagtgagcagagctgactgctttagacagttaggaggcaggtgtcctccgcatcccgtgcacgctgcccgttagccctccccctctccgtgcg

SEQ ID NO: 938 - DNA, 413 bp, Mesocricetus auratus
cagcctactcctaggctactctcgcggccacctctgggggaggaacccggagggtgggactactgccttccgcgtggttatggctcttcttcttgtctgtcttgaatacagtgatgccagagagggtattcagaggttcacaggacgtggagcagcggactcgagagctgaccagtttgccaacaaatggggccggagtggtaaagacccccaccactttcgacctgctggcctgcctagtaaatactgagtttcatcttcatgctattaacagccatgcagcccccaaggttgcatttactagattaagttagttcccgagccccggacgtccaagcaccccgaaatttagaataaatacccgtgaaatgccaccatgtcactgcattttgtaacgagccattagggaagtg

SEQ ID NO: 939 - DNA, 3442 bp, Mesocricetus auratus
  misc_feature (34)..(63): n is a, c, g, or t
  misc_feature (292)..(307): n is a, c, g, or t
  misc_feature (2586)..(2606): n is a, c, g, or t
  misc_feature (2622)..(2648): n is a, c, g, or t
cgcggaggagatggccttgtccaccgtggagagnnnnnnnnnnnnnnnnnnnnnnnnnnnnnngctggagcgggacgccgaagtggaggaacgcaggtcctggcaggaacacagttctctgaaagagctccagagccgaggggtgtgtttgctgaagcttcaggtatccagccagtgcaccgggctgtacggacagcggttggtcacctttgagcccaggaaattggggcctgtggtggtgcttcccagcaacagcttcacatccggggatattgtgggtctgtatgatgcnnnnnnnnnnnnnnnnctggccactggggtcctgacccgcatcacccaaaagtcagtcacagtggcctttgatgagtcccatgatttccagttgaacctggaccgagagaatacgtacagactgctgaagctcgccaatgatgtcacgtacaagcgactgaaaaaagcgctgatgacactgaagaaataccactctgggccagcgtcctcactcatagacgtccttttgggtggctcctccccgagtcccaccactgaaatacccccattcactttctacaacacggccctggacccttcccagaaagaagctgtgtcttttgcactggcccagaaagaagttgccatcatccatgggcctcctggcaccgggaagactacaactgtggtggaaataatcctccaagctgtgaagcaaggcttaaagattctgtgctgtgctccctccaacgtcgctgtggacaacctggtggagcgtctggctctgtgtaagaagcggattctgcgcctggggcaccccgcccgcctcttggagtccgctcagcagcactcactggatgcagtgctagctcggagtgacaacgcccagattgttgctgatatcagaaaggacatcgaccaggtctttggcaagaacaaaaagacccaggataagagagagaaaagtaattttcgaaatgaaattaagctactgaggaaggaactgaaggagcgagaagaagcagccatagttcagagcctcactgctgcagacgtggtcctagccaccaacacaggtgcatcttccgatggccctctgaagctgctgcctgagaaccactttgatgtggtggtggtggacgagtgtgcccaggccctggaagccagctgctggatccccctgctgaaggccccaaaatgcatcctagccggagaccacagacagctgccacctaccaccatttctcacaaggcagcactggctgggctgtcccgcagcctgatggagcgtctggtggagaagcatggcgctggtgcggtaagaatgctgacagttcagtaccgaatgcaccaggccatcactcgctgggcctcggaggccatgtaccatgggcagcttaccgcccatccctctgtggcaggacacctcctgaaggacctcccaggtgtggctgacacagaggagacaagtgtccccctgctgctcatagacacagccggctgtggactgttggagctggacgaggaggacagccagtccaagggaaaccccggcgaagttcgcctcgtcactttgcacatccaggcactggtggatgctggggtccatgcaggtgacattgctgtcatcgcaccctacaaccttcaggtggacctgctcagacagagcctctccaacaagcaccctgagctcgagattaagtctgttgatggcttccaaggccgagagaaggaggctgtgatcctgacctttgtcaggtccaacaggaaaggtgaagttggttttctggctgaggacaggcggatcaatgttgctgtcacccgtgcccggcgccatgtggcagtcatctgtgattcccgcactgtcaataaccatgcctttttgaagaccctggtggattatttcacagagcatggggaggtacgcacagcctttgagtacctggatgacatcgtccctgagaactacacccatgagggctcccagggccacagccatgctcccaagcccaggggccctgtcacctccatcaggaagcctaccaatgagcaggagaatggccaagaggccagagcagctgctggacagggccgcaggaagccgaacgagaggcccccgggctctcaggtccactcccagcccagctctggtgcgagaggctgtgatagaactggagcaatagaccgcacagagcactttagggccatgatcgaggggtttgtggccagcaaggagtcacagttggagtttcccgcatccctgagctcccatgacagactactagtccaccagatagctgaggagcatgggctaaggcacgacagcaccggggaggggaaggcccggcacatcactgtgagcaggaagagccctgcaggttctggcggtgtggccccacagcttccttcaccccccagccctgcacaggctgagcctgaaccactgtcacaacagccccttgggcagccacattgctccacacagctggatctgaaggcactgcacctgcagaggctgcagagacagcagggcagccaagcccaacccgccaaggcacagccaggtgtgggtttgcatccacagaagactcaacnnnnnnnnnnnnnnnnnnnnncaaaaggtccagctcnnnnnnnnnnnnnnnnnnnnnnnnnnntggtgtcagctgtgattaaggctgacaacacctgtagctttgccaagtgcacggccagcaccaccaccctgggccagttctgcatgcactgtagccgccgctactgcctcagccatcacctgcctgagatccacggctgtggtgaaaaggctcgcgcccatgcccggcagatgatcagtcgggaaggagtactctatgcaggcagtgggaccagggatagggctctggacccggccaagagggcccaactgcagaggaggctggacaagaagctgggtgagctcagcagccagaggacaagcaagaggaaggagaaggagagggggacatgaggcgatgtccccatgcagggccgagtggggcagagggccagggcctgtgaccagcttcctcggcagcaggtggaacacagtccagcactagccatttctatgctcattctggcatatccccctatttctcagtgacaagggtggtgttctcaaagagacctgcttggtcttagactccatcagattaactgcctgactgcccagaccccattaatgctgctcaggtgcgtgtcctgagaagtgagtgccgtgcatggctagctggccatggccacctccatcctgtcttcaatgacacagtgggcataaagtgtgtgctctggggataggagggtggctgctccagggctgggaggctcctagcctgtgattgcctgcactctgctgctgcttggtgactggtgagaaggagccatcccagggcacctcactgctcacctcacaaagtctgcatcctctcca

SEQ ID NO: 940 - DNA, 2147 bp, Cricetulus griseus
  misc_feature (603)..(652): n is a, c, g, or t
  misc_feature (1803)..(1948): n is a, c, g, or t
aatcgggacaggcgctgccggccgcagggtcccctccgtgccggcgccgcagctgccgggcctctcgagtcggtggacgcgtcctcccgccggcctcgcaaccgccgcaccccggcctcggctgcgtcgcgccatggcggcccctggcgccccgcggtcgctgctcctgttgctgctggcaggccttgcacacggtgcctcagcattgtttgtggtgaaagacagcaatggcacagcttgtataatggccaacttctctgcctccttcttcaccatctacgagactggacatggttctaagaactcaacctttgaactgccgtcctctgcagaagtactgaatagtaacagttcttgtggtagagaaaatgtttctgaacccatcctcacaattgcttttggaagcggatatttattgacgctcaacttcacaagaaatgcaacacgttacagtgtccaggacatgtattttgcttataacttgtcagacactcaacatttcctgaatgccagcaacaaggggatccactctgtagactcctcaactgacatcaaggcagacatcaacaaaacataccggtgtttgagtgctatccaggtccnnnnnnnnnnnnnnnnnnnnnnnnnnnnnnnnnnnnnnnnnnnnnnnnnnctgttgaatagcaacttcagcaaggaagagacacgctgcacgcaggatggaccttccccgaccactgtgccgcctagcccctcaccaccacttgtgcccacaaaccccactgtgattaagtacaatgtgactggtgaaaacggaacctgcctgcttgcctctatggccctgcagatgaacatcacctacatgaagaaggacaacatgactgtgaccagagcattgaacatcagcccaaatgacacagctagtgggagctgcagtcctcatgtggtgaccttgacagtggagagcaagaacagtatcctggatttgaagtttgggatgaatggcagttctagcctgtttttcctacaagaagtccggttgaacatgactcttcccgatgccaacgtgtcgtcactcatggcctccaaccaatcactgagagctcttcaggccacggtcgggaactcctacaagtgcaacaccgaggagcacatctttgtcaccaaggagttttccctcaatgtcttcagcgttcaggtccaggctttcaaggttgaaagtgacaggtttgggtctgtggaagagtgtatgcaggatggtaacaacatgctgatccccattgctgtgggtggtgccctggcagggctcgtcctcatcgtcctcatcgcctacctcatcggcaggaagaggagtcatgccggctaccagaccatctagccggtggacaggcgggtgcgcgtgcgccagacgcacaggggcctgttcttatgtccccgagcttagataggtgtggaagggaggcacactttctggcaaactgttttcaaatctgctttatcaaatgtgaagttcatcttgcaacatttactatgcacaaaggaataactattgaaatgacggtgttaattttgctaactgggttaaatattttgctaactggttaaatgttaatgttaccaaagtagagctctaaggaggacaagaaggctttcagaatcgcacggctcccccatttgacttttttaagacttggtgtttggtttcttcatcctgttactcagatttaagccttacaaagggaatctctggcctgacacttgggcgtggtaagggcggctgatctttaggctgcacgctgaagatgctagaagggaagagcaggnnnnnnnnnnnnnnnnnnnnnnnnnnnnnnnnnnnnnnnnnnnnnnnnnnnnnnnnnnnnnnnnnnnnnnnnnnnnnnnnnnnnnnnnnnnnnnnnnnnnnnnnnnnnnnnnnnnnnnnnnnnnnnnnnnnnnnnnnnnnnnnnnnaaaaaggcattatttttatttactttttgtaaagtgatttccagtcttctgttggtgttgagggtggccccgtttctgcactgtgtacaataaaagattcacactgctgacctgtcctgccgcataggtgggttgtacactgaggaccagctcacgtaatgcattgcctgtaacgatgctaataaaaagtctccttctt

SEQ ID NO: 941 - DNA, 2460 bp, Cricetulus griseus
atgatggatcaagccagatcagcaatctctaacttgtttggtggagaaccattgtcatacacccggtttagcctggctcggcaagtagatggagataacagtcacgtggagatgaaattggctgtagatgaagaagaaaacactgacaataacatgaaggccagtgtccgaaaacatagaaggcttaatggaagactctgctttgggacaattgcagtagtcatctttttcttgattggatttatgattggctacctaggctattgtaaacgcacagaacaaaaagactgtgtaagactggcagaaacggagacaggcaattcagaaatcatccaagaagaaaacattcctcaatcttctcgcttatattgggcagacctcaaaaaactgttgtcagagaagctggatgccatagagttcactgacaccatcaagcagctgagccagacctctcgggaggcaggatctcaaaaagatgaaaatcttgcctattatattgaaaatcagttccgtgactttaaactcagcaaagtctggcgagatgaacattatgtgaagattcaggtgaaaggcagtgctgctcaaaacgcggtgaccataataaatgtaaatggtgactcagacctagtggagaatcctgggggctatgtggcatatagtaaagctacaacagtttctggtaaactgatccatgctaattttggcactaaaaaagactttgaagatttaaagtatcctgtgaatggatctttagtgattgttagagcagggaaaatcacttttgcagaaaaggttgcaaatgcccaaagctttaatgcaattggtgtcctgatatacatggaccagactaaattccctgttgttgaagcagaactttcactctttggacatgctcatctaggaactggtgatccatacacacctgggtttccatctttcaatcatactcagtttcctccatctcagtcatcaggattacctagtatacctgttcagacgatctcaagaaaggctgcagaaaagctatttcaaaacatggaaacaaactgtcctcctagttggaacacagattctttgtgtaagctagaatcttcacagggtataaatgtgaacctctctgtgaacaacgtgctgaaagaaacaagaatacttaacatctttggagttattaaaggatttgaggaaccagaccggtacattgtagtaggtgcccagagagatgcctggggtcctggtgctgcaaaatccagtgtgggaacaggtcttctgttgaaacttgcccaagcattctcagatatggtttcaagaggtgggtttaaacccagcagaagcattatctttgccagctggagtgcaggagacttcggagctgttggtgccaccgagtggctagagggatacctttcatctctgcatttgaaagctttcacttatattaatctggataaagttgtccttggtactagaaacttcaaggtttctgccagccctctattatatacacttattgagaagacaatgcaggacgtaagacatccaattgatgggaaacctctctatcgagacagcaattggatcagcaaagttgaggatctttcccttgacaatgctgctttcccctttcttgcatattctggaatcccagcagtttctttctggttttgtgagaatgaggactatccttatttggacactaatttggatacctatgagaaactaattcagaaagttcctcagctgaacaaaatggttcgtgcagcagcagaagtagctggtcagttcataattaaacttacccatgacattgaactgaacctggactatgatatgtataacaacaagatactgtcatttgtgaaggagctgaaccaattcagagcagatatcaaggcaatgggtctgagtctacagtggctgtattctgctcgtggagactttttccgtgctacatctagactgacgactgatttccataatgctgagaaaacaaacagatttgtcgtgagggaaatcaataaccgtattatgaaagtggaatatcacttcctgtcaccctacgtatctccaagagagtctcctttccgacacatcttctggggttccggctctcacactctcacggctttagtggagaacttgaagcttcgtcagaaaaacagtagtgcttttaacgaaacactcttcagaaaccagttggccctagctacttggactattcagggagttgcaaatgccctctctggtgacatttgggatattgacaatgagttttaaatgtaacataattaaataagagcagggcagtctgtttctagacttgtactggttgtgctaaattttcattagagctcaaatctaatgttataattctacccgatcatcctgatactaaatgtctttaggcagcagcttttagtgcagggttggacctacacttgaagttacagtggataacacttt

SEQ ID NO: 942 - DNA, 2571 bp, Cricetulus griseus
  misc_feature (2377)..(2398): n is a, c, g, or t
ggttatgatgatgagtttaatgccgtggactttaagtggtaccttcttcatcaacactgagagagatgatgactatgctggctttgtgtttggctaccagtccagcagccgcttctacgttgtgatgtggaaacaagttacccagtcctactgggacaccaaccccacaagggctcagggatactcaggcctgtctgtaaaggttgtgaactccaccaccggccctggcgagcacctgcggaatgctctgtggcacacaggaaacacccctggccaggtgtgcgcaccctgtggcatgaccctcgtcacataggctggaaggatttcactgcttacagatggcgtctcagccacaggccaaagacaggttacatcagagagtggtgatgtatgaaggaaagaaaatcatggccgactcaggacccatctatgataaaacctacgccggtggtagactaggcctgtttgtcttctctcaagaaatggtgttcttctcagacatgaaatacgaatgtcgagattcctaagcatcagctgtcaatcataaccagcgctggtactgcaccttctggaaccaaggtctagagaaaaccccctgccagcagccacttctcgccttccttgcttctcttcttgcatagtgtggacttctaagagcaggtgacctgcctcaagaaaatgcagtccagactcagcactctcagctcacggatgagacagtctcagactcaagatcatgaaccatgaagaatgactttggtttgcttttgtgaaagcaaacacatctatttacttcccaccaggaaggtgcccactccactctgccttgcccacagagccagggctcctgtgaggtcatcttggagcagcactttcagaagcattttcaggcatgtcagagggagaaggacccactaggactcagcaccgagccacccctgacagaagtctcaggggtggggaagcaggaagccaaagctgtctagggagggtggcatagctcaagagaccatgtatgaagaaaatatgagagctgttacttgttcggtactaaatcattttcaggggacagaaagacttgctgcatttcctttatgctgactcgtggagttaacccaaccatcgatacaggcacttgagtaacaggaagggagggaaagcctggcttctggacttcctccctttgggcacttctcacacacctgcagtggccagggtgggggtcaggagtgtaaggccatgctggctgcccttggctggtcacgcttggaactcttggtttattctgcatacaatgtgcagccaggagagctagagaagcagaccatctcagtgagctctagctcctctgcaggagggcagcatgcctttattttatggttagaaaggctaaatttctatcaacctagctaaaacattccttttccttgtttcttttttcctcccgttaccatggtgcaaaccagcccgagcgatcgacccgttgtacagccttagcattcccctctcgagcctgcgctggaaggatgttctgcaaacaggagcgtggactatctgaaccatcctcatagtgagtctttatgactgtaagattgtaaatacagattatttattaaccctgttctacctggaattagattgcatatggcaaatgtttgccagcaggtagctgaggcggatcagcaaattgctccagaaccagtgtgtggaatgaccaacagaagtcatcacttttcatttggggcttagagtgatgatttggactcctttggctttcccctttcttttctcgttcgtgtaggaattaggtggcggtcccattgcattcagagagtagagtaaaggaagccagaagtcgatcgtacacactctggcattgacagagaaactataagcctctttattacgagaaagcgatacaaacatgtttctttagttcattattttcccaaaagagtcaaaggtggaacttatatacaaatattacctcatttgttgtgtgactgtgtaaagaattttgcaacaagtagaaagagtttaagtgtcaaaaaacttaaaactactgctgtgtctaaaaagtcagctgttgtacctagcataaaaatcctttgcagaagatgatcccaataaagaatagctttgaaagttaaatacaacttctcaaagttactgctttcgttctatcatctttggtaccgttgcttttatttttataattattttctcattgccattggaatagagatctcagacatgtagatatgctatttaaataatttatcaggaaatactgtcatgtagagtattctatttttatacgtttgcacactgaattgaagaaatgttggttttccttgttttagtttagtttgtttcnnnnnnnnnnnnnnnnnnnnnnctttttactccccagttttactattttgccaatacccttttttttcctaggaatgtgcttttttttgtacacatttttattcattttacattctaaaacagtgtaacttgtatattactgtttcttatgtacaaggaacaataataaatcatatggagatttatatttataaa

SEQ ID NO: 943 - DNA, 4436 bp, Cricetulus longicaudatus
  misc_feature (891)..(918): n is a, c, g, or t
  misc_feature (2095)..(2124): n is a, c, g, or t
  misc_feature (3788)..(3817): n is a, c, g, or t
  misc_feature (4383)..(4397): n is a, c, g, or t
tgacaatcactgttaaccatcacaatcgaagcctaaacttgaatgttgcacttttgtccttgttgctattttgcaggactagggataaaattttgggcctgggcctggagcatgctaggaaactgctctaccattgagctagactcctaggcccaatgttgagaaactctttaacaagcacatcccatgtaaagatttaaagtacaggtatgaggtacactaacgccctagggtgaaccatacactgacactcgttcctttactcaacattgcttctccgtgacaaagcccttagggaatgaatacaaagtctatctccaataaatgaactagaaaaccaacctatcacttttccattaagagcaaggaaattggaaaatattttgtccacaagagaaaaattgaaggatgcaaaattcatatgtacccctgcaaaatttacttctgctaactattagctgcacagtgacctcaaaataagcactgttatgaattcaaacagatgagaggcaattttgttacttcagttggatcaggcaatgcttttgtatttatcaaataagctcataaaacaaagggacttttgaagtactcagtaaaagtctacattaaaaattgtttttaatgtgtgactcctgcttgcagttatgaaggtttgccttccacctacaagttgccattatctcaaaggtgaaattttagcacatggctaaaatgttctatagttacagcttcatgattcagcatcagtaattcagagtgagatcataggcagtggaaggtggtgtcatactcttttgcctgtgaaggggcgaccagggaatggcataagcatattgaatttagactgtggctcctgtgagtaccacaatttgtctctcagctcttgcnnnnnnnnnnnnnnnnnnnnnnnnnnnntttaagaatggtaaatttggctcattaggcatgttgatcaccagctccccccacccaccttatatggagtgggcagaagttttatcagcttttcgtggaaaagattccaacttggtaccgtgccatcaccacacaccagtgtgctgggttttctatttggagcttcaaattcttgcacccaaccaaaaataaatcaagccagccatcagggcaccaaaagaatactactgtgaaaaatcagcattgcctgaaacttaacatataaacaacacttctgaagcaagttttgcgtggcacatccggacactttaaaaataccatctgcttactaataacagctaccagggtgcattaaccctggaaataaattgtaaaatcagccccttaacacaaacaacacgagacgaccatcaaaagatctccacaactagaaaaacaattggcaggctgttttcagtacgagctgaggacactggaaccaccaccgcaaagccctcctcaccagatggctccaccaactcccagagctgctcaggaccccgccaacccggtttctgcaccactctcatccctgggggcttccctcccgcgtactcgcccccttccgctcaactctgcctgggctggtggagttagggtctgagtgtcaaagtctgctaatttgcataagccaatgggtgcattgcatgcaaatgaggcgggccctgattggctgacggctagccccataactccggaatcgggggcctttgtcctccagtggcccggaggaagctgtgcagtcctcacctaccgagacttaggcgagaagcggcgaagcggcgggtgggagccgagcgagcgcggggctggcgccgcgcactggggggggcaggagcagcccgcgcgccgcgtgagggactcgcacttgcaatatgactttggaggaattctcggccgcagagcagaagaccgaaaggtaagtgtgcctgcggactctgtggccgctgcccctcccgccgtcggggacccggctgacccactctcgccctgccgcccgcaggatggacacggtgggagatgccctggaggaagtgctcagcaaggcgcggagtcagcgcaccatcaccgtcggcgtgtacgaggccgccaagttgctcaatgtgtaagtggtcccggccgcccgcgcccctgcctnnnnnnnnnnnnnnnnnnnnnnnnnnnnnntctaccccgagctccctggacagtgtgcactcaccgctgccccgctgtccgcagcgaccccgacaacgtggtactgtgcctgctggctgcagacgaggacgacgacagggacgtggctctgcagatccattttaccctcatccaggcgttctgctgcgagaacgacatcaacatcctgcgggtcagcaacccgggccggctggctgagctgctgctgctggagagcgacgcgggcccggcggagagcgggggtgcctcgcagccccctgacctgcactgcgtgctggtgacggtaagggacccggggctgcagcccggaatctgttgggatagacctcggcagtgctagacgctgatctcgcgggggttctgatggtaccgagcgtgtctaagctcgtgggtggcctccagcggcggaagatagccctgtgagtcagcaggctgcccagctacctctgcctacctctgcactacctcgcgtgactattctcagagcaggacagattagataaagccaaataaattcccggctcacccttcattaagaagtcagcttcattcttcatttgctctcaaagctaaatatagaaatagagtaggagacagaccttattaattcgctggagatactctggtgtgtacagagtggaattcttttctctgaacctttgtatttgtttagatgagcccccccccccacgcacacacacacacaaacacacgccctttaaaaatttctggttgaataatgttttcagagagaaatgtgctgtcttggtcttctgtttttttgtttttgtcctttctctgccttgactggtgtaggcaagtggcaccctgattacttttgctgccagtgaaaagtgccattcatcaccagggaagataagagtgaagctaagctgcctgccctgcagctttcacatggtgtgcgagaatgttttcagagctattttacttatgaccctactagggtgcatgcttgataggttcaacttatgaatgataacctcatgcagaatggtacagataattatgcaaaactctgtggcccagtgtgcattacaggtgtttagatcttgccaaatgctacttaacagaatgctcaggttttggccctttcaaaagtagtacaattagtagcataagctgatgattttatggaaaagtaatttttctaaatttgttcttagaacccacattcatcacagtggaaggatcctgccttaagtcaacttatttgcttttgtcgggaaagtcgctacatggatcagtgggttccagtgattaatctccccgaacggtgatggcatctcaatggaaataactgaaccaaattgcactgaagttttgaaatacctttgtagttactcaagcagttactccctacgctgatgcaaggattacagaaactgatgtcaaggggctgagtgagttcaactacatgggggctaggagatgactttgcagatggacagaggtgaaaataaagaaggaagctgtgttgaaacagaaatctaagtcaaaagggacaaaaactacaaagaactgtgcaagaaagaaaactgttgatttaggatggctgagttacattaaataagccaaatattgctttgttgaaaccttaaatgtgtagcaatagtttgttttttttttgtatttgnnnnnnnnnnnnnnnnnnnnnnnnnnnnnntgatctttatgccctcaagtaaaaggaaagtgaaaaggattaattgtattttaaagctacaggttaatgtattttgatgagatgttaaattctcagaaattttattataaatcggactaagttattttatgatatgaaaggttatttatgataaagtttttgaagcacaatatctaaaataaactggtatggaataattgcatcattttcactgtgtggtttgtgttgtgcaacattgactattaacagacatttcattgaagccttgctttacactaggcagaaaaatgggtgattttagagggcttggataagggaaaaaaatgtttacggattccccttgcaaagtttgaataactacaattagttattttaatgctacaaaaatgcatgcaaaatgtagaagcagagaggagggcaaccagggccacttggaagattagtggagcttttgctgaggagaaatcattttcttggggtcttaagaaataaccttaatttctctagttagagagaggaaagggatgttgctaacagcagtttgtgcagaggtgtggaggcctgannnnnnnnnnnnnnncatagagactgactctgcatgcctctggtgtagaaagat

SEQ ID NO: 944 - DNA, 1550 bp, Cricetulus griseus
  misc_feature (113)..(132): n is a, c, g, or t
ttattatttttaattgtgtgtaggtgtataagtgcctatgtgggagtatgtatacatgcatgtaggtacctgaggaggtcagaggttttggagccccttaaagctggagttannnnnnnnnnnnnnnnnnnnaggttaagagcactgactgatctttgacaaacctgagaaaaacaagcaatggggaaaggattccctgtttaataaatggtgctgggaaaactggctagccatatgtaaaaagctgaaactggatcccttccttacaccttatacaaaaatcaattcaagatggattaaagacttaaacgttagactgaaaaccataaaaaccatagaagaaaacctaggcattaccattcaggatataggcatgggcaaggacttcatgtctaaaacaccaaaagcaatggcaacaaaagccaaaattgacaaatgggatctaattaaactcaagagcttctgcacagcaaaacaaactaccatcagagtgaacaggcaagccacagaatgggagaaaatttttgcaacctacttatctgacaaagggctactatccggaatctgcaatgaactcaaacaaatttacaagaaaaaaacaaacaaccccatcaaaaagtgggcgaaggacatgaacagacacttctcaaaagaagacatttatgcagccaaaaaacacatgaaaaaatgctcaccatcactggccatcagagaaatgcaaatcaaaaccacaatgagatatcatctcacaccagttagaatggcaatcattaaaaagtcaggaaacaacaggtgctggagaggatgtggagaaataggaacacttttacactgttggtggaactgtaaactagttcaaccattgtggaagtcagtgtggcgattcctcagggatctagaactagaaataccatttgacccagccatcccattactgggtatatacccaaaggactataaatcatgctgctataaagacacatgcacacgtatgtttattgcagcactattcacaatagcaaaggcttggaaccaagccaaatgtccaacaatgataaactggattaagaaaatgtggcgcatatacaccatggaatactatgcggccataaaaaatgatgagttcatgtcctttgtagggacatggatgaaattggaaatcatcattctcagtaaactatcgcaagaacaaaaaaccaaacactgcatattgtcactcataggtgggaattgaacaatgagaacatatggacacaggaagggaaacatcacactctggggactgttgtagggttgggggaggggggagggatagcactgggagatatacctaatgctagatgacgagttagtgggtgcagggcaccagcatgtcacatgtatacatatgtaactaacctgcacattgtgcacatgtaccctaaaacttaaagtataataataaaaaaaaaaaagaataatggccagggtttgatggacaaggtgcctggggaatctgggtttttctgccttaactcttcaccttattcctggtcacattctaggcatag

SEQ ID NO: 945 - DNA, 1550 bp, Cricetulus griseus; identical to SEQ ID NO: 944
  misc_feature (113)..(132): n is a, c, g, or t

SEQ ID NO: 946 - DNA, 313 bp, Mesocricetus auratus
cgggccaccccttactccctgcaggagacactgacactggtgtgcctggctggcctgctcatgctgttcacagtgtttggcaacgtgctggtcatcattgcggtgttcaccagccgtgcgctcaaagcgccccaaaacctcttcctggtgtctctggcctcagctgacatcctggtggccacgctggtcattcccttttctttggccaacgaggttatgggctactggtactttggtaaagtgtggtgcgagatctacttggcgctcgacgtgctcttctgcacgtcttctatagtgcacctgtgcgccatca

SEQ ID NO: 947 - DNA, 2088 bp, Cricetulus longicaudatus
  misc_feature (458)..(484): n is a, c, g, or t
  misc_feature (1076)..(1126): n is a, c, g, or t
  misc_feature (1196)..(1221): n is a, c, g, or t
  misc_feature (1346)..(1404): n is a, c, g, or t
  misc_feature (1933)..(1950): n is a, c, g, or t
gtggaagattgcatgcgacaccccgcgcgccccccgcatcccttcgtcgggacgctccctgcggccgtctgtgagacctcacgtccccgagccccacgcctgagggcgacatgaacgctctggccttgcgagacctccggacccgagaccgcttctggccacacgaaccggcgctcctgcccccggggtgaagcgcagcccgccgcccagacacatggccccaagcccaagaccccagcatatcctgctctggagggatgcccactccttccacctcctgtctccactgatgggcttcctcagtcgggcttggagccgcctgagggtcccggaagccccagagccctggccggcagaaacagtaactggagcagatcagatagaagctgatgctcatccggcacctccccttgttcctgagaaccacccccctcagggggaggctgaagaaagtggannnnnnnnnnnnnnnnnnnnnnnnnnnggaccctgcctggatgtgcaagccaacagttcccctcctgaaactttgggactttcagatgatgataagcaaggacaggatggccccagagagcagggaagggcacacacagctggcctgcctatactgctgtctcctggtctgcaaagtgctgataagagccttggagaggtggtggctggagaagagggagtgactgagctggcttaccccacatcacactgggagggttgtccatctgaggaggaagaggatggagaaactgtgaaaaaggctttccgagcctctgctgactctccagggcacaagtccagcacttctgtgtattgcccaggggaggcagaacatcaagccacggaggaaaaacaaacagaaaataaagctgacccccccagctctccttcaggctcccactccagagcctgggagtactgctctaagcaggagggagaagccgacccagagccacacagggcagggaagtatcaactgtgtcagaatgcagaagctgaagaggaggaagaagccaaggtttcatctttgtctgtgtctagtgggaatgccttcctgaaggcctgggtgtatcgacctnnnnnnnnnnnnnnnnnnnnnnnnnnnnnnnnnnnnnnnnnnnnnnnnnnngagggtaaggccttgtcttcccctacctctcctgaacatgacttcctgaaggcctgggtatatcgacctnnnnnnnnnnnnnnnnnnnnnnnnnntagtgactggggatcagctgaggaagagggtaaggccttgtcttcccctacctctcctgaacatgacttcctgaaggcctgggtatatcgacctggagaggacacagaggatgaccaagacagtnnnnnnnnnnnnnnnnnnnnnnnnnnnnnnnnnnnnnnnnnnnnnnnnnnnnnnnnnnntgcctttctcaagacctgggtctgttgccctggagaggacacagaagatgacgactgtgaggttgtggtcccagaagattcagaagcagctgacccagacaagagtcccagccatgaggctcagggttgtctgcctggagagcagacagagggacttgtggaagcagagcactctctcttccaggtggccttctatttacctggagagaagccagcaccaccttggactgcccctaagctgccccttcggctgcaaaggaggcttacgttgttgagaacccccacccaggatcaggaccctgagactcctttacgggccagaaaggtgcatttctctgagaatgtcacagtccatttccttgctgtctgggcaggaccagcccaggctgcccgacgtggtccctgggagcagcttgcacgagataggagccgttttgctcgaagaattgcccaggcggaggagaagctgggtccttacctcacccctgccttccgagccagagcatgggcacgccttggaaacccatcnnnnnnnnnnnnnnnnnngcccatctgtgaccacaccttcttcccttcccagtgaagcccctccttccagcctggactgcggtgggaggcgtggctaaacccaagtcgtttcctgttatttattttaataagaaataaagccttttgatttataca

SEQ ID NO: 948 - DNA, 461 bp, Cricetulus griseus
agttaacaagctaaacctgccctgaagggagaaaatgaggaaaccaggcacgtggtctcccggaggggtggtcgagtgccttcctaacattccggcccgggttctgggcagctgcaccccacctacctctgcagacagggtcttccagggcggctcgcgcggggagcgcagaggctgccatagccgggtccagctcagagggcgagcagctcgctttgcagggacagggggagaggggcggggcccacatgcgccctggccttggcacgcctccgtcttcggctgcgattggtcggtgagcttttaaaggaaagcgcgaacctgaggacgcttcccactcaccgaccccggaccttggcgctcaggctcgcacagccgccatgaattacatcaatctgcccaccgtgctgcccggctcccccagcaagacccggggccagatccaggtgcggggtccgggc

SEQ ID NO: 949 - DNA, 1424 bp, Mesocricetus auratus
  misc_feature (304)..(370): n is a, c, g, or t
  misc_feature (819)..(879): n is a, c, g, or t
  misc_feature (915)..(933): n is a, c, g, or t
  misc_feature (973)..(990): n is a, c, g, or t
  misc_feature (1012)..(1034): n is a, c, g, or t
  misc_feature (1089)..(1106): n is a, c, g, or t
atctcttgaccttgagcaacctagctctgtttccctatccgcaaaataggggaatgtctgagaatccattcttaaaataccacttctgagacaaagtcttaaggcgcaatttaaagtcttggctttgaaaaatacctttggattcctgtctttaaaaaaaaaaaaaaaattaccaagtctgactgacagcctgagcccagtcttgagagaagcacttggtggaaagaaagaactgaccactaagagttgtcctctgacctccacagttgtgccatggtatacatagcacacatacacagagatnnnnnnnnnnnnnnnnnnnnnnnnnnnnnnnnnnnnnnnnnnnnnnnnnnnnnnnnnnnnnnnnnnngagacagatagaaatcttaggaaagtcctcctctacggcagtgtaaccatccagacgaggagaagttcatgacaaccgtctgcttcagaggacagagtatcggaaagctggccaatatgtacaaaacttcaccagatgtcatctttgtatttagattcagaacccacttcggtggtggcaagacaacaactggctttggcatgatctgtgattctttagattatacaaagaagaatgagcctacacacagacttacaagacacagcgcctctatgagaagaagaaaaaaagacctcccgaaaacagcgaaagggacacaagatcagaatgaagaaggtcaggggggactgcaaaggccaacgttggtcctgggaaaaagccaaaggagtagatcctgtggtgactgatctgctgtgatgtgcagattctgagaggacaataactaaaannnnnnnnnnnnnnnnnnnnnnnnnnnnnnnnnnnnnnnnnnnnnnnnnnnnnnnnnnnnntccttcaaggaaggaccttgctggcttgatgtcttnnnnnnnnnnnnnnnnnnnattttttgtttttcgagacagggtttctctgtgtagcccnnnnnnnnnnnnnnnnnnctctctacttttttgtttttcnnnnnnnnnnnnnnnnnnnnnnncctggctgtcctggaactcactctctagaccaggctgcctcaaactcagaaatcnnnnnnnnnnnnnnnnnnaaatgctgggattaaaggcatgcgccaccactgcccggcattgatgtcattttaatgtgttcccaaatggcccacatcctagaaaattggtctcctgtgtgtggtgctgatgggggtgaagcctttaagaggtgggacctggtatgaggtcaccacactcaaagatttcatgaggttgtcacaggagcacatgaggctgtctcactggctttggcccttccgtgggtgcttctccaccatgtaataatgttgctgggtagggaagggtttaccagggctggctccgtactcgttggactttgagcacagattgagcaa

SEQ ID NO: 950 - DNA, 542 bp, Cricetulus sp.
tcaggactggttccatgggcggtgtgtgacagtgccccgcctcctcagctcccagaggcccggttttacctcatccccactgctggcctggtgggaatgggacaccaaattcttgtgccctctgtgtatgcgctcacggcgcccacgcttggaaaccatcctggcactgctggtagccctacagagactgcctgtgcggctgcctgagggtgaggctctacagtgtctcacagagagagccatcagctggcaaggccgtgccagacaggttttggcctctgaggaagtgactgctctgttgggacggctggctgaactccgccaacggctacaggctgaatccaagcctgaggaatcccttgcttactcttcagatgctggagagggcgctggccatatacctaaggtccaggggctgttggagaatggggacagtgtgaccagtcctgaaaaggtagccacagaggagggctcaggtaagagagatctggagctactctcctcactattaccacagttgactggccctgtgttggaactgc

SEQ ID NO: 951 - DNA, 2069 bp, Mesocricetus auratus
  misc_feature (372)..(395): n is a, c, g, or t
ttcaaatactacttgtcaacataaagtgactaggcttaaatatacataccacccaaagaaatctgttaaagtggacctctgacaacaggttactttagtctccagcagaggtgcagaaatgccatcggagactgctgtaccgcctccacaccccattcctccggatggaggatggggttgggtagtagttggagcagcctttatctccatcggattttcatatgccttccccaaagctgttacagtattcttcaaagatatccagcaaatattccaagctagctacagtgaaatcgcatggatatcatccatcatgctggctgtaatgtatgcaggaggtcccatcagtagtgtcttggtgaacaactacgnnnnnnnnnnnnnnnnnnnnnnnngagggttgttatgctgtactggaatgatcttggcttccttcagtaacagcgtgttagaactttacctcacgattggcttcatcggaggtttaggattagcgttcaacctgcaaccagccttaacaataatcggaaaatacttctataggagacgacccatggcgaatggcttggccatggctggaagccctgttttcttaagctcactggctcctttcaatcagtacctattcaacagttatggctggaagggaagcttcctgattttgggaggcatatttttgcactcctgtgtggctgggtgcctcatgagacctgtccagacaagtccacgtaagtcgaagtctaaaagtaaagttggttcaagacaagatggaagtatgaagaaagccagtaaggtatcaacagcagagaagattaatcgctttttagatttcagcctttttaagcatagaggatttttgatctacctatctggaaatgtcattatgtttctagggttttttgcccctattatattcttggctccatatgctaaagacaaaggagtggacgaatataatgcagctttattgctgtctgtgatggcttttgttgatatgtttgctcgaccaactggaggattaatagccaactccaagttaatccgtccacgaatccagtacttcttcagctttgcaatcgtgttcactggtatttgccatctcctctgccccctggcagatacctacccagctttggtggtctactctatattctttggctatggatttggaagtgttagcagtgtcctctttgaaactctcatggaccttgttggacctgccaggttttccagtgctgtgggactcgccacaattgtggagtgttgtcctgttcttcttggccctcctcttgctggcaaattggtcgataaaactaaagactataaatacatgtatatagccagcgggacaattgtggtaatatcaggcatttatctgttcatcggcaatgctataaactatagactcctcgccaaggaaaggaaaagagagaaagcaaggaagaagaaatcagccacccatccttccagagaatcggaggctttgagcagatcaaaacaggatgatgtttctgtcaaagtctcaaatccacacaattctccctcagacagagaaagagaaagcaatatttaacatgagtctcatcttcaatcagtgtttatcaatttacttatgagtttctttgtgtttttcaaagtgttgaaaagaattttagctaaaagaaaggatcacaaacagtaacgaaacttgtattttcctcaatgacactctgcaaatcaatattttgacatttgtttggataggtaaattttgagatcgtgaacacaggaaatccatgcagtggcttatttgcatacctgacttggggtgttgtgatgaaaaagaagaatttttaaatctttcactgacatttacttctagctgtagaatgaaatctgcatcccagacccccctggctttcgtaagcatatgtcaattccatagaatgtctctcttcaaagttctttctttttttaatttgatattgttataaaataaattgaggacagcatttctcttcacacacaaagaatcacatatccacactaacactgagtatctggagaccatgaagaaataaatgaatttg

SEQ ID NO: 952 - DNA, 2782 bp, Mesocricetus auratus
  misc_feature (2014)..(2035): n is a, c, g, or t
attgtagaattgcagtttgaaaaagaaaaagtaagcttgaaattagaagaagaaattcaagaaaataaagatttaataaaggagaataatgctacaagacatttatgtaatctgcttaaggaaacctctgctagatctgcagaaaagacaaataaatatgaatatgaacgggaagaaaccagacaagtttatgtggatctaaataataacattgagaaaatgatactagcttttgaggaacttcgtgtgcaagctgagaatgccagactggatatgcattttaagttaaaggaagatcatgaaaaaattcaacaccttcaagaagaatataagaaggaagtaaacgacaaggaaaatcaggtatcactactattgatccaaagaactgagaaagaaaataaaatgaaagatttaacatttctgctagaggaatccagagataaagttaatcagttagaggacaaaacaaaattacaagatgaaaacgtcaaagaattaaataaaaagaaggatcatttaacatcagaacttgaagatactaaaatgtcattgcaaagaagtatgaacactcagaaggctttagaagaagatttgcagattgcaacaaaaacaatttatcagctcactgaagaaaaagaagctcaaatggaagaatttaacaaagctaaaactgatcactcatttatggttactgaacttaaagctactacatgcaccttggaggaattactgagaacagaacagcaaagattggtaaaaaatgaagatcaactgaaaatacttaccatggagctgcagaagaaatcaaatgaactggacgagatgactaaatttaaaaataacaatgaagtgaagcttgaagaattgaaaaaaatattggcagaagaccaaaaacttttagatgaaaagaaacaagttgagaagcttgctgaagaattacaagggaaagaacaagaactaactctccttttgcaaaccagagagaaagaggtccatgatttagaagaacaattacttgtcactaaaataagtgatcagaattattcaaagcaggttgaagaactgaaaactaagcttgaagaagagaaacttaagaatgctgaattaactgctagctgtggcaagctttcccttgagaacaataaattgacacaagaaacaaatgatatggccctagaactcaagaaataccaagaagatatcactaatagcaaaaagcaagaagaaaggatgttgaaacaaatagaaaatttggaagaaaaagaaacacatttaagggatgaactggaatcagtaagaaaagagttcatacagcaaggaaatgaagttaaatgtaaattggataagagtgaagaaaatgctcgaagcattgaatgtgaagttttaaagaaagaaaagcaaatgaagatactagaaaataagtgtaataatttaaggaaacaagctgaaaataaaagcaagtatattgaagaacttcatcaggagaataaggccttgaaaaaaaagagctcagcagaaagcaaacaactgaatgcatatgagataaaggtcaacaaattacagttggaattagaaagtgccaaacaaaaatttcaagaaatgactgacaactatcagaaagaaattgaggtcaaaaaaatatcagaggaaaagcttttgggagaggttgagaaagcaaaagcaatggttgatgaagcagtaaaattacagaaagaaattgatttacgatgccaacataaaattgctgaaatggtagcacttatggaaaaacataagcaccaatatgataagattgttgaagaaagagactcagaattaggactttgtaaaaatcgagaacaagaacagttatctgtgaagactgctttggagactgaactatcaaatatcagaaacgaacttgtatcccttaagaagcaacttgaaatagaaagagaagaaaaagaaaaactaaaacttgaaaaagaaaacacagctattctcaaagataaaaaagacaagaaaatacagacannnnnnnnnnnnnnnnnnnnnnccacttgtcagaaatttgattctaaaacaactccttcacaaaatatatctcggatttcctcatcaatggagagtggcaaaaccaaagataacagagattgtctgcggacatcagcaaaaattttatctacagcattcgtaaaggaatatacagtgaagacaccaactaaaatgcaaatgtatcaaagagaaaacaagtatatacctactggaagaagtaataaaaagagaaaaacagtctttgaatttgatgttaattcagatagttcggaaactactgatctcttgagcatggtttcagaggaagagatatcaaacagactttacaataataattcaccaaattctcatctaacccccaaacagactccattatcactatcaactcctgaatcttttgtgtcacttggaggtgtgagaaaaatgagagaggaccgttgggcaacaattgctaaaactgacaggaaaagaagactaaaggaagcagaaaagttatttgcttaatttcatgaaatcaatgctgatcatagagtctaataacattaaatgtttaactattttattgtttaccagagaccaaactgtactcaggaatttagactttaaaattacttgcataaataatttgtgttcatgttattatatttttggcttaaatatatgttatctgaattttaaaattgtattcagataattacatttgtttttatttgctatggatattaaagttccaagttttttaacttga

SEQ ID NO: 953 - DNA, 2792 bp, Cricetulus griseus
  misc_feature (817)..(834): n is a, c, g, or t
  misc_feature (850)..(868): n is a, c, g, or t
  misc_feature (1895)..(1910): n is a, c, g, or t
cgtcccgtgcgcggtcactcagcgaagatgcctgaggaaacgcagacccaagaccagccaatggaggaggaagaggtggagacctttgcctttcaggcagagatcgcccagctgatgtccttgatcatcaacaccttctactccaacaaagagatctttctgagggagctcatttcaaactcgtcagatgctctggataagatcagatacgagagtctgacagaccctagtaaattagactctgggaaggagctgcacattaatattattcccaacaaacaagaccgaacccttactatcgtggatactggaattggaatgaccaaggccgacttgatcaataaccttggtaccattgccaagtctggcaccaaagccttcatggaggctttgcaggctggtgcagacatctctatgattggccagtttggtgttggtttttacactgcgtatttggttgccgagaaagtgactgtgatcaccaaacataacgatgatgagcagtacgcctgggagtcctcagccgggggctccttcacagtgaggactgacacaggtgaaccaatgggtcgtggaacaaaggttatcttacacctgaaagaagaccaaacggagtatatggaggaaaggagaataaaggagattgtgaagaaacattctcaatttatcggctatcccattactctcttcgtggagaaggaacgcgataaggaagtcagtgatgatgaagctgaagaaaaagaagataaagaggaagagaaggaaaaggaagaaaaaggaatcgacgacaaaccagaaatagaagatgtgggttctnnnnnnnnnnnnnnnnnnaagaaggatggcgacnnnnnnnnnnnnnnnnnnntaaaggagaagtacattgaccaagaagagctcaacaagacaaagcctatttggaccaggaatcctgatgacattactaatgaagagtatggagagttctacaagagcttaaccaacgattgggaagaacatttggcagtgaagcatttttctgttgaaggacaattggaattccgggcccttctctttgtcccaagacgtgctccatttgatctgtttgaaaacagaaagaaaaagaacaacattaagttgtatgtgcgcagagttttcatcatggataactgtgaggagttattccctgagtatctaaatttcattagaggagtggtggattctgaggatcttcctctaaatatttcccgtgaaatattgcagcaaagcaaaattttgaaagttatcagaaagaatttggtcaggaaatgcttagaactatttcatgaactggcagaagacaaagagaactacaaaaagttttatgagcagttctctaaaaatataaagcttggaattcatgaagactctcaaaatcggaagaagctttcagagctgttgcgatactatacatctgcttctggagatgagatggtttctctcaaggactattgtaccagaatgaaggaaaaccagaagcatatctacttcatcacaggtgagaccaaggaccaagttgctaactcagccttcgtggaacgtcttcggaagcatggcttagaagtaatctatatgattgagcccattgatgagtactgtgtgcaacagctgaaggagtttgagggcaagaccttggtgtctgttaccaaagaaggactggaacttccagaagatgaagaggagaaaaagaaacaggaagagaaaaagaccaaatttgaaaacctctgcaagattatgaaagatattttggagaaaaaagttgagaaggtggtcgtatcaaaccgattggtgacgtccccttgctgtattgtcacaagcacatacgggtggacagcaaacatggagagaatcattaaagctcaagctctcagagacannnnnnnnnnnnnnnncatggcagcaaagaaacacctggagataaaccctgatcactccattattgaaaccctacgacaaaaggcagaggctgacaagaatgacaagtctgtgaaggatctggtgatcttgctgtatgaaactgcactcctgtcttctggtttcagtctggaagatccccagacacatgctaacaggatctacaggatgatcaagcttggtctaggtattgatgaagatgatcctactgtggatgataccagtgctgctgtaactgaagaaatgccacccctggaaggagatgacgacacatcacgcatggaagaagtcgactaagcttcaccagagctatatgtttgatgcttactttcattccttctgataatatattttcaaggatttttgtttgatttttgttaacatttaaaacatctgtgtggcatgttttctaaggggaagaaaaatttctttctacttgtgatactgtgatactctaggcttgactcaacgggttggtagtacatttgtgtaagacaaaatgtaacctattaacttgtggtctgcagtgtttagctgttgagctgattccttagtagaccaaatttgtcacttttggaagtgttctaagatagcttcatgtttaaaaggaaaaagattaagatgggcctaagtttcatcttaaaattttcatcccctgtagttaattctgcatgtactagtcttagaagtaaatacacaagctaaaacaactgaggaattccccatgtggcttgttttcaaagtactgagaacaaaactaagcttccctaggtcttgtaagtgagcaaggcttgtgaatggaaatatagtgcccaatcacattctgctttaaaaggtaaatacagatgagataaaaacct

SEQ ID NO: 954 - DNA, 1211 bp, Mesocricetus auratus
  misc_feature (888)..(902): n is a, c, g, or t
  misc_feature (1120)..(1158): n is a, c, g, or t
cagtcccagagccttcggggactgagctggacagacgctcagtcccagagccttcggggagggccaagagctttcaacttggggggggggtccacaggagcaggcgcgtcgtcattggccggggcggggcggggggtgtcccattggccccgtccggaccgcctcgtgattggctcctccctcggctataaggcggcgaccggctggtccgtgggagcgcgcgggagcgcacggcgggggcggcggctcggggaagcaggcgagcggaggcccgtggccgggcgcccatggcgttcgcgctgctgcgcccggttggcgcgcacgtgctgtactcggacgtgcggctgctgagcgaggacgaggagaaccgcagcgagagcgacgcctcggaccagtcgttcgggtgctgcgaagggctggagacgacgcggcgcggcccaggtcccgggggcgggcggcgggcaagcagcggcgcgggcccggtggtggtggtgcggcagcgacaagcggccaacgcgcgcgagcgagaccgcacgcagagcgtgaacacggccttcaccgccctgcgcacactcattcccactgaaccggtggaccgaaagctgtccaagatcgagacgctgcgtctggcgtccagctacatcgcgcacctggccaacgtgctaatgctgggcgacgcagccgacgatgggcagccgtgtttccgcgcggcgggcggtggcaagagcgcggtccccgccgccgacggccgtcagccacgctccatctgcaccttctgtctcagcaaccagcgcaaagggggtagccgtcgtgacctggggggcagctgcttgaaagtgaggggtgttgcccccctcagagggcctcggcgatgagcctggtccctgnnnnnnnnnnnnnnngaaggactccagagaaagaggctaggagccagcccctcactggacagaggagaagattccagaagcccaaaccactcctgctttgtgtagggaccagaggacaatggcctggacacagggcccaccctggagagccatgaggacccaactagccattcaggcccagctggccaaggacaaggcagaaagttcagaaaaccaaagactatttttgaaannnnnnnnnnnnnnnnnnnnnnnnnnnnnnnnnnnnnnntaatgtgatatgtgagagaatttggtggggttaaaataaaggtatttttaaat

SEQ ID NO: 955 - DNA, 253 bp, Cricetus cricetus
acatggagtgggggcctttggggacgatgctcactggcctactcagcacctgcttgatgctagtgtggaccaggcatccatcaatccaggcaaacagaggtatggctagtaggcccaggcagtggtggtgagcaggggctgcaccagcgagcatagctgacggggcctctgctttcacgtggacacgcacgcgccttcatgcaggtttgagaagatgatcagtggcatgtacctgggtgaaatcgtccgcaac

SEQ ID NO: 956 - DNA, 1603 bp, Mesocricetus auratus
ataacaacctaattgtttcctaacagtccagcagcccttcctagggtcacctgcatcatacccaaccccacttcgatctccttcctgtgttgaccatgcctgggtggagctgcctggtgacaggagcaggagggtttctgggccagaggatcatccgcatgttggtgcaggagaaagagctgcaagaggtcagagccctggacaaagtcttcagaccagaaaccagggaggaattctgtaagctgcagacaaagaccaaggtgacagtgctggagggtgacattctggatgcccagtgcctgaggagagcctgccagggcatctccgttgtcatccacactgctgccgccattgacgtctttggtgccattcccagacagaccatcatagatatcaacctgaaaggtaccctgaacctgttggaggcctgtgtccaggctagtgtgccagccttcatctacaccagctcaattgatgttgcggggcccaactcctacaaggaaatcgtcctaaatggccatgaggaacaacagcatgaaagcacatggtctgatccatacccatacagcaaaaagatggctgagaaggcagtgctggcagccaatgggtcctccctgaaaaatggtggcactttgcatacttgtgccttaaggcctatgtacatctatggagagaaaagtccattaatttctgtcacaataatcagggccgtcaaaaatagtggtattctggatgttactggaaaattctccacagtcaacccagtgtatgtgaataatgcagcctgggcacacattctggctgccaggggcctacaagaccccaggaagtcaccaaacatccaaggacagttctactacatctcagatgacacccctcaccaaagctatgatgatttaaattacgtcctgagcaaggactggggcctccgccctgattccagttggagacctcctgtggccctgctgtactggcttggcttcctgctggaattggtgagcttcctgctgcgtccggtctacaactaccagcctcccttcaaccgacacttggtcacactctcaaatactgtgttcaccttctcctacaagaaagctcagcgagatctgggctatgagccccttgtcggctgggaggaagccagggagaacacttcagagtggatcgggtcactggtggagcagcacaagggaacactgaacacaaaggctcagtgatgtgactggcgatggcgggaacatgacctgggtgctgtcaggaaatagttgtcaggttctccagaagagacagaggcacaacccaggtcttactgcctccctttgacacagagatcaacttagtgtcttcctcaagacaccagcagctggtccctgacccagccacagggtttcttccctccacacctgcccagtgacacacatgtggctgtgcctcagctgctgtgacctgtgacaacaggcttcagcaattgcaatttcctgtcacatagagttcagtattggttttctttgcactctcaagttctatatcatatcctgcctttgagaaaatcccattgctttatgaagctcaacagaaatagaaataaatattgcaatacctt

SEQ ID NO: 957 - DNA, 1762 bp, Mesocricetus auratus
  misc_feature (785)..(799): n is a, c, g, or t
atcaattacttgtttccctcgtgccgcttccaaagacagctgctactcctagaactctctgattcctgcttccagttcaagaagggagctctctgctgtggcctgctgccattcagacctctaactcctggaaacaaaacgggtgggagatggacgaggtcttccatgggggatcatgaaaatttcagatgtccttattttatgtatgccatctccagaatcaccctacattacccgctgccctcgctggatctgtttcctgtgttggccatgcctggatggagctgcttggtgacaggggctggagggtttctggggcaaaggattatccacttgctggtacaggagaaggatctggaagaggtcagactcctggacaaggtgttcagaccagaaaccagggaggaattcttcaagctgcagacaaagaccaaggtgacagtgctggagggtgacattctggatgcccagtgcctgaggagagcctgccagggcatctccgttgtcatccacactgctgccgccattgacgtctggggtatcattcccagacagaccatcatagatatcaatgtgaaaggtaccctgaacctgttggaggcctgtgtccaggctagtgtgccagccttcatctacaccagctcaattgatgttgcggggcccaactcctacaaggaaatcgtcctaaatggccatgaggaacaacagcatgaaagcacatggtctgatccatacccatacagcaaaatgatggctgagaaggcagtgctggcagccaatgggtnnnnnnnnnnnnnnngtggcactttgcatacttgtgccttaaggcctatgtacatctatggggaaaaaagctcaatactttcagggataatgattagggccatcaaaaataatggtattctgaaagttactggaaagttctccacagtcaacccagtgtatgtgagtaatgcagcctgggcacacattctggctgccaggggtctgcaagaccccaagaagtcaccaaacatccaagggcagttctactacatctcagatgacacccctcaccaaagctatgatgacttaaataacaccctgagcaagaaatggggcctccgccctgattccagttggagacctcctgtggccctgctgtactggcttggcttcctgctggaattggtgaacttcctgctgcgtccggtctacaactaccagcctcccttcacccgatacttggtcacaatctcaaatactgtgttcaccttctcctacaagaaagctcagcgagatctgggctatgagccccttgtcggctgggaggaagccagggagaacacttcagagtggatcgggtcactggtggagcagcacaagggaacactgaacacaaaggctcagtgatgtgactggcgatggcgggaacatgactgggtgctgtcaggaaatagttgtcaggttctccagaagagacagaggcccaacccaggtcttacttgcctccctttgacacagagatcaacgtagtgtcttcctcaagacaccagcagctggtccctgacccagccacagggtttcttccctccacacctgcccagtgacacacatgtggctgagcctcagcttctagttccaaaatattcagcacctcttgtaccttagagctctctccattggctacatctcccccacaaaaagcatttcttacctttggaaaattcccattactttatgaagtgcaatcaaaggagcaataaatatttgttaatacctc

SEQ ID NO: 958 - DNA, 4863 bp, Cricetus cricetus
  misc_feature (627)..(642): n is a, c, g, or t
  misc_feature (1393)..(1408): n is a, c, g, or t
  misc_feature (2490)..(2785): n is a, c, g, or t
  misc_feature (2928)..(2953): n is a, c, g, or t
  misc_feature (3696)..(3710): n is a, c, g, or t
agccgagcccgtgcgcgcgccgccatgcccttggccttctgcggtaccgagaaccactcggccgcctaccgggtggaccagggcgtcctcaacaacggctgcttcgtggacgcgctcaacgtggtgccgcacgttttcctgctcttcatcaccttccccatcctcttcatcggatggggcagccagagctccaaggtgcacatccaccacagcacctggctgcactttccagggcacaacctgcgctggatccttaccttcattttgctcttcgtccttgtgtgtgagatcgctgagggcatcctgtctgatggggtgacagaatcccgccacctccacctgtacatgccagccgggatggcgttcatggctgccatcacctctgtagtctactatcataacatcgagacctccaacttccccaagcttttgatcgctctgctcatctattggaccctggccttcatcacgaagaccatcaagtttgtcaagttctatgaccacgccatcggcttctcccagctgcgcttctgcctcacggggcttctggtgatcctgtatgggatgttgctgcttgtggaggtcaacgtcatcagagtgaggaggtacatcttcttcaagacgccnnnnnnnnnnnnnnnncctgaggacctgcaggacctgggtgtgcgctttctgcagcccttcgttaacctgctgtcaaaggggacctattggtggatgaatgccttcatcaagacggcccacaagaagcccatcgacctgcgggccatcgcgaagctgcccatcgccatgagagccctcaccaactatcagcgcctctgcgtggccttcgatgctcaggcgcggaaggacacacagagcccacagggtgcccgggccatctggagggctctatgccatgcctttgggagacgcctgatcctcagcagcacattccgcatcctggctgacctgttgggcttcgctggaccactctgcatctttgggatcgtggaccacctggggaaggagaaccacgtcttccagcccaagacacagtttctcggggtttacttcgtctcttctcaagagttccttggcaatgcctacgtcttggccgtgcttctgttccttgccctgctactgcaaaggacattcctgcaagcctcatactacgtcgccattgaaactggaattaacctgagaggagcaatccagaccaagatttacaataaaatcatgcacatgtccacctccaacctgtcaatgggggaaatgactgctgggcagatctgcaacctggtggccatcgacacaaaccagctcatgtggttcttctttctgtgcccaaacctctggacgatgccagtacagatcattgtgggcgtgatccttctctactacatccttnnnnnnnnnnnnnnnnttggagcagctgtcatcattctgctggctcctgtacagtactttgtggccaccaagctctcccaggcacagcggacgaccttggagcactccaacgagaggctgaagcagaccaacgagatgctccggggcatgaagctgctcaaactgtatgcgtgggagagcatcttctgctccagggtggaggtgactcgcaggaaggagatgaccagcctgagggcgtttgctgtctacacttccatctccatcttcatgaacacagccatccccattgctgccgtcctcatcaccttcgtgggccacgtcagcttcttcaaagagtcggacttgtcaccctcggtggcctttgcctccctctctctcttccacatcctggtcactccactgttcctgctgtctagcgtggttcggtccactgtcaaagccctggtgagcgtgcaaaaactgagcgagttcctgtctagtgcagagatccgtgaggagcagtgtgccccccgagagcctgcaccccaaggccaagccggcaagtaccaggcagtgcccctcaaggttgtgaaccgcaaacgcccagcccgggaagaggtccgggacctcctgggcccactgcagaggctggcccctagcatggacggggatgctgacaacttctgtgtccagatcatcggaggcttcttcacctggacccctgatggaatccccactctgtccaacatcaccatccgtattccccgaggtcagctaaccatgattgtggggcaggtgggctgcggcaagtcctcgctcctcctcgccaccctgggggagatgcagaaggtgtcgggggccgtcttctggaacagcaaccttccggacagcgagggagaggaccccagcagcccagagcgggagacagcagctggctcggatatcaggagcagaggccccgtggcctacgcatctcagaaaccatggctgctaaacgccaccgtggaagagaacatcaccttcgagagtcccttcaataagcagcggtacaagatggtcatcgaagcctgctccctgcagccggacatagacatcctgccccacggagaccagactcannnnnnnnnnnnnnnnnnnnnnnnnnnnnnnnnnnnnnnnnnnnnnnnnnnnnnnnnnnnnnnnnnnnnnnnnnnnnnnnnnnnnnnnnnnnnnnnnnnnnnnnnnnnnnnnnnnnnnnnnnnnnnnnnnnnnnnnnnnnnnnnnnnnnnnnnnnnnnnnnnnnnnnnnnnnnnnnnnnnnnnnnnnnnnnnnnnnnnnnnnnnnnnnnnnnnnnnnnnnnnnnnnnnnnnnnnnnnnnnnnnnnnnnnnnnnnnnnnnnnnnnnnnnnnnnnnnnnnnnnnnnnnnnnnnnnnnnagtgccagctctttgagcactggaagaccctcatgaaccggcaggaccaagagctggagaaggagacagtcatggagaggaaagcctcagagccatctcagggcctgccccgtgccatgtcctccagagacggccttctgctnnnnnnnnnnnnnnnnnnnnnnnnnncagccgaaagcgaggaagatgacaacttatcttcagtgctgcatcagcgagctaagatcccctggcgagcctgcactaagtatctgtcctctgctggcattctgctcctgtccctgcttgtcttctcccagctgctcaagcacatggtcttggtggccattgattattggctggccaagtggacggacagtgccctggtcctgagccccgctgccaggaactgttcgctcagccaggaatgtgacctggaccagtctgtctatgccatggtattcaccttgctctgcagcctgggtatcgtgctgtgcctggtcacctctgtcactgtggagtggacgggactgaaggtggccaagaggctacaccgcagcctgctcaaccgcatcatcctggcccccatgaggttctttgagaccacacccctcgggagtatcctgaacagattttcatccgactgtaacaccattgaccagcacatcccatccacgctggagtgtctgagccggtccaccctgctgtgtgtctccgccctgactgtcatctcctatgtcacacccgtgttcctcgtggccctcttacccctagctgttgtgtgctacttcattcagaagtacttccgagtggcatccagggacctgcagcagctggacgacacgacgcagctcccgctcgtctcacactttgctgaaactgtggagggactcaccaccatccgtgccttcaggtacgaggcccggttccannnnnnnnnnnnnnnatataccgactccaacaacatcgcctccctcttcctcacggcagccaacagatggctggaagtctgcatggagtacatcggagcgtgcgtggtactcattgcggctgccacctccatctccaactccctgcacagggaactttctgctggcctggtgggcctgggcctcacctatgccttgatggtctccaactacctcaactggatggtgaggaacctggcggacatggagatccagctgggggctgtgaagaggatccacgcactcctgaaaaccgaggcggagagctatgaggggctcctggcgccgtcgttgatccccaagaactggccagaccaagggaagatccaaattcagaacctgagcgtgcgctatgacagctccctgaagccagtgctgaagcatgtcaacaccctcatctccccggggcagaagatcgggatctgcggccgcacaggcagcgggaagtcctccttctccctggcctttttccgaatggtggacatgtttgaaggacgcatcatcattgatggcatcgacatcgccaagctgccacttcacacgctgcgctcacgcctgtccatcatcctacaggaccccgtcctcttcagcggcacgatcagattcaacctggaccccgagaagaaatgctcagacagcacactgtgggaggccctggagatcgcccagctgaagctggtagtgaaggcactgccaggaggcctagatgccatcatcacagaaggaggggagaattttagccagggccagaggcagctgttctgcctggcccgggccttcgtgaggaagaccagcatcttcatcatggatgaagcaaccgcctccatcgacatggctacggagaacatcctccagaaggtggtgatgacagccttcgcagaccgcacggtggtcaccatcgcgcatcgtgtgcacaccatcctgagtgcagacctggtgatggtcctcaagaggggtgctatcctggagtttgacaagccagagacgctcctcagccagaaggacagcgtgttcgcctcctttgtccgtgcggacaagtgacttaccggagccaaagtgccaccccgcgcctcgcttgcttgcctaggatttctaactgcaaatcacttgtaaataaattaattctttgct

SEQ ID NO: 959 - DNA, 2417 bp, Cricetulus griseus
  misc_feature (31)..(48): n is a, c, g, or t
  misc_feature (665)..(679): n is a, c, g, or t
  misc_feature (2037)..(2061): n is a, c, g, or t
  misc_feature (2064)..(2076): n is a, c, g, or t
  misc_feature (2080)..(2101): n is a, c, g, or t
tgtaggatgaacggagaagcagactgccccnnnnnnnnnnnnnnnnnngcccccaaaggccaagaccgctggtcccaggaagatatgctaactttgctggaatgcatgaagaacaaccttccttccaatgacagctccaagttcaaaaccacagaatcacatatggactgggaaaaagttgcatttaaggactttttaggagatatgtgcaagctcaaatgggtggagatttctaatgaggtgaggaagtttcgtacgttgacagaattgatccttgatgctcaggaacatgttaaaaatccttacaaaggcaaaaaactcaagaaacacccagatttcccaaagaagcctctcaccccttatctccgcttcttcatggagaagcgggccaagtacgcgaaactccatcctgagatgagcaacctggacctaaccaagattctgtccaagaagtataaggagcttccagagaagaagaagatgaaatatattcaggacttccagagggagaaacaggagttcgagcgaaacctggcccgattcagggaggatcaccctgaccttatccagaatgccaagaagtcggacatccctgagaagcccaaaactccccagcaactgtggtatacccatgagaagaaggtgtatctcaaagtgcggccggnnnnnnnnnnnnnnnaggtgaaggactccctggggaagcagtggtctcagctctcggacaaaaagaggctgaaatggattcataaggccctggagcagcggaaggagtacgaggagattatgcgagattatatccagaaacatccagaactaaacatcagcgaggaaggcatcaccaaatctaccctcaccaaggccgaacgccagctcaaggacaagtttgatgggcgacctaccaagccacctccgaacagctactcattgtactgtgcagagctcatggccaacatgaaggacgtgccgagcacagagcgcatggtgctatgtagccagcagtggaagctgctgtcccagaaggaaaaggacgcctaccacaagaagtgtgaccagaaaaagaaagattatgaggtagaactgctgcggttcctcgagagcttgcccgaggaggagcagcagcgggtcctgggcgaggaaaagatgttgaacatcaataagaaacagaccaccagtccagcctccaagaagccttctcaggaaggtggcaagggcggctctgaaaagcccaagcggcctgtgtctgccatgttcatcttctcagaggagaagcgaaggcagctgcaggagcagcggcctgagctctcagagagcgagctgacccgcctgctggcccgcatgtggaacgacttgtcagagaagaagaaggctaaatataaggctcgggaggctgctctgaaagcacagtctgagaggatgccaggtggggagcgtgaagagcgaggcaagctgcctgagtcgcccaagagagctgaggaaatatggcagcagagtgtcattggagactatctggctcgcttcaagaatgaccgagtcaaagccttaaaagctatggagatgacttggaacaacatggagaagaaggagaagctgatgtggattaagaaggctgccgaagaccaaaaacgatatgagagagagttaagtgagatgcgggcccctccagctgctacgaactcttccaagaagatgaagttccaggggatgcccaaaaaacctcccatgaacggttaccagaagttctcccaggagctgctgtccaatggggagctgaatcacctgccgctgaaggagcgcatggtagagattggcagccgctggcagcgcatctcccagagccagaaggagcactataagaagctggcggaggagcagcagaagcagtataaggtgcacttggacctctgggtcaagagcctgtctccccaggaccgtgcagcatacaaagaatacatctccaataaacgtaagaatatgactaagcttcgaggcccaaatcctaagtctagccgaaccaccctgcagtctaagtcggagtcnnnnnnnnnnnnnnnnnnnnnnnnngannnnnnnnnnnnngagnnnnnnnnnnnnnnnnnnnnnnaatggggactcctctgaggatggcggggactcttcagagtctagcagcgaagatgagagcgaagatggggatgagaatgaggacgacgatgacgacgacgatgacgatgaggatgacgatgaggatgaagacaatgagtctgagggcagcagctccagctcttcctcttcaggggactcctcagactctgactccaactgagctcagcccccaccctgggcaggcagccaaggagagccactgcagagctcccctccccacctgaccacctttgtctctccctatgttctgtcccctcagcttcccccactttctt

SEQ ID NO: 960 - DNA, 2306 bp, Cricetulus griseus
  misc_feature (31)..(48): n is a, c, g, or t
  misc_feature (1664)..(1688): n is a, c, g, or t
  misc_feature (1926)..(1950): n is a, c, g, or t
  misc_feature (1953)..(1990): n is a, c, g, or t
tgtaggatgaacggagaagcagactgccccnnnnnnnnnnnnnnnnnngcccccaaaggccaagaccgctggtcccaggaagatatgctaactttgctggaatgcatgaagaacaaccttccttccaatgacagctccaagttcaaaaccacagaatcacatatggactgggaaaaagttgcatttaaggactttttaggagatatgtgcaagctcaaatgggtggagatttctaatgaggtgaggaagtttcgtacgttgacagaattgatccttgatgctcaggaacatgttaaaaatccttacaaaggcaaaaaactcaagaaacacccagatttcccaaagaagcctctcaccccttatctccgcttcttcatggagaagcgggccaagtacgcgaaactccatcctgagatgagcaacctggacctaaccaagattctgtccaagaagtataaggagcttccagagaagaagaagatgaaatatattcaggacttccagagggagaaacaggagttcgagcgaaacctggcccgattcagggaggatcaccctgaccttatccagaatgccaagaagtcggacatccctgagaagcccaaaactccccagcaactgtggtatacccatgagaagaaggtgtatctcaaagtgcggccggatgagattatgcgagattatatccagaaacatccagaactaaacatcagcgaggaaggcatcaccaaatctaccctcaccaaggccgaacgccagctcaaggacaagtttgatgggcgacctaccaagccacctccgaacagctactcattgtactgtgcagagctcatggccaacatgaaggacgtgccgagcacagagcgcatggtgctatgtagccagcagtggaagctgctgtcccagaaggaaaaggacgcctaccacaagaagtgtgaccagaaaaagaaagattatgaggtagaactgctgcggttcctcgagagcttgcccgaggaggagcagcagcgggtcctgggcgaggaaaagatgttgaacatcaataagaaacagaccaccagtccagcctccaagaagccttctcaggaaggtggcaagggcggctctgaaaagcccaagcggcctgtgtctgccatgttcatcttctcagaggagaagcgaaggcagctgcaggagcagcggcctgagctctcagagagcgagctgacccgcctgctggcccgcatgtggaacgacttgtcagagaagaagaaggctaaatataaggctcgggaggctgctctgaaagcacagtctgagaggatgccaggtggggagcgtgaagagcgaggcaagctgcctgagtcgcccaagagagctgaggaaatatggcagcagagtgtcattggagactatctggctcgcttcaagaatgaccgagtcaaagccttaaaagctatggagatgacttggaacaacatggagaagaaggagaagctgatgtggattaagaaggctgccgaagaccaaaaacgatatgagagagagttaagtgagatgcgggcccctccagctgctacgaactcttccaagaagatgaagttccaggggatgcccaaaaaacctcccatgaacggttaccagaagttctcccaggagctgctgtccaatggggagctgaatcnnnnnnnnnnnnnnnnnnnnnnnnnagagattggcagccgctggcagcgcatctcccagagccagaaggagcactataagaagctggcggaggagcagcagaagcagtataaggtgcacttggacctctgggtcaagagcctgtctccccaggaccgtgcagcatacaaagaatacatctccaataaacgtaagaatatgactaagcttcgaggcccaaatcctaagtctagccgaaccaccctgcagtctaagtcggagtcnnnnnnnnnnnnnnnnnnnnnnnnngannnnnnnnnnnnnnnnnnnnnnnnnnnnnnnnnnnnnnaatggggactcctctgaggatggcggggactcttcagagtctagcagcgaagatgagagcgaagatggggatgagaatgaggacgacgatgacgacgacgatgacgatgaggatgacgatgaggatgaagacaatgagtctgagggcagcagctccagctcttcctcttcaggggactcctcagactctgactccaactgagctcagcccccaccctgggcaggcagccaaggagagccactgcagagctcccctccccacctgaccacctttgtctctccctatgttctgtcccctcagcttcccccactttctt

SEQ ID NO: 961 - DNA, 4623 bp, Cricetulus griseus
  misc_feature (2363)..(2377): n is a, c, g, or t
  misc_feature (2664)..(2676): n is a, c, g, or t
  misc_feature (2678)..(2717): n is a, c, g, or t
  misc_feature (2778)..(2800): n is a, c, g, or t
  misc_feature (2803)..(2834): n is a, c, g, or t
  misc_feature (4511)..(4526): n is a, c, g, or t
agcttggagaaggagctgctcctacgcaggacctggggagggcacggggacatgtggggacacggcggggacccacccagaccaggcccaacaaggatccagggtggagcctgcttacctgctgttgtgcgtcaccagctgtgcctacatggggggctcctgtggagcagacgggacatggaagtgggcgtgacaagcgccacacaggagggtgggcaggaggcagtaggggtgcactcaccgagtggggcgggcaaagcctcctggctgaggatctccttgtacagctcctctgcttgttggtacttgttctgtttcaggtaggccgaggcctgcggggagggccggggcagggcgcgggcatcttgctcaggcctgggaatgtctcagacccgcccgcccgcccgccggccggccctcccagcaccctgccccactgatgacggtgcagacccaccatcccagagaaccaggccgcccgtccctggaccactcttgcgcctcagtttcctgcctcactgtgtgaaaagtcaggagcatctgctgtgaattaaagcctgacacaggctactgtcaactgtttgctcctggccttttgtccctgtttgatctacaggaaggagcctgaggtcccctccccacagtgtccccaggacaggacccacccatgcctcaccaggttgttcttggtcttggccacattggggtcattcggcccccccagggcctggtagatgctcagggcccgtgcgtagtgccgctccacatcctggaacttgccttggttctgacacagcaacgccaggttgttgagctgcttggccacatcagggtggtcggcgcccagcacctggggacgcacaagccatgtgtcaacagggtggcccatgagatgccacagtcacccagggtcacaggtggggaatgcagtgacagagtagaagctaacacggtgcgtgggaattagtgaagccagaggtcatgggtgctgtgtccaacgagtcagcttggagataggaagtgggtcgggaggccagggtcaagcagggcattgggtggagcatgggattgggtgctcggctcaatgggggaacctgccaccaaatgcaaggtacaccagggattatggcttgtggtaccagtgacaaggcaaagagctggctgcagcaccttctcacggatctccagagcgcgctggcacaggggctctgcttcccggtaacgcccacgtttcccatagaggacagctaggttgttgagggtggcggccacctgcagggggaaagttggcagaggagggcccctacaggtgtccccccccccaagcccaccctccctgaattggggctcaccgcagggtgttcaggacccagagtctgctcccggatctgtagggcatcatgaagaaggtccgtggcctctttgtatttgttctggtccctgtaggcagggtcaagctgggaccactggctggactgagccaggaatgactgacatctttcaggggacccctggtcttcttcccacacaccccaggcctctagcacagattcccagtctgccagttctgtcaagcatcgggtctcctgtcccttgcccaccctggtgcccagactctggctctcatcacctctccagctctctcttccttttgttgtcctgcccaccaccccccttttccgttgccccccgggtgctttatcttgtcagaggattgccactaccacagacgggggcccctccaatcagccacggctctcacctgtacaccagtgccaggatgttaagcatagtggccacatccgggtggcagtggcccgagctccgctccaggtcctccaaggcctggcgacatagaggcaccgccacctcgtagcggccctggccagcgtactggatcaccaggttgtgcagggtccgaaggcgagctgggatctcataaccaccctgctgcgctgctgcagctcctgctgcctcgggacctgggggaggtggtgtggagttccccacgatgggcctcagcctgcaccgcaccctagggctcctctcgcactaggccttatgctgacactggacacggggttacagaaatctaactggccagtgggatgttaggtgccagaaccgaacccgcctaggtcataggctgcctaacttccagcctcctccctccccatgccctgtgcccggctcagaggccttggcgtcccaggtcaaggctccagccccaggcttagcctgtagtcctgggtgatggccctctgatatcgtgcccagggttcccacacacccacctctcctttcctcctcttcactggggaacagagaagccaggctgtctcggcgaggcggggactcgggcnnnnnnnnnnnnnnngaaagagtaattcccagaacagtgagcgtcagtgccctcaagctacttcaggcctgtccgtgtagctctctgttgtccaggacaggggctcgctctgtagacactcagagagacagatgaacctgcctctgcctccagagtgctgggatgccaggcttcaggactggttttgtctgtgagtctcactgtgtagcccaggctggccttgaactcacagcaccctccagccttagccacgccagctctgagtctgacagaggcgtgggtcaggagcctttgaggtgccnnnnnnnnnnnnnannnnnnnnnnnnnnnnnnnnnnnnnnnnnnnnnnnnnnnngagctctctgagtttgaggccagcctggtctccagagcgagtgccaggataggctccaaannnnnnnnnnnnnnnnnnnnnnngannnnnnnnnnnnnnnnnnnnnnnnnnnnnnnnagcctttggagtttcagtggcctgggaaagacctgggagctcaggggagcactgaggggactttggaagctcaaatggatgtggggatttggggatcccacatgtacttaaagggttatagggtactaagaaaggcctgagggtatctgggggctctgcgaaggactgtgtaccctcttcgccctgcccctggtacctggctctcctcgggcggatcgtactgccgcagctggcccaggaactggagatggctcttctcctcctccagctgggccacagcctcctcactggcccgcagtcgcctctgcgtctcctccagttcctctcgaagccatgtgttctcttgggctagcctccgcgcctgcgcccgcagcctctgcttctcagcctccagcacactcacgtgtgccgacagggccagcagcacctgccaagcatcggaaccatgaggagtggatgcatccctcggacagccccagcccaggctttttacatcaggccggatacacccgttccacacaggtcccccccagattctgaagacaacccagtgtggctctgatagtaagagttttccagaaacccccgattccaaccaaattatgcatagggttaattcctattccatctatttaacccaacaccttcataaaaaaacatctgtgaataacaggggtgtggctcagtggtggagcccctgcctagaatcccccagtgaggggctgggggcgtggctcagtggtggagcccctgcctagaatcccccagtgaggggctgggggcgtggctcagtggtagtgcccctgcctaggatcccccagtgaggggctgggggtgtgtggctccatggtagagcccctgcctagaatcccccagtgaggggctgggggcgtggctcagtggtagagcccctgcctagaatcccccagtgaggggctgggggcgtggctcagcgggagagcccctgcctaggatcccccagtgaggggctgggggcgtggctcagtgggagagcccctgcctaggatcccccagtgaggggctgggggcgtggctcagcgggagagcccctgcctagaatcccccagtgaggggctgggggcgtggctcagcgggagagcatctatctgcctaccaggagcaaaacctagggttccattcataatgaaaactccaatctccctccaggactgagctctccgcgaggaccacatgcgggacacacagggatggaatctctgaactgaagtccctccttccttcttcaggccacctgaacttcctcctctgcacagggtcccctcatccctgggcctcccccaccccgcgcactccgcatccccggtccttctcatggccccacatacctgggcctcgcccagccccagctcgatggcctccagcgagtgcttcaccacctgtcgcttctcctccagcagctccactccaggcacagggcccggtgcagccagggcctccgccaagtgcccagcgagactgcagtgctcagcccgcagggcctccagcccctgcactacctgtctcgtctgccgcaccagctcctcggggttcaggcgctctgggcccagccctgtgcttccgggggctgccacctgcacagacatggctactcctgggggtgggggtgggggtggggggcagtgagggtgagggagnnnnnnnnnnnnnnnnacagactcacagcctctcttcattccagccatccccctgccccacccatcctggctggctcccctttccaccccaggcagccttcatgggggaattc

SEQ ID NO: 962 - DNA, 7951 bp, Mesocricetus auratus
  misc_feature (37)..(63): n is a, c, g, or t
  misc_feature (3203)..(3226): n is a, c, g, or t
  misc_feature (5664)..(5782): n is a, c, g, or t
  misc_feature (6154)..(6168): n is a, c, g, or t
  misc_feature (6286)..(6300): n is a, c, g, or t
  misc_feature (7345)..(7373): n is a, c, g, or t
  misc_feature (7612)..(7638): n is a, c, g, or t
tgtgaggagccgccctcgctatcgctattgccgttannnnnnnnnnnnnnnnnnnnnnnnnnnttggagttaactgtcgctgtcagttggagttaactgtcgctgtcagttggagttaactgtcgctgtcagttggagttaaccgtttaaactgtgcctctcccgtgacgtcatctggggtgatgtgcaaaccaccaatcccggctctacacatctcactcggagctcctaggcttatataaggggctgggtttcttagcttggggtctccctctaagaagctgatcatctatgtctcaagatgcattaaagctttactgcagaaggatccgagtgttctgcgtcgttcttgctggcgagacggtagcgcgggacatctggtgccgaaacccgggaactcttcaacatcgccggcgccgcgggagacccctcggaaaacggggcggattcagaactgcagggacgtaggttcagagaggtatgctttatcctgaacaacccttttctcgactttggccttagtttgtcatcaccgtgggacgggtcagtggaggctttggtgctagtcctgtttgtccttctccttcatcgtggctggtgctgacagaacggcgctgtccatctggcgctgtccgtctggcgctgtccatctggcgctgtccatctggcgctgtccatctggtgctgtcagtctggtgctgtcagtctggtgctgtcagtctggtaacggagttgagcgcgttttttagataagctgtcagcgcgatggggtcgtcacagtcagtggttacagccttacagactgtgctaaaacaaagagatcttaaaattgcaccacgaacacttcaaaattttatgaaggaggtagatagagtggcaccatggtatgcttgttccgggtccctcactgtggcctcatggaacaagctaggtaaagaactagacaggaagcatgcagaaggagatctctgcttaggtaccaaagccatttggaagctagttaaaaactgcttggaggatgaggcctgtcaccctgctataatagaaagtcagggaaccttagaggaagttcaggatagcatgtcagaaactgaacggagtgagagaatgggagctcgcaaaagaaaagacatgtctaagaaaaaaggccctccccaggaagttaagaaagggggagagaaagaagggagttatcattcaccccttaacaaatctaagaaaaagaaaaagccagaatctagtcaataccctgcagtagagctagaagccttggagctagataattctgattctgacactctggattctagcgaagaaggtggtctagaggaggaggtggcacggtatgaggaaaaaagatatcaccctgatagacaccggccactgaaaacaaaaatgaatgtgaggccaccgcctataaatccggcgggctcacgcccctcagcgcctccgccatatgagcttcggctgaatactggtactgactcctttttacctttagaggaacggagaaaaatacaaatggcttttccagtattcgagaatgcggaaggcggaagagtacatacccccgtagattacaatcaaattaaagaattggccgaatccgttcgtaattatggggtcaatgctaactttaccacattacaggtggaaaggcttgctaattttgccatgactcccactgactggcaaacgacagtgaaagcagtgcttcccaacatgggacaatacatggaatggaaggctctctggtatgatgcagcccaggcacaagctagagttaatgccacggctgaagatgagaatcagaggcagtggacatttgaaatgctgacaggtcagggtcaacatgcccttaatcaaaccaactacatctggggcgtctatggtcaggtgtcggccgccgctattaaagcatggaaggccctcacaaaaaggggaggtccagtggacaccttacaaagattgtccaaggaccccaagagccattttcagactttgtggccagaatgacagaggccgccagtcgcatctttggtgattcagaacaagctatgcccctgattgagcaacttgtctatgaacaagcaacccaggaatgtcgagcggctatcgcccctcgcaaaagcaaaggtttacaagattggctcagagtgtgcagggagctggggggacccctaaccaatgcaggactagctgccgccattttacaaacgcacaggtatagagatttatctaatcgaaaagcttgttttaattgtgggagaatggggcaccttaagaaagattgtcaagcccctgaaagaacaagagaatcgaagctttgctatcgttgtggtaaaggttatcatagggctagcgaatgcaggtcagtccgggatgtaaaagggaggcttctgccccctattgaagaatccaaggtaccccaatcaaaaaacgggtcacggggcccatggtcccagggccccagaaatatgggaaccaatttcagaaaagcaatcaagaggaagtagaggtttccgaggaacctccggaatggacttgcgtgccgctccgacttcttactcatgccccaaatgaatgttcaaccggtcccagtccattcccctggacctttgccccctgccaccattgggcttattctgggccgtggctccttaactttacagggactcattatatatcctgggattgttgacccatatcataaagaggagattcaagttctctgttctagccctcggggtgtattttctataaagcagggagatagaattgcacaactggtgttgccgccctccctcggggatggagaaacctacactttacaaaaaagggctatgggatcttctggaagtgattcagcctatctggctatacccctaaatgagagacctacaataaaattgttaattaatggaaaagaatttgaagggataatggattcgggagcagacaaaagcattatttcactccattggtggccgaagtcttggcccactgttgtttcatctcattctctacaaggtcttggataccagtcctctcctgccatcagtgcctcagccttaacctggcgggatgctgaaggcaaacagggatgttttaccccctatgtgttgccactccctgtaaatttatggggacgagatgtgttacaagccatgggcatgaccctaactaatgaatactccccccannnnnnnnnnnnnnnnnnnnnnnnggggtatacaaatggtagaggcttgggtaggcaagaacaaggcagaataaaacccattacacaacacggaaatcggggtagaaaaggactgggttttatttgggggccgttgaggcttcacgacccataccatggaaaacagaggagccgttatgggtctctcaatggcctctatcctctgaaaaattagaggctgtcacaagattagtgcaagaacaggaacggctggggcatctagagccttctacctccccatggaatacaccaatttttgttattaaaaagaaatctgggaagtggagattactccacgacctgcgggccattaacaatcagatgcatctttttggccctgttcaaagaggccttcctttgctttctgcacttcctcaagattggaagcttattattatagatattaaggattgtttcttctctattccactttacccacgggatagaccaaggtttgccttcactatcccttctcttaatcatatggaaccagacaagagatttcagtggaaggtactgccgcaaggcatggccaatagcccaacaatatgtcagctatatgtgcaggaggctttggagccaattaggaagcaatttacatctttaatcgttatccattatatggacgatattcttatttgtcacaaagagttagatgttttacaaaaggcttttcccatgctggtggctgaattaaaacagtggggattagagattgcctcagaaaaggttcaaattgcagatacagggctctttttgggctcaaagattactcccaaaaatatagttcctcagaaaatagaaattcgcaaagaccacttacaaacattaaatgattttcagaaacttctgggagatataaattggttgaggccctttttaaaaattccatctgctgatctaaaacccctcttcgatctcctggagggtgagcctcatatctcctcacccagaaaatttacccctgccgcccaccgagccttacagatggtggaagaggccttacaggaagcacaaattacaacgaattgaggagtcactaccttttaatctgtgtgtttttaagacagctcaattgccaactgcagtcctgtggcaacatggaccattactttggattcatccaaatgcttcccctgctaagattattgactggtaccctgatgctgttgcacagccgcgctcgcgaataaaagcagctgttacacattttggcagggatcctgattccttgattgtgccttatactgctgcacaagttcagaccttggcagccacatctagtgattgggcagttttagttacttccttttcaggacaaattgataatcattttccaaagcatccaattttacagtttgccctaaaccaggctatagtgtttccacaagtgacagctaaagacccactcccagatgggactgtggtgtacactgatggatcaaaaactggtctgggagcttatgtggtcaaggatagggttatatctaaacaatataatgaaacttcacctcaagttgtagaatgtctgatagtactggaggttcttgaggcttttccaggacccctcaatattgtatcagattcctcttatgtggttaatgcagttaatctccttgagatagctggaataataagatcctccagcagagttgctaacatctttcagaagatacaagctgccttgttaaataggagatttcctgttttcattacccatgtccgagcacattctggactcccaggtcccatgtccttagggaatgacttagcggacaaggctacaaagctggtggccactgccttgtctacccatgcacaagcagcaaaagaattccataagcgctttcatgtgacggctgagaccttgcgccgtcgttttgctctatccaggaaagaggctagggaaattgttactcaatgccagaattgctgcgaattcttacctactccccacatgggaataaacccacgtggcattagaccattgcagatgtggcagatggatgttactcatattccctcttttggaaggcttcaatatgttcatgtttctgttgacacctgttctggcgtaatgtttgccacacccctaacaggggaaaaggcctcatatgtgattcaacattgccttgaggcttggagtgcttggggaaaacccagaatttaaaaaacagacaatggaccagcatatacctctcaaaaatttcgacagttttgtcggcaaatggatgttacccatctaactggcctaccttataaccctcaaggacagggcattgtggaacgtgcccatcgtacactcaaatcatatctgattaaacaaaaggggagtattgaggatgttctaccctcggtaccaagagttgctgtatccatggcactttttacccttaatttcttgaactgtgatgcccaaggcnnnnnnnnnnnnnnnnnnnnnnnnnnnnnnnnnnnnnnnnnnnnnnnnnnnnnnnnnnnnnnnnnnnnnnnnnnnnnnnnnnnnnnnnnnnnnnnnnnnnnnnnnnnnnnnnnnnnnnnagctgtgtgtgtttttccacaggaggaagaaaaccccctgtggatccctgaaagactcactcgaagagctccttcacaactccagaataagaaggatggaggccaagtgggtgatgaagactctcctactcgggatgatggttcctagtatgatgggagagttacggtgggccatcatgtctaccttccccctaccgatgccagtgatgcagaatgcccaggtgttccctagatttttcacaaataatagagagttggggcttgcctttttgcctttagatcctcagatacagagttttcaggatgagagaaccttgtcattagtaggaagcttgtgctttactgtgatttcttcattaaaggataattttnnnnnnnnnnnnnnngaaagatctaatgctaatccttttgaattaatggaagctgtactgatctttctcctatgatagtgagaagggacagattggaaaggggcattaggcaacagtctgagtgagggacagnnnnnnnnnnnnnnngattggtcctcctccaatgttaagtataccccttttaagagaactaattattcagctgccctttatttgggttgtgagtaatgataccttaggtaagaatcagaaagaaataaattgttctgcttagaattgtttttatgcattatgctgggatgctattaagcacccttttgctttggtaatgcgcatgcctcgatttattccagctcctgttgaggcgccaagtaatttgagtttgtttagggaaaagcgagatttttgggatctctgctattattgtgggcctgatagccaccgccgcggttactgcttcggttaccgcctcggcccttgcactttctgccactgtgcagacaactcaaaccattaatgaactataggccactgtgaccatggtcctagataaacaggccactgccaattctcagatacaaggaggcctgatgttggtaaaccaacagattaatttggttcaggaacaattggatatattgtggcagatggccaaattgggatgtgaacaaagttgcctggcctttgtgtcacttagtacaatatgagaattttacaagagcagctaacctgtcaaaagctctgtctcaacatttattacagaattggacttttgagtttgagcagacactccgtgagttgagaatggcgatcctgcaagtgaattcgacgcatctggatctttctctgatggaagacctctccccctggatttcatctgcattttcttattttaaggaatgggtgggggtaggatcatttagcctagttctctgctgtggaatagtgttgatgctttggatggtgtgtacgctcagagcccaaacaaaaggagaaagtggtggtggcacaagcacttgctgccttagaacacggagcatcccctgacatttggttaaccatgttaaagcaataggtcgctggcctcccagctcttgcaccccacgaggctagtctcattgcacgggatagagtgggtaggcttcagcagcccaaggagttgcaaggctaagcactgcacaggagaggtctnnnnnnnnnnnnnnnnnnnnnnnnnnnnnagtcatcttgcatgaaggttctatgtcatgatctccttcccccagaaaaaagacatcggactggtcaggacttcctctggggataagaccctggagaggagctttgtacatgttccgaatttgcacatggggatttgacctctatctccactccaaagttgtgggtgtcctattgcttcaaaaataaatgattagggggagatgtgaggagccgccctcgctatcgctattgccgttannnnnnnnnnnnnnnnnnnnnnnnnnnttggagttaactgtcgctgtcagttggagttaactgtcgctgtcagttggagttaactgtcgctgtcagttggagttaaccgtttaaactgtgcctctcccgtgacgtcatctggggtgatgtgcaaaccaccaatcccggctctacacatctcactcggagctcctaggcttatataaggggctgggtttcttagcttggggtctccctctaagaagctgatcatctatgtctcaagatgcattaaagctttactgcagaaggatccgagtgttctgcgtcgttcttgctggcgagacggtagcgcgggaca

SEQ ID NO: 963 - DNA, 117 bp, Mesocricetus auratus
tctatacaggtggtgtcagaggaaggccctaaaaatggtcaaatactccagccacccgagtcatagacttctctctgctaccacaagctctgccacggaggtgttattaccgaagaa

SEQ ID NO: 964 - DNA, 99 bp, Cricetulus griseus
cccatgtgctgcaattttacacttcattgtcttgtgtttgtctttgtatgtatatgactgtcttacactatcaataaaggtgtttccatattaagtggg

SEQ ID NO: 965 - DNA, 591 bp, Mesocricetus auratus
gaattcaaatcaaatatttcaaacgttttaccggagaagcatagctgtggttgctaggcaacctgatagcctcccaagcagggaccaactcgcctcccacactttgaccatctctccccagcagtgggacgcggagtcgccattggtcccgatctcctctcactgaccttcaattggtcagagaacctctcactccgctcccgttggctctcgccgtctctcgccgtcccgccattggccgagatgttctcgggccaccctacgtcaccgtctcaccccacttccccggtcctccgactttgtccccgccccttcccccacccttccagccgcgagggaaaaccctagcgagtcaccgcctctcctttccttcccattggcagaaagcggtatgaggggcgggagctgacgagcgagtctgagctctgggattggctgcggcagccgccatcccgccccctgccgcctcccggcggtgcgggagtcgggtgggtcggtggctataaagctgctgagggcgggaggcacagtgcactgtgctccgtggattgctcctttctttgccccgggtccggtcgtgtttgggtgagt

SEQ ID NO: 966 - DNA, 499 bp, Mesocricetus auratus
gctccagagtcatgcaacaagggactatttttagtagcaaaagaggagggtgaattacctggacaggaactaaatctacagacagaacaatgagtcttctccaatttaacaaacattcggccaatcttttcacctcccttctcccccttgttatcccagatgcggatggagaaggacagattctccgtcaacctggatgtgaagcacttctccccggaagagctgaaagtcaaggtgctgggggacgtggttgaagtgcatggcaagcacgaagagcgccaggtgtgtggaccgctgcttcttttgggagtttcattcagtgcacactggatgccaggcactgccacagtctctgaagctggcggaactccaggccccaaacataaagggttagagcaggagctgctaggaagctaagttagggataaatctgttgttactgttatggttttgctgagagaagtgccccttgatgtttattttgattgccttgttggtg

SEQ ID NO: 967 - DNA, 588 bp, Mesocricetus auratus
  misc_feature (139)..(198): n is a, c, g, or t
  misc_feature (413)..(437): n is a, c, g, or t
cccagctccaggcatttctttttctcttatgatgtcagggcaattcggtctaacctaagggaaagggatgtctgagtttggggaaagtggtggcttccctgttcttacttctctgtttctttcttcattctcttggatnnnnnnnnnnnnnnnnnnnnnnnnnnnnnnnnnnnnnnnnnnnnnnnnnnnnnnnnnnnntgtggatcctctgaccattacttcatccctgtcatctgacggcgtcctcactgtgaatggaccaaggaaacaggcctctggccccgagcgtaccattcccatcacccgtgaagagaagcctgctgtcactgcagcccctaagaagtagactccctttctctcattgcattttttaaaacaagaaagtttcccatcagtgaaggaaaatctgtgannnnnnnnnnnnnnnnnnnnnnnnnagggccggcccagattattaagctaataaaatatcattcagcaatagatttgtctcgtgcttatgtattcagggtgctttgaataactacaagcataacggatctaattcttgtactgtgattcagggaaactccaaggacttttgggtca

SEQ ID NO: 968 - DNA, 247 bp, Mesocricetus auratus
gatcttgtgcccccttctggtgtacaagcatacatgcaggcagaacactgtacaaaataaataaaaattttaaaaaatcctgttattttttaaaaagtgtaaacctctttttaaaaaaaagtgatgggagtgatttcaggaagagttttgagtgtccttaaccctctggggatatggtctctcccttttcaggatcaaccttcccatccagaccttctctgctctcaacttccgaggtgagttgtac

SEQ ID NO: 969 - DNA, 1388 bp, Mesocricetus auratus
gtaccatcctttggctcttgaagtcagctctttagcaggactggtccctggctttacagaaccatctgttgggtgctgggttcaaggaccaggtcttgaagaaggcagaaggttgtcacgaggaaggtggaattggatggtgcatggggcaatgcaacctgggatggagttccatccaaggtgcagcttagatatgaacctgccaggctgagcatggggtgtgtctattatagaaaccagccctgaacaaaggggttctgaagtccacaccaaaaagacggtgatgatcaagaccatcgagacccgggatggagaggtgagtggtctgctggaccccgtgtccttggtggtggcaatggtgtgtctgccagcccggtgtctttcaccctgggtgggggtgaggaggtcctgctgctgtggggtggagtaaatggggccgaggcgcctcttagactggatttctcctcatgctcaggtcgtcagcgaggccacacagcaacaacacgaggtgctctaagccagacactgtcctggtccccgtggtcactgcctcctgaagccagcctcttccactctcggatgtcacacccagccactttccttcactcacagaatctgacccttcctcaccgatcacccctttgtggtcttcatgctgcccaggaaacaccccagcacctctgcagaccttaccatgagtcctggctgtcggcagtcgcaagcctggctcttcagatagaacctagttcaagtcatggccctttccctcccacctttgtaacctcaggctctacgctttggctttggagatggtaccagagaaggtgttgggatctgtagggtcaggacagagctttatagacaccctcacattcgacccccagcctgggtcagagacagagtgaagcctctcagctgaggtgggggaggggctgaaaaaatgtccttgcgtcccctctctttcccatcccagcccaggatgggcttagaaaagctggggctgtaagagggaacctgaaggtgctggatgtgggagcaggagattcagaaggagagcgggtgggtgagaagctggagggaaagaagagagaggcagagagtgggcccaggctggtgggagggccccacctctcacgcctgcccctcccactgcaggggccctggacagaaacaataaagagccaagcacaaacctacatgcccctgctgtcttgactggaccctgtcataccacccatcaccctgagatggacggtgtcaccctcttgccaggtagattgctctaaggcctccaggctgcagtctatgtgctgcataggggaggttggacaaggggcttctgttacaatgccacagtgatgcccctttccttaagctaccttcagatc

SEQ ID NO: 970 - DNA, 1578 bp, Cricetulus griseus
  misc_feature (617)..(631): n is a, c, g, or t
  misc_feature (755)..(768): n is a, c, g, or t
  misc_feature (770)..(782): n is a, c, g, or t
agtctatataagacctctcctggaggcggactcacactgcttctccccgggactccttggtagtctgctagtgggaggtcctcgtcaccctctcttaactcagacctcgcggaccgcttcctagacaacatgcgtgagtgcatctccatccacgttggccaggctggtgtccagatcggcaatgcctgctgggagctctactgcctggaacatggcatccagcctgatggccagatgccaagtgacaagaccatcgggggaggagatgactccttcaacaccttcttcagtgagacaggcgctggcaagcatgtgccccgggctgtgttcgtagacctggaacccacagtcatcgatgaagttcgcactggtacctaccgccagctcttccaccctgagcagctcatcacaggcaaggaagatgctgccaataactatgcccgtggccactacaccatcggcaaggagatcattgatcttgtcttggacagaattcgtaagctggctgaccagtgcacaggtcttcagggcttcttggttttccacagctttggtgggggaactggctctgggttcacctccctgctgatggagcggctctctgtcgattatggaannnnnnnnnnnnnnnagttctccatctacccagccccccaggtttccactgctgtggttgagccctacaactccatcctcaccacccacaccaccctggagcactctgattgtgccttcatggtagacaacgaggccannnnnnnnnnnnnncnnnnnnnnnnnnncattgagcgccccacctacactaaccttaaccgcctcattagccagattgtgtcttccatcactgcttccctcagatttgatggagccctgaatgttgacctgacagaattccagaccaacctggtaccctaccctcgcatccatttccctctggccacatatgcccctgtcatctctgctgagaaagcctaccatgagcagcttacagtagcagagatcaccaatgcttgctttgagccagccaaccagatggtgaaatgtgaccctcgccatggtaaatacatggcttgctgcctgctgtaccgtggggatgtggttcccaaagatgtcaatgctgccattgctaccatcaagaccaagcgtaccatccagtttgtggactggtgtcccactggcttcaaggttggcattaattaccagcctcccactgtggtacctggtggagacctggctaaggtccagagagctgtgtgcatgctgagcaacaccacagccatcgctgaggcctgggctcgcctagatcacaagtttgatctgatgtatgccaagcgtgcctttgtgcactggtacgtgggtgagggcatggaggagggggagttctctgaggcccgtgaggacatggctgccctagagaaggattatgaggaagttggggcagacagtgctgaaggagatgatgagggtgaagaatattagcccatgtgctgcaattttacacttcattgtcttgtgtttgtctttgtatgtatatgactgtcttacactatcaataaaggtgtttccatattaagtggg

SEQ ID NO: 971 - DNA, 987 bp, Mesocricetus auratus
cagctcagcctggccaacagaatagcctcagaggcccagaagcacctgaagaacgcccaagcccagttgaaggacacccagctccagctggatgatgcgctccacgccaatgacgacctgaaggagaacatcgccatcgtggagcggcggaacaccctgctgcaggcggacgtggaggagctgcgggctggggtggagcagacagagcggtctcggaagctggcggagcaggagctgatcgagaccagcgagcgggtgcagctgctgcactctcaaaacaccagcctcatcaaccagaagaagaagatggaggcagacctgacccagctccagaccgaggtggaagaggcggtgcaggagtgtaggaatgcggaggagaaggccaagaaagccatcacagatgccgccatgatggcggaggagctgaagaaggagcaggacaccagcgcccacctggagcgcatgaagaagaacatggagcagaccatcaaggacctgcaacaccggctggacgaagccgagcagatcgcgctcaagggtggcaagaagcagctgcagaagctggaggcccgggtccgcgagctggagaacgagctggaggctgagcagaagcgcaatgccgagtccgtgaagggcatgaggaggagtgagcggcgcatcaaggagctcacctaccagacagaggaggacaagaagaacctggtgaggctgcaggacctggtagacaagctacagctgaaggtgaagacctacaagcgccaggctcaggaggcggaggagcaggccaacaccaatctgtccaagttccgcaaggtgcagcatgaactggacgtggcagaggagagggccgacatcgccgagtcccaggtcaacaagctgcgggccaagagccgtaacatcggtgccaagaagaggcacgatgaagaatgatgctgcccgcagcccttgctgttgctagcccacaataaacacgaatgcctgactctg

SEQ ID NO: 972 - DNA, 364 bp, Cricetulus griseus
attttcttgccaaaagtctggacgatgccttaaaacttattgaacaaccagagttagcagataaagtggacatggtttggatagttggaggcagttccgtttacaaggtaagtagagtcatgtgcaagtagaaaaaattccctgcttctagtcatgaccacaggaagcagcacattatcccagctgtgaactacacagttgtcaaagtgaattatttgacactgtcatgcaaaataaatacaaacataaatgtaaaatttatagtttataccagtctattctttttgttttatgtataaaatcatatttcattatgatgtgacatatttcatgtgctttagtcatattcacccctcccactgcc

SEQ ID NO: 973 - DNA, 420 bp, Cricetulus griseus
gtacctgtacccaatacacataaccagacaaaaagatataatatctacaaagagatagaatatgaagaaaacataaacaaatcttttttcaaaatactttctattgtttgagcaacagtaagcatggatttaatgcctagtacaaacttaattaaaacaagaatcttctagtctctttgtctttcaacatgggttaaggagagtgataccttctattttattttaaaggaagccatgaatcagccaggccatctcagactctttgtgacaaggatcatgcaggaatttgaaagtgacacgttcttcccagaaattgatttggagaaatataaacttctcccagagtaagtactacaattattaactagtcagaagcactttagagactaattacagaagaaaggggagcaagtaaggaca

SEQ ID NO: 974 - DNA, 810 bp, Mesocricetus auratus
tcgaaaatctccctctttagcaatttcttgctcctagagtttcagcaattgctttctcgctccattaggcaacctttcattttctcaccttccccattatgtaacgggagcaatgggttctggaccagtcttccattaaagatgatttttatagtcggtgagcgccgtcagggagtgatgacacctgggggcggtttaaaccgtacaatcccttaaaccagtctggagcggtgactcatttccccagggagaagtggcgcggccattggtgagcacgacgcaagccccgccccacccagcccggccccgccctgctacccctcctgactcactgccccgcccgctcccccgcggcgtccgagcagcagaccgagaaggcacatcgagtccactcgtcgcgtcggtggcaggtaagcggcttctgaagcctggccccgggaagggtgctggagccaggcctcggtaagccttcggcttcccagagccaagcccggcttactccggctctcggggcgctgaggccgcggggctgaggttgagtctggctgggaggtgaccgcgcacccgcagccgcgcgtctccttgagggaccgaaccccaggagaggccaggagccatcccttcctcccgagcccggctcacccccagagtcgctcggggatgggggatgggggatggggtggcatcttttgactgtcgtttgctgttttcttctctctttgtaatagctacagcgaacataattttacccagggttccaccgtggtctcgtccgtcctcggcatctctcagtccagtacatacccaagg

SEQ ID NO: 975 - DNA, 703 bp, Mesocricetus auratus
aattcccttccagtactttgcttgtaagactgtagacattagaccgccacagattcttgcagagctgggagccatccctgtgtggaagcaggctttgctgccaagtggcatgcatgttctcagttgctaagtggtgggaggtgttcctgccctgcttgctttggctgccctaatcataacacagcttaaattgaataaactcccccatacaaccacaagttaggtcttattatactgggaagtaaaatgaaagcagctattagtaaagaaaacattttaataaactccgccttttctccatcccctgagaagccaccctgggtgtagcatgtgaactcaaattaacctgtttttattaatctatgttctgtcacatggcttggttatctctcttctgtaccgtacatcttcagtgtcttgctgggcatctcctgccacacaccaggttcatctcctgttcctctttctccctggaagtcctacctattctctcctacctagctattggccattccactctttattaaacctataacagtgacacatagccacacagtgtaaacaaatactccacaacaaaaaaataaacctttcttccccaagtcgctttggtcatggtgtttaatcataacaaggaagcaggacctttgtcatggaaataaaatcaagattgagccaaatatcacaatctataaacaaagct

SEQ ID NO: 976 - DNA, 500 bp, Mesocricetus auratus
  misc_feature (351)..(367): n is a, c, g, or t
aattcccttccagtactttgcttgtaagactgtagacattagaccgccacagattcttgcagagctgggagccatccctgtgtggaagcaggctttgctgccaagtggcatgcatgttctcagttgctaagtggtgggaggtgttcctgccctgcttgctttggctgccctaatcataacacagcttaaattgaataaactcccccatacaaccacaagttaggtcttattatactgggaagtaaaatgaaagcagctattagtaaagaaaacattttaataaactccgccttttctccatcccctgagaagccaccctgggtgtagcatgtgattctcattaactgccannnnnnnnnnnnnnnnnctcagtactgaagacatttgacctatttgtgtgcatgacgctagtatttcttcaggtattttgcatgactcctttcaaatttctccacccccttgaaggacatctgccacttacctccaacccctcacaattt

SEQ ID NO: 977 - DNA, 150 bp, Cricetulus longicaudatus
tttccccggccaccagcctctttttgttttcagggatatttcgtctttcttgaaggattctgtcttctttcgagcttccatttgctttttggttagttattttaagtccacgcatggcggcaagatcgactacatcgcaggcgagtggcc

SEQ ID NO: 978 - DNA, 1311 bp, Mesocricetus auratus
tcgctattgccgttagaagatgtcgctgacatcactgtcagttggagttaactgtcgctgtcagttggagttaactgtcgctgtcagttggagttaaccgtttaaactgtgcctctcccgtgacgtcatctggggtgaatgtgcaaaccaccaatcccggctctacacatctcactcggagctcctaggcttatataaggggctgggtttcttagcttggggtctccctctaagaagctgatcatctatctctcaagatgcattaaagctttactgcagaaggatccgagtgttctgcgtcgttcttgctggcgagacggtagcgcgggacagatggttcctgcgtaatgcaacttggggttaagatctgtcctccttagtaccatgctaagtgtaataagtgaggcagcaaaacacaaatacgacataatctaaaccttctgatatagagaattaagtgatgattctcataaacttggagatgtcaagggagaggaggtgagagatattagtcaaaggttacaaagcttgattaaatgggatctattctactgatccattgattatcgaggtgactgtaataatattgaacacttatatattttaaagttgtcaaaagagtagaaattaagtgttcttaactcaatgaaagaagtgtgtcaggtgatggacatgtgtggattagctagacttaatcagttcacaatgtctgtatggattatgtattgtaagtacagataatctctattctcaactaaaataaaattgattaaaattgcattctatgtcgcaggccccagctctgccccctcagggctgcacggctgagccaagtgggctggtaggggaagtccaggccagcgggcagcgggtgcagccaaggcagtgctttcttccctggagcatgcggcttgtgctggatgctgcaaaaagagaggagtgtgtgaaggtgatgcgactggtaggggcggcacgagggacttgggccatgggctgggtgccttggggtggcagaaccgtggcagagcaggccaggccgtggtgggggtggagagacagggttccggttggttaatggcaccagttggccgggcttggcccctgacttaactttctgggtgcggcatgcgtgccagttgccgggggctgggggatggggggacctgaacgaggatgtcagtttggaggtctggttaatctatggagtcactgaaagtagatcagtatttatcactagaacacgaatggaatttgggagtctattccacctagagggatattctctctgcctagacacacagctagggtcga

SEQ ID NO: 979 - DNA, 960 bp, Cricetulus sp.
  misc_feature (24)..(41): n is a, c, g, or t
aacggatctggctcaaattctaannnnnnnnnnnnnnnnnnatgactgagagtaaacctcattataatatttagttgctttgtatccctgtaagtcatttaatcctgtggtctccgcttactcaactgtaaaaatggagataaaacccgcaacctctgagagtgctccaataacaaaatgacaaaagcatccaaaactcttagttagtgcaggtacaaagtggctaataataaaaaccaatttcagggctggagatacggatcttttagaggatctgggttcatcaccagcaaccacatggtgctcaccacgcctctaactcagtctcaggagatccgacgccacttccgatctctgctgacacgaggcgcgtacgcagtgcacacatacaggtacgcaaaatacccatacacataaaagaaacagacctttaaaaagtaaaaaccaattgtaacaatacaatataggctgcaaatctaaggttttcaggcagggggctcctccgggaatcggcggaggcgtcagggtggcgtcacctggctgtgacagcctgcggcccggatgcacagagcgcgcggaggtcgaggggctggcggagagcgagccaggcgccgcagcgaggggcccaggtgggacatcatgcagcaggacatcgggcttcctaagaggaccaatggctggaacgaggcagcccaacctcagaaaggcgacagagagctgaagagcctagcaccagctctggaaaacacctgagatcggagttagtccgggttgggaagggggtggaaatgaactcaaatatctcacgctcctgaaccggaaatgcttgtgctctcgctagagacgttctaggcacgaaagccggtgactcgatagccggaagtcatccgaacgtaggctaggtctaccaaggcggggttagacagcaggctgttccgtttggcagccaggatggcatcg

SEQ ID NO: 980 - DNA, 528 bp, Mesocricetus auratus
  misc_feature (143)..(491): n is a, c, g, or t
attctgcttggaatatgatggcgtcttccctgttttgcccttagactattcgagttgcctctgtggattagggctggaggcagcacggatagtctgatggccaaataaggcaggcaagacagctatttgtaactgcgaaatannnnnnnnnnnnnnnnnnnnnnnnnnnnnnnnnnnnnnnnnnnnnnnnnnnnnnnnnnnnnnnnnnnnnnnnnnnnnnnnnnnnnnnnnnnnnnnnnnnnnnnnnnnnnnnnnnnnnnnnnnnnnnnnnnnnnnnnnnnnnnnnnnnnnnnnnnnnnnnnnnnnnnnnnnnnnnnnnnnnnnnnnnnnnnnnnnnnnnnnnnnnnnnnnnnnnnnnnnnnnnnnnnnnnnnnnnnnnnnnnnnnnnnnnnnnnnnnnnnnnnnnnnnnnnnnnnnnnnnnnnnnnnnnnnnnnnnnnnnnnnnnnnnnnnnnnnnnnnnnnnnnnnnnnnnnnnnnnnnnnnnnnnnnncttcagcggggccagcagcaactagctgagcagggtc

SEQ ID NO: 981 - DNA, 2269 bp, Cricetulus sp.
  misc_feature (128)..(165): n is a, c, g, or t
  misc_feature (910)..(974): n is a, c, g, or t
  misc_feature (1189)..(1223): n is a, c, g, or t
  misc_feature (1428)..(1443): n is a, c, g, or t
  misc_feature (1445)..(1481): n is a, c, g, or t
  misc_feature (2124)..(2168): n is a, c, g, or t
gagctccaggacagcaagagcaaatagttaggccctgtctcaacatccccgacaaaatctccacaggtgatctatcaaccaatatcatcagttggcggaaccctgactatgcagaaaattaggttttnnnnnnnnnnnnnnnnnnnnnnnnnnnnnnnnnnnnnncacgcctggaacccaaagtcccacacacaggtctaatccactcacggcaactctgtccttcaggccattgagggaaaccgtgagtggccacaggcgggcaaaaaactcctccagcacacaccaggaagtcacctctccgagaccgtccccatcaggagttaaatctaccgcgcgaggttggacattaagcgagctgtttgagcactgcacacaggcgcgcacacacgcacgcaactgcctttattgggagctgtctctcaggagaacagcggcccgcggcgcaacactagagccccgggatgttctcggctctgccgagggcagccgaggccgcgagctggccccagtggctctaggccctcaacttccggcgctctccggctcctcagcgggaacgcgcggcgagcagttgaggccgccgcggattccaacgggttggggacgttcgcagcgcgggggatgctcgggccacccaccacccccccacccccccggccacgaggcccggagctccaggtagcagtgcagcactaggcggcgtccgggccacgccgcccaattcccccgagccccttccacaagccgcgccaaacgggtctgcaccgcgcaggcggcgaaggcgagccgctagggcgatgcgaagacgcgcacaccagccagtcaacgtccgccttgcgtagagctaggcccgcccccaggggctgccgtcaggccccgcccccggcgacccgcccccacgccgtannnnnnnnnnnnnnnnnnnnnnnnnnnnnnnnnnnnnnnnnnnnnnnnnnnnnnnnnnnnnnnnnggttggtggaggaggggtcacgaggacgccgtcgtcgcctttccagaggcgattactgggcaggctcagtcttttgcctcagacgctagctgtagctggcagtcgctcgtacgtgctccagagtccaccgtgcccgtcgctgccgcccagctcgcgtgggttccccgaggctctcccgagctgcgcccttcgccgcacgcgccgtcgtcgcaacnnnnnnnnnnnnnnnnnnnnnnnnnnnnnnnnnnnctcgcgcgcgccgacgcgacggacgcctgggcctgctttctgaggggcgcgcgcgcgcggtcgctcaggggaggagggcctgcgcgcaatcccgggcgcgttcgagggcgcatgctggggaaagtctcgcgcgactagcggagagggtctcgcggtgtttggcccctgacttggtggtgggggagagccgaggcggtcccgggannnnnnnnnnnnnnnnannnnnnnnnnnnnnnnnnnnnnnnnnnnnnnnnnnnngggcggtgagatcggagccgccgcgaggggagaaggggcgacaggcccgccgaggggagatgggacccaactcgtgggccggcgccgctggcccgcctcctggcgcacgtgctccggtgcgcggcccgccacgtgggttttggcgctctgcgtgtgttccgcgtctcgggctcggggagtcgcggggtaccggggagggggacagcgggactgagctaggtgggttccccggcgatccccagcgcctgtccgtgacgggcaggccagcacgtggtggacacctgagggagcgcgtggtggcctgcgtggtacctccacgtggcccgcctccagagtggcgacgtcggaagtggttctgtgaaagacgtgctcctctccagaaggggctacccaaatagatacccctgccccggcagatgatttagagtgaaattcaaagggcaatgaatgactagtagattgtcttcagttgtctctggaagggaaagacaagttatataggtgattctcaggaaagattgccacatataataatgccaatgatgtcacctgtgcttagggcctttaacaatatagacagtgggcattaagaaagaagataatggcgaaacgcaaaatggcttacaaatagggtatcgacatnnnnnnnnnnnnnnnnnnnnnnnnnnnnnnnnnnnnnnnnnnnnnctaagaaaatggctcctcctccaaaagaggtggaagaagatagtgaagacgaagaaatgtccgaagatgaagaagatgacagcagtggagaagaggtatac

SEQ ID NO: 982 - DNA, 277 bp, Cricetulus sp.
atggtacccccggttcaggtctctccgctgatcaagctcggccgatactcagccctggtcctcggcatggcctacggcgctaaacgctacagttacctaaaaccccgggcagaagaggagaggagggtggcagcggaggaaaagaagagactagatgagctgaaacggatcgagagagaactggcagaaggtgacaccatactcaagtgatgcagagcccatgagcttgcctgtccttagccgctgaggatgaataaagctttgtcatgtgatggat

SEQ ID NO: 983 - DNA, 899 bp, Mesocricetus auratus
gcgcgggacagatggttcctgcgtaatgcaacttggggttaagatctgtcctccttagtaccatgctaagtgtaataagtgaggcagcaaaacacaaatacgacataatctaaaccttctgatatagagaattaagtgatgattctcataaacttggagatgtcaagggagaggaggtgagagatattagtcaaaggttacaaagcttgattaaatgggatctattctactgatccattgattatcgaggtgactgtaataatattgaacacttatatattttaaagttgtcaaaagagtagaaattaagtgttcttaactcaatgaaagaagtgtgtcaggtgatggacatgtgtggattagctagacttaatcagttcacaatgtctgtatggattatgtattgtaagtacagataatctctattctcaactaaaataaaattgattaaaattgcattctatgtcgcaggccccagctctgccccctcagggctgcacggctgagccaagtgggctggtaggggaagtccaggccagcgggcagcgggtgcagccaaggcagtgctttcttccctggagcatgcggcttgtgctggatgctgcaaaaagagaggagtgtgtgaaggtgatgcgtttcactgacagatcaacaggcactgtttgttctctttcttcctcttgaatcaaatccaaaatgctttcattcttatatttttggttgtgccatcaccacccagcttgattctgaatatgacatggttattgcctacatcaactaccaaaacctgcggttgcctgcaaaagatgaagccagataaatttcttgcactaatttgattgggtggaggtgtggctttggcgtgcttgtaagtttgggcggatgaggaagtggggcgc

SEQ ID NO: 984 - DNA, 1437 bp, Cricetus cricetus
  misc_feature (592)..(613): n is a, c, g, or t
aaaaaatatagagttaaaagataatattcacctttctctcttttggtgacctataatactgtagtttaaaattctttttggtgtgtcacatatcacttgtgggaactaaatctgaagtattcccttctgttgtgtttctttactttctcatcaggatggcaacttaacaagagtgctcctccataacctgtgtcttcgttagtagcagaaatgctttagaggtctctcctgcattccaacaagttaatgggggaaagggaatatgaccactgaagactgtggcgtctccaggcatagagtagcagccatatcaataaaaagggaaatagagcaaataatatccagactctggcatgttcctgcatatgtaaaattttgcatatgttcttatttttaaattttgttactccttttttcatgtatttgtgtatcttgtgtgtggtgggggacacatgtttgcatgcagaggtcagaggacagtttacaggagctgggtctctcctcccaccgagtggtctcagggttgttctcaggtcatctaactggcaataggcatttttcccaccccatgagtgctctcaccaataaccannnnnnnnnnnnnnnnnnnnnncttggcattctgtcatgtcatgggaaaacctccaaggcaaatcattagtgactgagtgttgggaatgacagtgccacttggtcaccagtctcttccatcatgctttctgtttcactctgaccagactcctgagcaaagccaggaatatcgttgtaattttgtttaagggacagagtctttgattggcagcaaaatctttgatcagctccgtttacaaattgtgcctggtttcagtgctgcagtgtgggtttctaagccctggaacatccttgtaagggaaacagaaacagtggggagctgttttgtgtttggttactatgatgttgatgaaggaatgaagccaggcagggtggttagactatggtcggctttggagaattgtttttactggtttcttatctttcacttttcctgtacacatctgttttaatacaggtacagcctgactgtttggactggaaaggatgacagttatcccactgaagatttactttatattcgagactactttaataaaacccaagttttctatgatattttggaaccacaaagccatgaatttaaacaagccattgggatctgagtcactctaagaatacaagaagacattttctaatcattttctctcttggcttcaccatcattctctgctttgtctgaattcattgctgtattaattgtgattattggtttgtactaaattatccaatcaaaatgcttgttgtatacctactcttcctttatcatgtcttcatggctgcacacatctgaaagattttatgaactgcaataaaattgtataaaattatagtaaaaatgctcaa

SEQ ID NO: 985 - DNA, 303 bp, Cricetulus sp.
tagattttaggataagtttgaaggaagtgtgacatttaatgaagtcgtgttcaactatcccacccgggccaacatgccagtgcttcaggggctgagcctggaggtgaagaagggccagacgctggccctggtgggcagcagtggctgcgggaagagcacagtggtccagctgctcgagcggttctacgaccccatggccggaacagtggtgagagcgctttcttagtaaattgattcaagattgtatcttatgtgatcatactggcagttgagtgaaggtccaaaatcctatctgatgtaatg

SEQ ID NO: 986 - DNA, 315 bp, Cricetulus sp.
ccttctatacaattcagttacttactatttaggatcgtttcctaaaaagaaaaacaaaacaaaaaaactgtaatagttgtggatttctgtttttcagctcctagatggacaagaagcaaagaaactcaatatccagtggctccgagcccaacttggcattgtgtcccaagaacctgtcctgtttgactgcagcattgccgagaacatcgcttatggtgacaacagccgggttgtgtcccaggatgagatcgtgagggcagccaaagcagccaacatccaccccttcattgagacactgccccaagtgagctaact

SEQ ID NO: 987 - DNA, 251 bp, Cricetulus sp.
atcttactatagaaatgtctattgattttaatttttgtcttgtaaaaagaactggcttaaaactgcattacctttattgatgactaactttcagaaatacaaaacaagagtaggagacaaggggactcagctctcaggaggccagaagcagaggcttgctatccgtcgcgccctcattagacagcctcgggtcttgctgctagatgaagccacgtcagctctggatactgagagtgaaaaggtctgtctcc

SEQ ID NO: 988 - DNA, 92 bp, Cricetulus sp.
gtgagcacgcttttgtcatcagatcacctaggttttatcatacaaatgcctggtgttatttactcttgattatgagtgcatcgttttgtttt

SEQ ID NO: 989 - DNA, 86 bp, Cricetulus sp.
gctgcaatcccacagtcttaaagtatgattttgctaagtctgaattgtgctggtgctgaagttgatctgtgaacccttgctcccag

SEQ ID NO: 990 - DNA, 97 bp, Cricetulus sp.
gtgagcacgttttttatactcagaacatttgggggttttaattatccagatagctgggtgtgtttaacccttgaacataggtcaatgattttttttg

SEQ ID NO: 991 - DNA, 89 bp, Cricetulus sp.
acatagtagagagaaatcctggcctggttatagagggaggactaaaggagaagggattttatcatagtcttttgtgtgactggaaacag

SEQ ID NO: 992 - DNA, 93 bp, Cricetulus sp.
cccagaattttatactatgaaataatggcagcaattttgctaaaatctgaatcatgctggtgctgaagttgatctgtgaacctttgctcccag

SEQ ID NO: 993 - DNA, 274 bp, Cricetulus sp.
  misc_feature (129)..(146): n is a, c, g, or t
cgcaagctggtaaataccatagatggatgggttcatttaaaatgcagtgtgggggagtgttgggacctgccaaaataagtaaagtctgttcactacattaattaagtagacttgtacatgtggtctatnnnnnnnnnnnnnnnnnntaataccaattcacaattttttcctttcaagtaaatgtggtttgccatcttgaggaattgcaagcagtgctgagagtatgccctgttgataaacaatgcctgttctttttttcctacaggctgaccag

SEQ ID NO: 994 - DNA, 356 bp, Cricetulus longicaudatus
gtgtttgtgtccccaatcccgcccgccgggagggttgcgatctgttgcggatctgttgtgttggttcttggacgatcggatcgagacggctgtcgggcgacacctagcggcggcagtaagctacaacacgcctggtccccgggcgctcggtgacaagggcggtgactcgcctgcagtcagccgaccagagcgacgagaatccaggcacgctggcgggtgtgtcccggaggcggtgcgacgtttgtgaacggtctctgtgcaggaggttgtaccggtagaataaacgagaaggtggtggctgttctgtgtgctaccatggccagatggaggtgtggtggcggcttgagctggtcgac

SEQ ID NO: 995 - DNA, 444 bp, Mesocricetus auratus
  misc_feature (133)..(182): n is a, c, g, or t
agccctaggtgaccagctataatcagaagccatcagcaagcaggttattgttctaccatgaccctgtggatgcgccttctgcccctgttgaccctgctggtcctgtgggagcccaaccctgcccaggcttttnnnnnnnnnnnnnnnnnnnnnnnnnnnnnnnnnnnnnnnnnnnnnnnnnngtgtggggagcgtggcttcttctacacacccaagtcccgtcgtggagtggaggacccacaagtggcacaactggagctgggtggtggccccggagcagatgaccttcagaccttggcgctggaggtggcccagcagaagcgcggcattgtggatcagtgctgcaccagcatctgctcgctctaccagctagagaactactgcaactagtcctcaccactacccagcccaccttcctgcagcgaataaaacctttgaaggagc

SEQ ID NO: 996 - DNA, 648 bp, Mesocricetus auratus
acaacaggaggcctcatttcctatatcccaagtcccgcttgatccgtagcctcctccctcctccccactatgggcccctgagcttccacgacatgttccagcctttcctcgagatgatacaccaggcgcaacaggccatggatgtccagttccacagcccagccttccagttcccggacatggatttgttaagagaaggtgaagatgaccgtgcagtgtgcaaggagatccgccacaactccacaggatgcctgaagatgaagggccagtgtgagaaatgccaggagatcttgtctgtggactgttcagccaacaacccagcacaggctcacctgcgccaggagctgaacgactccctccaggtggccgagaggttgacccagcgatacaacgagctgctccattccctccagaccaagatgctcaatacctcatccctgctggagcagctgaacgagcagttcaactgggtgtcccagctggctaacctcacacagggcgaggaccagtactaccttcgcgtctccacagtaacaacccactcttctgactcagaagtcccctcccgtgtcacgtaggtggtggtgaagctgtttgactctgaccccatcacagtggtgttaccagaagaagtctccaaggatcacc

SEQ ID NO: 997 - DNA, 204 bp, Mesocricetus auratus
tacctggcccaagctccaaaccacgttgtggtctcacggaaagagaaggcagcccgggttagcacagtgctgcttaaccagcagacttcatttggaaggggtgtatctgactgcactacgaacttctgtatgttcaaatctgacaccagcgaccttctgttcagagatgacaccaaatgcttgtttaaacttcctgatggtatc

SEQ ID NO: 998 - DNA, 890 bp, Mesocricetus auratus
  misc_feature (854)..(890): n is a, c, g, or t
agcggctttcctctgttgtagtccacagtgcaacacatcttctcagagatgcagctgcctttgactccactgtccttctctgggacactccttttgatggcaatgtcaaattttctcctttgggaacatgtgacctcctcagcaagtcctcgtttatccactagaaacttgtaccagcgtgtggttgaattgtcacactgcacccatgatcttgcctcaaaagttttcactgactttaatatgaagtttggtaagagtatttgcagacagaaactgatgttatacacctgccacacctcctctattcctactccagaaaacagagagcaagtccaccaaacaaactcggaagatctcctgaaagtgacgatcagtgttttacaagcctgggaggagcctgtgaagcacatggtggctgcagtagctgctcttccaggtacatctgatgccatgctgtcaagagcaaaagagttggaggaaagagttttaggccttctggagggactgaagatcatactcaacaggattcatcctggagctgttgaaaatgactatactttctggtctggatggtcagatttgcagtcatctgatgaagctactcgtaacattgctttttatactatgggccgttgcctgcgcagggatacacacaaagttgataattatctcaaggttttgaaatgccgagatatccataataacaactgctgagctcaaatccttaaccactgtcatggagaaggtccagacctcaaagttccattgagtctttaccttttggttcattccttggtttaatgggcatgttattcaaaaataaacattgattctttgaaatgcttaattcaaannnnnnnnnnnnnnnnnnnnnnnnnnnnnnnnnnnnn

SEQ ID NO: 999 - DNA, 862 bp, Mesocricetus auratus
  misc_feature (611)..(627): n is a, c, g, or t
  misc_feature (741)..(772): n is a, c, g, or t
tctagggaagggtggagtcagtcttctacagacagactgcagagaggtatgatggttatgaagcccccacatgcctctctggaaacttcctatacagttgtagttcggctggcaaaactgaaatataatgtgctttaaagtaatggtccatttgcaaagtatcggacagtgggattctagtgaaacaggtagaaatggggatctagataactccctggaatccactgtatcatccgtctctcacaagtgtgtgggtttatgtataaaatccagttggacctgttactggaatttgaggacagctcaacattacagaagcatcctccaccccaagaaatggcatattcatcctgtgttttcctggccctgaagcaggatgaagcctttccttgccatcattttttgcttcttgatcctgggagttgacagccaaaggtggttccagttcatgaaagaagctggccaaggtaaggacaaaggatgggggcaggaggttgtacgtgtgaggtttcaagtacttaccagagcagggaccacataattaagggaaaacatccttgtgaagtccccatggacagagaagcagtgtctctcttcccgtgtagttctgnnnnnnnnnnnnnnnnnttgacctttttctgtgaggatccgaagcctgagatcacgtcctgatgtgtctgcagctttcccacaggaatgtaggaacaatctgtccttgtaagatgcagattcaccagccannnnnnnnnnnnnnnnnnnnnnnnnnnnnnnnacgatgaacagctcatttctatgtggctgtgagacaaagtgtatctcaaggtgctacaatattcagaccaggcacaggaacaactgtgag

SEQ ID NO: 1000 - DNA, 2214 bp, Cricetulus longicaudatus
ctaaaacatcccaagtagggagacttctcattggtcagctaggtaacctggggtagccagtgaggccctgggccgacctctgaggtcatcccgcatacagggtcacagcacctaaaagaacagaagcaagccgaattatctcctaactctcttggccccaagctgcctcttcgcgatggcctcagccccgcctggcgtcgcacgtcagcactgcgggccacacccctgcgcacgggttgggtccggcgatatgatgaaacttcccgcacgcgttacagtagcccggctgctctaaggtaagaagcagtcctctgctccttcgtgtccctgtgctgcctcctctcccgcctcctctggccctagccaccagcgagcagagtgcctgcagttctcctgcaggatgtgtggcatttgggccctctttggcagcgatgactgcctttccgtgcagtgcctgagtgcaatgaagattgcacacagagggccagatgcatttcgttttgagaatgtcaatggatataccaactgctgctttggatttcaccggttggccgtggttgaccccctgtttggaatgcagccaataagagtgaagaaatacccttatctgtggctctgttacaatggtgaaatttacaaccacaaggcgctacaacaacgctttgaattcgagtatcagaccaatgtggatggtgagattatcctgcatctctatgacaaaggaggtatcgagcaaaccatttgtatgttggatggggtgtttgcattcatcttgctggacactgccaacaagaaagtttttctgggcagagatacctatggagtcaggcccttgtttaaagccatgacagaagatggatttctggctgtgtgttcagaagctaaagggctcgtttccttaaagcactccacaactcccttcttaaaagtggagcccttccttcctggacactacgaagttttggatttaaaaccaaatggcaaagttgcatctgtggagatggtgaaataccatcactgcagagatgaaccactgcacgccctctacgacagcgtggagaaactcttccaaggctttgagttagaaacggtgaagagcaatcttcgtatcctgtttgacagtgctgtcaggaagcgcttgatgacggacaggaggatcggctgccttttatcagggggcctggactcgagcttggttgccgcctccctgctgaagcaactcaaggaggctcaagtacagtatccactccagacatttgcaattggcatggaagacagccctgatctactagccgctagaaaggtggcaaattatattggaagcgagcatcacgaagtcttatttaattctgaagaaggcattcaggccctggatgaggtcatattttccttggaaacttacgacattacaacagttcgagcatctgtaggtatgtatctaatttccaagtatattcggaagaacacagacagcgtggtgatcttctctggagaagggtcagatgaacttacacagggctacatatatttccacaaggctccttctccagagaaagcagaggaggagagtgagagactgctgaaggaactctacctgtttgatgttctccgagccgaccgaactactgctgcccacggtcttgaactgagagtcccgtttctggatcatcggttttcctcctattacttgtcactgccaccagaaatgagaattccaaaaaatgggatagaaaaacatctccttcgagagacgtttgaggactccaacctgctacccaaagagattctctggagaccaaaagaagccttcagtgatgggatcacctcagttaagaactcctggtttaagattctacaggattatgttgaacatcaggttgatgatgaaatgatggcaacagcagcccagaagtttcccttcaatactcccaaaactaaagaaggctattactaccgccagatctttgaacgccattacccaggccgggctgattggctgacccattattggatgcccaagtggatcaatgccaccgatccttctgcccgaactctcacccactataagtcagctgccaaagcttagatattctctaaactctagtgtaaaagtgttcttctcactctgaaggcagagaccgtgagacaaacacagtaatgcaaatcaaccatcaactgctcaggcttacataggcatggaaagaaataaaaaca

SEQ ID NO: 1001 - DNA, 261 bp, Cricetulus sp.
  misc_feature (12)..(12): n is a, c, g, or t
ggactagtgtcncagcagctgagagttagtcctctgtcccttgcagggagagcatcctctggacgcaggattgcctgttccatttattagctgtcagtcatgggtcagctgttttcttcacctaaggatgaacagcatgaagatttggcctccagctttacccaatattttaagaagtttaagacagtagacacaatcattcctcaggaaactctggcttcaattgggtcaagcctgacaagaggaaacattcaggtagtc

SEQ ID NO: 1002 - DNA, 242 bp, Cricetulus sp.
ggactacatgagagtcacagtgtgagatgaggttcagtgcatctctgctgaggaagggaaattcccaggctctaagcccaacccctcattccttcggctctccggaccaaaggacaccattttggcaggttataccaccaactaggcaaacatcttacaagatgcaatggccatactaattataccctctgcaaagcccaacttgaaaccttcacttgggaacataatcgtatcgctagtcc

SEQ ID NO: 1003 - DNA, 906 bp, Cricetulus migratorius
  misc_feature (26)..(47): n is a, c, g, or t
cggctttctgtctcccactcaagtannnnnnnnnnnnnnnnnnnnnntcatagccctggacaaagagcatggacaagatgctgctgctgcttggggtatctatcctcctttcagaagtctttgctcagacagacctcacaggaaaggtatttgtgttccccagagagtctgaaagtgattatgtgaagctgatcccacgtctggaaaaaccactggagaacttcacactgtgttttcgaacctatactgacctttcccgccctcacagtcttttctcctacaatacaaagaacaaagacaatgagctgctaatttataaggaaagaatgggagaatacggattgtacattgaaaatctgggagccatagtccgtggggtggaagaatttgcttctccggtgcatttctgcaccagttgggagtcctcttctggcattgctgaattttgggtcaatgggataccttgggtaaaaaagggtctgaagaaggggtacactgtgaaaacccaacccagtattatcctaggacaggagcaggataattatggaggagggtttgataagtcccagtcctttgtaggggagatgggggatttgaacatgtgggactctgtgctgaccccagaagaaattaaatctgtatatgaaggttcctggcttgaggctaacattctagattggcggactttgaactatgaaatgagtggctatgcagttatcaggcctcggtgtgtggcattaagctcttacaacaaaatctcatgaaaatgaaatgaccaatgtccaagaggtcaagtcagcacaactcaacacttaatcctgaatctgcagccttttctcccttgtgaacttcctgcctacttatctgcctaataaaaaattatcaagttcaaaaaaacgatatcaa

SEQ ID NO: 1004 - DNA, 1671 bp, Mesocricetus auratus
agatctgcctgcccctgcctcccaaatgctgggatttaggcatatgccaccatgcccagcttttccctctacttttgacctagaaatgtaagagaatctaagcagatatttgaatatttgagaaaagtacttaatgagatccggtgatgtcctcccatccaagtaccatacttctgagctgagaggagattggctcttcagtgtcccatggccttagactgtagtgactctagttttcctctggctcccagaaatgtgtcctgagaatggctcttgtgcaccggaaggccctggtcttttgcagtgcgtttgtgcggatggtttccacggatacaagtgtatgaggcaggtaaggaactgggcctttcacaactaaaggttcttgcatttggcaagaacctcccaggaagatacaaggagctgacgctagttgctggtaggcaacttcaagggaagtgcctggaggaggggctgcgtggctaagaaagaagtaggtcagagagaccctgtgttctgctgtgacttgtttgtttgtttgctaatcacagggctccttttcgctgcttatgttctttgggattctggggtccaccacgctagccatctccattctactttggggaactcagcgccgaaaggccaaggcttcatgaacctcacagggcttcttgctcacccgagatcgctctgatcatgacaaacattactcgccagccagcggatcctgctcaaggctgaagcggccattgataatgaaggaaggtgtcaaattttaccacttcggggtggtggacactcggttcaggagcggacgagtacttgcatgtattattgactacaataaacactttttttccattgttttaggaaatagtgccctacctttgcgtgttccttgcttgaggggctggtttgggacggtcgggtttctcgggtctccaggttttgcttggtgtgatgctgtggacccacccatggtcccgccccttacgtgcccggccccgcccctcacgctgccggctgcctgcgccgtcgcagtcgtgctccagctcagtacgattagggctgccgcttaccgcgcccgcctgctctccagcgccccgctcagcgagccacgtggaccaacttcggcgcgcggtgttcgcttggttccagtggggctcgccgcgcctcccgcttctcggtgctcgcctcgtctcagctccgaccccatggcggctctggtgttggaggacgggtcggtgctgcagggccggccctttggggccgctgtgtcgactgctggggaagtgggtaagcaagcccgagcggcgtgcctaacctgtccacccctcctgcacacccctctctccgattcggtggctccagctccctctcaccgctcacgaccgaagcagtcacctcctccgggatctgcagcgctcggggcagtgttccgaaggctgcccttgccagatctcagccctgcctctttcttcagtgtttcagaccggcatggtcggctacccagaggccctcactgacccttcctacaaagctcagatcctggtgctcacgtaccctctcatcggcaactacggcattccctcagatgaagaggacgagttcggcctgagcaaggtagtcacacccagtgctttctctacatcccttctcacgtcagaagttaac

SEQ ID NO: 1005 - DNA, 317 bp, Cricetulus sp.
aagcttgtcttgtaattcaaaccactttcctgtggatcatcaaaattcttgtttctctgtgttaagcacacagaataaaaaatcaggatgatgccccacaacatttgcctatgtattagaaagccatcatgaggtacatggaaggaaattgtgatctatctggccctaagggaagatggaaaaagagataaatggaaataaaagctgtgagctgtttctgctccaaactgtaaacatctttgtggtatttttggcagatggagtggtctattttgttggttttggtactgaagtcataattaagagggttgcttggg

SEQ ID NO: 1006 - DNA, 321 bp, Cricetulus sp.
aagcttgccttgtatttcaagccactttgatgtggagcatcaaaattcttgtttctatgtatgcttatacagaataaagtatcaacctgaggccccacatcatttgcccatgtattagaaagcaatcatgaggtactcggaaggaaaccatgatctatttctggcaccaagggatggtggaaaaggagaaaaaatggaaatgcaaactgtgtgcactatctgctctgaactgtaaacatcaatgcggaattgttggcagatggcttgtttctattttgttggttttcagaactgaggccataattaagagggatgcttggg

SEQ ID NO: 1007 - DNA, 2601 bp, Cricetus cricetus
  misc_feature (1502)..(1531): n is a, c, g, or t
  misc_feature (2336)..(2377): n is a, c, g, or t
  misc_feature (2503)..(2521): n is a, c, g, or t
gaattccttgatataagcctgcagttctgtccatatactcaagtaagctttgacccagtccacatgcttcttatccacatctttgtactccttgaggactcggtttgtgtaaaacatggcagcatcagtcatctctttcacaaaggggccaggttttgcagccagagccacccagcccagggcctggatgctttcactgacagctgacaaatgattgaaaaacttgctgcctcggttcttctcccggaaggttataacttcttgaatctgctctgagataggtgccaacaaatcagagagcttattaccggccggctgctggcactgagaagctgtaaccaggagagctccaacttcaggcctgtgtggaccatctctgcatgtttctgcacgtctcccccaatctccttactcatcttcaacttgtggcctccccgcaacgaggacaggaagatgccacccaagcgcatagctaagagaaggtcacccccagaagatgccattcccaaaagcaagaaagttaaagtctcacacaggtctcacaaaacagaaccaggcttggtgctgacactgggccagggcgacgtgggccagctggggctgggtgagagtgtgctggagaggaagaagccggccttggtgccccttctgcaagatgttgtgcaggctgaggctgggggcatgcataccgtgtgtctgaaccaaagtggccaggtctactcctttggctgcaatgatgagggtgccctgggaagggacacatcagtcgagggctcagagatggtccctggcaaagtggaactgcaagagaaggtggtacaagtgtcagcaggggacagtcacacagcagctcttactgaagatggccgtgtcttcctctggggctctttccgggataataacggtgtgatcgggttgttggagcccatgaagaagagcatggttcctgttcaagtgcagctggacatgcctgtggtaaaggtagcctcagggaatgaccatttggtgatgctgacgactgacggagacctctacaccttggggtgtggagagcagggtcagctgggccgtgtgcctgagttatttgccaaccgaggtggccgtcagggccttgagcgactcctggtccccaagtgtgtgctgctgaaatcccggggaagtcggggccgtgtgcggttccaagatgccttctgtggggcctatctcacttttgccatctcccgtgagggccatgtatatggctttggcctctcgaactatcaccagcttggaactccgggcactgcatcttgcttcattcctcagaacttaacatccttcaagaattccaccaagtcctgggtgggcttctctggtggccagcaccatacaatctgcatggattcagaaggaaaagcatacagcctgggcagggctgaatatgggcggctgggccttggggagggtgctgaggagaagagcatacccaccctcatttcccgactgcccgtcgtctcctctgnnnnnnnnnnnnnnnnnnnnnnnnnnnnnntgtccaaggatggtcgtgtttttgcctggggcatgggcaccaactaccagctgggcacagggcaggatgaagatgcctggagccctgtggaaatgaccggcaaacagctggagaaccgagtggtcttaactgtatccagcgggggccagcacacagtcttactggttaaggacaaggaacagagctgatgaagtctttgtgggcctggcttctggcccccaacccaccttcacagaacaggaaaacagccagatgcaaattccagaaggcccctccccagccctgaacagctgtcatctcctgtcttacccatcaccaccacagaatcctttccttctgtttcgtcctcttttctagaatcatcctgagaagtacaggatgagggaggatgggaagggggtctcagaaggagtttgcttacttacgtccttacaccgttccctatattaccctacttcctgtggtcctagcaggccctggctcattgcctacaaaacccaaagcttggggtttgggtgcccatactctgaaaagttgggaactccgttcacacccccattcctatgtgccactttttctgttcctaacatcagtttaaaaggagacggatggtacagtcatcagatccagttgtcatggacctatgcctagagagatctggacaaaggcttcacaaggctggggtgaccctaagccaaatatttggctctaaacaggtgtccatgggcaaaaacagcgatccacttgaaagaaatccaactagctgtctcccaaaagcaccaaagcacccactgtctcttgggcnnnnnnnnnnnnnnnnnnnnnnnnnnnnnnnnnnnnnnnnnnggactggaaagccatgctgggctctgctgggcagtcaaggcagggtactggggaagcgtggaggggaacacttggagggacggaggctggtcctaagaaaaggaagaacagtggttgagacagtannnnnnnnnnnnnnnnnnnaattataaagtattttggaggggagagtgaaagtcttttaacactttgaataaatttagagttttataaaaatggaattc

SEQ ID NO: 1008 - DNA, 2726 bp, Cricetulus griseus
  misc_feature (563)..(612): n is a, c, g, or t
  misc_feature (1054)..(1080): n is a, c, g, or t
  misc_feature (1948)..(1965): n is a, c, g, or t
  misc_feature (1968)..(1991): n is a, c, g, or t
  misc_feature (2033)..(2048): n is a, c, g, or t
  misc_feature (2051)..(2068): n is a, c, g, or t
catggtgatttttctttagatattctgggcctcctgaaactgacaagattctgtaaagcaaaagacataatcaacaagataagacagcagtgcaaacaatgggaaaagttcttcaccaaccccatatctagccaagggcaaatttctaaaacatacaaagaactgatgaaagcagtcaacaaaacaccaaataatcgccctcactctccgccaccagcctgctttgccagatgagaccagtgtcccgggcgctggctcctcatgtcactcgggcctatgccaatgatgtaaaatgtggggcaaatccttgatccttaaagcttcaagttgtagaccttttagccgatgctgtagctgttacaatggggccaaagggaagaacagtgattattgaacagagttgaggaagtcccaaagtaacaaaagatggggtcatttttacaaaggcaattgatctaaaggatacatacaaataatatcagagctaaacttgttcaagttgttgccaataactcaaatgaagaggctgggatggcactaccactgctactgttctggcaagnnnnnnnnnnnnnnnnnnnnnnnnnnnnnnnnnnnnnnnnnnnnnnnnnntagaaatctggagaagtgtgatgttggctgttgatgctgtaattgctgaactaacaaaacaatctaaacatgtgacaacccatgaagaaatttctcaggttgctacaatttctgcaaatggacacatagacattggaaacatcatatctgatgcaatgaaacatgttggagggaaagacgtcatcacactgaaggatagaaataccctgaatgatgaattagaaattattggaggcatgaagtttgaaagaagatgtatttctcagacatcaataagtcaaaaatgtgaattccaagatgcctatgttctattgagtgaaaagaaaatttctattgtcgagcccattactgctcataggaaacaaatggtgatatttgctgaagatgttgatggagaagctctaagcacactggttttgaacaggctaaaagctggtcttcnnnnnnnnnnnnnnnnnnnnnnnnnnntttggggacaataggaagaataagcttaaagatacggctattgctactgatggtgagcaatttggagaacaggggctaaaactaaatattgatgatggtcaagttcatgatttaggaaaatttggagaggtcattgtccccaaagatgatgccatgcttttgaaaggaactgatgactaaactcaaattgagaaaccaattcaagaaatcactaagcagctagacatcacaactagtgaatatgaaaaggaaaagctaaacgaaacacttgctaaactttcagatggtgcagctgtgtttaaggttggaggaacaagggatgttgaagtgaaggagaagaaagacagagttacaaatgctctcaatgctacaagagcagctgttgaaaagggcattgttttaggacttagctgtgctctgcctctgtgcatcccagccttggattccttaaagccttcaaatgaagatcagaaaataggtatagaaattattaaaagagcactcaaaattcctgcagtgacaattgctgagaatgcaggtgttgaataatctttgagagttgagaaaattctgcagggttcctagggagttggttattaggctatgcccgcaaattttgtgaacatggtagaaaaaggaatcattaatccaacaaaggtaaatgagtcagcaattcttaaacattggatggcttgttctatggtatgtgttttcattaatcattttataaacatttttttgtaggttgtaagaactgctttagtagatgcctccttgctaacttcagcagaagctgtagtgacagaaattccaaaagaagagaaggaccttggaatgcgcacacatgcctttaatcctagcacttgcnnnnnnnnnnnnnnnnnntannnnnnnnnnnnnnnnnnnnnnnnactccggagtgagtgccaggatagtctccaaagctatccaannnnnnnnnnnnnnnngannnnnnnnnnnnnnnnnnagacatttgtacattcctgaaaaaaacccaaataatccaattaaactaggggtcagcctaataaagatacccgaataggtttttacatcttaagagaaaaatctactaataaatgacttggagcaggtccttcacagacaatatttagtgagagtaggtagcctcatgtgggttagtagttccagttgcttcaaaatgccctcaccttttgtcataggctcatgtggaggatctactccattggatggtgatattaaaagtagcacatgggtacatgccttaagatattaagatccccaagtaaaaactgcatctcagatgctctctgtttcttgggccatgatatgggcagtgagatttctgtcacacttgccaggaaacacttatgatctgtctgtcacaatctcttatattgtcaagtacttaaccaaacacaatcacccatgacctctcatatcctcctggacttagacaggaggcacaagtctactcaggtataaatatttttacttctgatgccccacagtaacctacaatggcttcagtccagtacacaggtaagtaaacccaccaatataccattccagctgattgataacctcttagatacatcccatatgctgcagttcccaaatggagacaacccaaagtttcttga

SEQ ID NO: 1009 - DNA, 1845 bp, Cricetulus griseus
gttccccgctgtggtggccgcagtccggcctctgagcggagatcccggccgtccgcggtgttagcgaggccagccaggttccctaacgatggagggccctttgtccgtgttcggggaccgcagcactggagaggcgatccgctcccagaatgttatggctgcagcttccattgccaacattgtgaaaagttctctggggccagttggcttggataaaatgttggtggatgacattggtgatgtaaccattaccaacgatggggccaccatcctgaagttactggaggtagaacaccctgcagctaaagttctttgtgagctggctgacttgcaagacaaagaagtgggagatggaactacctctgtggtaattattgcagcggagcttctgaaaaatgcagatgaactagtcaaacagaaaattcatccaacatcagttattagtggctatcggcttgcctgcaaggaagcagtgcgctatatcagtgagaacctaattattaacacagacgaacttggaagagactgtctgattaatgccgctaagacatccatgtcttccaaaattattggaataaatggtgatttctttgctaatatggtggtagatgctgtacttgctgtcaaatacacagatctgagaggccagcctcgatatccagtcaattctgttaatattctgaaagcccatggaagaagtcaggtagaaagcatgctgatcaatggctatgcactgaactgtgtggtgggatctcagggcatgcccaagaggatagttaatgcaaaaattgcatgtcttgacttcagcctgcagaaaacaaaaatgaagcttggtgtgcaggtggttattacagatcctgagaaattggaccaaattagacagagagaatcagacatcaccaaggagagaattgaaaagattctggcgactggggccaatgttattctgaccactggtgggatagatgatatgtgtctgaagtactttgtggaggctggtgccatggctgttagacgagttctaaaaagggatctcaagcgtatcgctaaagcttctggagcaagtatcctgtccacactggccaatttggaaggcgaagaaacttttgaagctaccatgctggggcaagcagaagaagtggtccaggagagaatttgtgatgatgagctgatcttaatcaaaaataccaaagctcgtacatctgcatcaatcatcttacgaggagcaaatgatttcatgtgtgatgaaatggagcgatctttacatgatgctctttgtgtggtgaagagagttttggagtcaaaatctgtagtcccaggaggaggtgctgtagaagccgccctgtccatataccttgaaaactatgcaaccagtatggggtctcgggaacagcttgctattgcagagtttgcaaggtctcttcttgttattcctaatacactggcagtgaatgctgcccaagactccactgacctggttgccaagttacgagcttttcacaatgaggctcaagttaacccagaacgtaaaaacctgaagtggattggtcttgatttgatcaatggaaaaccacgagacaacaagcaagcaggggtgtttgaaccaaccatagttaaagtgaagagcctgaagtttgcaacagaagctgcaatcactattcttcgaatcgatgatctgataaaattacacccggaaactaaagacgataaacatggaagttatgaaaatgctgttcactctggagcccttgatgactgattggatttcccttttatttatagcagtgtcaggtgcaatgtagccttgggtatctcacattaaagtacagtgagctgtccacctga

SEQ ID NO: 1010 - DNA, 5302 bp, Cricetulus griseus
  misc_feature (230)..(250): n is a, c, g, or t
  misc_feature (2859)..(2878): n is a, c, g, or t
  misc_feature (3003)..(3024): n is a, c, g, or t
  misc_feature (3549)..(3567): n is a, c, g, or t
  misc_feature (3746)..(3763): n is a, c, g, or t
  misc_feature (3765)..(3803): n is a, c, g, or t
  misc_feature (3815)..(3833): n is a, c, g, or t
  misc_feature (3852)..(3882): n is a, c, g, or t
agatctggtcacagcgacacgcagcacccggagtccttaataagccatcttggtcgccggcaggcttagcctccttggaaaccgcaatagaggcttcttccgggagccgggattccctccgtgacctcagaggtacacttccggaatacggaagtgacccgtctgcccgccccttccttctctctctttccggtggagaagtctggagacgacgttcaggtagggaggcnnnnnnnnnnnnnnnnnnnnngcatcctctggccaggggcgtctgcgggcttggggtcgcggtttgtgcgcggtaaccgagccaggtgcgtgatggtgacgggcggctgtccgctcgccgcgatccacccggcctggggctgcgccgtgtccgggaggcggccttctggcctgagatcggaaggtctgaggtggaagtgcggggcctgcctgggccttgccgtcacgccacagtcgtcgcccgagcgttcggggagcgtgtccctagtcgcgggtgggccgtcaccggcaccccattagattcttaggggccgtcgacgacctgcacctaacctcatgcccctcatgtggaaaatacgagcagcgttcgtatctgccccttctgtaaaccgaagcgtaaaatgggatgtcagaaaacctggtcacgcaggattagagtgcttctaacccatggtggttacccctccgagtcggacacattgcctgttggggtgccccctagtagagtaggactgatgccatatgtttacatttctctgaatagccctctcgtctccactgaggacggcaaagctacactgaacagatgtcatgtcttatggaatcgtgtttgttagcctaatttgagggtatgagcaggtgactacatcctggacctgcccttgtgcttttggcaaataagtcccaaatagtgtgtgagggaggcactacagagatcccaggtgtggttgaaacttttaaggcctaggaggaactttgtggagtaggagcatcttggttctaggaggagtataagacaggctttggtgcagtattgtcctggacagacttagcctcgggttggtcaaaggcatgcctgcagctttggcaaaaaaaaaaaaagcctctttgcttgtgtattttccctgggtcctgtgactgtacttacattattgactaggcaggaaggggttacatgtcaggtgtatttgcagttcataacaatagcaaaattagagttatgaagtagtagcaatgactttttgtgtggggggcaccacaatatgagaattgtactaaagggtcacagcgttaggttgagaaccaaagggtagactcacttgatgctgaacactgaattttaggtatggatatctttaccattaaacttcctggaaggcataccctgaccatcctgggacttgctacgtagaccataactacgatatcctcctgcctgtgactcccaggtgctggggctaaagttatacacaagcacacattgctgtggcagtgctttttaatgtttattactagtaaagggtgaaagatttggttctaaacagtgagaggctgtcagattaagaattgtgtgtggacagggagtccgttaatctgcagttggcttcagttgtgtcatgttaatcaaataaacttcccagcttaaggagagggagaggggagttgtgaatggggctttgccccaacacctgagttcagcatcctctattttggataactacttgtgaaagtttgaggtgcatattgttcattgctggaatcttaggctcatcctgaaaatgcttggagcttttgtttagaaattgtctcctctcttggcgcctcccttttagttacaactcagtaattccccaagtacaaatatgttggatattagagagccaaaggagcttgggttttcctttagtaggctaaagtatttggggatgttttgtctgttaacatggaggttctccttccactcagaaatggcacctcgcaagggaaaggaaaagaaggaagaacaggtcatcagcctcggacctcaagtggctgaaggagagaatgtatttggtgtctgccacatttttgcatctttcaacgacacctttgtccatgttactgatctttctggcaagtgagtacttggggacatgaagacataaaaccaagcctcacagggactgaggtgggagaaaaaggcataggagtttatgggattccctctaaagaattactgattttcttattttcccataaattataagagaaaacagttgaatgtagctgaggattcatccacagaaaatcaccgcaaataggaagtggaagcagaggatcagaaactcaattatcctcagctacacgcacatgtaaaatatatgcattatggaagtgattatggggataaaatgcaaaactaattgttgtattaacagggagtttgtctagatagggtccttggacccctgtaattatacacaactcctgtcttgttcagaaccaggatgtgtgcttgttggggttcagcaagtgtttcctgtgtccttgttggaaaatgaaggcatggatctgcttttgtctctagggaaactatctgccgggtgactggtggaatgaaggtaaaggctgacagagatgagtcttctccttatgcagccatgttggctgcccaggatgttgcccagaggtgcaaggagctgggcatcactgccctgcatatcaaactccgagctacgggaggaaacaggtatggaagtctagggctggacatttgtaagttcactgggcttgggggtggatctgagatttgagtctctgctgtgtctgagagcaagccgttttaggaatgtatgtatgttcttcgtcagnnnnnnnnnnnnnnnnnnnntaatcccagcactccggaaccaatataggaggaggatctaaagtttggtgctaacctgggctacacagtgagcctcaaaaataagatagtttgttcctttatgtttgtccctgtagagtgctgcnnnnnnnnnnnnnnnnnnnnnncatacatgagactgactcttccccagcaccaggtagactgggtgtggtagtatacacctgttgtctcagaaagtggaggtgaggagagctagagtttcaagttggttattggttgcatattgagtaggtggccagcttgagctgaacagtgatgcttaaatgatgaactgggggtgcatagtccagatagagacaaaacttcaagagaagcatcttggggtgagaaagaagttgggctttacagggatgattggtgtaagatatgatctaagaagcagggatggagcctctggggtcttaagttttacaaaacagagcaagggcttgggcatgaaaactagaataggtggctactgagtggaaagatactgcataggaagccctaaggaagttacatactggatgtaggagctgggaagtaggcatcacagcaaggggaggacagccacaggccaggtgactatcccctcccccccccacacacacacatgtacacttttaaaggatttgtaggcatggtggctnnnnnnnnnnnnnnnnnnntctcttggggggcgtccccccacaaaagtgggaaaaattacatgcgtatgttgcctgtgtgcatgcatgcgtgcattatcggttccctgtggaggacagaagaggaccatgaatctcttggaactggtgttgctgagccacctctccaggcctcagttagcagttttgaaagggtttgnnnnnnnnnnnnnnnnnncnnnnnnnnnnnnnnnnnnnnnnnnnnnnnnnnnnnnnnnggcactggcttnnnnnnnnnnnnnnnnnnnaaactcacagagatccgannnnnnnnnnnnnnnnnnnnnnnnnnnnnnncaccaacgcaggatttggttttgttgtgagattgtataatatatgaaaaccgtagcagcctacaaagtctagaattttgtgtaatcccctcacagtgtgcagatctttaactatagccccaccaccattcagaagtgaattaaaaccatgtgaacattcccactgacttgaccaacaatccttcattttttaggaccaagacccctggacctggagcccagtcagccctcagagctcttgctcgttcagggatgaagattgggcggattggtaagtgacccttctagctaacattgggtttattttgaagcattgaccccttccaaactatgtgatgtgcatattggttcaagcttgtctggtgactggtgcagttaacttttgttaacctgtaaaagacattgagagcgttgatttctgtaaatgccccttaactgttatattttcccatttgcaattgggaagacttaaaaaacacttgtgaatctgtcctagcagcctttttccctgctagctaaatgttaagggtatgcccttgggacagtccaagtgaataattgcacacacctggcctaaagagcaaacagccacaggtgctcagtgtaggggctctgagttagaaacttgaaggagtccttcccctctgatgtttgtgtgccttctcagagcctgtgttgtcctcgtccaatgtgggttgagatgaggaaatgacaggtgaggtgggcccttgtttattgaccactggtgatacatttggggaagaataaagtctgctagttagtctaatggctagggaggctgtgtttatgtagctatgggcaatgacattttttcttcttgcagaggatgtcacccccatcccctctgacagcacccgaaggaagggtggtcgtcgtggtcgccgtctgtgaacaggacttctcaaattattttctgttaataaattgctttgtataagctattttggttctgatgtttgtttgttttgaggcaggatctctctccatgtctatgtagaagagtctggcctccaactcagatccacatacctgtctctgcctcccaagtactggggataaaggaatgcaccaccacaccccggtgaccttaggggccacccagggcaacaccaaggcagtgttttgaggggatgttaagattgcatgtaggagcttctaatgtaggttgggggttggcaaacctgggtttgcaggctggctttctgagaatgggaacctgagagaggagatgctgaggctgccactctggcattaatttgccagccagtattttcaaagtggaactgttagtagcccatgctgtcatgggacagctaaacaccacacacacacacaccccaagcagggtagtagagatcacaagttggaagccagtttaatatggtctacttggggaattc

SEQ ID NO: 1011 - DNA, 311 bp, Cricetulus sp.
tgacctcttgtcctgtatagcaacctatttgactgcttcatggactctttgctgttgatgttgatctcctggtagcatgacctttggcctttgtaagacacacagcctttctgtaccaagcccctgtctaacctacgaccccagagtgactgacggctgtgtatttctgtagaatgctgtagaatacggttttaagtgactgacggctgtgtatttctgtagaatgctgtagaatacggttttagttgagtctttacatttagaacttgaaaggattttaaaagatcatttctcatgtgctttgtagcttt

SEQ ID NO: 1012 - DNA, 636 bp, Cricetulus sp.
  misc_feature (66)..(102): n is a, c, g, or t
tgacctcttgtcctgtatagcaacctatttggtaatgattccagcactcacagaacagcttgcgtnnnnnnnnnnnnnnnnnnnnnnnnnnnnnnnnnnnnncactaaccagtgcaagttggtaaataaactttaaagaggcataacaaaaaccttatctatcacaagtatatattagaaaaacgtttttagttaatactcggaagagctacagacagaactgaccaccatccctagctcaccagttttcctgggacagcacatgagtgtgcacacatgtgcgtgcacacacacccagggcatggtgggaacctaggtgcacacctgtgtgcacacagtatgatgggagcctgggtgcacacgtgtgtgtgcacacactcacacagggcatggtgggagcatgggttgggaatcctccggacagccctagggttttactttccaagacccactctatgagcagggcaggcagagggaggcctggctcagtccatccggcctgcccactctacattctacaaggctgcctgctcagctctgccctgcccctgctcaaattccaaaaccctttcagaaatggtcaacactctaaacatccccctactccacagccacagcagaaaactctaaggacct

SEQ ID NO: 1013 - DNA, 843 bp, Mesocricetus auratus
gtgggctttgtcatcgtcaccttccaggagcagggagaaaaagagtataagaactgtgagctcgacaaaaatcagcgtcagtgtgttgagtatgccttgaaagcacgccccttacggagatacatccccaaaaacccctaccagtacaagttctggtacgtggtgaactcctcgcctttcgaatacatgatgttcgtcctcatcatgctgaacacgctctgcctggccatgcagcactacgagcagtccaagatgttcaatgatgccatggacattctgaacatggtcttcacgggggtgttcactgtcgagatggttttgaaagtcattgcgtttaagcccaagcactatttcactgatgcatggaacacttttgatgccttaattgttgtgggtagcgtcgttgatattgctataactgaagtgaataactctgaagagagcaatagaatctccatcacctttttccgtcttttccgagtgatgcggttggtgaagcttctcagcaggggcgaaggcatccggactctgctgtggactttcattaagtccttccaggcactaccatatgtcgccctcctcatcgccatgctcttcttcatctatgcggtcatcggcatgcagatgtttgggaaagttgccatgagagataacaaccagatcaacaggaacaacaactttcagacgtttccccaggcggtgctgctgcttttcaggtgtgccacaggggaagcctggcaggagatcatgcttgcctgcctcccggggaagctgtgcgacccagactcagactacaaccccggagaggaatacacttgcggaagcaacttcgccatagtctat

SEQ ID NO: 1014 - DNA, 1711 bp, Mesocricetus auratus
agagaacctggtagaagtctctatgaagacaaattacagagcacagggccatatagggctgtgcttgggctccccctaacccttaagatggggatccctgtgctctgtgccctcttgctgatggctgcctcccaagccccgaccaggacccatgctggtgagtgcaggctcaggagggaaatgacctctgtgtgtttggcgggggctgcaccaggaaagctgtgtccctgcatcgcccagccagaccctcctgcctcttccccacccgcatcctgagctctgcgcccagctcccctcccggcctgagtaccagcctgaggtccggggaggaggtcaaggtctcaccatgctccacacccaggctcgcactcgctgcggtatttctacatcattgtttcctggcccgacctcgtggagccccggtacatggaagtcggctacgttgacgacacacagttcgtgcgcttcgacagcgacctggagaatccgagatatgagccgcgggcgccgtggatggagcaggaggggccagagtattgggagagggagacacggggagccaaagactgggaacagattttccgagttgacctgaggaccctactaggctactacaaccagagtgagggcagtgagtgaagatggaggttaagactttccatgtccctaggtaagggcctgagttatgccaggtcccaagtccaaggtccaggaggaggagaccagggaccaggaccagtttccctttcaggttagaggatacctgggtgggcggggcacgagcaggacaggagggcaaggctgacctggggtgagcagggctgaccttgggatccccgcagtctctcacatcattcagagtatggtcggctgtcacgtggggtcggacgggcgcctcctccgcgggtacagtcaggacgcctatgatggcgatgattacatcgccctgaacgaggacctgaggacgtggactgcggctgacacagccacacagatcaccaggcgcaagtgggacctggctggtgttgcagagcatgaaagggcctacctggaggacgagtgtgtgcagtggctccgcagatacctggagaacaggaaggagcagctgctgcgcacaggtgcaggggctgcgggcaaatcctacctctgacctcgggcttagttctgaggaagaagagacccctcacctgggggtaatgccccattttctacttatttttaatttttaaaatttagtacagaaaactcacactctaaaattgacaagaacaaaggctatatccctctcagtgaatatacatggttggtgaagccatcatgaattcgtggaagttccagttggattttacacattccttttgaaatataattcatgaacttatccagcaccaacacgcaaaaaaaaaaggatagaaagaaaatccaagacagatatataactggaaaacaattaaccttataacctgtttcaaaactcagacctgtactcagacctttctcattcccaatatttagcctttcttgttgtcttttcgtcgtcatgctatactgtacacatacgtaaacttatttacatatctgcatacattgctgactacatatgaggaaatacaatgtagattttctacctgagattgtatgacctcacttaatatgtacatgctaagttcatccagtttcctgtgtagttttgtagttacattgtttagag

SEQ ID NO: 1015 - DNA, 2534 bp, Mesocricetus auratus
cttcttcttgtcctactttgatcccatttataccaatttctgtctatttctgatagcttatataaaatcttctctgtatcaaatacaaaggtggagagtgtacacccttgtctccttcctgtatttacaggaagctctgggtgtctctcctttagacataatatccacctgtctccatgtttctcacatatgggatgtgggaagttctatagtgtctcctgaccctttatgagagactggctttcccaggctcgcccttctgtcaggcagttcagagtgtctcaggagggaaggagagaaggtccctgaaatgactaaggcagttcaccttcagtctgcagtgctgtgtagggccacaagccttgctcaggcccagttctctgcccacacctgaggtctctggggtctgaattcccaaagaaagcattatccagaacccagtgtctaagctacaggggcttttcacccctccctcaccccatttctgatccacacagggatggtcacagggaccctgctggagtccctacaaatcacctgacatttccaactcttctcctcagaccctccaaaggcacatgtgacccatcactccaaccctgaaggtaaaaccaccctgaggtgctgggccctgggcttctaccccgctgacatcaccctgacctggaagagggatgaggaggaactgacccaggacatggagatggtggagaccagacctgcaggagacggaaccttccagaagtgggcagctgtggaggtgcctattggagaggagcagagatacacatgccatgtggagcatgagggactgtctgagcccctcaccctgagatggagtaaggagggaggggtgcagagatggggtcagggaaacatggagccttctgcagagcctgagcagggtcagggctgagagatggggtcatgaccctcaccttcccttcctgtccttcccttcccagagcctcctcagtccactgtccccagcatggcagtcattgctgttctggttctccttggagctgtgaccatcattggagctgtggtggctgttgtgaggaagaggaggagaaacacaggtaggaaggggcagggtgtgagttctctctcagccccttttagcagtgtgctctgctcatggaaacacatccacaccctcattgttcctgtctctagccagggtctgctgtcagttctggaaacttcctagggtcagggtcttccctggtctctcacatcttttcttgtcacaggtggaaaaagagggaactatgctcaggctccaggtaactgtggggaaccggcttgtccctaaagcctgttgagtgaagctggttgggaaacccaacagcccataattcctcctccatccacatcctctcagtaaccgcaatggtccttgtcatttcttcttctgcagacagggacagtgcccagagctctgactcctctctggagacttgaaaaggtgacactctggggtcctgggttggggctgaggaacaaaggaaaagactggtgaagggaccagaccctcacccagcccccctgctttatcagccatgacaggctgcagaaaagtcatggaggcccctgactcagcacatgttggacttgctggtcctgcccaggtcactaggaggtcagataccaatcagaagttagctggtggactctggatgtgtttaaggctctgggcatgctttatggtaaaagtggtctaccagtgacttgcaaacacatgacaaccagttgaccaatcggcacaggacagattgcccagcacagaagtgcaccaatcctgagactgttgcttacccttagacactccccttatactgcctggcagtttctctgggtccttctcatgccaactgtcctgttggacatacgatggcccctagttaatggggttagctcattaaacaacaataactgactctttgcttttgcatcggaatgggtctcttggtgattttgggggttcagaatttaagcacaacactgtgtcccaggacttctcagaacttagacatttgaatgagtcacagtgggcgtttgagatgtctttatactgactgtccatcactctttgtctttagcttcagacagtggcctcacagggacacattctcactcaagaaagagcaatgttggaagctgtctgctttctcctgtgaagagcatccagcccggtcctgtccaccaggaccctacccctgcacggccccttctacctccacagtcaaccttcctggtccagcacaggcaggaggagacaactctatcctgtcacctgcatgcttccatgagctgcacaccttggcttccccactgaaaataaaaatctggatgtgaacttgatagttcatgtccttgacctctgaaagtgtgatggagaaaataaatggcagcatggagaatcttccagaacctgtgtctgctgtggtgactgtcagcggggacaggagtctgtgggagctgagtgagatggggctgtgacaggtagagctcagtccacgtggctttgg

SEQ ID NO: 1016 - DNA, 2090 bp, Cricetulus sp.
aagcagcggttccaggagcctgctcccatctccccaggcccgctaaactcggaatcgcttcttccaattctacgactgggcggactttgcgaaggaaagcggaggtcgtgatggagtttgaagaggactttagcggaagaaaagacaagaacttcttgaagatgggcagaaagagtaaaaaggagaagaaagagaagaaaccagtgggcttcacatttggcaaagctggagagatcctcaccaagcgactccgatacatggttttcaaatccatgctgagacaggatgtgagctggtttgataaccctaaaaacaccactggagcattgaccaccaggctcgccaacgatgctggtcaagttaaaggggctacaggagccagacttgctgtcattacccagaatatagcaaatcttgggacaggaatcatcatatccctaatctatggctggcagttgacacttctactcttagcaattgtccccatcattgcaatagcaggagtggttgagatgaaaatgttgtctggacaagcactaaaagataagaaggagctagaaggttctgggaagattgctactgaagcaatagagaacttccgcactgtcgtctctttgactcgggagcagaagtttgaaaatatgtatgcccagagcttgcagataccatacagaaatgctctgaagaaagcacacgtctttgggatcacattctccttcacccaggccatgatgtatttttcgtatgctgcttgtttccggtttggtgcttacttggtggcacgggaattaatgacatttgaaaatgttctattagtattctcagctattgtctttggtgccatggcagttgggcaggtcagttcatttgctcctgactatgccaaagccaaagtgtcggcatcgcatatcatcatgatcattgaaaaagtcccttccattgacagctacagcaccggaggcctgaagcctaatacattggaaggaaatgtgaaatttaatgaagtcgtgttcaactaccccacccggcctgacatcccagtgcttcaggggctgaacctggaggtgaagaagggccagacgctggccctggtgggcagcagtggctgcgggaagagcacagtggtccagctgctcgagcggttctacgaccccatggccggaacagtgtttctagatggcaaagaagtaaaccaactaaatgtccagtggctccgagcacacctaggcattgtgtcccaagagcccatcctgtttgactgcagcatcgctgagaacatcgcttatggagacaacagccgggtcgtgtcccaggatgagatcgagagggcggcgaaggaagccaacatccaccagttcattgagtcactgcctgacaaatacaacaccagagtaggagacaaagggactcagctgtcgggtgggcagaaacaacgcatcgccatagcacgcgccctcgtcagacagcctcacattttgctcctggatgaagcaacatcagccctggatacagagagtgaaaaggttgtccaggaagctctggacaaagccagagaaggccgcacctgcattgtgatcgctcaccgcctgtccaccatccagaacgcagacttgatcgtggtgattcagaatggcaaggtcaaggagcatggcacccaccagcagctgctggcacagaaaggcatctatttctccatggtcagtgtgcaggctggagcaaagcgctagtgaactgtgttaaatatttttttaatatttgtattaacacatagcatttaaccaaagttaaaaagaaagtacgtaccagaataaccagttatctatttcctgtcattatgagaagcatttagtccagtttagagttttcagagactttgtaattaaagggacagaaatagatatatcatcaaatggaaaggaatcatttaaattgcactataaaattatacaagaattaaaagtaaatgtttcataatatatacttttatttatactttctcatttgtaactataactgatttccttgctaaacaaatcatgtgtgtatcaaaaattaatgaaatgtttgtataaagtatatatagtgaaact

SEQ ID NO: 1017 - DNA, 946 bp, Mesocricetus auratus
  misc_feature (191)..(213): n is a, c, g, or t
cccatataattccgcgctctgcaccagcaccatgcctgtgacactgggttactgggacatccgtgggctggctcatgccatccgcctgctcttggagtacacagacacaagctatgaggaaaagaaatacaccatgggggacgctcccaactttgaccgaagccagtggctcaatgagaagttcaagctgnnnnnnnnnnnnnnnnnnnnnnnctacttaattgatggatcacacaagatcacccagagcaacgccatcctgcgctacatcgcccgcaagcacgacctgtgtggggagacagaggaggagaggattcagctggacattctggagaaccaggctatggacacccgcatgcagttggccatggtttgctacagccctgactttgagaaacgaaagccagaatacttggagggtcttcccgagaagatgaagctgtactcggagttcctgggcaagagatcatggtttgcaggggacaagatcacctatgtggatttcctcatctatgatgtccttgaccagcaccgtatatttgcgccaaagtgcctggatgcatttccaaacctgaaggacttcttggctcgctttgagggcctgaagaagatatctgactacatgaaaagcagccgctttagctgcaaacaaatctttgcaaagatggccgtttggaactcaaaataggacttcgaagcccagacctggctccccactcctctatttcttctcacaagcccttccttcagtcaagcctctggatcctactcctgttcctttgccctgccctgagtcctgccatccctcagtgctgtttggaggaagggccagactccagaatccagcgagcccgagagatcagatctgcctgtgtgctggctctggtccccagagtgagcaacggggccctgtttgatctccagtaaagtctgaatgacacggaat

SEQ ID NO: 1018 - DNA, 385 bp, Cricetulus griseus
cgttgtaacccacaggtcagtaatagcagcacatgccagacccaaagtcggggggctccctgtgacccttccccctgtgtttcaccctcaaagcgtggcttgaaagattggtcttgagagtggcactggatatgggctggcaggaaaattaaagtggtcctgccatcctgtcaagggcccacatgatttagttgtagcacttgaggggcaaatgtacttttctgaggaatacagaagatggaaaagaaatctaacaagaaaattaagctatttaaaaatgaagctgttactatgcatggaactttgtggactttgtttctcaagttaaaggtaggcagtcacatctctcagtgcacagtgtgacattctgtggtttccatcacta

SEQ ID NO: 1019 - DNA, 175 bp, Cricetulus griseus
ctgtaacctccttacgcgaagggctgtatatgggaaccttgtgggtcaaagtgatggggcactgggcacttgttgatgtaagaacctgggtttacaggcacatatctatcataagagatggcactgtctgatcgacccatgatagtcttttctagagatttagcagaccagcagg

SEQ ID NO: 1020 - DNA, 1242 bp, Cricetulus sp.
  misc_feature (1012)..(1041): n is a, c, g, or t
cagtggcccggaggaagctgtgcagtcctcacctaccgagacttaggcgagaagcggcgaagcggcgggtgggagccgagcgagcgcggggctggcgccgcgcactggggggggcaggagcagcccgcgcgccgcgtgagggactcgcacttgcaatatgactttggaggaattctcggccgcagagcagaagaccgaaaggatggacacggtgggagatgccctggaggaagtgctcagcaaggcgcggagtcagcgcaccatcaccgtcggcgtgtacgaggccgccaagttgctcaatgtcgaccccgacaacgtggtactgtgcctgctggctgcagacgaggacgacgacagggacgtggctctgcagatccattttaccctcatccaggcgttctgctgcgagaacgacatcaacatcctgcgggtcagcaacccgggccggctggctgagctgctgctgctggagagcgacgcgggcccggcggagagcgggggtgcctcgcagccccctgacctgcactgcgtgctggtgacgaacccacattcatcacagtggaaggatcctgccttaagtcaacttatttgcttttgtcgggaaagtcgctacatggatcagtgggttccagtgattaatctccccgaacggtgatggcatctcaatggaaataactgaaccaaattgcactgaagttttgaaatacctttgtagttactcaagcagttactccctacgctgatgcaaggattacagaaactgatgtcaaggggctgagtgagttcaactacatgggggctaggagatgactttgcagatggacagaggtgaaaataaagaaggaagctgtgttgaaacagaaatctaagtcaaaagggacaaaaactacaaagaactgtgcaagaaagaaaactgttgatttaggatggctgagttacattaaataagccaaatattgctttgttgaaaccttaaatgtgtagcaatagtttgttttttttttgtatttgnnnnnnnnnnnnnnnnnnnnnnnnnnnnnntgatctttatgccctcaagtaaaaggaaagtgaaaaggattaattgtattttaaagctacaggttaatgtattttgatgagatgttaaattctcagaaattttattataaatcggactaagttattttatgatatgaaaggttatttatgataaagtttttgaagcacaatatctaaaataaactggtatggaataattgc

SEQ ID NO: 1021 - DNA, 2257 bp, Cricetulus sp.
  misc_feature (1)..(37): n is a, c, g, or t
  misc_feature (791)..(838): n is a, c, g, or t
  misc_feature (1235)..(1269): n is a, c, g, or t
nnnnnnnnnnnnnnnnnnnnnnnnnnnnnnnnnnnnncagccccaggggccgccgcctccgctgcccagcacgctccggggacgccggccgccttagcacccgccgcgccgcagctccgggaccggtcccggccgcgacgccgccgcgatgggcaacgccgccgccgccaagaagggcagcgagcaggagagcgtgaaagagttcctagccaaggccaaggaagaattcctgaaaaaatgggagagcccttctcagaatacagcccagttggatcactttgatagaatcaagacacttggcactggctcctttgggcgagtgatgctcgtgaagcacaaggagactgggaaccactatgccatgaagatcttggacaaacagaaggtggtgaagctgaagcagattgagcacactctaaatgagaagcgcatcctgcaggctgtcaacttcccgttcctagtcaaacttgaattctccttcaaggacaactcaaacttgtacatggtcatggagtatgtgcctggtggggagatgttctcccacttgcggcggatcggaaggttcagcgagccccatgcccgtttctacgcggcgcagatcgtcctgacctttgagtatctgcactccctggacctcatctaccgggacctgaagcccgagaaccttctcatcgaccagcagggctatattcaggtgacagacttcggttttgccaagcgtgtgaaaggccggacttggaccttgtgtgggacccctgagtacttggcccccgagattatcctgagcaaannnnnnnnnnnnnnnnnnnnnnnnnnnnnnnnnnnnnnnnnnnnnnnngagatggctgctggttacccacccttcttcgctgaccagcctatccagatctacgagaaaatcgtctctgggaaggtgcggttcccatctcacttcagctctgacttgaaggacctgctacggaaccttctgcaggtggatctcaccaagcgctttgggaacctcaagaacggggtcaatgacatcaagaaccataagtggtttgccacgactgactggattgccatctatcagagaaaggtggaagctcccttcataccaaagtttaaaggccctggggacacgagtaactttgacgactatgaggaggaagagatccgggtctccatcaatgagaagtgtggcaaggagtttactgagttttaggggtgtgcttgtaccccatgggttttctttnnnnnnnnnnnnnnnnnnnnnnnnnnnnnnnnnnnggttgggggtgggagggttggatcgaacagccagagggccctagagttctgtgcatctaatttaacacccactccacccccaagttagggagagcaggaaagccagatattggggaaggggcaacatcagctgctcccccctcccccactgagacacccttctccccacttctctgcctgttttcaatgaatttctcagcttcagtcacacccagacttatggtgtatccaagggcagggtaaggaaagagaggcccaaattcaccccagcctccacccccactccagcactggacactaaggatgaacagaaatgccaaccaccccttccatgcagtcctacttggaaagggagattttagtgacaggtacagagggctgcttgctagtgggtttttggtttctttttttttttccttttcttttttaaatattcatttaaattaagttccaccagtgcctcccttcctccagactgtccctcccctaccaaaccccctctacaagcccccaatccactctgaggccgggatagccaactgactctgtcaaggaaggaaccgggctttgaacctcgccctgagctgctagcctcccggtccttttccaggggtctcatgccaattctttggcgcatcagcccccttaagaagcccctccccatcctgggcacctcacttctagcttagctgtcagctgtccatcacctcttgctctgctccccactcactgcacccccaagtctgattgtgcttttctctcaatagaaaggtggggagctgctggggaaattaccccatttatccctgtgtttatccctctcgtaacttctcccaaacaggaggagctctcaggcctgggtgggggccccgggtgggcgaggggggccattcaacctgtgtgctgcgaaggatgagacttcatcttgaacagtgtgctgttgtaaacatatttgaaaactattaccaataaagttttgttttaaaat

SEQ ID NO: 1022 - DNA, 1311 bp, Mesocricetus auratus
  misc_feature (499)..(540): n is a, c, g, or t
atgcagcgggccttattcaggcagtaccatggggctgagctaccagctcctcctgtgtctcctgctgtgtggaggcgccaagcagtgctgttcccagcctctgtggctcttgccaggcggaactccgaccccaggaaagctcacgtcatccgtggaggtggagtgtctggaagctgagctcgtggtgactgtcagtagagacctttttggcaccgggaagctcatacagcccgaggacctcacccttggctcagaaaactgtcggcccctggtttccgtggctacggatgtggtcaggttcaaggcccagttgcatgaatgcagcaacagggtgcaggtgacggaagatgccctggtgtacagcaccgtgctgctgcaccaaccccgccctgtgcccggcctgtccatcctgaggactaaccgtgcggacgtgcctattgagtgccgctaccccaggcagggcaatgtgagcagccacgctatccggcccacctgggtnnnnnnnnnnnnnnnnnnnnnnnnnnnnnnnnnnnnnnnnnnctctctccgcctgatggaggagaactggaacactgagaaattgtcacccacctcccacctgggagaggtagcctacctccaggcagaggtccagactggaagccatctgccactgctgctgtttgtggaccgctgtgtgcccacaccttcgccggaccagaccgcctctccctatcatgtcattgtggacttccatggttgccttgtggatggtctatctgagagcttttctgcatttcaagtgcctagaccccggccggagactcttcagttcacggtggatgtattccattttgccaatagctccagaaatacgatctatatcacctgtcatctcaaagtcaccccagccaaccagaccccagatgagctcaacaaagcctgctccttcaacaggtcttccaagagttggtcgccagtagagggcgatgctgaggtctgcggctgctgcagcagtggcgactgtggtagctcaagccgttcacggtaccaggcccatggagtgagccagtggcccaagtcggcatctagacgccgcaggcacgtgagagacgaagctgatgtcacggtaggacccctgatcttcctgggaaaggcaagcgaccaggctgtggagggctgggcctcttctgctcaaacctctttggctcttggtttaggcctagccgcagtggcattcctgaccctggctgctattgtcctcggtgtcaccaggagttgtcacaccccttcccatgttgtatccctttcacaataaaaagtccagttctg

SEQ ID NO: 1023 - DNA, 1054 bp, Mesocricetus auratus
aacgtcatctccaacatcatggctgactttgtccagacaagggctgccagcatcatctcagacagagacgtcgaggtggacatttccttgacaagatcacccgtcatcacggccacccaccttgagtcccatcacaagggccatttcgtctacaagaacatctctgaggacctccccctccctgccttctcacccacgctgctgggggacacccggatgctctacttctggttttctgagcaagtcctcgactccttagccaaggtcgccttccaggatggtcgccttcagctcagtctggcagaggcggagttcagggcggtgctggagacctggcacttcaaccctaaccaggaaatcattccagagctgttcagtgcctccctcaccagcccaggccgagtcactgtccactgcccggggaggcccacaatctcctgccaaaacaagggtgtcgtggtcagttctcccgtggtgatagaattcctcttcccacataaggatgggcaagattctgtgactcacacttttgaagaggatatcgttactaccatccaggcctcctattccaagaaaaagctcttcttaagccttagcgatttccagattaaaccaaagatggcctccaacatggatgaggactccgcgtccatccagagcttcctgcagttgatgatcaccacagtaggcatccccgaggtcatgtctcggctggaggtggctttgacaaccctcattaacagtaaaggcctggatcttttcgacatcatcaaccccgagatcatcagtcgtgacggcttcctgctgctacagatggacttcggcttcccagagcatctgctggtggacttcctgcagagccttaactaggagactttaacaatggaggctgatggggctgggatcaaaggcgtgcacccaactcacaatggaactggagcgtcggattgctggcatctcctgtgtggggctcagagtggggacaaggagatggggactggctccctccttcctggattattaaaggcctactcattaaatgctctgaccagta

SEQ ID NO: 1024 - DNA, 6404 bp, Cricetulus sp.
  misc_feature (4858)..(4877): n is a, c, g, or t
tgtagggagccggttccttcattatccattacaataatggtgcctgaagacaccaagatgtaaattacttcacaggcgctgggtaatctccattcctttgatctctgcctatcccgtggctcatttggcctgaggagctgaagccattcatagggtaacacttcccaggcggctggccagcctttataagggatggttttcttggttcagtgtctccgctctggtaagcttatgcattaaagcttgtctgcagaaggatccgagtgtcctgcgtgtatttcttgctggcgagaaaatacagcgcgcgggacatctggtgcggaaacccgggaacttgttaacatctccggcatcacggagacccctctaacagggcggattcagaactgcagggtggtaagttcggagaggtatgcttcattctgacaccttcttttttgactttgcttttaatttgccaccactatgggatggaaaagccttaattctagtctttattctaattttgttcacattggtcttatattatgcccaccgtggctggtgttccagttcgagaccaagcttaccccaggtagcctccagcattatgggctcttcaaaacagagagacctaattaaaaactgtctagagattgaggcttgctgtcccatggtagcagagagtcaaaaaatgcttaaagaggtacaggataatatatcagaaaccgaacgagatgagagaataggggctcaaaaaaggaaggacatgtccaaggaaaaaggccctccccaggatataaaaaaagggggagagaaaatagggaataaccggtcacaccccggtaaatttaagagaaataaagactcaaaacctagcctctgccctacaacgaaactagaggccttggagctaagcagctcagactctgagattttagactctagcaaggaagcagagctagaggaggagctgccaaaaataaaagcaaatatgaggccaccgcctgttaatccagcgggtgtgcttccatcagcacccccattatttggtattgactcttttttaccattagaggagcgaaggaaattgcagatggctttcccagtctttgaaaatgagggggcaagagtacatgctcccgtagactataatcagattaaagaattggctgaatcagtccggaagtatggggtcaatgccaattttacaacaatacaagtagaaagactagcaaactatgctatgacacccactgattgggagacaacagtaaaagcagtgctccccaatatgggacaatatatggagtggaaggctcttttttatgatgcagcccaggcacaggcaaaggccaatgtcacagcagaaaatgaaaatcagagacaatggacctttgaaatgctgacaggacaggggccacatgccctcaatcaaactaattacatttggggcgtatatgcccagatatcagctgccgccattaaagcatggaaagcattgacaaaaagggatgaatcaggtggacatcttacaaagatagtccaggggccccaggagccattctcagactttgtggccagaatgacagaggccgctagccggatattcggtgatgcagaacaagccatgcctctgattgaacaattagtctttgaacaagcaactcaagaatgccgagcagccatagctccccggaaaagtaaaggtttacaggactggttaaagatctgcagagaactcggagggccacttactaatgcaggcttggccgcagccatcttacaaacccaaaggcgccgaaatacgtctgcctgctttaactgtggaaaaacacggcaccttaaaaaggactgtagagtccctgaaaggattagagaagtggagttgtgcaggcgctgtggaaaaggttatcatagggccagcgaatgcaaatctgtgcgggacataaaaggtaggcttttaccccctagggaggaacctaaagcatcccaaccaaaaaacgggcctcggggcccatggtcccagggccctcagaaatatgggaaccagttctggaaaagcaactcagagaaggaagggactcccgaggacactccggagtggacctgtgtgccgcctccgacttcttattaatgccccaaatgaatgttcagccggtcccaatccagtctccggggcctttaccccccgctaccattgggcttattttgggccgaggttccttgaccttacaaggactcattgtgtatcctggaatcgtagatccatatcataaggaagaattccaggtcctctgctccagccctcgggggtgttctccataaagcagggagataagatcgcacaattagtgctattgccctcccctggggatagagagaattgcacctcccgaaaaagagccttgggctctaccggtaatgattcagcatatctggccatacccctagatgagagaccaactatgaaattattggttaatggaaaagaatttgaggggattacagatacaggggctgacaaaagcatcatttcattgcattggtggccgaaatcctggcctactgtgacttcatcacattctcttcaaggccttggatatcaatcctctccagctgttagtgctgccgccttggtctggcggagcaccgagggcaggcagggacgctttaccccttatgtcttgcccctcccagtaaatctgtgggggcgagatgtgttacaagccatgggcatgaccctgaccaatgagtattcccctcaggcatcagctataatgacaaaaatgggctatgtaccaggaaggggcctgggcagaagggagcaaggtagaatagagcccattgaacaaaaagggaatcaaagtagaaaaggactgggttttatttaggggccattgaggcttcacgacccataccatggaatacagaggacccggtatgggtctctcaatggccattatcctctgaaaagctggaagtagtcacaagacttatacaggagcaagaacagttggggcatttagaaagttctacttctccctggaacagcccaattttcattataaaaaagaaatctggaaaatggaggttgctccatgacctgcgggctattaataaccaaatgcgccctctgggtcctgtccagagaggtctccctttgctttctgcgctaccccaaaattggaagcttattattatagatattaaggactgttttttctccatccccctctttcctcgggaccggcaaaggtttgcctttactgttccctcactcaatcacatggagccagacaagaggtaccaatggagggtgctgccacagggcatggccaatagtccaactatatgccaattgtatgtccaaaaggcattggaacctgttaggaagcagtttacatccatgattatgattcactatatggatgatattcttatctgccataggaagatagaggtcctgcaacaagccttccccatgctggtagctgagttaaaacaatggggactggagatagcatcagaaaaggtccaggtctcagataccggtctcttcctgggctcagtaattaccccaacaaaaataatcccacaaaaaatagaaatacgcaaggatcatctgagaaccttaaatgacttccagaaactcttgggggatataaattggctgagaccctttttaaagatcccctctgcagatttaaaacccctttttgacatcctggaaggtgagcctcatatttcttcccccagaagctttactccggctgcttgtcaagccctacaaaaagtggaaaaggccttgcaggatgcacaattgcatcgcatagatgagacattgccattcagcctatgtgtctttaaaacggctaagttaccgaccgccatcttatggcagcatgggccgttgctttggattcacccaaatgcttcccccgctaagatcattgattggtatccggatgctgtcgtgcagctcgcacttcggggaataaaagcagctgtcgctcattttggcagggaccctcatctcttggttgtaccttacaccactgcgcaaattcaaactctaacagctacttctaatgactgggcggtgttagttacctccttttcagggaaaattgataatcatttcccaaaacatccaatcctacaatttacacaaaatcaggctatagtgtttccacagatgacagcaaagcatccaatcccgaatgggacggtggtttatactgatggttccaaaaccggtgtaggggcttatgttataggaaataaggtagtttctaaacaattcaatgaaacctcaccccagatcgttgaatgccaagtggtgctggaagtccttgaggcctttccggggccacttaatattgtatcagattcctcttatgtggttaatgcagtcaacctccttgaaactgctggtataatacgaccctccagcagagttgcaggtatctttcaaaaaatacaaattaccctatcaaacaggaggttccctgtttttgtcacccatgttcgagcacattcggggctcccaggacctatgtcctctgggaatgatttggcagaccgggccacaaagctgatggctgccgccttgtccacccagatacaagctgcacaagaatttcatcagcgctttcatgtgacggctgaaaccttacgccgtcaatttgctttgacaaagcaggaggctagacaaatcgttactcaatgtaaaaactgctgtgaatttttacctgcacctcatgtaggaataaatccgcacggcattaggccgctgcagatgtggcaaatggatgttacacatgttgcctcctttggaaagctccaatatgttcatgtctcagtggacacctgctcnnnnnnnnnnnnnnnnnnnnctttgacaggggaaaaggccgcgcatgtgattcaacactgtttagaggcttggggtgcctggggtaaacctcatatcctaaaaacagataatgggccggcttatacctctcaaaagttccagcacttctgcagacagatggaaattacccatctaactggcctaccttataaccctcaaggacaaggcattgtggaatgtgcccatcgcatcgcacacttaagtcttatttaatcaaacaaaaggagggaatgggagcatccttaccctcggtgccaagagttgcaatatccatggcactctttacccttaattttctaaacaccgacgctcagggccatacagcggccaagcgtcatacctcagaacctgaaaggtctaaggagatggtaaaatggaaagatgtcttaactggtctttggagaggcccggatcctattctcataagatccaggggggcgatatgtgtttttccacaggattgaagaaaatcctctgtggatcccagaaagactcacccgaagagcctcttcggaccttcaaaagtcggaactccaccctctccccgggagttgagagccgctattgttatccagattaactcctgtccttggcagagagattgtatcactgcttaaggggtgggggtgggattgtttgatgcagccgtttgcggattgctgttacctctggctgatgtatgagaaagaggtgggggtggaattgtttgatgcagccgtttgcggattgatgttacttttggctggcatgtaagctccagggctcaaaccaagagatcgcccaagcgcttatattttggctaactatgcttaagcaatagccgccggccagacagctcttgcacacccggagcctaggctcattgcacagggtagagtgtctggtttgagcagccccaatgagggatgctgagcaaaggcatcgcacagagttgcctaatatacaggcttccctgggaggtacgttgacctgcataagggttacctgccccgagactccctttcccagaaaaacggcagaggacaggtcgagagtacttcgggccaagctaacagcctgatggcgactctcgtacacagtcttaatgtttgatttgggaaggttcaacctctgcctctatccctcaacatatgggtgacctatttgcttgtaaaaatataaagccttatcattaattaataaaaaaagggggatatgtagggagccggttcctgcattatccattacaataatggtgcctgaagacaccaagatgtaaattacttcacaggcgctgggtaatctccattcctttgatctctgcctatcccgtggctcatttggcctgaggagctgaagccattcatagggtaacacgtcccaggcggctggccagcctttacaagggatggttttcttggttcagtgtctctgctctggtaagcttatgcattaaagcttgtctgcagaaggatctgagtgtcctgcgtgtatttcttgctggcgagaaaatacaacccgcgggaca

SEQ ID NO: 1025 - DNA, 1963 bp, Mesocricetus auratus
  misc_feature (169)..(212): n is a, c, g, or t
  misc_feature (1724)..(1788): n is a, c, g, or t
gggaatgtgaacttctctgtgaccgcagaagcacgacagtccccagagccttgtggttctgaggtggccatagttcctgaaactgggaaaaaggacacagttgtcaaagtcctgatagttgagcccgaaggagtaaagaaagaacataccttcagttcactgttctgtnnnnnnnnnnnnnnnnnnnnnnnnnnnnnnnnnnnnnnnnnnnnaacggcggtggtggacgactcagccagagcccatttctctgtgttgggtgacatcttgagttcggccataaaaaacacacaaaaccttctccatatgccctttggctgtggggagcagaacatggtgctttttgcccccaacatctacgtactgaaatatttgaatgagacacagcagctgactcagaacatcaagtcaaaggccattggctatctcaataagggctatcagaaggagctgaactacaaacacaaggacggctcctacagtgccttcggggatcaaggtggccggaaacaaggaaacacttggctcacagcctttgtgctcaagtcttttgcccaagctcgagccttcatcttcatcgatgaaacacacatcgcccatgccttcacctggctctcccagcagcagcaggacaacggctgttttaggagctctggatatctgttcaacaatgccatgaagggtggagtagacgatgaagtgaccctctctgcctatgtaaccatcgcccttctggagagttcactcgaagacacacatccggttgtctccaaagccctggcctgcctagagtcatcctggaagacgatacagcaagagggaaatgggaactttgtgtacaccaaagcgctgctagcctatgcccttgctctggcagggaaccaggacaagagaaaggaaatcctgaaatctcttgataatgaggctatagaggaaaaaaactccgttcattgggaaagacctgagaaaccgacgaaaccagagaggtgtctgtacgaaccacaggctccctctgctgaggtggagatgaatgcctatgtcctcctcactctcctcactgcccagccagccccgagccctgaagacctgggtttggcagtgcgcatcgtgaagtggctcacgaagcagcagaattcccatggtggcttctcctccacacaggacactgtggtagctctccatgctttgtccaagtatggggcagttactttcgccagaagtcagaaaactccttcagtgaccatccaatcttcggggacattttccagaaagttccaaatagagaacagtaatcgactgttactgcagcaggtctccctaccagacatccctggggactataacatcagtatgtcaggagaaggatgtgtgtatgctcagacaacactgaagtacaatgttcacttggagaaagaggagtctgcattcactctacgggtgcagacagtacctctgacttgtgataaccccgaaggccacaacagtttccagatctcactagaaatcagttacatagggagccgtccagcctccaacatggtgattgttgatgtgaagatggtatctggcttcattccattgaaaccaacagtgaaaaagcttgaacgatcagagcatgtgagcagaacagaagtgagcaataacaaggtcttgttatatgtggatcaggtgaccaatcagacactggccttctcctttgtcgttcaacaagacatcccagtaannnnnnnnnnnnnnnnnnnnnnnnnnnnnnnnnnnnnnnnnnnnnnnnnnnnnnnnnnnnnnnnngaatacagcgccccctgcagttcagagaaacaaaacttttgaaactccaatctgtggacaagccattgctggaatccccaaaccccttcaagatggtgatttttgcctgtgtctgcaatactaattctgaacaagcatgatgaataaacgcacacttctagacagtcaggaattc

SEQ ID NO: 1026 - DNA, 1434 bp, Mesocricetus auratus
  misc_feature (1159)..(1185): n is a, c, g, or t
cgggaacccactgcaaatggcctggtcaaccagaacaatgatgtcacttgctctgtacacctgtttcctctggctcctcaccagtggcctcaagactgtccaatccttgcatgattctcaccgaggcctagctcctactaatgttgactttgccttcaatatgtatcgtcacctatcgaccttggatcctcacaagaatatcttaatttcccctgtgagcgtctccatggccttggccatgatgtcccttgtcgccgtaggctccaaaaagaaccagtttttccaggatgtgggcttcaacctcacagagatcagtaaagaagagatctatcagagcttcgagaagctcagtcaccttctcagcaaggcagacagcagcttggagatgcgcatgggcaataccatgttccttgaccagagcctgaatatgagggactcattcttaacagacatcgaacactatcatgaatcagaggccttgactaccgatttcaaggacggggctgatgcccgtgagcatatcaacaggcatgtggagactaagacacagggagaaattacacatgtgttctcagaccaggatagtccagctcccctcaccctggtcaactacaatgtcctcaaaggcatgtgggagctccccataagcccagagaataccagggatgaggacttccatgtaagcgagaatagcacggtcagggtgcccatgatgttccagtcaggtgtcatcggttatcttcatgactcagagatcccctgccagttggtacagatgcagtatttgaaaaatgggactaccttcttcatccttccagacgagggccagatggacgctgtcaccgctgcacttcatagggacacagttgaaaggtgggacaagctgctgaccaaaaggctggtgaacctgtacatccccagagtctacatgtctggtacctacaacctcgaagatgtgctggagggcatgggcattacaggcttattcaccaaccaaacagatttcttagacatctcccaggatcctccacagaaagcatcaaagatagtccacaaggtcatgctgcaactggatgagaaagatgaaccgcctgttaccaccacagaggctcccccacagacaacatctgaaccgctcaccctcaccttcaacaaaccnnnnnnnnnnnnnnnnnnnnnnnnnnncacttggagcagcctgttgttgggcaaaatcatgaatccagcttagtgcatgctggagaagctatggtaccgcctgactttggggggtagaagcctttccccagtcttctccaggttcttccgaacccaactaggtatccctacttttagatatcctgtaatgtataaccattgttgctactcccaagacaggtcaactgataaagtagcactgagatagagggaactgttattaaagggtgtttttgc

SEQ ID NO: 1027 - DNA, 6108 bp, Cricetulus longicaudatus
  misc_feature (1216)..(1264): n is a, c, g, or t
  misc_feature (4738)..(4760): n is a, c, g, or t
cccctgtgctccccggcccgcaacctgctggcatggacgtacacacccgctggaaagatcggctcccggtcggccccgctgctgtcccgccgctgctcctgctcctgctgctgctgtgggcgccgcctcagagccgcgcagctcagccaacagatcttctggagatgctagattttcacaatttgccctcaggggtaacgaaaaccacaggtttctgtgccactcgacggtcttccagagggccggatgttgcctaccgagtctctaaagatgcacaactcagcatgcccaggaagcagctgtaccctgactctgattttgctgaggacttctccatcctgactaccgtgaaagccaagaaaggcagccaggccttcctggtctctgtttacaatgagcagggcatccagcaggtggggatggagctgggccgctccccagtcttcctctatgaggaccacacagggaagcccgggcctgaggagtatccactcttccctggcatcaacttgtctgatggcaagtggcaccggattgctatcagtgtctacaggaaaaatgtcaccctgattcttgactgtaaaaagaaggttgtgaagttcctcaaccgcagtgaccaccccataatagatgtcaatggcatcatcatgtttggctctcggattctggatgacgaaatatttgagggtgacatccaacagttgctctttgtctccgaccaccgggctgcctatgattactgtgagcactacagtcccgactgcgatactgcggttcctgacacccctcagtcacaggaccctaacccagatgaatattatccagaaggagatggtgagacctattactacgagtacccatattatgaagaccctgaagacctggggaaggagcctgcccctacgcagaagccagtggaagctgccagagaaaccacggaggttcccgaggaacagacccagcccccaccagaagcccctacagtgcctgagaccagtgaccctgccggcaaggaggatgatccagggtttggggactatgactatgtgcccactgacgactactacactcctgccccctatgaagaccttggctatggcgagggtgtggagaaccctgaccagcccaccaaccctgactcaggggccgaggttcccaccagcaccatcataacctccaacacctccaatccagctccatctccaggggaagacannnnnnnnnnnnnnnnnnnnnnnnnnnnnnnnnnnnnnnnnnnnnnnnnggaaaactactatgacccctacttcgaccccgactctgactccaacgtctccccatcggagatagggccaggcatgccagctaaccaggacaccatctatgaggggattggaggacctcgaggtgagaaaggacaaaagggagagccagccatcattgagccgggcatgctgatagaggggcccccaggccctgaaggccctgcgggtcttccaggaccgccaggaactacaggtcctactggccaagtgggtgaccctggagaaaggggtccccctggtcgcccaggtcttcctggggctgatggcttgcctggtcccccaggaaccatgctcatgctgccgttccggtttggaggaggcggcgatgctggttctaagggccccatggtctctgcccaggagtctcaggcccaggctatcctccagcaagccaggttggcactgaggggaccagctggtccaatgggtcttaccggaagacctggccccatgggtcctcctgggagtggaggcttgaaaggtgagccaggagacatgggaccccagggtccacgaggtgttcaaggtccacctggcccaacagggaagcctggaagacggggccgtgctgggagtgatggagcaagaggcatgcctggacaaacaggccccaagggtgaccgtggctttgatggcctagctggattgccaggcgagaagggccacaggggtgaccctggtccttctggcccacccggacttccaggagatgatggagaaaggggtgacgatggagaagttgggcctagggggctgcccggggagcctgggccacgtggtcttcttgggccaaaagggcctcctggccctccaggacctccaggtgtaactggaatggacggccagcctggcccgaaaggaaatgtgggtccccagggagagcctgggccccccggacagcagggtaatcccggtgctcagggtcttccaggtccccagggtgccattggtcctccaggagaaaagggtcctttggggaaaccaggtctcccaggaatgcccggtgctgatggacccccggggcaccctggcaaagaaggtcctccaggagagaaaggaggccagggtcctcctggcccccagggtcccattggctacccaggtccacgaggagtcaagggggcagatggcatccgaggtctgaagggcaccaagggcgagaagggtgaagacggcttccctgggtttaaaggcgacatgggaataaagggtgaccggggggagatcggcccacctggtccccgaggagaagatggtcctgaaggtccaaagggtcgtggtggtcccaatggtgaccctggtcctctgggacccactggggagaaggggaagctcggagtgccaggattaccagggtaccctggaagacaagggccaaagggctctattggattccctggcttcccaggtgccaacggagagaagggcggcagggggacacctggaaagccaggaccgaggggacagagaggcccaacgggtccgaggggtgagagaggcccacggggcatcacagggaagcctggtcctaagggcaactctggaggtgatggcccagctggccctcctggtgagcggggacccaatggaccccaaggacccacaggcttccctggacccaagggtcccccgggcccaccaggcaaggatggactccctggacatcctggacagagaggcgagaccggcttccaaggcaagactggccctccaggacccccgggagtggttggccctcagggtcccacaggagaaaccggcccaatgggagagcgtggccaccctggccctccaggcccccctggtgaacagggccttccaggagttgctggaaaagaagggactaagggggacccaggccctgcaggcctccctggaaaggatggccctccaggattgcgtggattccctggggaccgaggacttcccggccctgtgggagctcttgggctaaaaggcagcgaaggccccccgggccctccaggtcctgcgggttctccaggagagagaggaccagctggggctgctgggcccatcggaattccagggagacctgggcctcagggacctccagggccagctggagagaaaggggttcctggcgagaaaggtccacaaggcccagctggccgagatggcctccaaggtcctgtggggcttcctggtccagccggccccgttggtcctcctggagaagatggagataagggagagatcggggagccagggcagaaaggaagcaagggggacaaaggcgagcagggtcctcctggacctacgggtcctcaaggccccattggacagccaggtccctcgggagcagatggtgagccaggtcctcgtggacagcaaggcctgttcgggcagaaaggagacgaaggctcaagaggtttcccaggaccaccggggccagtgggattacagggtttgccaggacctccaggagagaagggtgagacaggagatgtgggccagatgggacctccgggtcccccaggcccccgaggaccctctggagctccaggtgctgatgggccacagggtcctcccggaggaattggcaaccctggtgcagtgggagaaaagggggagcctggtgaagctggagagcctggtcttccaggagaaggaggtcccctgggacctaaaggagaaagaggggagaagggagaggtaggcccctctggtgctgctggaccccccggacccaaaggccctcctggagatgatggacccaaaggcagccctggccctgtgggctttcccggagaccctggtccccctggagagccaggccctgcaggtcaagatggtccacctggagacaaaggggatgatggtgaacctggacagacgggatccccaggccctactggtgaacctggtccatctggacctccaggaaagaggggtcccccaggccctgcaggtcctgaaggcaggcaaggggagaaaggagccaagggagaagccggcttagaaggccctcctgggaagactggtcctatcggcccccaaggggcccctgggaagcctggccccgatggtcttcgtgggatccctggccctgtgggtgagcaaggcctcccaggatccccaggccctgatggtccacctggccccatgggtcctccaggactccctggactcaaaggagactctggtcccaaaggtgaaaagggccatccaggcctgattggactcattggacctccaggtgaacagggtgaaaaaggtgaccgaggactcccaggcccccagggctcatctggtcccaaaggagaacagggtatcactggtccttctggcccacttgggcctcctgggccccctggcttgccgggccctccaggtcccaaaggtgctaaaggctcttcgggtcccactggcccgaagggcgaggcaggccacccaggactccctggcccacctgnnnnnnnnnnnnnnnnnnnnnnncccctgccaatccaggcatccaggactcggcggaacatcgatgccagccagctcctagacgatggggctggggagagttacttggactatgcagatgggatggaggagatctttggctccctcaactccctgaagctggagattgagcagatgaaacggccactgggcacacagcagaaccccgcccgaacctgcaaggacctacagctctgccatcctgatttcccagacggtgaatactgggtcgatcccaaccaaggatgctccagggactccttcaaagtctactgcaatttcacagccggagggtccacatgtgtcttccctgacaagaagtctgagggggccaggatcacttcttggcccaaagaaaacccaggttcctggttcagtgaattcaagcgtgggaaactgctctcatatgtggatgctgaaggcaaccctgtgggcgtggtacaaatgaccttcctgcggctgctgagtgcctctgcccaccagaacatcacctacaactgctaccagtcagtggcctggcaggatgctgccacaggcagctacgacaaggctatccgcttcttgggctccaacgacgaggaaatgtcttacgataacaacccttacatccgcgccctggtggatggctgtgctaccaagaaaggctaccagaaaacagtgctggagatcgacacgcccaaagtggagcaagtccccattgtggatatcatgttcaacgactttggtgaagcctcacagaaatttggatttgaagtggggccggcttgcttcctaggttaggagctgctgagcccacggtcttcagagcaacctcgtgacctcagcaccccacctgtgggtgtcctgtgcacggcccatcctggacagtgaacatttctcacccctgcctgcctgactcatctgtgcctcggaccctccgtggcattggaccccacaccaatgagaacaaagggaaagagccgtgttcccacggagccgaatcacatgacctagccacaccacagcctcttgccacactgcaggcctggtccccagctctcctaataggttcatcaaaggtgttcgtgaactgttggccgggagtcagggtggggcagtatttggaaatcactttaaaaaaaccaacttgaaaatatgtattccccttgaccttcaaaagatgttctaaggtggtcttgtaaaggtcgccaaagccttctctttttttgtttttaaacaaccctcaatacatccactcagaggccaaatgtcattccacgtgtgcctttccgatggattaaaggtgcttatgtttttgtgagagttttaagtaaatatttgtattgtattgtta

SEQ ID NO: 1028 - DNA, 1623 bp, Cricetulus griseus
cagctgggttgtcacctgttacctgtttcaggaaggtggaggcagaaggatcagggggctcacggtcatacttgacaagctcaggtaggggcggaggactgaggctcgggctcagagaattttcagttaaaatgaggaccacacagacaagtgaagcagggaatagacacagagaagtggcgctccgagacgggcgggcgggagggcgagcgggcgggcgggcggggtagaggcgcaccctcctcctcgctctgggcggagcaagcaaagagcaagcaccacagagcagggcagagtccagtgaggaggctcacagcctcctggaactccagcttcagagactctcacccctctgtgggctccctaagcaccaggcatgcctgtggtgcccagacatgcatgcaggcaaaacacccatacacataaaacaacaacaacaaaaattttaaaaaataaaatcaatctttaaacagtaaccacaaaaaggacttacagaaggaactggaagactggatttagcacctgcctacccactaaaaaccttaggaaggaccagcaggatggctcagtgagcaaagggacttgctactatagctgtggttctcacccgatgggtcgcaaccccttcaggggtcacatacaaagggtatttacattgtaattcacaaaagtgtgaaattacagttatgaagtagcaacgaaatacttatatgtctggtgtcaccataactcaaggaactgtattaaagggcgctgcttcaggaaggttgagaacactgtactacagtgtgggccactggcccatggcaagcaaataacgaaaggtcaaagcaaaacttgtgaaacacacccagcctggcgaatgttcatggggcaccgccaagggccgaagggtggaaaacaagccagtgttcacagagggaggaccaaactgtggcgcatggtggaatattgctggaccatgaaaaaggaatgcaaacctgttccctgctgaaacgtggatagatctcaaagacatcacctaacgtacagctctgttgtgttggtatctctgtggagacagaaatcggtggggagcgtgggggctggaggagccagggtgtcgagccactgcttacggtataggggtttgctctacagatgactaaaatgtctgggaactaaagctaagtcatatttgtagttcttgcactggagaggctgaggcggaagaatttcagagagttcaagttcaagtgaataccaggatattcaagcacataaaataataataataaataatcaaggaagaattggggctaatgttttgcaagtttttgttctcttccatcttatcgaagtaggaaaatcctagctataaggtaaggtctgctaatcagccaatgggagcagctactgtcaatcacaaaaccccacctacctctccaggaaggtgattagtcctctgagagtcaaggcatgccttgagtctcaaggagcaagaagtgtaccaagccctaagttagggcaccttgccaggaagcctggtctgtcatatccccaatgtctccctgtccagccagaggacaagtagtcctaacatggccactcagctctgcaaaccagagctcccagaaggaattc

SEQ ID NO: 1029 - DNA, 779 bp, Cricetulus griseus
  misc_feature (122)..(134): n is a, c, g, or t
  misc_feature (136)..(149): n is a, c, g, or t
  misc_feature (167)..(188): n is a, c, g, or t
ggatccgacacccacaccggtggcagaaatgaagacatgcatgtggcatattagccaaaacaaacaaacacctgaatcttaaaatatctcaggcaggccaggccgtggtggcgtacaccacnnnnnnnnnnnnngnnnnnnnnnnnnnncgaaaatctctgagtttnnnnnnnnnnnnnnnnnnnnnnaaagttcttgaacaaccagagctacatagagaaacccatcccaaacaaacaaaaatcaaaacaaatacctcaggcaaaaccatgcaagctggcagcactagggaaaccgaggcagatatggagaactcaagactagtcttaggtatataacaagttcaaggacagcctggaacacgtaacgagttaggaagaccatgctctcctactaaattcaaatcgttttccccccaactccagttcaacccagtaagttcccattggaaccggggcaccagggacttacatggggttgtcatctggctcccagccttccagctccttaaagcagaaaaaacactgggccaagtcaggctcgttctcggtagggcagtggatgaagccggcttccgccatctgaaaatgacagcacagctcgtgagcagaaccaaccgtctggttttgattctgtcactctctggggtcgttccgggccggcctctctggggacggagggaagaggtcgccctgtctggccctgtctaccgggccggggcctgacgcctgacaacagccgtagcgaaggctgggggattagtggggtgccctggtcga

SEQ ID NO: 1030 - DNA, 1629 bp, Mesocricetus auratus
  misc_feature (294)..(321): n is a, c, g, or t
cgggcagtcaggcttgatctcaagcaagctgagtatttccttggtggaagatccaggtaaccaagctctccagcctgaacagagagagcagctgggactcccaggactcagaggcaaagccgagagcaagggcactgctcctattcacagaagccatgacgaggacaaccacctgcgtatatcacttccttgtttggaactggtacatcttcctcaattattacatcccacttattggaaaggatgatgagaagttaaaggaattccacgatggcggacgttcaaagtacttgnnnnnnnnnnnnnnnnnnnnnnnnnnnnttttctttggggtcgcctgcctagatgacgtgctgaaaagaatcataggaaggaaagacatcaagttcatcacatcaaccagagatctacttttttccacattggtttttccaatatccacatttatattcctggtattctggaccctcttttactatgatcgaagtctcatttaccccaagggcctggatgactactttccagcatggcttaatcatgcaatgcatacctacatactgctctttgtactggtggaaaccattctcagaccacaccactatccatcgaagaagctaggacttgccttgctgggtgcttgcaatcttgcctacattaccagggtcctgtggcgctactctcagaccggaaactgggtgtaccctgtgtttgcctccctcaacccactgggtattatcatcttcttcttggtctgttatatcctgaatgccagcatctacctggttggagagaagattaatcactggaaatggggtgccacagtgaagccgttgatgaagaagaagaagtgactacacactgttttccaagagtcatagaagaagaaacataaaaactggtcatctgtctattctcattaatattactccttttgggatcagtggtggaatagcatggggagatataaaggacagagaacggtacctaagtttaataaagggtatgaagggggcttcacttgagatcttttggttttctgaaaggctgatagacaattcctgatgtctcagaatctactgattttgtctgtccttcatggaagattgtttctggctaaaaaggctaaagaagcctgtgtagacttgctggtggactgtttagaggaggggtgtggggaaaggaacttagattcatccaatcacttcaccttcaagggggatagtgaggacccagataatgagttgttgcattcatcaaaatcattgtcacactggagtagcagggcacacggcgcagctgaactcaaggctgccctggcctgctgagtaagaccctgtggtggtttgaaagaaaatgacccccaaaggaagtgcactaatagaaggtgtgatcttgttggagtatatgtggtcttgttaagggaagtttgtcactgtggaggcaggctttgaagtctcatacatgctcaaggcatgcccagtgaggtagaccacttcctgttgcctgcctatcaagatataagactcaactccagcaccatgtctgcctccatgccaccgtgtcacacaatgataataatggaccaaacctctgaaatgtaagccaccccaattaaattttttttccttt

SEQ ID NO: 1031 - DNA, 186 bp, Cricetulus longicaudatus
  misc_feature (10)..(38): n is a, c, g, or t
gcagaaggcnnnnnnnnnnnnnnnnnnnnnnnnnnnnngctgacccggcacatcagaatccacacgggccacaagccctttcagtgtcggatctgcatgcgaaacttcagcagaagtgaccacctcaccactcacatccgcacccacaccggggagaagcccttcgcttgtgactattgtggccgc

SEQ ID NO: 1032 - DNA, 413 bp, Cricetulus longicaudatus
atggcacggtcagtgctggtaccgccaggacctgacagcttccgcttctttaccagggaatcccttgctgctattgaacaacgcattgcagaagagaaagccaagagacccaaacaggaacgcaaggacgaagacgatgaaaatggcccaaagccaaatagtgacttggaagcaggaaaatcccttccttttatttatggagacattcctccagagatggtgtcagagcccctggaggacctggacccctactatatcaataagaaaacctttatagtattgaataaagggaaagcaatctctcgattcagcgtcacctctgccctgtacatcctaactcccttcaaccccattagaaaattagctattaagattttggtacattctttattcaatgtgcttatcatgtgcac

SEQ ID NO: 1033 - DNA, 601 bp, Cricetulus longicaudatus
  misc_feature (325)..(374): n is a, c, g, or t
tccaatgattgtgagctcccacgctggcacatgcatgacttcttccactccttcctgatcgtgttccgtgtactgtgtggagagtggatagagaccatgtgggactgcatggaggtcgccggccagaccatgtgtctcactgtcttcatgatggtcatggtgattggcaacctagttgttctgaacctcttcttggccttgctcctcagctctttcagctctgacaaccttgcagccacagacgatgataacgaaatgaacaaccttcagatagctgtgggaaggatgcaaaggggaattgactttgttaaaaggaagatacgtnnnnnnnnnnnnnnnnnnnnnnnnnnnnnnnnnnnnnnnnnnnnnnnnnncaaaccccttgaagatctgaataacaagaaagatagttgtatctccaaccacacgaccatagaaataggcaaagacctcaattacctcaaagatggaaatgggacaaccagtggcataggaagcagtgtggagaagtatgtggtagatgagagtgactacatgtcattcataaacaaccccagtctcactgtgaccgtgcccattgcccttggagagtctgactttg

SEQ ID NO: 1034 - DNA, 598 bp, Cricetulus griseus
  misc_feature (395)..(448): n is a, c, g, or t
ctacatggccgtgatacacgtggtatcttccgagtccatcagtttgagaagattgaacagttcgtgtacacatcacctcatgacaataagtcatgggagatgtttgaagagatgatcggcaccgcagaagaattctaccagtctttggggatcccttaccatatcgtgaatattgtctcaggctctttgaatcatgctgccagtaagaagctcgacctggaggcctggttcccaggctcaggtgccttccgtgagttggtctcctgttctaattgcacggattaccaggctcgccggctccgaatccgatatgggcagaccaagaagatgatggacaaggtggagtttgtccatatgcttaatgccacaatgtgtgctaccacccggaccatctnnnnnnnnnnnnnnnnnnnnnnnnnnnnnnnnnnnnnnnnnnnnnnnnnnnnnntgagggagttcatgcctccaggactccaagaactgatcccatttgtgaagcctgcacccattgaccaggagccatctaaaaagcagaagaagcaacatgagggcagcaaaaaagaaagcaaaagaggtcaccctggagagccagctgcag

SEQ ID NO: 1035 - DNA, 2452 bp, Mesocricetus auratus
  misc_feature (2399)..(2413): n is a, c, g, or t
ggcggcaagtagacaccggctgtgggtgggggaggcggccagctcagtggccttgggccgcgtggcctggtggcagtggagccatggtttctaaactcagccagctgcagacggagctcctggctgccctgctcgagtccggcctgagtaaggaggctttgattcaggccttgggggagccagggccctacctgatggttggagatgctcccctggacaagggggagtcctgcagtgggagtcgaggtgacctggccgagctgcccaatggcctgggggagtcgcgtgtctcggaagacgacacggatgatgatggggaagacttcgcgccacccattctgaaagagttggagaacctcagcccggaggaggcagcccaccagaaagccgtggtggagtcgcttctgcaggacgacccgtggcgtgtggcaaagatggtcaagtcctatttgcagcagcacaatatcccgcagcgggaggtggtcgacaccacgggtctcaaccagtcccacctgtcgcagcacctcaacaagggcacgcccatgaagacgcagaagcgggccgctctgtacacctggtacgtccgcaagcagcgagaggtggctcagcaattcacccacgcggggcaagggggactgatcgaagagcccaccggtgacgagctgccgaccaaaaagggaaggaggaaccggttcaagtggggcccggcatcccagcagatcctgttccaggcctatgagaggcagaagaatcccagcaaggaagagcgggagaccttggtggaggagtgtaacagggcggagtgcatccagaggggggtgtcaccatcacaggcacaggggctaggctccaaccttgtcacggaggtgcgtgtctacaactggtttgccaaccggcgcaaggaagaagcctttcggcacaagctggccatggacacatacaacggacccccacccaggccaggcccaggcgccacactgtctgctcacagctcccctggcctgcccacatccgccctctcccccagtaaggtccacggtgtgcggtacggacagcctgcaaccagtgaggcagctgaggtgccctcaagcagcggtggtcccttagtgacagtgtctgcggctttacaccaagtgtcgcccacaggcctggagcccagcagcagcctgctgagcactgaagccaagttggtctcagccactgggggtcccctgcctccagtcagcaccctgacagcactgcacaacttggagcagacgtctccaggtctcaaccagcagccacagaacctcatcatggcttcactgcctggggtcatgaccattggacctggggagcctgcctccctgggccccacattcactaacacaggcgcctctaccctggtcattggtctggcctccactcaggcacagagtgtgccggtcatcaacagcatgggcagcagcctgaccaccctgcagccggtccagttctcccagccactgcacccctcctaccagcagccactcatgccccctgtacagagccacgtggcccagagtcccttcatggccaccatggcccagctgcagagcccccacgccctctacagccacaagcctgaggtggcccagtacacgcacacaagcctgcttccgcagactatgctgatcacggacaccaacctcagcgcccttgccagcctcacgcccaccaagcaggtcttcacctcagacacagaggcctccagtgagcctggacttcatgaaccatcgtctccagccaccaccatccacatccccagccaggacccatctagcatccagcacctgcagccggctcaccggctcagcaccagtcccaccgtgtcctccagcagcctggtgttgtaccagagctcggactccaccaacgggcatagccacctgctgccatccaaccatggtgtcatcgagacttttatctccacccagatggcctcctcctcccagtaaccatggtgatggcctctcaggagctgggttcccagagcccacactgcctgcatagggggtgagaaggccaaggccatgctgcctggaggacatctgcgactgccatgtgtctcctgccgtaggctggtggccttcccatacacccccgctttcaccccgacttctccagcagcatcagagagggatggctctggggggagtctcaccctgagaagggaccataaagggcttgaggacagcccggtctggacagcgttggaagaccatcctcctgcagagaatagggaactcgacacttgggacaaaggggagcctgtgatgctggtacccacacaggatctctgtgttgagcttgggggcctagatccacatggctgcctcctgtctcctgtgcaaccccaggccatcccacgagcaccagcnnnnnnnnnnnnnnnacatggctgtttggcggtcacctaccccagcccagacag

SEQ ID NO: 1036 - DNA, 2081 bp, Mesocricetus auratus
tgcgaacatcaggactcacctaacgcagacactggcagcggcaacagctctgcagagagcagagaagatggccctccgggtagcttttattcttttggtggctgcattctgccctgctgtcctctgccaacaagatggaacattgggaaaggaaaccacagtccaggaagaacaaaacaatgagacaaaagtggacagcttaaccctggcctccatcaacaccgactttgccttcagcctctacaagcagctggctttgaagaatccagataagaacgtcattttctccccattcagcatctcatttgccctggccttcctgtccctgggagcaagcagcaacaccctggaagagattctggaaggtctcaagttcaatctcacagagactcctgaggcagatatccacaggggctttggacacctcctccgcatgctcagccagccaggggaccaggtgcaggtcagcacaagcagcgccatgtttgttgaaaaacgcctgcagatcctggcagagttcaagaagaaggcaagggccctgtaccaggctgaagcctcctcgactgacttccagaagcctcatgaggccaaaaagctcatcaatgactatgtgagcaaaaagacccatgggaagatcaaggaactgatgtccgacctggatgatcagacgtcaatggtgctggtgaattacatctactttaaaggaaaatggaaggcgccctttgaccctgatttcacatatgagtctgacttctacttggacaacaagaggtctgtgaaggtgcccatgatgaagcataaggacctgaccacaccctacttccgggatgaggagctgtcctcctatgtggtggagatgaggtacagaggcaatgtcagtgccatgttcatcctccctgacaagggcaggatgcagcagctggaatccagcttacagccagagaccctgaggagatggaaggactctctgagacccaggatgatccatgagctctatgtgcccaagttctccatctccactgactacagcatggagggcatcctttcacagttgggcatcaaggaagtcttctcctcacaggctgacctgtctgggatcacaggggacaaggacctgagagtctctaaggtcgtccacaaggctgtgctggacgtgggtgagacgggcacagaggcagcggctgccacaggcctcaggatgatgggatcagctctaattatgaaccctctgagactgcgtttcaacaagccgttcctgatgattatctataacacaaacactcagactccactctttatggccaaagtcacaaatcccaagcaaaactagaacatcccaagtgctgaggcttcttcccaggagccagggattaatcctgtatgagagtatctatctgcatttttgcttccatgctctgattggctgtggcatgcctggattggacaatgacagtaactaactgtatgactgccacatgcacagagtcctggggacagtcagtgtcaggctcccagtcctcttggcagcactagctcatattcctgaagctgaaatctatccttgtggccactccttcccgccactattttatctgcctctacacaaaagcctgggccctggaaggtaggctcacccctgtctaggctcttgttatgtctacattcagcttccacagccttcatggaatcatgcaaacttataggtgaaccatgtgtccctcagccccaggacacagaagggaacccgctaccatgagtctatttccagcatctggggaccagttggtgtccagttcctgcctcacacctttcctcttccattcactgtcccttcaggggatcctcacacttcccacatctggcacagtgttggagccctcactcctgcagctgcatggagcctgtccttcagatcagctcccttctcccttctatacctacttagggtagaggagcctttctctagtttcctaatgaccacactcacagaacagaaagactcctcttctttccttacccaaactggagggcttgaagcaaaagatcaataaacataactgcatgaaaagtgaaaaaaaaaa

SEQ ID NO: 1037 - DNA, 408 bp, Cricetulus sp.
atggcctgtggtctggtcgcaagcaacctgaatctcaaacctggggagtgtctcaaagttcggggcgaggtggcccctgacgccaagagctttgtgctgaacctggggaaagacagcaacaacctgtgcctgcacttcaacccccgtttcaacgcccatggggacgccaacactatcgtgtgcaacagcaaggataacggagcctgggggactgagcaccgggagcctgccttccccttccagcctggaagcactgtggaggtatgcatcacctttgaccaggctgacctgaccatcaagctgccagatgggcatgagttcaagttccctaaccgtctcaacatggaggccatcaactacatggcggcagacggtgacttcaagattaagtgcgtggcctttgagtga

SEQ ID NO: 1038 - DNA, 117 bp, Cricetulus griseus
  misc_feature (31)..(56): n is a, c, g, or t
ggtcctgtgagaggcatctctatcaagttgnnnnnnnnnnnnnnnnnnnnnnnnnntaattatgttcctgaggtctcagccctagaccaggagatcattgaggtggatcctgacacc

SEQ ID NO: 1039 - DNA, 1184 bp, Cricetulus griseus
  misc_feature (76)..(476): n is a, c, g, or t
  misc_feature (1014)..(1184): n is a, c, g, or t
atcactctctgaggtggttctgcaaaacagacggggattagatttattatttttacaggaaggggggctatgtgcnnnnnnnnnnnnnnnnnnnnnnnnnnnnnnnnnnnnnnnnnnnnnnnnnnnnnnnnnnnnnnnnnnnnnnnnnnnnnnnnnnnnnnnnnnnnnnnnnnnnnnnnnnnnnnnnnnnnnnnnnnnnnnnnnnnnnnnnnnnnnnnnnnnnnnnnnnnnnnnnnnnnnnnnnnnnnnnnnnnnnnnnnnnnnnnnnnnnnnnnnnnnnnnnnnnnnnnnnnnnnnnnnnnnnnnnnnnnnnnnnnnnnnnnnnnnnnnnnnnnnnnnnnnnnnnnnnnnnnnnnnnnnnnnnnnnnnnnnnnnnnnnnnnnnnnnnnnnnnnnnnnnnnnnnnnnnnnnnnnnnnnnnnnnnnnnnnnnnnnnnnnnnnnnnnnnnnnnnnnnnnnnnnnnnnnnnnnnnnnnnccctttctttctcaagtttgtctcctcttcctcctgtcggcggcttccccgatccccacccccggtggcctttccccgcccggcccgagaacaagcaccggatggggccggcccgagaacaagcaccgggtggggccggcccgagaatgagcaccaggtgggccagcccgagaacgagcaccgggtgggctggcacgagggcgagcaccaggtgggtcagcacgagaacaaacaccgagtgagccggcctggagctctgcccctgagcccccgccccgcccgaagagaaacactccgtcccaaggtctccgcccccaaggtcaggccatcaggaagggggggggggaattgagtctgctgtaccagacaccagaccttgagaatatgctgatctggaatggctctgtgtctcatttgaaccatccaatagaaataattctgtatttcgcctcatttgaaagactctgtgtttcacctcatttgaataactctgtacttgcctcattgaataaccctgtatagcgcctcatatacattnnnnnnnnnnnnnnnnnnnnnnnnnnnnnnnnnnnnnnnnnnnnnnnnnnnnnnnnnnnnnnnnnnnnnnnnnnnnnnnnnnnnnnnnnnnnnnnnnnnnnnnnnnnnnnnnnnnnnnnnnnnnnnnnnnnnnnnnnnnnnnnnnnnnnnnnnnnnnnnnnnnnnnnnnnn

SEQ ID NO: 1040 - DNA, 469 bp, Cricetulus griseus
  misc_feature (370)..(390): n is a, c, g, or t
  misc_feature (426)..(450): n is a, c, g, or t
  misc_feature (453)..(465): n is a, c, g, or t
tacgttatgctctgatttgaaatcagctgtctttctttttcagattagtgatgatgaaccaggctatgacctagattttgcccagcgatgatggcagacacaaaaacccaacctcatctttggaggttctttgcctcatagcattaaattggggcttttttttttcttaccttataggtcctttgcatatatattatagcttccagatttgtgtttttatgggattttgtgtgtgcaaatgcatgtgtctatatgtgtttcttgtgctttttctttgcctccttttcttgtttgtggtttattctgattggaaaaggtgtttattcctcatggagtgattatggacaggtaagtaagatcttaattgaannnnnnnnnnnnnnnnnnnnncggttaagagcactgactgctcttccagaggttctnnnnnnnnnnnnnnnnnnnnnnnnnatnnnnnnnnnnnnnccct

SEQ ID NO: 1041 - DNA, 2352 bp, Mesocricetus auratus
  misc_feature (1408)..(1453): n is a, c, g, or t
  misc_feature (1531)..(1561): n is a, c, g, or t
  misc_feature (1885)..(1916): n is a, c, g, or t
  misc_feature (2043)..(2059): n is a, c, g, or t
agtttgtaataaataacctacattgatttctctgttccagaatgattttggcttcccttcctttaagtggtctgatgtttaccccaagagacagtgttaggaaatcatttacaaagtggtacagcctctccttctggtatagttataaatacaaggttgggctgggactgaagcaagggatccagaacttctcatcgtgatttttcagacaaaactgagttttcctaatgtgaaaatccaggtccagcagcatcaatagccatggagaagctgctgtggtgctcactggtcatgatcggcttctctcaggcttttgcccagaaaggtaggatctattataaagatctgatctggggggagacgggtgagagcctaatttcttacatatggaattcaagaaacagcatcaggtacagatgtgtgtttgtgtaacctgggaaaaggccacatgcctcttgatcctaaactctacttgtaagtgagggatgatagatctttgttatctgagaaactactcactttcttcgtttcctgtctcacagacatgtctaaaacagccttcgtatttcccaaagagtcagccaattcctatgtatccctggaagcacagtcaaagaagacattgaaagccttcactgtgtgtctccacatcttcacggaactgagcacaacccgcagcttcagtattttctcttatgctaccaagaacagccctaacgaaatcctcatattttggtctaaggatagagggtatgcttttggagtgggtgggcctgaagtactattcaaggcttctgaaattcctgaagttccaacacacatctgtgccagctgggagtctgctacagggattgcagagttatgggttgatgggaaacccaaggtgcggaaaattctgcagaagggctacactgtggggacagatgcaagcatcatcctggggcaggagcaggactcatatggtggtggttttgatgcaaaccagtctttggtaggagacattggagatgtgaacatgtgggacattgtgctgtctccagaacagataaacacagtttgtgttggtgggacactagaccccagtgttttaaactggcaggcactgaagtataaagtacagggtgatgtgtttattaagccccagctgtggccctgacctactgttgtgagccctgagacaacccttgggattacattgtcttccttgtctctggttatagaccttttaaccccaacagatgctgtagttctattctgtgaatatggtctttcacttccctgctctgcctttcctcagcaccagagcatgcaatttaagtgtatggcttggcagtatgtacatcatattaggaatatttatcaaagagaatcctaattacatgtttttgtttatatacacactataagnnnnnnnnnnnnnnnnnnnnnnnnnnnnnnnnnnnnnnnnnnnnnnatttccaggtgtaacagccccggctgacctggaacttgctgtgtagaccaggctgacctcaaactcactgagatccannnnnnnnnnnnnnnnnnnnnnnnnnnnnnngggcctgtgctatcactatctggattttttacatatatttttaattgaaagaattttaaacaatccctcaccctcacaaagatgagaaaccacacagaaagaagaatgaaaattttaatttaatctttttgtttttaaaatttcatatatgaatgctatatttacttcatttatatccctccctctccaaatcttcctgtatcttgacctcttatttattagctttatatgcatacacatacattatatacacaatatctatcatctatgtatctatgtatgtaagtacaatgtatctatgtgtctatgtatctatgtatctannnnnnnnnnnnnnnnnnnnnnnnnnnnnnnnctatcattcatccatcctactggttccatttagtgttgcttgtacgctgttgagggttggtcacttgggacttggataatctattagatggcacacccctgaagaaaacggactctccttttctcannnnnnnnnnnnnnnnngtagctcttcatataggggtggggctttgtgaaatttcttctgtccatgttgcatgctagtgttgtcattatgtaggtcttatttaggcaacccagactgatgggggaccgactatactgggctcagagttagtccttttctggaataaaaatctgtatctgaacttcctgggtccatgagtcaataaagctacctttggtttggatgaattggagttattgcatgattcattttattatcaaccctctggaataaatagtctgaagttcaggctgactgtcacttccctgca

SEQ ID NO: 1042 - DNA, 312 bp, Cricetulus sp.
ttttaactagaatgatcagtcaacaggggacataaaagttattggtggggatgatctctcaactttaactggaaatggctccaagttagtgtttcccacctccctaactagctttatcagctctctggattgataggaaacggggactagggaggaaatgaaacttggcccctgaagtgttgcccagagcattgccttccaaaggtggtatcctgaaggtagaatgatgacaatgagaggagtctagatggaattgatggattcaggctaagagtatctattgttttcccagggggagttaaagggaaagca

SEQ ID NO: 1043 - DNA, 866 bp, Mesocricetus auratus
ccttctttggtgaagtgtgttcccaggaatcatcatcaccatgaacagccagggatcagaccggaaagcagtgacactcctgctgcttgtgatgtctaacctgctgttctgccaaaatgcgcaccccctgccaatctgccctggtgggaattgccagatgcccctccaggagctgtttgaccgggtgatcatgctttctcactacatttatatgctgtctgcagatatgttcattgaattggataaacagtatgctcaagatcacgagtttattgccaaggccatcagtgactgccccacttcttccctggctacccctgaaggcaaggaagaagcccagcaggtccctccggaagtccttctgaacctgatactcagtttggtgcactcctggaatgaccctctatttcaactcgtaactgaagtagatggtattcatgaagcctctgatgctatcatatcaagagcgaaagagattggggaacaaaacaagcgccttctagaaggaattgagaagatacttggccaggcctatcctgaagccaaaggaaatgagatctactcggtttggtcacaatttccatctctgcagggagttgatgaagaatccagagacttggctatttacaacaaggttcgctgcctgcgcagggattcccacaaggttgacaattatctcaagctcctgagatgtagagttgtccacaacaacaactgctaagcccgaattcaatccgtgtacttctgagatggcctttaacagttcatttcttcaaaacttctattagtattatagctttcagtgaatgcttgggtgcaatgggtctcttcttaaagaataaaaactaacttttaaaaaaaaaaaa

SEQ ID NO: 1044 - DNA, 809 bp, Mesocricetus auratus
  misc_feature (358)..(380): n is a, c, g, or t
cagatcccaaactgctcagggtcttgtggaccgatcactgcccggcaatggctgcagactcccagacctcccggctcctgaccttcaccctgctctgcctgctctggcctcaggaggctggtgccttccctgccatgcccttgtccagtctgtttgccaatgccgtgctccgagcccagcatctgcaccagctggctgctgacacctacaaagagtttgagcgtgcgtacatccctgagggacagcgctattccatccagaatgcccagactgcgttctgcttctcagagaccatcccagcccccacaggcaaggaggaggcccaacagagaagcgacatggaattgcttcgcttctnnnnnnnnnnnnnnnnnnnnnnnctgggacctgtgcagttcctcagtagaatcttcaccaacagcctgatgttcggaacctcagaccgcgtctacgagaagctcaaggacctggaagagggcatccaggctctgatgcaggagctggaagatggcagtccccgtgttgggcagatcctcaagcaaacctatgacaagtttgacaccaacatgcgcagtgatgacgctctgctcaaaaactacgggttgctctcctgcttcaagaaggacctgcacaaggctgagacctacctgcgggtcatgaagtgccgtcgctttgtggaaagcagctgtgccttctagcagggcactacggtgtctctgctgtactcccccagcgcctccctttgccctagcaactgcccatccctatcgttcgccctaataaaattaagatgcatcataaaaaaaaaa

SEQ ID NO: 1045 - DNA, 1853 bp, Cricetinae gen. sp.
  misc_feature (585)..(613): n is a, c, g, or t
  misc_feature (1825)..(1845): n is a, c, g, or t
tgactgtggtgtgaaggagcggaaccagcgtgctatctatcaggatgcctcctgctctgagattgattactccatctccacaagatggttgaatggtctgactggaagcctgttttctgctgagcctaactcatttctgctggagctgtaggtgtggccccctggctacacgtgtctgcttgtaaattgtcctcactcccatatatcttcacacaccaaagaggacttctcttctgtagcaattctagaaagaactgcaggccagaccctgtgttcctggcccagaatcggccatggggggccgtgccattgtcactgacaccaacatcttttctggcctcgagagcaacaccactggtgtcaccgccttctccatgcctgcctggcagctggcactgtgggccacagcctacctgggtctggtgctggtcgctgtaacaggcaacgccacagtcatctggatcattctggcccacgagagaatgcgcacagtcaccaactatttcatcatcaacctggccttggcagacctctgcatggcagccttcaatgccaccttcaactttgtctacgccagtcacaacnnnnnnnnnnnnnnnnnnnnnnnnnnnnntttccagaacctctttcccatcacagccatgttcgtcagcatctactccatgactgccatcgctgccgacaggtacatggccatcgtccaccccttccagccacggctctcagcccccatcaccaaggcgactatcgcgggcatctggctggtagctctggctctggcctccccacagtgcttctactccaccatcactgtggaccagggagccaccaagtgtgtggtggcctggcctaatgacaacggaggcaagatgctccttctgtatcatctggtggtttttgtcctcgtctacttcctaccccttgtggtgatgttcgtggcttacagtgtcatcggcctcactctgtggaaacgcgcggtccccagacaccaggctcacggtgccaacctgcgccatctgcatgccaagaagaagtttgtgaaggccatggttctggtggtgttgacatttgccatttgctggctgccctaccacctctacttcatcctgggtagcttccagaaggacatctactaccgcaagttcatccagcaggtctacctggcgctcttctggctagccatgagctccaccatgtacaatcccatcatttactgctgcctcaaccacaggtttcgctctggattcaggcttgctttccggtgctgcccctgggtgacgcccactgaggaagacagactggagctgactcgcactccatccctctccaggagagtcaacaggtgtcacacaaaagagactttgttcatgactgcggacatgacccactctgaggctaccaatggccaggttgggagtccccaagatgtggagcctgccgcaccctgaagtcttgagactgtctgcagggccaggcttagtccctttgagaaacagctgatagaaaaggcctgatgtaatagcttgtcccacactccattcttcaaccaccaatagaaaaacaagatggtgcctggagctccacaggcaatgctaatacaaagagctcacatacccaccataagcattcctgggatggaggaaagagccaggaagacagggagccaacacttggccaatctaggagctgcaaagtgaaatgtctccctgcagtataaagatggatgggaaaactggatctcattaaagataactgcaggtgtcatgagaagaggcagttgaagggatgatgagatggtaaaggcacttgctgcctagcctggtgnnnnnnnnnnnnnnnnnnnnnctacatgg

SEQ ID NO: 1046 - DNA, 540 bp, Cricetinae gen. sp.
aattcggcacgaggggaacgctgaggcgcgcgtcgctcttctgccttccggaccggccagtgcgggcaaggaaggcatcatgtcagacaacgaggacaatttcgacggcgatgactttgatgatgtggaagaggacgaaggactagatgacttggaaaatgcagaggaggagggtcaggagaatgttgagattctaccctctggtgaacgaccacaggccaaccagaagcgcatcaccactccttacatgaccaagtatgagcgagcccgtgtactgggcacccgggcactccagatcgcgatgtgtgcccctgtgatggtggagctggagggggagacagaccctttgctcattgccatgaaggaactcaaggcccggaagatcccaatcatcattcgccgttacctgccagatggaagctatgaagattggggcgtggatgagctcatcatcactgactgagcagagctgccaattgtgcctgggcaacccttctgtacccactttatacatgtaaataataaatgtcaccttcccac

SEQ ID NO: 1047 - DNA, 1060 bp, Cricetinae
cagatatgggagacatgggcgatccaccaaaaaaaaaacgtctgatttccctatgtgttggttgcggcaatcaaattcacgatcagtatattctgagggtttctccggatttggaatggcatgcggcatgtttgaaatgtgcggagtgtaatcagtatttggacgagagctgtacttgctttgttagggatggaaaaacctactgtaaaagagattatatcaggttgtatgggatcaaatgcgccaaatgcagcattggcttcagcaagaacgacttcgtgatgcgtgcccgctccaaggtgtaccacatcgagtgtttccgctgtgtagcctgcagcaggcagctcatcccgggagacgaattcgcgctgcgggaggatgggcttttctgccgcgcggatcacgatgtggtggagagagccagcctgggagctggagaccctctcagtcccttgcatcctgcgcggcccctgcaaatggcagccgagcccatctccgctaggcagccagccctgcggcctcacgtccacaagcagcctgagaagaccacccgcgtgcggactgtgctcaacgagaagcagctgcacaccttgcggacttgctacgccgccaaccctcggccagatgcgctcatgaaggagcaactagtggagatgaccggcctcagcccccgagtgatccgagtctggtttcaaaacaagaggtgcaaggacaagaagcgcagcatcatgatgaagcagctccaacagcagcagcccaacgacaaaactaacatccaagggatgacaggaactcccatggtggctgctagtccggagagacatgatggtggtttacaggctaacccagtagaggtgcaaagttaccaaccgccctggaaagtactgagcgacttcgccttgcagagtgacatagatcagccggcttttcagcaactggtcaatttttcagaaggaggaccaggctctaattccactggcagtgaagtggcatcgatgtcctctcagctcccagatacacccaacagcatggtagccagtcctattgaggcatgaggact

SEQ ID NO: 1048 - DNA, 1503 bp, Cricetinae gen. sp.
atggcactcagggcaaaggcagatgtgtggctggcaagaccctggcagtgcctgcccaggacgagggcactgggcaccacagcagcactggcccccaacacactgcggccctttgaagccataccgcagtactccagaaacaggtggctgaagatgctacagatcctgagggaggagggccaagagggcctgcacctggagatgcatgaggccttccgggagctggggcccattttcaggtacagcatgggaagaacacaggttgtgtctgtgatgttgccagaggatgccgagaagctgcaccaggtggagagtatgcaccctcgtcggatgcacctggaaccttgggtagcccacagagaacaccgtggcctgagtcgtggagtgttcttgctaaatgggcctgaatggcgcttcaaccgactgaggctcaacccacacgtgctgtccccaaaggccgttcagaagtttgtccccatggtggacatggtagcacgggacttcttggagtccctgaagaagaaggtgtttcagaatgctcgtgggagcctcaccatggatgtgcagcaaagcctttttaactacagtatagaagccagcaactttgttctttttggggagcggctgggactccttggccatgacctgagccctgccagcctgacgttcatccatgccttgcattccgtgttcaagacgaccccacagctcatgttcttgcccaggagcctgactcgctggacaagcacccgggtgtggaaagagcattttgaggcctgggatgtcatctctgagtatgtcaacagatgtatccggaaggtgcaccaggagctcagacttggcagccctcacacctacagtggcatcgtggcagaactaatgtcccagggagctttgcctctcgacgccatcagagccaactcaattgagctcaccgctgggagtgtagacacgacaaccttccccctggtcatggctctctttgagctggctcggaacccagatgttcagcaggctgtgcggcaggagagcctggcagctgaggccagcgtggctgcaaatccccagagggctatgtcggatctgcccctgctgcgggctgtccttaaagagaccttgaggctctatcctgttggtggctttttggagagaattctaagctcggacttggtgcttcagaactaccacgtccctgctgggacattggtcctactttatctctactccatgggccgaaaccctgcagtatttccgaggcccgagcactacttgccccagcgctggctggagaggaatgggagtttccagcacctgaccttcggctttggggtgcgccagtgcctggggaagcgcctggctcaggtggagatgctcctcctgctgcaccatgtgctgaaatccttcagggtggagacgcaggagcgagaggatgtgcggatggtgtaccgctttgttctggcgcccagctccagccccctgctcactttccggcctgtcagctag

SEQ ID NO: 1049 - DNA, 292 bp, Cricetinae
tcatatcttatgaaccactttgatttgccaacatgtgatagctgcagagatgctgatgacaaacacaagctgataaccaaaacagaagccaagcaggaataccttctgaaagactgcgatttagagaagagagagcctgcgcttaggtttatcgtgaagaagaaccctcgtcactcacagtggggcgatatgaagctctacttaaagttacaggttgtgaagcgggctctggaagtttggggtagccaggacgcgctggaagacgcgaaggaagtgaggcaggaaaaccgag

SEQ ID NO: 1050 - DNA, 1217 bp, Cricetinae gen. sp.
  misc_feature (577)..(595): n is a, c, g, or t
acagcgaggcaggcgctcagagcccgcagcccaacgacaccgaggaccgcgacgagtggcatctaggacccgctcctccagcagcctgctccatctgaactgcctgcggcaaccccatggcgcggttcctgagactttgcacctggctgctagtgcttgggtcctgcctcctggctacagtgcaggcagaatgcagccaggactgcgccaagtgcagctaccacttggtgagcccaggcgacatcaacttcctggcgtgcacactggaatgtgaaggacaaatgccttctcacaaaatctgggagacctgcaaggatctcctgcaggtgtccaagcctgagttcccttgggatagcatcaacatgttcaaagacagcaacaaacaggatgagagccacttgctggccaagaagtacggagggttcatgaaaaggtatggaggcttcatgaagaagatggatgagctttatcctgtggagcccgaagaagaagcgaatggaggcgagatccttgccaagaagtacggtggcttcatgaagaaggatgcggatgagggcgacaccctggccaactcctnnnnnnnnnnnnnnnnnnncctgggaacaggagacaaccgtgcgagagagggccgccaccaagagagcactgacaatgatgacaacatgagcaagaggtatgggggcttcatgagaggcctcaaaagaagcccccaagtggaagacgaagcaaaagagctgcagaagcgctatgggggcttcatgagaagggtgggccgcccagagtggtggatggactaccagaagagatacggaggcttcctgaagcgctttgcggagtccctgccctccgatgaggaagctgaaagttactccaaagaagttcctgagatagaaaaaagatatgggggattcatgcgattttaaagccctttcccaaaggtgaccccaggcacccaccagcctgctgcatccccagtgagcgactgcctacccagtggtgtttgttgtcacttgctgcttgtactgttgcccttctggtctggataactacactgcctgaaagctgtgatgtgtggggtctgtgttctcttgagtctcggggctcagtactggcctgttgcagctatcccggtatcatgctgtaagtttctgttacctcatcccctaacttttggcagaaacgtcaataaatgcttacttgtatatagatataataaa

SEQ ID NO: 1051 - DNA, 833 bp, Cricetinae gen. sp.
aaaggagatagacgtgctgaaaatgactaaaagtaaaaagtacatgggaaagtaatgggagggcatttaaaaaacaaaaactaattctgtgtattatttaagcaatgtacataagatggtcttaaaagagaaggttgattaccaattccagagaaccagcaacatctgcaacatcaacagcaatgggcaggctctttgctttcttgatggccctagtgatgatgagctactggtcaacctgctctctgggatgtaacctgcctcagattcataacatcagaaacaagagagccttgacactcctggcacaaatgaggagactctcccctctctcctgcctgaaggacagaagggactttgcattccctctggagaaagtagatgtccagcacatgcagaaggctggagccatccctctcctgcaggagctgacccagcaggtcctcatcctcttcagctcaaaggactcatctgctgcttgggagacaaccctcctagacacattctgcactggcctctaccagcagctcagtgacctgaaagcctgtctgattcaacaggtagggattgaggaacctcctctgagccaggaagactccctgttgactgtgaggaaatacttccacaggatcactgtctacctgagagagaagaaccacagcccctgtgcctgggaggtggtcagaacagaagtctggagaaccctgtctgccacagcaaacttgctggcaagattgagtgaggagaaggagtaagtcctgagccaaagtgaacagaactctcctgaactaggacactgcacctcactcctcagattctccaggccagaagtc

SEQ ID NO: 1052 - DNA, 171 bp, Cricetinae gen. sp.
tcagctacacctagatagacataaattaataaaaatcgtcttaaccaacttatctaataaaaattggcaaccagccactattttgttgactatgagaaagtttaagtttatgttaatttttagggtctgatagatattcatgtgtattacagtggtattcatatgctatgt

SEQ ID NO: 1053 - DNA, 404 bp, Mesocricetus auratus
  misc_feature (117)..(140): n is a, c, g, or t
tgtgtgtattcaagaatatgcatgtaaatgatgtttttttttaactagaatgatcagtcaacagggggggaaaggaggaaacaaagaaagaatgaaaaagaaagggaaggagggggnnnnnnnnnnnnnnnnnnnnnnnnattggttgcatactctattctctgtccaatgtaggtgtcagtgggaggaggtgatggacctgacctccaggcagtcattgccatgagagggagatgcagtataaataaaacaaattacatgttgtattatcaaaaaacataaaagttattggtggggatgatctctcaactttaactggaaaggtaagtaccttaaagggaaagcaaagaatcatttttataccaagaatcaattagtaactgtgctttcaatcactcacttgg

SEQ ID NO: 1054 - DNA, 249 bp, Mesocricetus auratus
acttaccacttaccattaaatacctcttttctttttaaaaggacataattgacactggtaaaacaatgcaaactctgctttccctggtcaagcggtacaaccccaaaatggttaaggttgcaagcctttgcacactctgtctctttcttgggtcagcggatttgataggaagggcagagaagagttcccgaggttctttattatctgtgtagatgtttttttttcattgggagcaataagcaattgctt

SEQ ID NO: 1055 - DNA, 534 bp, Mesocricetus auratus
  misc_feature (182)..(239): n is a, c, g, or t
atgtcctgcaaattcgtgctccagctcctggggttctggctgctgctgagccagccttgcagggcgcgggtcacgaaggaatggctggatgaagtcatccacgtgtgcggtcgggaatatgtccgtgcgattttggacatctgtgcggccaccgtggggttggaggcaccacctctgcgacnnnnnnnnnnnnnnnnnnnnnnnnnnnnnnnnnnnnnnnnnnnnnnnnnnnnnnnnnncgacacaatgccaaatttgtcagagaaacccaagacagcactgcctgaagggcatccatctctaccagagcagcaacaatatgtgcctgtatcgagcgattcagttggtagcttggacgactttaagaaaagtttccatgctacacaaggtgaagcagaagacagcagtcttccagaacttaaatccttatacttggacactctttcgcggaaaaagaggtacactagtatatacatgagtcatcagtgttgcttccgtggttgctcaagaagatctcttactgcagcctgctga

SEQ ID NO: 1056 - DNA, 146 bp, Mesocricetus auratus
attcaggccacctggtatcagtacttagccaggctgagggcacctttgtggcctctctggttaaggagagtggcataacagtctccaatgtctggattggactccatgaccccaaaaataaccgtcgctggcattggagcagtgga

SEQ ID NO: 1057 - DNA, 645 bp, Cricetulus migratorius
gaggtgcagcttcaggagtcgggacctggcgttgtgaagccctcacagtcactgtccctcagttgctctgtcactggttactccatcagcagtggtaccttgtggacatggatcaggcagttcccagggaataagctggtgtggatggggtacataggctatggcgggggcacggattataacccatccctcaagaaccgcatctccataaccagagacacgtccaagaatcagttctcccttcagctgaagtctgtgaccactgaggacacagccacatattattgtgcaaaaatttttgggttcaatgctttggattcctggggccaagggatcctggtcaccgtctcctcagccacaacaacagccccatctgtctatcctttggcccctgcctgtgacagcacaaccagcaccacgaacacggtgaccctgggatgcctggtcaagggctatttccctgagccggtgaccgtaatctggaactctggagccctgaccagcggcgtgcacaccttcccatctgtcctgcattctgggctctactccctcagcagctcagtgactgtaccttccagcacctggcccagccagaccgtcacctgcaacgtagcccacccagccagcagcaccacggtcgactta

SEQ ID NO: 1058 - DNA, 2591 bp, Cricetinae
  misc_feature (408)..(430): n is a, c, g, or t
  misc_feature (1043)..(1134): n is a, c, g, or t
  misc_feature (2569)..(2591): n is a, c, g, or t
gaattccggggacagggctgcgggcaggctgggaccgacgcgcgcagagctccgtagcccggctggcgcgcgtctgtgcggccgcctgactcccgagcccaggcggtggccggccccgggcagcttggcgggccatggcgatggagcgcgggctgcacctcggcgcggcggcggcgagcgaagacgacctcttcctgcacaagagcctgggtgcctccaccgccaagcgcctggaggcggctttccgctccacgcccccaggaatggacctgtccctggcaccgccgcctcgtgaacgcccagcgtcgtcgtcgtcctcgcccctaggctgcttcgagccggctgaccccgaaggggccgggttgctgctgccgccgcccggaggaggaggcggcgcgggtggtggcnnnnnnnnnnnnnnnnnnnnnnnggtgagtgtccctgggctactggtgggctcagcgggcgtggggggcgacccgaacctgagcagcctgccggcgggggccgccctgtgtctcaagtacggagagagcgcgggccgcggctcggtggcagagagcagcggcggcgagcagagccccgacgacgacagcgacggccgctgtgagctggtgctgcgagccgggggcgccgacccgcgggcatccccgggagcggggggcggcggcaccaaggtggtggagggctgctccaacgcccacctgcacggcggcgcgggcctccccccggggggctctacgggcagcggtggcggcggaagcggcggcggcggtggcggcggcagcagcagcaagaaatccaaagagcagaaggcgctgcgcctcaacatcaacgcccgcgagcgccggaggatgcacgacctgaacgatgctctggacgagctgcgagcggtcatcccttacgcgcacagtccctctgtgcggaagctctccaagatcgccactctgctcctcgccaagaactacatcctcatgcaggcgcaggccctggaggagatgcggcgcctagtcgcctacctcaaccaaggccaggccatctcnnnnnnnnnnnnnnnnnnnnnnnnnnnnnnnnnnnnnnnnnnnnnnnnnnnnnnnnnnnnnnnnnnnnnnnnnnnnnnnnnnnnnnnnnnnncgttcagcgccgggctacccccggctgcctcctgtcccgagaagtgcgccctgttcaacagcgtctcgtccagcctctgcaaacagtgcacggagaagccttaaacactccctccctggaaagcctcgagacccactccaaagccagaggaaagcaagaagctgctccctaccccttttattttggtcctctccgagttgtgaaacacttgcaaggcaaacaaagcagagacagaaactgaggcgtatctgagacaaaccggactttcagccttggcatgccctgactcacagtctttggggtagggagggaggggagagggagttgagatgagatcgagtgtggaggtcttttttcccccctcagaaaagtggcaacttagacttcgaggaagtacagtcttcttggaaggtgaaaaataagttggaaagtagtgcttgtttattagacgtgaaaaatattgactgacaaaatactaaccttactaatagcggagaatttggctagtactgaaggggagaggagtatctcttgaaaggcttgggggacagaatattcattcagacaaatcagaaagggcactcgaaaataaattttgattctgagccaggagaaaaacttgaaatgcatacttaatttaagtggagggaaagcagagagagacacacgttgctatgaaagacttgtattttttattgcctctctgaacttaaaaatcccgtggaaaaaatgctcaaagttttggggagagtgatattaaacaaatagcaggctgtggatgaaagaattgcttttaaaatatttatgtgcaccttgttacttttcactctgcaatgatgtattaacgattcatgatatttatttgttattctttaatgatccacatgaacagtatttattacgtgttaaggtcttgggtctttaatgtgaagattttcttttaatgcttctaaaattctgttttatatattaacttacactgtgtgccaagtgttttaaaggtttatttgccaacgattatgaagaggaacattgatgtatctgagctgcttgggtttttgaaaggtcacctggatacttgagttgcatcatccctgtatttaaattgagctttaataaattgcttcagtccaaaaattacaggaaaggtgtattcttaattgatgaacgaattgatttctttttcaaatggggacctatttgcattccaaaaggggaaaaccatcacagagatagatcttgtaactgagaacctgctaggcaaatatattttccaggttgtgctgtgctttttgaaaggcctaatttaattgattttaatatagatgtacatatataagttattctaactgtgaagacttactacgttaaaagactgctttgattcgcttatgttgtgaaatcatttgttatttttctaaaaaaaatctaaaannnnnnnnnnnnnnnnnnnnnnn

SEQ ID NO: 1059 - DNA, 1791 bp, Cricetinae
accacgccggcctcaggtcatgcacggacacaaccgaaacgggcaggcccacgtgccgcggcggaaacgccgcaaccgctttgtcaagaagaacggccagtgcaacgtctactttgccaacctgagcaacaagtcccagcggtacatggcagacatcttcaccacctgcgtggacacgcgctggcgctacatgctcatgctcttttctgcggccttcctcgtctcctggctctttttcggcctcctcttctggtgcatcgccttcttccacggcgacctggaggccagcccctcggtgcccgctgcaggagccccggggggcaacggtggggcagccccggcggcccccaagccctgcatcatgcacgtgaacggctttttgggagccttcctgttctcggtggagacgcagacgaccatcggctatggtttccggtgcgtgacagaggagtgcccgttggcggtcattgcagtcgtggtccagtccatcgtgggctgtgtcatcgactccttcatgattggcactatcatggccaagatggcacggcctaagaagagggcccagacgctgctgttcagccaccacgcggtcatctccgtgcgcgatggcaagctctgcctgatgtggcgcgtgggcaacctgcgcaagagccacattgtggaggcccatgtccgggctcagctcatcaagccctacatgacccaagagggtgagtacctgccgctggaccagcgggacctcaacgtgggctatgacatcggcctggaccgcatcttcttggtgtcacccatcatcattgtacatgagattgatgaggacagtccactctacggcatgggcaaggaggagctggagtcagaggacttcgagattgtggtcatcctggagggcatggtggaggccacggctatgaccacgcaggcccgcagctcctacctggccagtgagatcctgtggggtcaccggttcgagcccgtggtctttgaggagaagagtcactacaaggtggactactcacgattccacaagacctatgaggtggctggcacgccctgctgctctgcccgtgagctgcaggagagcaagatcacggtgctgcccgccccaccgccccctcgcagtgccttctgctatgaaaatgagctggccctcatgagccaggaggaagaggagatggaagaggaagctgctgctgcagccgctgtggctgcaggcctgggcctggaggcgggccccaaagaagaggcgggcatcattcggatgctggagtttggtagccatctggatctggagcgcatgcaaggcaccctcccgctggacaatatctcctaccgcagggagtctgccatctgacctccaggccctgccctcctctattcctgcaagagcctctgccacgggtggggatccaggacaagcctcccactctcaggacagagttggacccggaggaaggtgggggcttcaaagactgggagatcccttcccgttgactgcagagcccaggactgggaaggaaggacccaggtactcagccctgctggcctgagccccgccccccagcacctccccacaggtggctctgggcccccagaccttccaccctttccccactgacccttcaaggatgcgtcccttctgttctcaggaccttggggaaggcggctggactgctggggggtgggcatcatgggagttctgggtgggcagggtgggcctggggagggggaggggtgtgttttttttgcatgaccatggtctgtgcccttgactcccttttgtaaatatct

SEQ ID NO: 1060 - DNA, 2076 bp, Mesocricetus auratus
  misc_feature (1073)..(1090): n is a, c, g, or t
gccaagatggccgacctggaggcggtgctggccgatgtgagctacctgatggccatggagaagagcaaggccacgccggccgcgcgcgccagtaagaagatcctgcttccagagcccagcattcgcagcgtcatgcagaagtacttagaggaccgaggagaggtgacttttgaaaagatcttctcacagaagttagggtacctgcttttccgagatttctgcctgaactatctggaagaggccaagcccttggtggagttctatgaagagatcaagaaatatgagaagctggagacagaggaggagcgtgtggtccgtagccgtgagatctttgactcctatatcatgaaagaactcctggcctgctcacatcccttttcaaagaatgctaccgagcatgtccagggccacctggtgaagaagcaggtgcctccagatctcttccagccatacattgaggagatttgtcagaacctccgaggggatgtgttccagaagttcattgagagtgacaagttcacacgattttgccagtggaagaacgtagagctcaacatccacctgaccatgaacgacttcagtgtgcatcgcatcatcgggcgtgggggcttcggtgaggtctatgggtgccggaaagcagacacaggcaagatgtatgccatgaagtgtctggacaagaaacgcatcaagatgaagcagggagagaccctggctctgaacgagaggatcatgctttccctcgtcagcaccggggactgccccttcatcgtgtgcatgtcatacgcattccgcacaccagacaatctcagtttcatcctggatctcatgaacggtggggacctgcactaccacttgtctcagcatggagtcttctctgaagccgacatgcgctcctacgcagctgagatcatcctgggccttgaacacatgcacaaccgttttgtagtctacagggacctgaagccagccaacattctcctggacgagcatggccatgtgagaatctcagacctgggcctagcttgcgacttctccaagaagaagccccatgccagtgtgggcacgcacgggtnnnnnnnnnnnnnnnnnntacagaagggcgtggcctatgacagcagtgctgactggttctctctgggttgcatgctcttcaagttgttgcggggacacagcccctttcggcagcacaagaccaaagacaagcatgagattgatcgcatgacattgacaatggctgtcgagctgcctgactccttctcccctgaactgcggtccctgctggaaggtttgctgcagagggatgtcaatcggaggctaggctgtctgggccgtggggctcaggaagtaaaagaaagcccgtttttccgctcactggactggcagatggtcttcttacagaagtacccgcccccactgatccccccacgtggggaggtgaatgcagctgatgcttttgacattggctcctttgatgaggaggacacaaaaggaatcaagttaccggacagtgaccaggaactgtaccgcaactttcctctcaccatctcggagcggtggcagcaggaggtggcagagactgtttttgacaccatcaatgctgagacagatcggctggaggcacgaaagaaagccaaaaacaagcagctgggccatgaggaggactatgctctgggtaaggactgcatcatgcatggctacatgtccaagatgggcaatcccttcctgacccagtggcagcggcggtacttctacctgttccccaaccgacttgagtggcggggtgaaggcgaggctccgcagagcctcctgaccatggaagagatccagtcagtggaagagacgcagatcaaagagcgcaaatgtctcctccttaaaatccgtggaggcaagcagtttgtcctgcagtgtgatagtgaccctgagctggtgcaatggaaaaaagagctgcgtgatgcctaccgtgaggcccagcagctggtgcagcgagtgcccaagatgaagaacaagccacgctcacctgtggtggagctgagcaaagtgccgctgatccagcgtggcagtgccaacggcctctga

SEQ ID NO: 1061 - DNA, 2094 bp, Cricetinae
  misc_feature (665)..(688): n is a, c, g, or t
gaggggatggcgatggcactcagggcaaaggcagatgtgtggctggcaagaccctggcagtgcctgcccaggacgagggcactgggcaccacagcagcactggcccccaacacactgcggccctttgaagccataccgcagtactccagaaacaggtggctgaagatgctacagatcctgagggaggagggccaagagggcctgcacctggagatgcatgaggccttccgggagctggggcccattttcaggtacagcatgggaagaacacaggttgtgtatgtgatgttgccagaggttgccgagaaggtattccaggcagacagtacacagcccagccgcacgctcttggaaccttgggtagcccacagagaacaccgtggcctgagtcgtggagtgttcttgctaaatgggcctgaatggcgcttcaaccgactgaggatcaacccacacatgctgtccccaaaggccgttcagaagtttgtccccatggtggacatggtagcacgggacttcttggagttcctgaagaagaaggtgctggcgaatgcccatggaagcttgtcaatgaacttctattccagtatgttcaactataccatagaagccagccactttgttctttttggggagcggctgggcctccttggtgatgacctgaattnnnnnnnnnnnnnnnnnnnnnnnnccttgaattccataatgaagacgactccacagctcatgcttttgcctagtggtctgactcgctggataagcacccgggtgtggaaagagaactttgattcctgggatttcgtctctgagtacgtcacaaaaaatgtcaagaatgtgtatcaagaggtgcaaagtggtggcccacagtcctggagtgtcatatcacagctggtagcagagggtgctctgacaatggatgccattctggccaactctctggaactcactgctgggagtgtggacacgacatcagtgcccctggtcatgaccctctttgagctggctcggaacccagatgttcaacaggctgtgcggcaggagagcctggcagctgaggccagcgtggctgcaaatccccagagggctatgtcggatctgcccctgctgcgggctgtccttaaagagaccttgaggctctatcctgttgctgtctttttggagagaattctaagctcggacttggtgcttcagaactaccacgtccctgctgggacgatcctccacatgagtctctactccatgggccgaaaccctgcagtatttccgaggcccgagcactacttgccccagcgctggctggagaggaatgggagtttccagcacctgaccttcggctttggggtgcgccagtgcctggggaagcgcctggctcaggtggagatgctcctcctgctgcaccatgtgctgaaatccttcagggtggagacgcaggagcgagaggatgtgcggatggtgtaccgctttgttctggcgcccagctccagccccctgctcactttccggcctgtcagctagtcagtcagctttgcagctggggttccagtcaggccagcagctccctcctgtcctgatgacaagctgccctcatttctaccttgggccaccatgcctgtagccacagctaccttcttgtctaggctctggaggattactgcccctcctctgtcagtcccttcacccccagcctccacctcaactgtgatcattcaagtgagcccatatgctggctttgctttcctctctggtcccaaaaatccctgtcactctcttcctgaaccctctcttaaagtttcttcgtatggtttgcacattgtcgaatactaacccagcatcagcaaggacatctcatgtcaacagtgaaagcccaggattcactcatgacacattctcatgcctgaggagagacagaactggccaagtgtatgctgcacaccccagacgtcatgtggtgtggcggagtcaggggcgcagtggatgctccctggtcagcttccattccagacattgtgccgatcttgaggatgctgagagggctaagggctcaagaatggccaaacaaaacggaaacaaacaacacacataaaagcccaacaaaca

SEQ ID NO: 1062 - DNA, 2264 bp, Cricetulus griseus
  misc_feature (1323)..(1408): n is a, c, g, or t
ggtttaaaagtttgacgtgctcaccaggtgctactcagctgccagtgggtagagaaccgaggacaggtgcttctgtggggcttgactgtttacacagcacagccagagatggataactcctccatctgcaaccccaacgcgaccatctgcgaaggcgactcctgcatagcaccggagagcaacttcaacgccatcctcagcgtggtgatgagcaccgtgctcacaatcctcctagccttggtgatgttttccatggggtgcaatgtggaactccacaagtttctgggacacctaaggcggccatggggcatcgtcgtgggcttcctctgtcagtttggaatcatgcctctcacaggtttcgtcctgtccgtggcctttggcatcctcccagtgcaagctgtggtggtgctgatccagggttgctgccctggaggaactgcctccaatatcctagcctattgggtagatggcgacatggacctcagcgttagcatgaccacctgctccacgctgcttgcccttggaatgatgcccctttgcctcttcatctataccaagatgtgggttgactcagggacgattgtgattccttatgacagcattggcacttctctggttgctcttgttattcctgtttccattggaatgtatgtgaatcacaaatggccccaaaaagcaaagatcatacttaaaattggatccatcgcaggtgcaattctcattgttctcatcgctgtggttggaggaatactgtaccaaagtgcctggaccattgaacccaagctgtggattataggaaccatatatcctatagctggctacggcctggggtttttcctggctagaattgctggtcaaccctggtacaggtgccgaacagttgccttggaaaccgggttgcagaacactcagctgtgttccaccattgtgcagctttccttcagccctgaggacctcaaccttgtgttcaccttccccctcatctacagcatcttccagatcgcctttgcagcaatactattaggagcttatgtcgcatacaagaaatgtcatggaaaaaataatactgagctacaagagaaaacagacaatgaaatggagcccaggtcatcatttcaggagacaaacaaaggatttcaaccagatgagaagtaaaaactaaggggacagaaaagaaagcttactaacaacattcattaaactacaactatttcatttggtggaatgatcagcagaaaaaaatgtttaaaattcaattcgaaatttgttattgttttggtacaaagtgactagcaatccattctttattgtgacaaacatctnnnnnnnnnnnnnnnnnnnnnnnnnnnnnnnnnnnnnnnnnnnnnnnnnnnnnnnnnnnnnnnnnnnnnnnnnnnnnnnnnnnnnngagtgtgtacatatccacaggggactgactggtcacaggatatcccttgatactaaattcacagaagcatgagcttctttcataaaatggcaaaatgtttgcattcatctctcatatacttcagatcaatactaacttacttaaaatatttaacatgatgtaaatgctatgtaaatagtcattttactgtattgtttaggaaatgatgtttttttaagtctgtgatattttatgttcagtacagacatcatttttcctgaaatttttgacaaaagtgggacttatccatagagttcaaacttattcttgggaggaaaactgaatttacatagatagatatgatcaatcatcactaatatattatcagaaaatatctaaagacctaactgaatgtagatcagactggaaaccttgttatagtatgctgaattcagaaacaagcacttttatatgttaaaatataacagattattattataaaatgttgattttcttcagtatttatgattgtaaaaagatgtgaatgaatgtattcctttaatattttaatcatcagtttgagactctgcaacctatttatttgtgatgtttacactatactctgtcaagtgtctgtctttttactttagaaaagtggcttctttcagtgatattccaaaagcagaagtgagataaagattactaatgaattcaataacaaatcagaattgagttaaactcaccacggatattttacatccgttcacatacttctatggtccaccaatgaccactatatctttcaaggaaaagacctcattagaacagtttatatctggcaacttagtttgttgaactctagagatgtttactaaag

SEQ ID NO: 1063 - DNA, 2640 bp, Cricetulus griseus
  misc_feature (64)..(134): n is a, c, g, or t
  misc_feature (415)..(432): n is a, c, g, or t
gtgttgtagtgcgcgtggtgctcgagccagaccgctgctgctggctgaaccaggtggagtgtcnnnnnnnnnnnnnnnnnnnnnnnnnnnnnnnnnnnnnnnnnnnnnnnnnnnnnnnnnnnnnnnnnnnnnnncatgtgaggagcccaggcaggaccgcgaactcaagtcctggagatgcctagtattctatctctgcttcttcggcttcatggcacagttgcggcctggggagagcttcatcacaccctacctcctgcaacaaaacttcacaatcgagcaggtgaccaatgagatcattccggtgctgccctactcccacctggccgtgctggtgccaatctttctgctcacggactacctgcgatacaagccaatcctgatcctgcagtgcctgagcttcatgtgcgtctgnnnnnnnnnnnnnnnnnncacctctgtggtacacatgcagctcatggaagtcttctacagcgtcaccatggctgcgcgcatcgcctactcctcctacatcttctccctggtgcgcccttcccgctaccagcgcatggccagctactcaagggcagcagtgctcctgggagtcttcaccagctctgtgttgggccaggtgctgtggcccctggaacaaaaatcccagaactccaacatgctcaactacatttccctgggctttatcatcttcagcctgggcctctccctctttctaaagcgtcctaagcacagcctctttttcaaccgcagtgcacttgtgcacaaagccttgccctgcgagctggaccagatgcacccgggccctggccgaccagagcctgggaaactagagcgagtgctgggcagttgcaggaactccttcctggtgtgcatgctaagtgaactggtgggaaatttacgacaaccacacgtgcgcctctggtgcctttggtgggtcttcaactctgcaggctactacctgattgtctactatgtgcacgtcctgtggagtattgacaaaaacctcaactacaatggcgccgtagatgctgcctccacactgctgagcgccatcacatccttctctgcgggcttcgtgaagatccgctgggctctgtggtcaaagctggtcatcgcaagtgttatagccatccaggccggactggttttctgtatgtacatggtccactacgtgacctgggtccacaaaatctgggtactctacatgacctacgtgcttttccgcggggcctaccagttcctcgtgcccattgccacttttcagattgcatcttccctatctaaagagctctgtgccttggtcttcgggatcaatacattccttgccactgcgctcaagactgccatcacgcttgtggtctccgacaaacggggtctgggcctcaaagttgaaaaacagttttgcatctactccgtgtacttcatggtgctttctgtcatctgctttgtcggggccgtgctggatggcgtgaggtactgccggcgtggtcgccaccagcccctgcccctgccccaggagctgagtcccttggagaattctgtgcaggtgccaagtatgcaggatagaggcctagggggactgcagccctcagcaccacagctgctcccagaggatggcgtggaggacagcgaggcaagcttgagagctgaagccaaggcctgacagtcacatcttgaccttcctggcttcatcccagttcggggggagaggggggattcctgacttaagcaacctctcccatgtgcgctccatcctgaaccagcctggcctgatgcctcagataagactgtactgtcttgagtcccagggcccaagatgtggggcccctgtgttacctttcaggagccctcagaatgtccacaggtttcaccttaggagccacctgctttaactgagggatgatagatagtttgttctactgatagctctaggaccgtagacagctacatcatctttagctgtgcaaagctgctgggacactcagggcagctgacctgcttgtgatcacgtgcagggcgctgtgagcctggattgcctatgcgttgccaagaagagcccgtgttggggtcaactgtgcccaccaggccagcccgccttagccccaggaagctcaggacaaatcatgtctgtcctcagggctggtgaggtagcccagacaccagccaaggcacactggccctgcgggtgctggtccttctatgtggggtggatgcctctcctggcttctgactagttgtcatttccaccattggaggtacttgcttggatggctatctgatctttttttaaaaaaaaactaaaacaaaactgacattaaaatggacaactacatttggcttttctgttgtgaaaagctggagtcaggtgggcgccaggcacatttccgactgatagagtagcggtaggcccttttcgcctgcagacgccatccccgagcaagttagtactcacctgacacacattcaggcagcatgggtgtaccagccttgattggaaccaaggcccttctagaggggaatgcctcaggggcttgcactggggagccatgtgagagttaccagagtcagctgtgaggttaagactagctgtggtgtgagcactttttccaatactttataaacagactctgttaaaaaaaaaaaaaa

SEQ ID NO: 1064 - DNA, 1125 bp, Cricetulus griseus
agacgctgttttggggggtgtcttgagtcagttaggtctggacacagattttaataaagccgtgattgtgtggcacaactacgcctttgtaactgcaagcctccaagctctccgttaccctcccctcccctctcctctcggtcctcaccgggacagcccggaagaggtgcgagccggatcgactctatcggctctcttccttccacgcgctcctgcgccgtcctccacgatcctcaagcgatgcctcgggccccgcctccccccaagagcccgccctcccgccgccacgcgcaggcgcgcgtcttccgattggcggagtgacgggcaggctcggccaatagcgtcgcgaggaaggcggggctccaggcccaggcccctcccctcctccctcgttgaatattcaagaggcgggcgagcggacgccgcgggaagacgccatgaagtgagcggcgggggggctcgggggagcggctcgctctgcggggggcgatggggcggccgctgggcctcgctggggccggagaggctgccgaggccgggccgggtggctccggggtcccgggctgggggccgggcgagcgggcgagcgggcgggcgggcggagcgagagcaccgggcaccgacgcgtcgccttcgccgccaggctcaacgtggacgggctgctggtctatttcccgtacgactacatctacccggagcagttctcctacatgctggagctcaagcgcacgctggacgccaaggtgggtgccggggtcgccgacggctcgacggctcgacggctgcctgcgctcgccgccttgcacgccctccccgcctccctcaggctaacttcctggtctggtctggtcgggggaggggggggaacccgggcacgttggccccaggcctgcaatcgcagcagcaccctgggaagcgcaggctggagcatcgctgcaagtttggaggccagcctgggctacacagtgagaccctgtgtcagcaacagcggcacaaataagtagcagggctgggaatgtggctcacccggtagctagggtgcttgctagcatcatggatctgatgctccccctttcatcctcgccaccgcgtaaactgaacgtgacggtgtgtgtctgcaagctt

SEQ ID NO: 1065 - DNA, 13667 bp, Cricetulus griseus
  misc_feature (1550)..(1574): n is a, c, g, or t
  misc_feature (2054)..(2082): n is a, c, g, or t
  misc_feature (2119)..(2161): n is a, c, g, or t
  misc_feature (2298)..(2321): n is a, c, g, or t
  misc_feature (2935)..(2961): n is a, c, g, or t
  misc_feature (2967)..(2979): n is a, c, g, or t
  misc_feature (2982)..(3001): n is a, c, g, or t
  misc_feature (3009)..(3026): n is a, c, g, or t
  misc_feature (3028)..(3041): n is a, c, g, or t
  misc_feature (3066)..(3078): n is a, c, g, or t
  misc_feature (3080)..(3100): n is a, c, g, or t
  misc_feature (4385)..(4402): n is a, c, g, or t
  misc_feature (4412)..(4427): n is a, c, g, or t
  misc_feature (4429)..(4448): n is a, c, g, or t
  misc_feature (4511)..(4530): n is a, c, g, or t
  misc_feature (4732)..(4784): n is a, c, g, or t
  misc_feature (4823)..(4845): n is a, c, g, or t
  misc_feature (6447)..(6470): n is a, c, g, or t
  misc_feature (10723)..(10745): n is a, c, g, or t
  misc_feature (11408)..(11428): n is a, c, g, or t
  misc_feature (12161)..(12175): n is a, c, g, or t
  misc_feature (12946)..(12961): n is a, c, g, or t
aagcttggaggccagcctgggctacacagtgagaccctgtgtcagcaacagcggcacaaataagtagcagggctgcgaatgtggctcacccggtagctagggtgcttgctagcatcatggatctgaagctcccgctttcatcctcgcgtaaactgaatgtgacggtgtgtgtccgcaggtttggaggccagcctgggctacacagtgagaccctgtgtcagcaacagcggcacaaataagtaacagggctgggaatgtggctcaccaggtagctagggtgcttgcctagcctgctagcatcatggatctgaagctcccgctttcattctcgccaccgtgtaaactgaacgtgatggcgtgtgtctgtgggtttggaggccagcctgggctacacagtgagaccctgtgtcagcaaaagtaacagggctgggaatgtggctcactcagtagctagggtgcttgcctagcctgctagcatcatggatctaaagatcccgctttcatcctcgccaccacgtaaactgaaggtgacggtgtgtgtctgcgggtttggaggccagcctgggctacacagtgagaccctgtgtcggcaacagcggcacaaataagtaacagggctgggaatgtggctcaccaggtagctagggtgcttgcctagcctgctagcatcatggatctgaagctcccgctttcatcctcgccaccgtgtaaactgaacgtgatggcgtgtgtctgtgggtttggaggccagcctggcttttatagtgagttcctggccagctagggctgtgcatagggggactatttcccaaagtatctaaggtaacttgtggagggagagttgtagcccagttagtagaatgtttgcctagcatactcgaatccaaacattgaattaacccggtgtgacatgatgcctgcctgtaaacctagcgctggggaggctgaggcaggagaatgagtggggggatttgcagccagcctgggtgagctccaggcaagccagggctatatagtaagacctttaaaaaggtaagggagggccaggtgacttagtgggtgaggtgtttgctgcaccagtgtagagttggatcccaggagccgtgtagaagtggagggagaaaaggatctccacaaagttagatgtcctatgaccttgtcatccaaacatatgtcatgtacacacactccccagaatagtaatcacgggatttgataatagaatcaaggctgagtcttagggacataggtacttttttctgtcacccaggatctacacatgggcttctagctgtgcactgttgggcatgtcatttaagctcttgccacaatttccacccctgtaaatggtgttcatgcttctccagagagagagatgtactttggttggggcatgcaccaggccctggtttcatcttcgacacagtgtaagtctggtgattcacccctgtaatcccagccctcagaatgtgcaggcaggaggatcaaaattcattctctggtacaatagggtgttcggggccatgcatggtggaacatgcttttaattnnnnnnnnnnnnnnnnnnnnnnnnnaggagccctgtaacttggtctatagcctggtctacatatggaatttcaggacagcctgggctacatagacagaacctgttctgtagaaagaattgaaccagtgtgctgggcaaatacctacacctccagctacatcagagccctctctttacttttcactattcaacaggacctcactaacttgcccaggctcacgctgaatttaagaaccctcctgccttaggtccatgtcttgaagaagaggaagaaagaaagaatgtgttggtgatgataacaggaggggctggagaggtggcacggtggttgagaggacttgctgcccttccggaggatcccagtttgattcccagtgcccatgcctggcactgacaaccagcagtgacttcagctctagggggtccggcatcctctccctgcttctgcaggccctgtacacacagagtgtacacacatacacacacatataaattaatctttgtnnnnnnnnnnnnnnnnnnnnnnnnnnnnngttttatgagacagagtttctctgtattgctttggannnnnnnnnnnnnnnnnnnnnnnnnnnnnnnnnnnnnnnnnnnaaggtgtgcgccaccaatgccgggccctaaattaaagtttttaaagttggagctagtgcagccttcctaggttgtgaggactgtgccagttcacacagaaaaggcagcagtttccagctcagggtgattttgttgcnnnnnnnnnnnnnnnnnnnnnnnnctgggaattagaccaacatgctgggcagagtgtctgcacctggagctccatcccagccctgtttcctttctgtatgagacaggacataactaaattgcccaggctcactctgtagcccaggctgacactgatcttagcagttctcccgccttaggttccaggtgacagacagactttgacaggctgactggtgttgatactcagagtctatttggcctgtgtacggtcacagtagtggaaggggggggggttcaggatgtggaggacagaggacaactttgtggacttggttgtctcctacttttatgcgggtcctgggaatcaaattcaggttggtagacttgatggcaactgcctttacgtgctgagctgactcaacagccctgaacacaaactttctttaaaacaatttttaaaaattgtatttatttatttagagtgtgggtgtccatgctctggtgtgcatgaggaggtcagtggacaacttctgggaggcagtttggttcttccttcagtgtaggtgccggggattgaactcagtgatcagctgggccccaggtacctttacctgctgagtcatctcactggcccacaagtctattgatactcttaannnnnnnnnnnnnnnnnnnnnnnnnnnctttcnnnnnnnnnnnnncannnnnnnnnnnnnnnnnnnnacagcccnnnnnnnnnnnnnnnnnncnnnnnnnnnnnnnntggcctcaagctcacaaagagcctnnnnnnnnnnnnngnnnnnnnnnnnnnnnnnnnnngtgcgccaccaacgcctggcagtcctcacaatcttgttccaagtaagggctgtggagccaaggagtcaagcaaggatgctgtgacccaggtgtgatccagagaggtcaacgaaatagggctcagcctgcaaccccagtactcaggaggtagaggcaggagcatcaccaagtgtacaaagccagccagaggtgcatagcaagtactagactagccaaggctacagagcacgatccttgggatgaaaattaaggatgaaaaataaaaactccagcaaaaaagaagcagagatgaagccccttgttccctgggccttgatggcagttcaccgttgtgtgtgtcatgttcctaggtaatggtgtcctctagggtccccagagtttatgaccccgaggttctgagagcccgtgttttgtctcttctgtgcccaactttcagggtcatggagtcctggagatgccctcaggcaccgggaagacagtgtccctgctggccctgatagtggcctaccagagggtgagtgaccatcatgggtgtctggactggggggcggggaggggctggatggggctgagctgattgtcacccacaggcttttccgctggaggtgaccaaacttatctactgctctcggactgtgccagagattgagaaggtgggcagtgaggatggacccagtggtctgtcccctcccctcggcctcagtggtccccagttgctgccctcactggcctggtgggcaggggcttatgctggtcctgaggtccccacgcaatgctcccatcgtctaagcaggtcatagaagagcttcgcaagctgctcagcttctatgagcagcaggagggcgagaagctgccgttcttgggactagctctgagctcaagaaagaacctgtgcattcatcccgaggtgagacccgggcctcgccctcagccttgggctacccattgcaagccccagagacagcccgtggccatgtgaggtgaccaccagtgtaactcccttttcagttagatcttgagtcatcagtcagagcgcaggttagctcctgctcctagaacagaaactgctggagtgccagggtgacgcctcagaatttctcatttgacctcatgggataagtcaaagtctaaacggtagagcacatttgaagtgttaggatttttatatacatgaaacataagtgaatttcatggcagcctcctgtcctatctgacgatatctattatatgtatgtaggtattccagaaccccaaaacacagttgagccaagggctactcagtgannnnnnnnnnnnnnnnnngtagccctannnnnnnnnnnnnnnncnnnnnnnnnnnnnnnnnnnntaaactaacagatcctcctgagtgctgggttcaaaaacatgtgacactaactgtcggcttgannnnnnnnnnnnnnnnnnnngatttatttatctaatgtgagttctctatctgcatgtacacccttattccagaagaggccatcagatcccattatagatggttgtggttggtaagaactgaactcaagacctctggaacagcagccagtgctcttaacctctgagccatttctctagccctgtctagcttgttttttaaaagagaaacttagagccgggcgnnnnnnnnnnnnnnnnnnnnnnnnnnnnnnnnnnnnnnnnnnnnnnnnnnnnngagtgtggtctacagatcgagtgccaataggctctgaannnnnnnnnnnnnnnnnnnnnnncaaaaaacaacaaaaaataaaagagagagagagagggagaaacttaggtttttattttttaaacacttataaacacttctatgttgtttttttaagattaatttatgtgttatgtaaacagtgttctgcctgcgtatctccctgcacacgttttattgtgaggtagggccttggtgtttgcccgggctggcctgagttggtgcattcctcctgctccagctgtcttagtaactgggattcaggtctgtgctgccgtgcccagctctggggacggttctgatgtcccactctgacatccctgcagcaagtccttttaactaatagtggctcaggtgaaggttctggctgcccagaaaccccagctgacctgctacttgtgatgtcccgagttgggaaacccaggttggcatagctggcacgcactacctcctgtctctgttgtaacttgtcccctgaacccccaggtgacaccactgcgctttgggaaggacgtggacggcaagtgtcacagcctcacagcctcatatgtgcgggcccagtaccagcaggatgccagcctgcctcactgccgcttctatgaggtgcagggaagggcccgggccggggagggcagagacactctggacagcagctctccctgacccttccatcttctggcccgggccggggagggcagacaccctcaggacagcagctctccctgacccttccatcttctggcccgggccggggagggcagacaccctctggacagcagctctccctgaccctgccatcttctggcccaggccggggagggcagagacactctggacagcagctctccctgacccttccatcttctggcccgggccggggagggcagacaccctcaggacagcagctctccctgacccttccatcttctggcctgggccggggagggcagacaccctctggacagcagctctccctgaccctgccatcttctggcccaggccggggagggcagagacactctggacagcagctctccctgacactgccatcttctgcctccccaggagtttgatgcccacggacgccaggtgcccctcccggcaggcatctacaacctggatgacctgaaggccctggggcagcggcagggctggtgcccctacttcctggctcgatactcggtgaagagttgttttgttttcttctggggcagggtctcacttataacccaggctggcctcaaacttagaagaaccttacgcaggttcccagctatgggggttataggcatgagccacttttgcccacccctccgttagcccatctgtctgcttgcatctttgttgacctggtacctaggtcttcctgtctccagcctctgtttatgccttgcctgggtggtcccatctgtcttttccatccacctgctgtctgtcttggtgttacgtctgtacacctgggaaggagtggtatggcgggggcagcagggcccaaggcaaaaacttatccctccatgttcctagatcctgcatgccaacgtggtggtttacagctaccactatctcctggaccccaagatcgcagacctggtgtccaaagagctggcccgcaaggccgtcgtgnnnnnnnnnnnnnnnnnnnnnnnnggtgaggagggtgccagggtgtgcagacagcggcggcctctctgccccgcctccaagccggctgagcccatgtctgtctgctttcctcctagacaatgtctgcatcgactccatgagtgtaaacctcacccgcaggactctggaccgctgccagagcaacttggacaccttgcagaagacggtgctcaggtgcccactctgctccctgtgtgccgcctgcctctgtggccctggacacctgccccattccagctctgtcccatgtccccgccaggatcaaggagacagacgagcagcggctgcgggacgagtaccggcgcctggtggaggggctgcgggaggccagcgcggcgcgggagacagacgcgcacctggcgaaccctgtgctgccggacgaggtgctgcagggtgagccgtgccccaccccccaccctcacacgccttccttcccttgccagctgactcagtctccctgcagaggccgtgccaggctccatccgcactgccgagcacttcctgggcttcctgcggcggctgctggagtacgtcaagtggcggctgcgcgtgcagcatgtggtacaggagagccctcctgccttcctgagcggcctggctcagcgcgtgtgcatccaacgcaagcccctcaggtgcgcgtgctgccatggggacctcaggtccagacctgtggctggtgacggggtcaggggtcaggtcagagtcggatgtggagcgagccgtgtcactgtgaggtcagctcttggctgtgaccgctgcaggactacctggtacttctgcagccctatgcgtgtgcatgtgcgagcctgggaaagtgtgtggctgttctttctgagcgtggggcccacgacactggctgcacagcacagtgactgatggccatgggtcttgtttgacaagaatttgcatacaagcggcaaacctgggcgccgtgtgctagtgctgtgcggtagctctggatgcttgcagtgtggggacagcttggccacagacgatgcccaggtaaacaggtggcgagagtcccagccgttgctgcttccctccctctcccgaccccatggcttctcaggttctgtgctgagcgcctgcgctccctcctgcacaccttggagattgctgacctggctgacttctccccgctcacactccttgctaacttcgccactctcgtcagcacttacgccaagggtaagctcccctcttgctcctcctggcagcggacttgggggcctagccaagtcgggtggggtattagcaggaagtctgggcatgtgagaccggggatttgagctactatgagggccctggggaacaagcgagtgagcgagcctcgtgttcagattcgtgtgtctagaggctcctcctggctgcagggggagaactcgagtgagctgtgatactgagcagagggatgctgtgcggtcagcccacctttggccggggggagaagtcctcatgtgtgcctgagggcaccgggagccatggcagggtctgggcaagggatgtacttggtgaggttgttgttttcaaggttcatccaacagagagggggagccatagactgtgggtacaggaaaagggagccttggggagagctatgggagaaagcggccaggtgtaaaagcccttgagggagagggatgcaggtgatgcacagggagaggggacaagctacagcttttgttgcccccgcccgccccagctttgcactgagtttttaagcttatccctggggattagtaccgtagccaggaaaccaggtcagctggcgtcctgcagctggcccagcctcggaagaaggggctgctggcagctgtctgcttccttctgccctcacccagccccttctcctggccttcattgttctccctccggcccccacctactgatgcatccatcacagtcttacagaaagcctccttccctgtgccccatcacctgcccgagtcaagtcctttacctctcagaaagtcacccccactccattccatcctgggcctgcccctccctctgtcccagctgggtctctggctagctgtctcccccgtgcaaggagagcccttttgggtaggaccgagattctgttggtttctgctgggtcctcagcatgatgctggacacaagacctggtctttccttgccaagtgaaacagaatctgtgaatgtaatcatttgttcagtcaacagatgggccaggctgggccccgtggagacagcgggatctaacacagccaggctgggcccggagtctaacacacacagccaggctgggcccagcacagccttagttgcccccctcatcctcctgtccatatccctaccctcatctgggagccacagcctgggggctaggagcaaagatcactccagaaggggacactagaaagtgtggctgtgctgtgaggagcaggagtcctggctcccagggtgcctgtggaacaaggacccaaccaaccaagtgggccctgggacatgacgctgataccgtagctgggagcaagggctggccctgcagagttcatgggcacacttctgggtatggcaggagtgtggagacaccagccaacttaaggttccatagcgtctccccgactgcagtgtggggagcagggggggacaggtgggagtgaggccggcctgggggagggcgggcctggcctccctgcggggccgtgcagtgaagccctggctcaccctgcttccacacctgagcgtttgtacagtcctgtcctgcgctagccatggcaggggcaggggcaggcgggggctgtcgtgcacactcaccggcctcctcctccccaggcttcaccattatcatcgagccctttgatgacaggaccccgaccattgccaaccccatcctgcacttcaggtgagatgcaagcctgtgtggacaggatggcttcgcccccggcctctgccctgggtgacgactgtgttatcccacagttgtatggacgcctccttggccatcaagcctgtgtttgagcgcttccagtctgtcatcatcacctctggggtgaggactctgtgctgttgttccatgggggccctggtccctgccccagtctgctgaggtcctccttgctgtctcttgcagacactgtccccactggacatctaccccaagatcctggacttccaccccgtcaccatggcaaccttcaccatgacactggcccgagtctgcctctgcccaatggtgagtgggtgagacccatgggagcaccaagccaccaaatggtgcctggaagggtctcttcccagcaacctggaccatagtgctcagggagcaggcctggtgctttatcaccgtataggtcagggtgagtgtgccatttgtcatccagctgtgacttggataatgagcctgcctctgttttggagtttagagtgtggccggctgttagacatattcaccccacagtccatgggccacatgaagccagctgtggctggggatgctgtttggcacatcagaaacactttaaaccttacgcaaggtttgtagcctgcttgcatgcttgtggagcacgagctgtgtacagcctgtctgcaggcctgctctcggcagcaggggttagttagacggttgttttcagagctgtgggctttttggaatgttccctctgaccattcactggcatggtggactggggagggaggctaatggggtgtgtgttttgggtgacctgtgttctgaaactacctaaggctggagtgtagccttgcctagaagcagaggtccctgccctgggacctgttgcagggcattggcccaagcagttgcagccataggcttagggccactgtctatgtctacatgacgctttcctgagctcgggccttatttggtacagtgctcgcctaatacatggaagtgcctgtgctagctagctgtggtaatgcaggcctgtgatcttgggaagtgggcaggaggaccaggagttcatggaacttcagaggttggggaaacagcttctcatgggtttgggagggtaggtagcctcagtgaggctcgcgtctaaaggccagcctgggctacatgagacactaagtcaaaaaaggggacatttgtcaggtgtatcacagaaccttcactctgtttcagatcattggccgtggtaatgaccaggtggccatcagctccaaatttgagaccagggaagatattggtgagtcacctgtgtgggcttggttggggtgggttacaggtggacaaggacttgctaccatannnnnnnnnnnnnnnnnnnnnnnccagcctctgtggcggacacaggcccactgtgggttgagcccaccctgggtctcttcactttggaagctgtgccaccaggcaccactgagccgtagcaccagcagagggcctttggaacagtgggcactggcttctgagtgtcatctagaagagacaccgccacctctatgtatttcttgtgctgtggcatgtctctgggtggcttgggaggaaggaactggataactagcctcagtgagcagcaggagaggatccagtctccaatcccctctccctagctgtaatccgcaactacggcaacctcctgctggagatgtctgctgtggtccccgacggcattgtggccttctttaccagctaccaatacatggaaagcaccgtggcctcctggtatgagcaggtatgcctagtccccaccgcccaaaccctcagctctgctcttcctgtgggggcttcactccccatgtttccaccatgacacatgtcacaggacaggatggtggtgctaacagaccctgcaggctcatcagtgtttcccttgaccagagaggaccaccattggggttactgcagactacatccccagcaagcaggcctggtgccagggggacggtgttgtgagcttaaggttccactctaggagctcttgtgtgtgggtgagnnnnnnnnnnnnnnnnnnnnncaattaaaggcgtgcgccgccgccacccggccaggaccctgtatcttgtcctagtggacagcctgacttttgtctcagtcattacagtgacagatttgaactctcgggataacccctgggtgtggtccttgcctggattacggtcaggccctccacctccactggccactttaggccccgtgcccaccttcttgggtggggatcagctccccactttggactgccaaagaggttggactgctgagggcccagagaaggatctccacggaaggccacagcagcggggctggaaacaggagcacgtggtcctgtgccctgacctccctgtccccccagggcatccttgagaacatccagaggaacaagctgctcttcattgagacccaggacggggcagagaccagtgtggccctggagaagtaccaagaggtgggtgcctgggacaggcaggcagagcagtgccagctgccaacaggggaacgggaaggggctgaggagtgactgcctccacctccctaggcgtgtgaaaacggccggggggccattctgctctcggtggctcggggcaaagtctcagaagggattgactttggtgagtggacctggctggctcttggcccagtggcctgcccaccctcccgtggctgctcccctggggaccactgggcatgcagagggatcctttccacgtgccccctaataccagccgagaatgcactgtaaccctgctgtnnnnnnnnnnnnnnnccactatgggcgggctgtgatcatgttcggtgtcccctacgtctacactcagagccgaatcctcaaggtgagtggggaagctgtggtgtctggagaggggcgttgtgtttgggaaggaagggcaggagccctaccttagactcctccctcattccccaggcccgcctagagtacctgcgggaccagttccagatccgcgagaatgacttcctcacctttgatgccatgcgccacgcagcccagtgtgtgggtcgtgccatcaggggcaagacagactatggtctcatggtctttgccgacaaggtgaggcctgtgggcaccccagcctaacctatcccccttcctcacaggggacagggtggtgggcagcctgggttccaacctggggtttgctgtcctccctcgccacagcgctttgctcgggctgacaaacgtgggaaactgcctcgatggatccaggagcacctgactgactctaacctcaacctgaccgtggacgagggtgtgcaggtcgccaagtacttcctgcggcagatggctcaacccttccaccgggtaagcccttagcccctccctcccagtgtgcacacttcccctagtccccacagggtccccatgtccaggaagtgagggacactgatgagagacctagcgcccttttcccagtttggccacgcattgcagtcatgttgacgtgtgccatttgacgcctgtcctttacctctgcgccttccaggaagatcagctgggcctgtcactgctcagtctagnnnnnnnnnnnnnnnnggagacgctacggcgggttgagcagatcgcacagcagctctgaccaggactgtgggtgacgtctgtggcaccaggaggtactgaaaggtcccaggaccctcaggcaatctcccagtcccagagtacagtctttaattgcagggaggacagcaggatcccgatccacaggtgccacccacccttcccagttcctgagcggctgtggccactgcagccagtccacttatcgagggctcaagtcctgggtgctggcgctcatggtccgcaaggcctcactcaatttccgggttgagaactgggggcaggtacaggaacggtcagagttcttttccagttgacactgggatcgtgtcgtgcctctgccctccacccccgactggaccccatcatgagtgccggggaggaagccccacctttcctgtcgagcctgtcagcagcaccctactccaccaccggcccctcacctgcggcctggcagccctcgggccttccacattcagcatgttgagtgacacggctctcttcatccttcagaggccgagaggacagagtgagtcaggaaggcctgcagggccctggctctgaccagtgtcgcagacgggctgctgagctcacccagcactcaccctgcagcgcccgccatgctctcccctcggaggcgcgagaccagcttctcactcccccgccggatggactctcgaagctt

SEQ ID NO: 1066 - DNA, 1925 bp, Cricetulus griseus
gcaagatggcggccgctgaggaaggttgcgatgctggggtcgaagcggaccgggaactggaggagcttctggaaagtgctcttgatgatttcgataaagccaaaccctccccagcaccccctcctaccacctcggcccccgatgcttcaggaccccagaagaaatcgccaggagacactgccaaagatgccctcttcgcctcccaagagaagtttttccaggaactgttcgatagtgagttggcttcccaagccactgcagagtttgagaaggcaatgaaggagctggctgaagaagagccccacctggtggaacagttccagaagctctcagaggcagctgggagagtgggcagtgatgcaaactctcaacaagaatttacttcttgcctaaaggagacattaagtgggctagccaaaaatgccactgaccttcagaactcaggcatgtctgaagaggaactgaccaaagccatggaagggctgggcatggatgacggggacggggatgggaacatcctccccatcatgcagagcatcatgcagaacctcctgtctaaggatgtactgtacccgtccctgaaggagatcacggaaaagtatccagagtggctgcagagtcaccaggagtctatccctccagaacagtttgagaagtaccaggagcagcacagcgtcatgggcaaaatatgtgagcagtttgaggcagagacgcccacagacagcgaggctactcacagggctcgttttgaggcggtgctagatctcatgcagcagttacaggacttggggcatcctccaaaagagctggccggggagatgcctcctggcctcaactttgacctggataccctcaatctatcgggcccaccaggtgccaatggcgagcagtgtctgatcatgtgaaacacaacacgttttcctccctgagtcccagacctggggaacatctggagtcagcagaactattgggaactgaggcaggaatgtcgtctctgggagctggctgccccacactctccatcccattcaagactgtgccctgccagctgcggatctgctgaatctgctctgtaggccatttctgtgagccttactccatcatgtgttctgctgttagaaacaggccagctcattgccccgtaaaggaagacatcacttcttcccactcccaaaaataatggtctatatggctgtactcatgttcccctttattcccagggacttcgtgccttgtttctactccctctcttggatctggggagcaggagctgagtcctaagactttgtgtttgtttctattaggcagggcttctgggaatgaggagaaaatgtagcttaccctggggctgtaggtttgtcaccacatctccttgccttcatttcgagctctctgaagggaaaggaatttgcacttaacctgtggtcaggttggaagagaagccctgggcttttcctgtccctaggtgctgcccacttaattcccctttcttcctgagaactcaagttgctacctaccttggttctttcaacagctctggtttgggtgaacccagctcttgaccttccttggccccttgactgtcctcttacctcctctcgttttagattcttattttactccagcccctctgaaccactgtgactgatgaaggccaatcttgttccctttcatctactcctgtgtcattctcttcccttcccttccctagacccttcccttccctggccaacacgtaattgtagtgtcagagctggtaaatgagtggccatgctacccagatacattctggcttacttgagacatcagattccctagaatccttggttcaggaagatgcttgggaatggggtgcagcctgagtcttttttcctgcaagccccaggggacagtatctaataaatactctgagcgcaaaaaaaaaa

SEQ ID NO: 1067 - DNA, 1366 bp, Cricetulus griseus
cgggggatggatcatctgcagggcctcggttaaaagtgagaaaagccggtcctcccttctccatttggattacaagctcaaagggactgcttataacctggaggaatgatctccgtgctcccggggggagcactgcccacagtacgtgcatagagaggctttgagaggaattaagatctcaggcccatggcgacttgccctgtcctgcagaaggagacgctattccagacaggagactatgcttacagaatccctgctctgatctacctgtcaaagcagaagaccctgctggcctttgcggaaaagcgtctgaccaagacggatgagcatgcagatttgtttgtcctacgaagaggaagctacaatgcagacacccatcaggtccagtggcaagctgaggaggtggtgacccaagcctacctggagggccaccgctccatgagcccatgtcctttgtatgacaagcagacaaggacccttttccttttcttcatcgctgtccgtgggcaaatatcagaacaccaccagctccagactggggttaatgtcacacggctatgccacatcaccagtactgaccatgggaagacctggagcgctgtccaggaccttacagataccaccattggcagcacccatcaggattgggccacatttggcgtgggtcctgggcactgtctgcagctgcgaaacacagctgggagcctgctggtccctgcttatgcctatcggaaacaaccccctatccatgcacctgccccctctgccttctgcttcctcagccatgaccatgggagcacatgggagctgggccactttgtgtcccagaactcgctggagtgccaggtggctgaggttggcactggcgctgagagggtggtctatctcaatgctaggagctgcctgggagccagggtccaggcacaaagtcctaacagtggcctggatttccaggacaaccaggtagtgagtaaacttgtagagcctcccaaaggctgccatggaagtgtgattgctttccccaaccccacctcaaaggcagatgccttagatgtgtggctgctctatacccaccctacagactcccggaagaggaccaacctgggtgtgtacctcaatcagaagccactggaccccaccacctggtcagctcccaccctgttggcaacaggcatctgtgcctactcggacttgcagaacatggggcacggccctgatggctccccgcaatttgggtgtctgtatgagtcaaataactatgaagagattgttttcctcatgttcaccctgaagcaagctttcccagcagtgtttggtgcccagtgatcttgctgcatgcggcccaaagtgcttcaaaacccccccg

SEQ ID NO: 1068 - DNA, 3816 bp, Cricetulus griseus
  misc_feature (2059)..(2103): n is a, c, g, or t
  misc_feature (3658)..(3673): n is a, c, g, or t
ctcctgcgaagcctggcgggcgccgccgccatggacgagctgcctttcggtgaggcggctgtggaacaggcgctggacgagctgggcgaactggacgccgcactgctgaccgacatccaagacatgcttcagctcatcaacaaccaagacagtgacttccctggcctgtttgattccccctatgcagggggcggggcaggagacacagagcccaccagccctggtgccaactctcctgagagcttgtcttctcctgcttccctgggttcctctctggaagccttcctgggggaacccaaggcaacacctgcatccttgtcccctgtgccgtctgcatccactgctttaaagatgtacccgtctgtgccccccttctcccctgggcctggaatcaaagaagagccagtgccactcaccatcctgcagcccccagcagcacagccatcaccagggaccctcctgcctccgagtttccctccaccacccctgcagctcagcccggctcctgtgctggggtattctagccttccttcaggcttctcagggacccttcctggaaatacccaacagccaccatctagcctgtcactggcctctgcaccaggagtctcgcccatctctttacacacccaggtccagagctcagcctcccagcagccactgccagcctcaacagcccctagaacaaccactgtgacctcacagatccagcgggtcccagtcgtactgcagccacatttcatcaaggcagattcactgctactgacaactgtaaaaacagatacaggagccacgatgaagacggctggcatcagtaccttagcccctggcacagccgtgcaggcaggccccttgcagaccctggtgagtggtgggaccatcctggccacagtaccattggttgtggatacagacaaactgcccatccatcgactggcagctggcagcaaggccctgggctcagctcagagccgtggtgagaagcgcacagcccacaatgccattgagaagcgctaccgttcctctatcaatgacaagattgtggagctcaaagacctggtggtgggcactgaggcaaagctgaataaatctgccgtcttgcgcaaggccatcgactatatccgcttcttacagcacagcaaccagaagctcaagcaggagaacctggccctgcgaaatgccgctcacaaaagcaaatccctgaaggacctggtgtcggcctgtggcagtgcaggaggcacagatgtggctatggagggtgtgaagcctgaggtggtggatacgctgacccctccaccctcagacgctggctcgccctcccagagtagccccttgtccctcggcagcagaggtagcagcagtggtggcagtgactcggagcctgacagcccagtctttgaggatagccaggtgaaagcccaacggctgcacagtcatggcatgctggaccgctcccgcctagccctgtgtgcgctggtcttcctgtgtctgacctgcaaccccttggcatcactgtttggctggggcatccccggtccctccagtgcctctggtgcacaccacagctctgggcgtagcatgctggaggccgagagcagagatggctctaattggacccagtggttgctgccacccctagtctggctggccaatggactactagtgttggcctgcctggctcttctctttgtctatggggaacctgtgacccggccacacactagcccagctgtacacttctggagacatcgcaaacaggctgacctggacttggctcggggagattttgcccaggctgctcagcagctgtggctggccctgcaggcattgggacggcccctgcccacctcgaacctagacttggcctgcagcctgctttggaacctcatccgccacctgctgcagcgtctctgggttggccgctggctggcaggccgggctgggggcttgcggagagactgtggactgagaatggatgcacgtgccagtgctcgagatgcggctctcgtctaccataagctgcaccagctgcatgccatgggcaaatacacaggagggnnnnnnnnnnnnnnnnnnnnnnnnnnnnnnnnnnnnnnnnnnnnngagtgcgcaggagatgctgtatccatggcaacgctggcagagatctatgtggctgctgccctgagggtcaagaccagtctcccaagagccttgcactttttgacacgtttcttcctgagtagtgcccgccaggcctgcctggcacagagtggctcagtgcctcttgccatgcagtggctctgccaccctgtaggccaccgtttcttcgtggatggggactgggctgtgcatggtgccccacaggagagcctgtacagcgtggctgggaacccagtggatcccctcgcccaggtgactcgactattctgcgaacatctcttggagagagcactgaactgtattgctcaacccagcccggggacagctgatggagacagggagttctctgacgcacttggatacctgcagttgctaaatcgctgctctgatgctgtcgggactcctgcctgcagcttctctgtcagctccagcatggcttccaccaccggcacagacccagtggccaagtggtgggcctcactgacggctgtggtgatccactggctgcggcgggatgaagaggcagctgagcgcctatacccgctggtagagcgtatgccccacgtgctgcaggagactgagagacccctgcccaaggcagctctgtactccttcaaggctgcccgggctctgctggaccacagaaaagtggagtctggcccagccagcctggccatctgtgagaaggccagcgggtacttgcgggacagcttagccgctccaccaactggcagctccattgacaaggccatgcagctgctcctgtgtgatctacttcttgtggcccgcactagtatgtggcagcgccagcagtcaccagcctcagcccaggtagctcacagtgccagcaatggatctcaggcctccgctttggagcttcgaggtttccaacaggacctgagcagcctgaggcgcttggcacagaacttccggcctgctatgaggagagtgttcctacacgaggccacagctcggctgatggcaggggcaagtcctgcccggacacaccagctcctggaccgaagtctgcggaggcgggccggctccagtggcaaaggaggcactgtagctgagctggagcctcgacccacatggcgggagcacacagaggccttgctgctggcctcctgctatctgccacctgccttcctgtcggcccctggacagcaaatgagcatgttggctgaggcagcacgcactgtagagaagcttggtgatcatcggctactgcttgactgccagcagatgcttctgcgcctgggcggtgggaccactgtcacttccagctaaaccttggatggtctccccagtattagaggcccttaaggacctttgtcactggctgtggtcgtccagagagggtgagcctgacaagcaatcaggatcatgccgacctctagtgacaaatctagaaattgcagaggctgcactggcccaatgccaccctcttgctctgtaggcacctttttcctgtcctatggaaaggaacctttcccctagctgagggccaccctgnnnnnnnnnnnnnnnncactcctggaagacttgtatatagtgtagatccagctgagccagtttcctgtgcaggctcatgtactactttaacttttgcaaactttattttcataggttgagaaattttgtacagaaaattaaaaagtgaaattatttata

SEQ ID NO: 1069 - DNA, 9603 bp, Cricetulus griseus
  misc_feature (598)..(2723): n is a, c, g, or t
  misc_feature (3301)..(3353): n is a, c, g, or t
  misc_feature (3791)..(3889): n is a, c, g, or t
  misc_feature (4504)..(4612): n is a, c, g, or t
  misc_feature (4665)..(4698): n is a, c, g, or t
  misc_feature (5185)..(5217): n is a, c, g, or t
  misc_feature (5246)..(5293): n is a, c, g, or t
  misc_feature (5314)..(5351): n is a, c, g, or t
  misc_feature (5618)..(5648): n is a, c, g, or t
  misc_feature (5699)..(6078): n is a, c, g, or t
  misc_feature (6145)..(6295): n is a, c, g, or t
  misc_feature (7036)..(7101): n is a, c, g, or t
  misc_feature (7322)..(7444): n is a, c, g, or t
  misc_feature (7935)..(8343): n is a, c, g, or t
  misc_feature (8803)..(8825): n is a, c, g, or t
  misc_feature (8919)..(8944): n is a, c, g, or t
  misc_feature (9236)..(9277): n is a, c, g, or t
gtcgactcgatctactttaaactgatggattctgcgagagagacattggttgtcttcagccacatataccaatggtgaacctaccagactccagtggatagttacaaatctacagccacacagaagctcctggttaaaattagttggttgtagtagatcagtacttatccctagcataggaatggacttttcaagccccattccacatagaggggatactccctgagcctagctagacacacagggttgggcctaggcctatcgaaaggatatgacagactctgaagaccccctatgtaaggccttcacccttcccttggggagccagaaaggatatgggatagtgaaagacccccacccctgggctgtagcctttctactctggtcggcagctggcggggcgcgcgaatacatctttccctccttagcacttccctccttagcaccttttgatctctgcagctgctggctctcactccccgccccacgcaaggccaacccccgccggatcgctcggtcccaaggccagccatctggaccggcaggagataaggccatttcgcctggctattaaaccttgagaaaatgctgatttgannnnnnnnnnnnnnnnnnnnnnnnnnnnnnnnnnnnnnnnnnnnnnnnnnnnnnnnnnnnnnnnnnnnnnnnnnnnnnnnnnnnnnnnnnnnnnnnnnnnnnnnnnnnnnnnnnnnnnnnnnnnnnnnnnnnnnnnnnnnnnnnnnnnnnnnnnnnnnnnnnnnnnnnnnnnnnnnnnnnnnnnnnnnnnnnnnnnnnnnnnnnnnnnnnnnnnnnnnnnnnnnnnnnnnnnnnnnnnnnnnnnnnnnnnnnnnnnnnnnnnnnnnnnnnnnnnnnnnnnnnnnnnnnnnnnnnnnnnnnnnnnnnnnnnnnnnnnnnnnnnnnnnnnnnnnnnnnnnnnnnnnnnnnnnnnnnnnnnnnnnnnnnnnnnnnnnnnnnnnnnnnnnnnnnnnnnnnnnnnnnnnnnnnnnnnnnnnnnnnnnnnnnnnnnnnnnnnnnnnnnnnnnnnnnnnnnnnnnnnnnnnnnnnnnnnnnnnnnnnnnnnnnnnnnnnnnnnnnnnnnnnnnnnnnnnnnnnnnnnnnnnnnnnnnnnnnnnnnnnnnnnnnnnnnnnnnnnnnnnnnnnnnnnnnnnnnnnnnnnnnnnnnnnnnnnnnnnnnnnnnnnnnnnnnnnnnnnnnnnnnnnnnnnnnnnnnnnnnnnnnnnnnnnnnnnnnnnnnnnnnnnnnnnnnnnnnnnnnnnnnnnnnnnnnnnnnnnnnnnnnnnnnnnnnnnnnnnnnnnnnnnnnnnnnnnnnnnnnnnnnnnnnnnnnnnnnnnnnnnnnnnnnnnnnnnnnnnnnnnnnnnnnnnnnnnnnnnnnnnnnnnnnnnnnnnnnnnnnnnnnnnnnnnnnnnnnnnnnnnnnnnnnnnnnnnnnnnnnnnnnnnnnnnnnnnnnnnnnnnnnnnnnnnnnnnnnnnnnnnnnnnnnnnnnnnnnnnnnnnnnnnnnnnnnnnnnnnnnnnnnnnnnnnnnnnnnnnnnnnnnnnnnnnnnnnnnnnnnnnnnnnnnnnnnnnnnnnnnnnnnnnnnnnnnnnnnnnnnnnnnnnnnnnnnnnnnnnnnnnnnnnnnnnnnnnnnnnnnnnnnnnnnnnnnnnnnnnnnnnnnnnnnnnnnnnnnnnnnnnnnnnnnnnnnnnnnnnnnnnnnnnnnnnnnnnnnnnnnnnnnnnnnnnnnnnnnnnnnnnnnnnnnnnnnnnnnnnnnnnnnnnnnnnnnnnnnnnnnnnnnnnnnnnnnnnnnnnnnnnnnnnnnnnnnnnnnnnnnnnnnnnnnnnnnnnnnnnnnnnnnnnnnnnnnnnnnnnnnnnnnnnnnnnnnnnnnnnnnnnnnnnnnnnnnnnnnnnnnnnnnnnnnnnnnnnnnnnnnnnnnnnnnnnnnnnnnnnnnnnnnnnnnnnnnnnnnnnnnnnnnnnnnnnnnnnnnnnnnnnnnnnnnnnnnnnnnnnnnnnnnnnnnnnnnnnnnnnnnnnnnnnnnnnnnnnnnnnnnnnnnnnnnnnnnnnnnnnnnnnnnnnnnnnnnnnnnnnnnnnnnnnnnnnnnnnnnnnnnnnnnnnnnnnnnnnnnnnnnnnnnnnnnnnnnnnnnnnnnnnnnnnnnnnnnnnnnnnnnnnnnnnnnnnnnnnnnnnnnnnnnnnnnnnnnnnnnnnnnnnnnnnnnnnnnnnnnnnnnnnnnnnnnnnnnnnnnnnnnnnnnnnnnnnnnnnnnnnnnnnnnnnnnnnnnnnnnnnnnnnnnnnnnnnnnnnnnnnnnnnnnnnnnnnnnnnnnnnnnnnnnnnnnnnnnnnnnnnnnnnnnnnnnnnnnnnnnnnnnnnnnnnnnnnnnnnnnnnnnnnnnnnnnnnnnnnnnnnnnnnnnnnnnnnnnnnnnnnnnnnnnnnnnnnnnnnnnnnnnnnnnnnnnnnnnnnnnnnnnnnnnnnnnnnnnnnnnnnnnnnnnnnnnnnnnnnnnnnnnnnnnnnnnnnnnnnnnnnnnnnnnnnnnnnnnnnnnnnnnnnnnnnnnnnnnnnnnnnnnnnnnnnnnnnnnnnnnnnnnnnnnnnnnnnnnnnnnnnnnnnnnnnnnnnnnnnnnnnnnnnnnnnnnnnnnnnnnnnnnnnnnnnnnnnnnnnnnnnnnnnnnnnnnnnnnnnnnnnnnnnnnnnnnnnnnnnnnnnnnnnnnnnnnctattggccacagtagtgacaggtcagagacagaataggcagagggatggcagaagggggccccacctggacagggatcaatgcgcttactgcaaagaaaaaggacattgggcaaaagaatgccctaagaacccccgggccaagcctccacggccaagaacctctgaccttctaaacctagaagattagagaagtcagggccaggagcccccccctgagcccaggataacactgcaagtcggggggcatccggtcaccttcctagtagatacaggggcacaacattccgttctgaatcggtcacccggacccctgagtcaccggactgcatgggtacagggagctacaggcggaaagcagtaccattggactacaaatcggcagctccagctcgcgactggtaaggttatgcattctttcctccatgtgccagattgcccctaccccttacctaggacgggacctattgaccaaattaagagctcaaatacactttgagaggtcagaagtcaaagtcacagggccagagggaattccccttaccatcttgacaatgtccatagaagatgaatacagannnnnnnnnnnnnnnnnnnnnnnnnnnnnnnnnnnnnnnnnnnnnnnnnnnnntgcggaatttccccaagcctgggctgaaacaggaggaatggccttgccatcaaccaggccccaattatagtaaccttaaaagctgccatccttcctgcatccgtcagacagtatccaatgcctaaagaagcccgagaaggaattcggccacatattaaaagttacttgaacaagggattctggtgccctgtaaatctccttggaatacacctttgttgcccgtcaggaagccaggaaccaatgactataggccagtacaggatctgagggaggtcaataaaaggatagaggacatacaccctactgtccccaacccttataatttgctgagcggattgccacccaactatacctggtatacagtcttagatcttaaagatgccttcttctgcctccgcctgcatcccaccagccaacctatatttgcctttgaatggnnnnnnnnnnnnnnnnnnnnnnnnnnnnnnnnnnnnnnnnnnnnnnnnnnnnnnnnnnnnnnnnnnnnnnnnnnnnnnnnnnnnnnnnnnnnnnnnnnngatctggcaggattccgggtccggtaccccgcgctaatcctcttacagtatgtagatgacatcctcctggcagccaaaaccaaggaagaatgcaaggaaggcactcgagccctcctccagactcttgggagcctaggataccgggcatccgccaagaaggcccagatatgtcagaaacaggtgacctatttaggatacaagataaaggatggacggcgatggctaacggaagcccgtatgcgagccatcttagacattcccaccccacaaaatccccgccaactgagagagttcttgggaacggcaggcttctgccgcctatggatccccgggtttgccgaaatggcggctcccctctaccccctcactcggccaggggttgcttttaaatgggaagagccccaaaagaaagccttcaccaacatcaaaaaggctctccttgaatcaccagccctgggtctaccggacttagctaagccatttgaactctttatagatgagaaaggaggctatgccaagggagtcctcacccaaaaactggggccttggagaaggcccactgcatacctctccaagaaattggatcctgtagcatcgggatggccaccctgtctnnnnnnnnnnnnnnnnnnnnnnnnnnnnnnnnnnnnnnnnnnnnnnnnnnnnnnnnnnnnnnnnnnnnnnnnnnnnnnnnnnnnnnnnnnnnnnnnnnnnnnnnnnnnnctccagacagatggctcactaatgcccgaatgactcattaccagactatgctnnnnnnnnnnnnnnnnnnnnnnnnnnnnnnnnnngtgactctgaatccagccaccttgctccctctcccaggggagccagaggctcataattgcttacaggtactggctgaggcccatggggcgagacccgacctgactgaccagcctctacccagcccggaccacatctggttcacggatggaagcagctttttgcatcaaggaaaacgaagggcgggcgcagcagtcaccacagagaatcaggttgtctgggctcaggcactccctcccggaacctctgcgcagagggcagaactcattgcactcacgcaggctctaaaattggcagaaggtaagaggctcaccgtgtacacagacagtcgttatgcctttgccactgcccatatacatggagaaatttacagacggagggggctgcttacctccgaagggaaagacattaagaataaggaggaaatcctcgctctcctaagagctcttcatctgccctccgccttaagtatcatacattgccccggannnnnnnnnnnnnnnnnnnnnnnnnnnnnnnnnaatcggagggcagacttggctgcccgagnnnnnnnnnnnnnnnnnnnnnnnnnnnnnnnnnnnnnnnnnnnnnnnnccaacgaccgtccctcccccnnnnnnnnnnnnnnnnnnnnnnnnnnnnnnnnnnnnnngaaattgggagccacaaaggaaccaaacggggattggacttatgaaggaaagactgtcatccctaccgggtaaccaagtacctagtgacatttttacataagatgacacatctgagctccaagaagatgcgggagctcctcgaacgagaagagaattcaatttcctttttggggaagaatgacattctaaaacaggtaactgaacaatgtgatgcgtgcgcccgagtcaacgcatccagactgaagcttcctcctgggaaccgggtnnnnnnnnnnnnnnnnnnnnnnnnnnnnnnnatagatttcactgagattaaaccaggtaaatatggatacaagtatctattnnnnnnnnnnnnnnnnnnnnnnnnnnnnnnnnnnnnnnnnnnnnnnnnnnnnnnnnnnnnnnnnnnnnnnnnnnnnnnnnnnnnnnnnnnnnnnnnnnnnnnnnnnnnnnnnnnnnnnnnnnnnnnnnnnnnnnnnnnnnnnnnnnnnnnnnnnnnnnnnnnnnnnnnnnnnnnnnnnnnnnnnnnnnnnnnnnnnnnnnnnnnnnnnnnnnnnnnnnnnnnnnnnnnnnnnnnnnnnnnnnnnnnnnnnnnnnnnnnnnnnnnnnnnnnnnnnnnnnnnnnnnnnnnnnnnnnnnnnnnnnnnnnnnnnnnnnnnnnnnnnnnnnnnnnnnnnnnnnnnnnnnnnnnnnnnnnnnnnnnnnnnnnnnnnnnnnnnnnnncctgcatggagtacctactcctatcattaactttcttgatcaagatgtctcagattttgctaactcnnnnnnnnnnnnnnnnnnnnnnnnnnnnnnnnnnnnnnnnnnnnnnnnnnnnnnnnnnnnnnnnnnnnnnnnnnnnnnnnnnnnnnnnnnnnnnnnnnnnnnnnnnnnnnnnnnnnnnnnnnnnnnnnnnnnnnnnnnnnnnnnnnnnnnnaggccaagaaccttgaaccccactggaagggaccctacatcgttttgcttaccactcccaccgcactcaaagtaagacggcattgccgcttggatacatgcttcacatgtaaagccagcccgacccaccgattcagccactacatcagaatggaccgcacaccgcactcaaaatcctttaaagataagactctctcggtacaccctcctgttgattggttgtctgtttaccccccatgtagcaactaacccccacagggtttataatatcacctggaaaatagccaatctagggaccggggaaatagccaacctcagcacttatatagggactctacatgatgggttccctcctctctatgtcgacctatgtgacttagtagggtctgattgggatccctctgaccaggaaccattcccagggtacggatgccaccaccctgggggaaggatagggacaagaagcaaggatttttatgtttgtctggccatagaccaactcatgactgcggggggccacaggaagggtactgtgcaagctggggatgtgaaaccacaggggaggcttactggaaaccctcttcctcttgggatttcatcactctcaaacggagggagatcccagggtacgcagggaaaggaccatggagatgtgggcaaagagcctgcgaccctgttatgatagtgggaggttttcaaggcgccacccccgaggaaaatgcaaccgctctcatcctaaggnnnnnnnnnnnnnnnnnnnnnnnnnnnnnnnnnnnnnnnnnnnnnnnnnnnnnnnnnnnnnnnnnngcagggaaagatccggtgaccttattctccctgtacagacaaattactcccctaagccaacaatcagtcgggccaaacacagtaatagcggaccagagggccccaacccaattccaagtcctgaccccctaccgttcctaaagctatcactcctaccccagatgctgtcatcttctcccccaccccagatgccctaaacatcgagttaaccagagaccctnnnnnnnnnnnnnnnnnnnnnnnnnnnnnnnnnnnnnnnnnnnnnnnnnnnnnnnnnnnnnnnnnnnnnnnnnnnnnnnnnnnnnnnnnnnnnnnnnnnnnnnnnnnnnnnnnnnnnnnnnnnatcaagaattatgtaaccaagtagagccattatctcaggacagccgataccttgttgccccttatggaacttattgggcttgcagtactgggttgactccctgtgtctctaccactgttctcaacaccaccattgatttttgtatattgatagaactttggcccaaagtcacataccaccaacctgaatatgtttacagcgtactagggaaatcaacccgatataagagggagccaatatcccttaccgtggccctattattaggaggaataacagtggggggcatagcagccggcatagggaccggaaccgttgccctacagggaattaatcattttaagcttctacaacaagccatgcacacggacatccaggtactggaagagtcagtcagtgcactcgaaaaatccttaacatcactctctgaggtggtcctgcagaacagacgaggattagatttattatttttacaggaaggggggctatgtgcnnnnnnnnnnnnnnnnnnnnnnnnnnnnnnnnnnnnnnnnnnnnnnnnnnnnnnnnnnnnnnnnnnnnnnnnnnnnnnnnnnnnnnnnnnnnnnnnnnnnnnnnnnnnnnnnnnnnnnnnnnnnnnnnnnnnnnnnnnnnnnnnnnnnnnnnnnnnnnnnnnnnnnnnnnnnnnnnnnnnnnnnnnnnnnnnnnnnnnnnnnnnnnnnnnnnnnnnnnnnnnnnnnnnnnnnnnnnnnnnnnnnnnnnnnnnnnnnnnnnnnnnnnnnnnnnnnnnnnnnnnnnnnnnnnnnnnnnnnnnnnnnnnnnnnnnnnnnnnnnnnnnnnnnnnnnnnnnnnnnnnnnnnnnnnnnnnnnnnnnnnnnnnnnnnnnnnnnnnnnnnnnnnnnnnnnnnnnnnnnnnnnnnnnnttctactctggtcggcagctggcggggcgcgcgaatacatctttccctccttagcacttccctccttagcaccttttgatctctgcagctgctggctctcactccccgccccacgcaaggccaacccccgccggatcgctcggtcccaaggccagccatctggaccggcaggagataaggccatttcgcctggctattaaaccttgagaaaatgctgatttgatgcttttcgcttctgtactatgcctgttttcccttataaaaggaccctccttccggggctcggggcttggcaaaacagaagctaagccccggatatccgtgttattaataaatcctcttgttcttacatccaaagttcgtgtttcgctgattcctgggtgtgggtcttcttccacgaaagaacctctccgggggtctttcaataggtagggtgttagttggagaggggcaggggaannnnnnnnnnnnnnnnnnnnnnnatgtaaacaatgctgtttctaattcaaattaaaagttgagaaaattaattggtcacacacacagagaaagttctattgtggggagtttctaagnnnnnnnnnnnnnnnnnnnnnnnnnnacatccaagttttgtgggacactcaacctcttgagcagtctgggtctagggacttgcttgtaacttatgaagtacataacacaagtgtatcacttgtaatttctgaaataagattacagaagctgaagaattagatggtgtgtgcttctttacaaagaattcctgacaaataatgccattaagtgacagctaatgatgaattgtggacttagtcagatgatcataccgacagaaactacatgaagagagtacatgcctgagccaaggtgaactctagcatcacctataagannnnnnnnnnnnnnnnnnnnnnnnnnnnnnnnnnnnnnnnnncatcacctatagaactactatgagctgcagttgacattcttcagtccatcctgatatggtctctgttactgataactccaggtctttggtaatgactgtgaaccagaaaactcagaagtagcacccagatttccagcccagacaaaacataacatattaagtcactgaggtttgggaaagatttttagacatccatgggtagcttatatagttccttttaatcagttgttgaaagtagtctcaatattcatatagtagtcgtttcattgtgtgaccaaatttatagacaatgttctcacctttgttattttcgttgttgtttctgg

SEQ ID NO: 1070 - DNA, 3612 bp, Cricetulus griseus
  misc_feature (1348)..(1366): n is a, c, g, or t
  misc_feature (2862)..(2914): n is a, c, g, or t
  misc_feature (2978)..(3010): n is a, c, g, or t
  misc_feature (3129)..(3166): n is a, c, g, or t
  misc_feature (3521)..(3548): n is a, c, g, or t
ctctaggagtatgctacatttaaaaggaatggacaaaataccttgctattgtcaactcaaaatgccatgctattgtcaccaattctctgtggtggactcctctctgaggaatgaaaaacatttgccacctaagagatcaatgtttcagtgaactgctactgcagaacagatgtccaaaggcaagtgacttggaggcagaaacctgattgtagacccacaggctcaacggaggtgtggttaacctctcctgcctggttagctcttttcaaagcctcagtttgtctctgtgttttgagagcttggcacaatgctgtgatcaaacaccaagttaaagtccctgtttcaatccaatacccaaaagcacaaacagctccctcactggcgaaatgcagccgtgggttgcccagcaacaaactgctatagtggaggcagaaggtgggtgggctgttgaggggaaagtacctggatcgagaacaagaaaaaaaaaaaatgggaagggcttttcgagtgtctgagctttcgaatttacaaaaatcccttcaaattgtggctgcgtttctggaagcagtgtgtttaccttggcttcctgctgtttggcaacagttttcctgcaaagagcagttgtggttccacactctcttccctcctgaccaaaggctttcggtgccatattttcagccccggggcatcccagattaagtttaggctgctagccctttaagcccgacctgcgaggggacgacgtggaaccacagaacaagctgtgtcagtcagccacgtggtacaaggaagccttcatgttggaactgggcaaagcgtatttactctttgagctgtacaatatgatgttccgagagtgtccacttatcttttcttcggttgagtttccaaaactctaatgatgccgctcctctccaacaaaagtttagtttaaaaataacaccactcgtccggctctggtgcccgttttaaaaatggtgcctcggtcttcagcagcgatagttcttttgcaattaagatccgggcggaaacaatgggtaggtgcagcggggcagagccgaggttgcttcacagaacctcttgcaggtcaggagggagggtcaggtcatagttgggttttgttcctgctggcgcggaatactcttgcgtgtaggaagcggctctaccgactgccgaggcctctgggattgtgccgggttgctagttagctcagttggcggcggagcggcggcccctggcgggtcaccatgtgggccttcccggagttgccgctgccgctgctggtgaatttgttcggctcgctgctgggatttgtggctactgtgaccctcatccctgccttccgtannnnnnnnnnnnnnnnnnncctctgtggccaggacctcaacaagctcagccggcagcagatgtgagtaacggcacatgagtgcgctggggtagggtgccaggttgtacagggtgcaggggcgaggactgaggtgcttggctttgcgctggcgggagagagctaacctaggcaacccagaactcttggtggtgatagaattgtctatcctggggaggacgaaatgggagctttgggtgtcaggactaatagcggtagtatcctcttccctgtgcacagtctccctactccctcacaaacaaaacaaaatcctgggaagaaagtcactttgggttattgtaaccccatacaatagtgagtaaccacgcccctttcctcttcctcctccaccccttgctgctgggccgcagcccagaatcccagggagtgatctgcggtgctgttttccttatcatcctcttctgcttcatccctttccccttcctgaactgctttgtggaggagcagtgtaaggcattcccccaccatgaagtaagtgcattagtgggaacggttggctggggtcggggacttgcttgagttggggttatttggattgggcagagggtgcttgtgggcccaactctagagacaggagtacttggattggtgatatataactcagtgatagagcctccctagtatgcccaaagccacgggttcaatcctcaactccaaaataaaaagatgggaaaagggaaacataggaggcaggaattcttgaaaggcagactagtaagtaggcttgagacgtaacttgcctgagccttccccagtttgtggccctgataggtgccctccttgccatctgctgcatgatcttcctgggcttcgctgatgatgtactcaatctgcgctggcgccataagctgctgctgcccacagctgcctctctacctctcctcatggtttacttcactaactttggcaatacaaccattgtggtacccaagcccttccgctggattcttggcctgcatttggacttgggtgagtattcctatcactattgcccctgtggcacccacttgtacccttccctctgagatcccagtaaaacactcttcctggtggtccacattctccatcaagtattccctttctgtctctggatcaacccagatttctctttttccttccctctttctttcctatcttttctttccttcctgtatcaaggaattgaagctaagacctcatgcttgctagacaagcactctgagctataccaaagcctttcctttctattttttccattttctaaaaatttcaaaacaggagggcaggagagattgctcagtcaagaacactcacttctcttccaaagatcctgagttcaattcccagtacccacatgatagctcacaactgtctgatgccttcttctggtgtgcagatgtacatgcaaagtaccaatatacataaaatacataaataatcatttttaagaaattcaaaggctgggcagtggtgtcaannnnnnnnnnnnnnnnnnnnnnnnnnnnnnnnnnnnnnnnnnnnnnnnnnnnntgagaccagcctggtctacaagagctagttccaggacagcctccaaagccacagagaaaaaccnnnnnnnnnnnnnnnnnnnnnnnnnnnnnnnnnttcaaagctgggtatggtgtcgcacacctttagtctcagcattagggaggcaaaggcaggcgcatctcagtacaaggccaccctgatctacagagggagttccaggacagctggagatnnnnnnnnnnnnnnnnnnnnnnnnnnnnnnnnnnnnnnattttcaaaacagggtcacacactaagttgccttgaactttcttagcccaggcaggccttaaactggtaaccctcttatcccagcctttcaagtagttggaattatagacctgtgctactaggtcttgcctattcagatcctttcattcctcctgtgctcttttctcaaaaaaagatgcaaacctccttccctaggtagcactatctgattctgtttccccaggaatcctatactatgtctacatgggactgcttgcggtgttctgtaccaatgccatcaacatcctagcaggaattaatggcctagaggctggtcagtcactagtcatctctgcttctatcattgtcttcaacnnnnnnnnnnnnnnnnnnnnnnnnnnnnagagataggaagaaacagacacctgtgtgttaagaggattgcttggtgtggatttagagaattc

SEQ ID NO: 1071 - DNA, 3806 bp, Mesocricetus auratus
  misc_feature (303)..(320): n is a, c, g, or t
  misc_feature (330)..(349): n is a, c, g, or t
  misc_feature (1543)..(1679): n is a, c, g, or t
  misc_feature (2570)..(2588): n is a, c, g, or t
gatcctggaagtgagggagccggctgcgtgctctccgagcccctgcttcccttcagcatccaggtccctccccgtggataagatgagcaagccccaagacaagcgttccctccacaccaaactcctgacacactgacatcacacctccccgacaccccccttactcatcaaacacccccaaaacaccctgtgcagcacattagcaacagccaagtccggaacctggaagtgcgcgcaggtggccagattgatccttcctgtggtcctggagaacaggattcccagaacctggtttttggtttnnnnnnnnnnnnnnnnnngttttgttannnnnnnnnnnnnnnnnnnnatgttccttttgtttaggttaggggggattgttttgttttgtgtgcctgaggtattgcttctgtagcgacagatttcactgatctaaaggagaaagccttcaagatccacagaaagttccaactactgatttctgtaaccactaactgaatgcctactgtgcacctgacgctgttagcaagaaagtcagggcagatgggtgaaaaaattacgcctttcggataactgtgcagtggatgccctcgcaggactcctggagaggaggtgggggaaggggcaggttcgcggaatccgagggtgtccaccttctcatagaaacccaagtccatctgccctttcaaacacccccatccacggtgccaccaaagtgattcaccgcagagaaagcagtttgcccgcggtgccctccccagagttcctaactgcgcggtggggggggacctccggcgcccactcgcaccctccacccccgggggccgcgtgctgtgctgggggagcccctccgccaggcgtcggcgcgggctggcgtagggcctgcgtcagctgcagcccgccggcgattggggcgcgcgcgcctcttcggtttggggctaattataaagtggctgtggcgctgccaacctccggacagcgaggcaggcgctcagagccccgcagcccaacgacaccgaggaccgcgacggtgagttcgcgatctgccccgcaccttgcccagctctccgctgccgcttcacacttaccttgtttttctctctcttgcagagtggcatctaggacccgctcctccagcagcctgctccatctgaacggcggcaacgtgagtgactttgccccccaagactcctaaggcgtggtgaccatcacctgttccctaattgcatcgtcccccactttctcggggctcctctttgccatggggaccaggtcctatatcccaagtgcccgctccccagcagcgatctccaatgcttgctgcagaatctcgccccaggcaaccgacgccagagaagacagtacaccctaggaagaataggatggatgccaccgggtagccaggatgctccggggaagataggtggccccaggaaacaggaagcccccccggaaagacagaatggccctaggaagacagtatgtccccggggaagcctcaggacaactggagccactcctgaccaagtcatccctgagtaannnnnnnnnnnnnnnnnnnnnnnnnnnnnnnnnnnnnnnnnnnnnnnnnnnnnnnnnnnnnnnnnnnnnnnnnnnnnnnnnnnnnnnnnnnnnnnnnnnnnnnnnnnnnnnnnnnnnnnnnnnnnnnnnnnnnnnnnctcctacagcccatggcgcggttcctgagactttgcacctggctgctagtgcttgggtcctgcctcctggctacagtgcaggcagaatgcagccaggactgcgccaagtgcagctaccacttggtgagcccaggcgacatcaacttcctggtgagtagaattcttggtgaggggttgtccttgcgcactcacgaggcagccctgcaaacatcaagtggtcactcgcgctcaaagtgcttgcacgagcctttggtgacctgggtgacccttccaaaacgttgatccctatccgctctgtctcccaattttggaaccagcctatctgggatcagcttggatccctttgaaaccctgggctggtgcagcatacccagcaagctctccagcaagactttcgtacccattcgcttcctttttccaagctcccttgttccgtgcaagagaaagctgtgataagagactagaaatggccttttctctgtgacagtgtgtatactaaagcagataactatggtccatcactggctggaagggctcttttagtcatgcatctccttgttcttcccaggcgtgcacactggaatgtgaaggacaaatgccttctcacaaaatctgggagacctgcaaggatctcctgcaggtgtccaagcctgagttcccttgtgatagcatcaacatgttcaaagacagcaacaaacaggatgagagccacttgctggccaagaagtacggagggttcatgaaaaggtatggaggcttcatgaagaagatggatgagctttatcctgtggagcccgaagaagaagcgaatggaggcgagatccttgccaagaagtacggtggcttcatgaagaaggatgcggatgagggcgacaccctggccaactcctnnnnnnnnnnnnnnnnnnncctgggaacaggagacaaccgtgcgagagagggccgccaccaagagagcactgacaatgatgacaacatgagcaagaggtatgggggcttcatgagaggcctcaaaagaagcccccaagtggaagacgaagcaaaagagctgcagaagcgctatgggggcttcatgagaagggtgggccgcccagagtggtggatggactaccagaagagatacggaggcttcctgaagcgctttgcggagtccctgccctccgatgaggaagctgaaagttactccaaagaagttcctgagatagaaaaaagatatgggggattcatgcgattttaaagccctttcccaaaggtgaccccaggcacccaccagcctgctgcatccccagtgagcgactgcctcaccagtggtgtttgttgtcacttcctgcttgtactgttgcccttctggcctggataactacactgcctgaaagctgtgatgtgtggggtctgtgttctcttgagtctcggggctcagtactggcctgttgcagctatcccggtatcatgctgtaagtttctgttacctcatcccctaacttttggcagaaacgtcaataaatgcttacttgtatatagatataataaacccattaccccaactgcacattggtcttgtgagaagtgactatcatttgtctgtgggtgttcacggcaaaggctagactgagagaccgtgccatcacctgctatgacagaataatcactggcttctttcccctgacccaggctaaaaaacattttatttaacaatttgtatgtaaactcttaaatgagcaaatgcaaagaaacaaaattagatgcaatgacaatttggtcctgttttatatgtacagaaagtgaacgccacaatggctaattagttgatctaaatttgctcaagagttgaaacaacagaagtgagattaacaccttttcctcatctcctatccaggattccagcaagagcagaaagaacttcgaactctgtcttgcacacccttcaccatgaccatagtaggaacctccaatagctgatgagtgggtgaatggcatggataaattaactcacttggcaatcagacaatccagaagggtaccgtgttactatgtgaattctcaaaacacttgatgaatatttcacaataacaagctgtttgattcgttattcagatatcaaaaatacaagtttcactttctagttga

SEQ ID NO: 1072 - DNA, 1000 bp, Mesocricetus auratus
cccgcggggatgtcgtacaagccgaacttgaccgcgcacatgcccgccgccgccctcaacgccggaagtgtccactcaccatctactagcatggcgacatcctcccaatatcgccagctgctgagtgactacggaccaccgtcactaggctacacccagggaactggaaatagccaagtgcctcagagtaaatatgcagaactgctggccatcattgaagagttggggaaagagatcagacccacttatgcgggaagcaagagcgccatggaaagactaaaacgaggcatcattcatgcccgaagcctggttcgggagtgcttggctgaaacggaacgtaatgccaggtcctagcccctggccagtctgaaggcccatcttgctaccccttggagatgagaggctttgttcaaaatggcagttttcctgccatggtcattaagctctgaacccacattcaaaagactgagaagacattttgcagttactgatgatgtgcattttaagtagttaggaacaatccaagcattgattttaaagatgtttgtgaagccacttcacagcaagctattgttttcccccaaataccagtgtccccttaatctccctttggatacatttgccatttgcatcaccccagttgacttcctttccaggaggtcacctgcctctgaggacctgagtgcaaaccacagcacgtttgtttagtagctggcccgcctgtgtacaccctgcttcacggagcttctctgcttaagtgtttgcatgactgagtgctttgaagtcaatcttaaaaatgcacaagttacagatacagaagaagagcgatctccaacctaccaagcgccctgcaaatgtccatcctgagactgtagttctcggttccatgtttactgtgagatgatcacaacatctggaagaaaatgactgaaactgttgcatctttgtatttattacttgatgtaataaagcttattttcattaacagtttgtattaaga

SEQ ID NO: 1073 - DNA, 2962 bp, Mesocricetus auratus
cccagcctgtgacaggttccatccatcctccttgcccctgctccctgcgaccctttttaagaggcgactagattcctcggttctatgccgcacaccatggacaagttttggtggcacgcagcttggggactctgcctcttgccgctgagcctggcgcagcagcagatcgatttgaacataacctgccgctatgcaggtgtattccacgtggagaaaaatggccgctacagcatctcacggactgaggcagctgacctctgccaagctttcaacagcactctgcccaccatggaccagatggtgatggccctgagcaagggctttgaaacatgcaggtatgggttcatagaaggccacgtggtgatcccgaggatccagcccaatgccatctgtgcagccaaccacactggggtgtatatcctcacatccaacacctcccactacgatacatattgcttcaatgcctcagcaccccttgaagaagactgtacatctgtcacagacctgcccaattccttcgaaggaccagttaccataactattgtcaaccgtgatggtacccgctacagcaagaagggcgagtatagaacacaccaagaagacattgatgcctcaaataccacagatgatgatgtcagcagcggatcctccagtgagaagagcacctcagggggctatgttttccacacctaccttcccactatacactcaactgcagaccaggatgatccctacttcatcgggagcaccatggccaccactaggagtggtggtaaagacggaagaagaggtggaggcctccccaaagacgcaactacttctctggaaggctacaccactcattacccagaaacaatggaaaatgggactctcaccccagtgactcctgcaaagactggggtctttggagaaactgaagtgactgttgctgaagactccaactttaatgttgatggctccttaccaggagaccaagactcatccatggatcccagggggaattccctcactgtgactgatggatccaaattaactggacactcaagtgggaatcaagacagtggggcaaacacaacttctcgtcctgggaggaaacctcagattccagaatggctcatcgtcttggcatctctcctggcgctggctctgattcttgctgtttgcattgctgtcaacagtaggagaaggtgtggacagaagaaaaagctggtgatcaacagtggcaatggaaaggtggaggacaggaagccaagtgagctcaacggggaggccagcaagtctcaggaaatggtgcatttggtgaacaaggaaccatcagagactcctgaccagtttatgacagctgatgagacccggaatctgcagaatgtggacatgaagattggggtgtagtgcctataccagcaatttggaaagacaccaaaaatcgcagacttgtcaatactgggagctgggacccttaacagatgcaatgtgctactgattatttttattgggggtagtttctgtgtaaaatttctattcctttttcattttgttaatagtccattccaatttataaaaaccagcattgctttctgaaatgagggcccaaagaatattccattaagattttgactcttccagctccttcctagaggtcttgcattcccaagggatgctatggacggcttcgatcaaatgcatattcttggtccctattgaatcttttccctaaactaagtcccaagtaacagtcaccagccagggacttaccccagggcttagaggtattggtctctgggaggaaatttgaatgggtccatattgcctctccacaagtccagtccttgggtattgttttccagttgggtgggagatcaggtgtactggttacacacctttttatagactcccctttctgctggaaaattttcagatgcttctgagagatccccaaagggtgaagctatttatctgtagtaagctatttatctttgtttttgaaatatcaaaccctggaggtcctttgtgcagtatgacttttgacttttttttaggttactttgtcagaagcataacagggtataagttgattcataataaacacctgtcaatcttccatcttaacctgttgttgtgctgtgatccttcagtttctaaaccagcaaggtttgagtcttcatagcacatcaggatgactttagaacggtcctcctaaactggtgccagactacctatgcccaactcaggttcatctggctgaatctcctaaaagatcaaggaaagaagcactgttctgtacctagggctatgaaaggggtttctctcctgttctggagtctggattgtgagcaggagagctttggtcatctttgtgctatggccacccttttctcttccttaaagggaacattacgtttctatgtccttctatttcatagaaactgatcctagtagtggttttcacagaacagcatggtgcgtgcttgtgacaccttacaataaaaggagaagccaacagaaattaaagtgcacaaacaagcagtagattggcataaggagggtgtggtgcacaacccatcccactatttccatggatgtgtttgttgatattttcacaaaccagttggtcctcagagtgaggtgcctgggaatctcccagaaagcctcagggctgcccactactggaatctcatcaccagataagcaggcttatggtttagccaagggagaatggtgttaccctctaacctcatttttttaacgtagtaggtaagtgtttggtggcatttatccatctgccagaatgtcccattgctcctggatcttccctggttacttgtagaagaaattaaatctataaagtaaggctttctgtaagatgagacttccttcctaagtctcccatgatgttactgttgataaatttatatgtttaatattttttcaaataaaaaaacaagagaaaagtttatcacct

SEQ ID NO: 1074 - DNA, 1788 bp, Cricetulus griseus
gccacctgcagggctactgctgctccggccactgcctgagactcaccttgctggaacgtgagcctcggcttctgtcatctctgtggcctctgtcgcttctgtcgctgtcccccttcagtccctgagccccgcgagcccgggccgcacacgcggacatgggcggcagcgccagggcgcgctgggtggcggtggggctgggcgtcgtggggctgctgtgcgctgtgctcggtgtggttatgatcctcgtgatgccctcgctcatcaaacagcaggtactgaagaatgtccgcatagaccccagcagcctgtcctttgcaatgtggaaggagatccctgtacccttctacttgtccgtctacttcttcgaggtggtcaatcccagcgagatcctaaagggtgagaagccagtagtgcgggagcgtggaccctatgtctacagggaattcagacataaggccaacatcaccttcaatgacaatgatactgtgtcctttgtggagcaccgcagcctccatttccagccggacaggtcccacggctctgagagtgactacattatactgcctaacattctggtcttggggggcgcagtaatgatggagagcaagtctgcaggcctgaagctgatgatgaccttggggctggccaccttgggccagcgtgcctttatgaaccgaacagttggtgagatcctgtggggctatgaggatcccttcgtgaattttatcaacaaatacttaccagacatgttccccatcaagggcaagttcggcctgtttgttgagatgaacaactcagactctgggctcttcactgtgttcacgggcgtccagaacttcagcaagatccacctggtggacagatggaatgggctcagcaaggtcaactactggcattcagagcagtgcaacatgatcaatggcacttccgggcagatgtgggcaccattcatgacaccccagtcctcgctggaattcttcagtccggaagcctgcaggtctatgaagctcacctaccatgattcaggggtgtttgaaggcatccccacctatcgcttcacagcccctaaaactttgtttgccaatgggtctgtttacccacccaatgaaggtttctgcccgtgccttgaatccggcattcaaaatgtcagcacttgcaggtttggtgcacccctgtttctgtcacaccctcacttctacaatgcagaccctgtgctatcagaagccgttctgggtctgaaccctgacccaagggagcattctttgttccttgacatccatccggtcactgggatccccatgaactgttctgtgaagttgcagataagcctctacatcaaagctgtcaagggcattgggcaaacagggaagatcgagcccgtggtcctcccattgctgtggtttgagcagagcggtgccatgggcggcgagcccctgaacacgttctacacgcagctggtgctgatgccccaggtacttcagtatgtgcagtatgtgctgctggggctgggcggcctcctgctgctggtgcccgtcatctaccagttgcgcagccaggagaaatgctttttattttggagtggtagtaaaaagggctcgcaggataaggaggccattcaggcctactctgagtctctgatgtcaccagctgccaagggcacggtgctgcaagaagccaagctgtagggtcccaaagacaccacgagcccccccaacctgatagcttggtcagaccagccatccagcccctacaccccgcttcttgaggactctctcagcggacagtcgc

SEQ ID NO: 1075 - DNA, 1914 bp, Cricetulus griseus
  misc_feature (344)..(369): n is a, c, g, or t
  misc_feature (372)..(384): n is a, c, g, or t
gagcccgggcgcagctcaaacatggcggcggctggcacgggccggtgaggcggtaccaggtgggggccgtcgggtgtcatgggcggtggcggcggcaccgcctccgcgtctccctgagccggacctcacgggggactcagcgccaagctgggcgatggacgagagcagcgagctgggcggtctggagaccatggacaccctcacggagctgggcgacgagctgactctgggggacatcgatgaaatgctacagttcgtcagcaatcaagtgggagagttccctgatttgttttcagagcagctatgcagctccttccctggtggtggtagcagtggcagtagtnnnnnnnnnnnnnnnnnnnnnnnnnntgnnnnnnnnnnnnnaggcaatggtggtgcagccacagatcctggagtgcagcggtcgttcagccaggtcccattacctaccttctccccctcaactgcctcccctcaggctctagccttgcaggtcaaagtctctcctaccccacccagggcaacccctgttctccagcctagaccccagccccagccgcagccccagccttcagctcagcttcagcaacagacggtaatgatcaccccgacattcagcactgctccacagacaaggatcatccagcagcctttgatataccagaacgcagcaaccagcttccaagtcctgcaggctcaagtccaaagcctggtgacatcctcgcaggtacagccagtcacgatccagcagcaggtgcaaactgtacaggctcagcgggtgttgacacaaacagccaatggcacgctgcagacccttgccccagcaacagtgcagacagttgctgcaccccaggtgcagcaggtcccggtcctggttcagcctcagatcattaagacagattcccttgttttgaccacactgaaaacagatggcagccctgttatggctgcagtccagaacccagccctcactgccctcaccacccccctccagacgggcgcccttcaagtaccaactctggtgggcagcaatgggaccattctgaccacaatgcctgtgatgatgggacaagagaaagttcctattaagcaagtacctggcggtgtaaagcagctagagccccccaaagaaggagagaggaggacaacacacaacatcattgaaaagcgatatcgatcctctatcaatgacaaaatcatagagttgaaggacttggtcatgggaacagatgccaagatgcacaaatctggcgttctgaggaaggccattgattacatcaaatatttgcagcaggtcaatcacaagcttcgtcaggagaacatggtactgaagctggcaaatcagaaaaacaagctcctgaagggcattgatttaggcagtctggtggacagtgatgtggacttgaagattgaagactttaatcagaatgtccttctgatgtctcccccggcctctgactcggggtcccaagcaggcttctctccctattctattgactctgagccaggaagtcctctgctggatgatgcaaagatgatgaaggttctgcaagtaaaaagcccaaggtagagttatcagaagaagagctgaaggcccattttgccaagggcacactgggcaagctaactgtgcctacactaaaggaggtctgtaaggcctatgggcttaagagtggaccgaagaagcaggaactgctagatgctctcaccagacacttccagaagaactgactgaaggtcacaccccagctacttcccacactgcagccagaccacctacttatgttctcaccaagttagcaggtgtttcttagctacaaagagttgcctgacagaaatgcaaaggacttgcttcatggagactgtagccctcccactttgttgtgccttatatgaataaacagctctaatgtt

SEQ ID NO: 1076 - DNA, 1084 bp, Cricetulus griseus
  misc_feature (182)..(232): n is a, c, g, or t
  misc_feature (519)..(573): n is a, c, g, or t
atggccccccatcttctttggtgcccggcagatgggctgggtaagtatggccaaagcttgatccttgggtcattggtgattgctctgggagagcaggtgaaattgaatcccaggtgagggggaggcctgtggtttgtagcccctttagaagttccatgagggccgggcggtggtggcacatnnnnnnnnnnnnnnnnnnnnnnnnnnnnnnnnnnnnnnnnnnnnnnnnnnntgagaccagcctggtctacaagagctagttccaggatagcttccaaagccaaagagaaaccctgcctcaacccccccccccaccacccccaaaaagaagtttcatgagtcaggtacagtggggttcctggaatcccagctctctggaggttgaggtgggaggatcagttgagcccaggatagggctaggccagcctaggtgacagtgacctgtgtactaacacagcctcagtccaccttccctccatgaagaaggttcagagggccaggttgaagtgggtggggctnnnnnnnnnnnnnnnnnnnnnnnnnnnnnnnnnnnnnnnnnnnnnnnnnnnnnnntgcgtgctgacacatggggacaaaaccactccttataaatgttcttgttcaggttttgtgatacatgcctggcctgtagttccaggagaggcaagaggattgctttaagtctgacagcctggtttacaaagctagttcaaagtcagctaagaccacatagtgtgcacaccacagcagcttgatccctcacactggcctcttgggtcagtacttgacaatgttgtatcttcaggtcagaggccttccagctgctgctttactcttcagcatgcggtgtccccttgggactgtctccatacatggcacaatcaggcagtgtcttacaggcaaggaaactgaggctgaaaacagagagaaggggcagccatcacacctcaggggtacagtagggctaattgagatctccaacctctagacccagcagggacttagcctccccatctcctgtctctgcaggccttggcagaccttctgctcgtcagtggggtagcaacagccacaaccctagcct

SEQ ID NO: 1077 - DNA, 1640 bp, Cricetinae
  misc_feature (885)..(899): n is a, c, g, or t
gaattccatgaccgcttgagttatcctccacactcagtgtcacctacagacataagcacgagtcttccaccaatgtccagcttccaccgtggcagcaccagcagctcaccgtatgttgccgcctcccatactcctcccatcaatggatcagatagcattctaggagccagagggaatgctgctggaagctcacagacgggtgatgcacttggaaaggctttggcatctatttattctcctgaccatacaagcagtagttttccatcaaatccatcaacaccagtgggatctccttcacctctcacaggtaccagtcagtggcccagagcaggaggacaagctccttcatctccaagctatgaaaactcgcttcactccctgaaaaatcgagttgagcagcaacttcacgagcatttgcaagatgcaatgtccttcttaaaggatgtctgtgagcagtctcgaatggaggaccgtttagacagactggatgatgctattcatgtgcttcggaaccatgcagttggaccttctaccagtctgcctactagccatagtgatatacacagtttattgggaccatcccataatgcaccaattggaaacctcaattcaaactatggaggatcaagccttgttacaaacagtcgatcagcttcgatggttggaactcatcgagaagattcagtcaatctcaatggcaatcattcagttctgtctagtactgttgctgcctcaaacacagacctgaaccataaaacaccagaaaattacagaggtggtttgcaaaatcagtctggaaatgttgttccaacagaaatcaagactgaaaacaaagaaaaagatgagaaccttcatgagcctccttcatcagatgacatgaaatcnnnnnnnnnnnnnnnccaaaaagacatcaaggtctcgtctagaggcagaacaagcagtaccaatgaagatgaggatctgaatccggaacagaaaattgaaagggagaaggaaaggcggatggctaacaatgctagagagcgcctgcgtgtgcgggatattaatgaagcattcaaagagcttggccgaatgtgtcagcttcatttgaagagtgaaaaacctcagacaaaactcctcattcttcatcaggccgtggcagtcatccttagtctagaacagcaagtcagagagaggaacctcaaccccaaagcagcctgccttaagagaagagaagaagaaaaggtctctgctgcgtcagcagagccaccaaccacgctgcccggaaccatcctgggcttagcgaaactaccaacctatgggtcatctgtaaacatcagccagttccagtgtcagcagtaggctagatagaagatgacctctcctcataaagacttggacaactcagattatctgaagacacaaaccaacctgacaggaaggagaagaaaaacaaaacacttgaagcaagaaactcaaatataatcctatgatcaaagcaactggtcaacacttccatcagaagtgaggataggaagctcatgagagaacgccggcccatgaggtgtttacagcatatcattctgctgtaagcaatgtgtcgcttctgcataatcagagactgtctcatctctcactcaacgtggaagttgccggaattc

SEQ ID NO: 1078 - DNA, 1836 bp, Mesocricetus auratus
gcgaccccaggtgcttttctccctgaattggtttcccggtgtttgccctcggttgcggggttcggctaactcttcccggaagaagaaggcaggcgcggcggggctctgcagttctgcacccgaattcctggggactttaatgcagtgtagcctcagcagctggtagccggtgcaacgaggcttgcccggccgctgttgctctacagaatgaagacgtcggaggagcgactcgtagtcccggacagcctctcttctgaccaggccccagctccagtgccccaaggttcccctgtggatgaaaatacagactctgaaccggtgccacagccttgcggtggagatgaccgatcccaggtagccgcagattctgtggctggctcggttgtgttccaggagccgcaacaagggcacccacttcctctctccgctccgctggaagtagagtttaatactcccggtgagttgagtcctcgaatcgaggagcaagaactgtctgaaaatgtgagccttcctgtagaagacacgaatcagcctgagttggcgtcaggagaagacgtggaaggtgtgtctgaagagcccggtccagtggatgagggagacgccttttggagctataacttctcgcaggtaccccgatacctcagtggctcctggtccgagttccgcgcccactccgagaacttcttaaaaggttgtaagtgggctcctgatggttcctgtatcttaaccaacagtgctgataacactctgcggatttacaacctgcccccagagctgtacagtgcgacagagcaggtggactatgcagaaatggttcctgtccttcgaatggtggagggagacaccatctatgactactgctggtattctctgatgtcctccagccagccagacacctcctatgtggcaagcagcagtcgggagaacccaattcacatctgggatgcattcactggagaactccgggcttcctttcgcgcttacaaccacctggacgaattgacagcggctcactcactctgcttctccccggatggttcccagctcttctgtggcttcaaccggactgtgcgtgtcttttccacttccaggcctggtagagactgcgaggtgcgagccacgtttgcaaagaagcagggccagagcggtatcatctcctgtatagccttcagtccatcccagcccctctacgcctgcggctcctatggccgtaccctaggcctgtatgcctgggatgatggttctcctctcgccttgctgggaggccaccaagggggcatcacccacctttgctttcaccccgatggcaacctcttcttctcaggagcccggaaggatgccgaacttctgtgctgggatctccggcagcctggccacctcctgtggtctttgagtcgggaagtgaccaccaatcagcgcatctactttgatctggacccgagtgggcagttcctagtgagtggcaacaccaacggaatggtctctgtgtgggacatcagtggcgctttcggtgacagcagcaagctgggacctgtgatgacttttctgccccagaaggactgcaccaatggagtgagccttcaccctagcttgcctctactggctactgcttccggccagcgcatgtttccagagcccaccaacagtggagatgaaggcgagccagagggggatcttcccctgctctccctatgccacgcccatcctgaatggcagcttcagctctggtggtgtggagggggaccagaccccagtagccctaatgacccccaagatgagaagggacaaggaagggcagagggctgtggggatgggttaatataaagattttgtata

SEQ ID NO: 1079 - DNA, 1836 bp, Mesocricetus auratus; identical to SEQ ID NO: 1078

SEQ ID NO: 1080 - DNA, 1414 bp, Cricetulus griseus
ctgcagagtttctggaacagcctttcccttagaactcagggtcaggactagcctgttggtgtgtctgatgtgaaagaagggtcagtaatgactcttgccatgggctcagatcctctctcccatacaggtacccatcacaggtgtttgtgggagataccttctgttattttgctggcatgacctttgccgtggtgggaatcttgggacacttcagcaagaccatgctactcttctttattccacaagtgttcaatttcctctactcgctgcctcagctccttcacgccatcccctgccctcgacaccgcatacccaggtagccgctctggggctccaaagggtcattatagctttttacttgggatagctaaagccagccagtccatctcctatgtaagaggaagtggaggaaaagaaggagtaactgtatgtgggtcgtccgttttagtttatgaagcacatttacttacataaagtgtgatgcttacaacagttcccttcacccagatgtaagcagctgagccagaaacaaatctcagtgctaagtgtcggtcctcttactaaccgcaggttggaagatgattcagtcacatggtaccatcttccctttacagactcaatccgaagacgggcaaactggagatgagctattccaagttcaagaccaagaacctctctttcttgggcacctttattttaaaggtaacaaggtaacaaggaggtaagccccaggccaccatccttcacttgagaaaagggaatccctggtcttttcagacccgaggggagtttggaaacatcaagaagatcccctgtggatgaaatgtgtaactgaagttgtcttcacctctggcccctccaggtagcagagcgcctccagctagtgacagttcaccgaggcgagagtgaggatggtgccttcactgaatgtaacaacatgaccctcatcaacttgctactcaaaatctttgggcccatacatgagagaaacctcacactgctcctgctgcttttgcaggtaacactgagggtggggtaaattatgtaagtgttcttatctcaagttcaccttggttcttattccagtccatttctccttctagatcctgagcagcgctgtcaccttctccattcgataccagcttgtccgactcttctatgatgtctgagttccctgaagactgactgcccatagcctccgttggacctcacccaggaccaacctgtctggtccaagactgccttctggtccaggcctctccaactgttggttttttcagttttgttttcagcttctcccatcacctgtaatgattattggcctggaccttattggactttaaagtccattagttgcactttgcccctggctttcttcagcttgctactcttcccctttctgtcccatctgcag

SEQ ID NO: 1081 - DNA, 973 bp, Cricetulus migratorius
gtttaaatcctgtagtgaatgatcagtctccacagactgcctactcaaaatgaagttgcctgttcttctgttggcactgctgttgttcatgattcctgattccagaggtgatgttgtgatgacccaaagtccaaacgttttgtcggtcagccttggagagcaagtctccatctcttgcaggtctagtcagagcttagtacagagtaatgggaacacttatgtgaattggttccttcagaggccaggccagtctccaaagcgtctaatctataagacttccaaccgaaattctggggtaccagacacattcagtggcagtgggtcagacaaagacttcacactcaagatcagcagaatggaaactgaggattttggagtatattactgcatgcaaggctcatatgtgccgtggacgttcgggcctggcaccaagctggaaatcaaacgggctgatgctaagccaaccgtctccatcttcccaccatccagtgagcagttgggcactggaagcgccacacttgtgtgcttcgtgaacaacttctaccccaaagacatcaatgtcaagtggaaagtagatggcagtgaaaaacgagatggcgtcctgcagagtgtcactgatcaggacagcaaagacagcacctacagcctgagcagcaccctctcgctgaccaaagcagattatgagaggcataacctgtatacctgtgaggttactcataagacatcaactgcagccattgtcaagaccctgaacaggaatgagtgttagagccagaggtcctgaggcaccaccacctgctccctaggaccattctcagtcttccctcctaaggtcttggagctttctccatagactacctaccactgttgcagtcctccaaacccccacctcgtctccctccctttccttggcttttatcatgctaatatttggggaagatattgaataaagtgaatcattgcaaaaaaaaaa

SEQ ID NO: 1082 - DNA, 1561 bp, Cricetulus migratorius
cccattcagtgagcagcactgaaaacaagacaatcaacatggtgttggggctgcactgggttttctttgttgctcttttaaaaggtgtccactgtgaggtgcagctggttgagtctggtggaggattagtgaagcctgcaggatcactgaaactctcctgtctggcttctggattcgccttcagtgactatttcatgagctggttccgccaggctccagggaagggactggaatgggttgctggcatagacactaaaagttatgattatgcaacctattactctggttcggtgaaaggcagattcaccatctccagagatgattcccaaagcatggtctacctgcaaatgaacaacctgagaactgaggacacagccacttactactgtacaagagaaatcggatactggggccaaggaaccatggtcgccgtctcctcagccacaacaacagccccatctgtctatcccttggcccctgcctgtgacagcacaaccagcaccacggacacggtgaccctgggatgcctggtcaagggctatttccctgagccggtgaccgtaagctggaactctggagccctgaccagcggcgtgcacaccttcccatctgtcctgcattctgggctctactccctcagcagctcagtgactgtaccttccagcacctggcccaagcagcccatcacctgcaacgtagcccacccggccagcagcaccaaggtggacaagaaaatcgagcccagaactgatacggatacatgtcctaatccaccggatccatgtcccacgtgtccaactcctgacctcttgggtggaccatctgtcttcatcttccccccaaagcccaaggatgtgctcatgatctccctgacccccaagatcacatgtgtggtggtggacgtgagcgaggaggagccagacgtccagttcaactggtatgtgaacaacgtagaagacaagacagctcagacagagacccggcagcggcagtacaacagcacctaccgcgtggtcagcgtcctccccatcaagcaccaggactggatgagtggcaaggtgttcaaatgcaaggtcaacaacaatgccctccctagccccattgagaaaaccatctccaaacccagagggcaagtccgggtaccacagatatatacctttcctccgcctatagaacagacagtcaagaaagatgtcagtgtgacctgcctggtcacaggcttcctccctcaggacatccacgtggaatgggagagcaatgggcagccacagccagagcagaactacaagaacacccagcctgtcttggactccgatggctcttacttcctgtacagcaagctcaatgtgcccaagagcaggtgggaccagggagattccttcacctgctccgtgatacatgaggctctgcacaaccaccacatgacgaagaccatctcccggtctctgggtaattgagctcagcacccagaaagctcttaggtcctaagctaccctggcaccctcctccacccttcccttgtataaataaagcacccagcactgccctgaaaaaaaaaaaa

SEQ ID NO: 1083 - DNA, 495 bp, Cricetulus migratorius
tccacaggagcccagccctggattcccaggtcctcccattctgtgatcagcactgaacacaggccacttgccatgaactcaggactccaattggttttctttgtcctcactctaaaaggtatacagggtgaggtgcagctggtggagtctgggggaggcttggtgcagcctggaaagtccctgaaactctcctgtgaggcctctggattcaccttcagcggctatggcatgcactgggtccgccaggctccagggagggggctggagtcggtcgcatacattactagtagtagtattaatatcaaatatgctgacgctgtgaaaggccggttcaccgtctccagagacaatgccaagaacttactgtttctacaaatgaacattctcaagtctgaggacacagccatgtactactgtgcaagattcgactgggacaaaaattactggggccaaggaaccatggtcaccgtctcctcagccaaaacaacagcccca

SEQ ID NO: 1084 - DNA, 4224 bp, Cricetulus griseus
  misc_feature (5)..(35): n is a, c, g, or t
  misc_feature (3209)..(3229): n is a, c, g, or t
  misc_feature (3232)..(3244): n is a, c, g, or t
  misc_feature (3246)..(3268): n is a, c, g, or t
  misc_feature (3621)..(3645): n is a, c, g, or t
  misc_feature (3744)..(3759): n is a, c, g, or t
tctcnnnnnnnnnnnnnnnnnnnnnnnnnnnnnnnaaaaggaggggagagggggtaaaaaaatgctgcactgtgcggctaggccggtgagtgagcggcgcggagccaatcagcgctcgccgttccgaaagttgccttttatggctcgagtggccgctgtggcgtcctataaaacccggcggcgcaacgcgcagccactgtcgagtccgcgtccacccgcgagcacaggcctttcgcagctctttcttcgccgctccacacccgccaccaggtaagcagggacaacaggcccagccggccacagccctcccgtgggcagtgaccgcgctgcagggtcgcgggggacactcggcgcggacaccggggaaggctggagggtggtgccgggccgcggagcggacactttcagatccaactttcagtccagggtgtagaccctttacagccgcattgccacggtgtagacaccggtggacccgctctggctcagagcacgcggcttgggggaacccattagggtcgcagtgtgggcgctatgagagccgatgcagctttcgggtgttgaaccgtatctgcccaccttggggggaggacacaaggtcgggagccaaacgccacgatcatgccttggtggcccatgggtctttgtctaaaccggtttgcccatttggcttgccgggcgggcgggcgcggcgggcccggctcggccgggtgggggctgggttgccactgcgcttgcgcgctctatggctgggtattggggcgcgtgcacgctggggagggagcccttcctcttccccctctcccaagttaaacttgcgcgtgcgtattgagacttggagcgcggccaccggggttgggcgagggcggggccgttgtccggaaggggcggggtcgcagaggattcggggcgcctgctcgcgcttcctgctgggtgtggtcgcctcccgcgcgcgcactagaccgcccggcgggggggcgaaggcgggtcttgcgcccgtttggggagggggcggagacctggcttcctgccgtggggccgcctccggaccagcgtttgcctcttatggtaataacgcggccggcctgggcttcatttgtcccctgagtttgggcgcgcgccccctggcggcccgagaccgcggcttgccggaagtgggcagggcggcaacggctgcgcctagtggcccgccagtgaccgcgaccctcttttgtgccctgatatagttcgccatggatgacgatatcgctgcgctcgttgtcgacaacggctccggcatgtgcaaagccggcttcgcgggcgacgatgctccccgggccgtcttcccatccatcgtgggccgccctaggcaccaggtaggtgacccttccctttgcgggtagcgatgctggggttttcctggggggagaggtgaccatattgagaacatcgttcccctccgcagggcgtgatggtgggcatgggccagaaggactcctacgtgggtgacgaggcccagagcaagagaggtattctgaccctgaagtaccccattgaacacggcattgtcaccaactgggacgatatggagaagatctggcaccacaccttctacaacgagctgcgtgtggcccccgaggagcaccctgtgctgctcaccgaggcccccctgaaccccaaggccaaccgtgaaaagatgacccaggtcagcagccagggtggccacctccatctttgccaacttctcggccacgccctttctcaattgtctttcttctgccgttctcccataggactctcttctatgagctgagtctcccttggaactttgcagtttctgctttttccccgatgaggtcctttttttctcttgattgcctttctgactaggtgttttaaaccctacggtgctgtgggtgtaggtactaacaatgactcgtgtgacaaacctaatgaggctggtgataagtggccttggagtgtgtattcagtagatgcacagtaggtttaaaatggagcccctgtcctgagatttctcccagcacacttaccttagctgtgttcttgcactctgcatgtcccatatctgtcctgacagtcctacctgccttgactacttgtggcttttggagtttgacaatgcctcatttttctttatagatcatgtttgagaccttcaacaccccagccatgtacgtagccattcaggctgtgctgtccctgtatgcctctggtcgtaccactggcattgtgatggactccggagacggggtcacccacactgtgcccatctatgagggctacgctctccctcatgccatcctgcgtctggacctggctggccgggacctgacagactacctcatgaagatcctgaccgagcgtggctacagctttaccaccacagctgagagggaaattgtgcgtgacatcaaagagaagctgtgctatgttgccctggacttcgagcaggagatggccactgctgcatcctcttcctccctggagaagagctatgagctgcctgatggccaggtcatcaccattggcaatgagcggttccgttgccctgaggctcttttccagccttccttcctgggtgagttgaagtgacctagtttcttcatctaatggtgaccaactcttgatcttgagaccatgctataagtctatctttctctttcccttttccctcaggtatggaatcctgtggcatccacgaaactacattcaattccatcatgaagtgtgacgtcgacatccgcaaagacctctatgccaacacagtgctgtctggtggtaccaccatgtacccaggcattgctgaccggatgcagaaggagatcactgctctggctcccagcaccatgaagatcaaggtgagctaagcatccttagccttggacccatgatgggcccttccaggtcaaccccttgactgtgggtaagacaggagtccagagcactcactatcactgtgtcttggcttctcagatcattgctcctcctgagcgcaagtactctgtgtggatcggtggctccatcctggcctcactgtccaccttccaggagatgtggatcagcaagcaggagtacgatgagtccggcccctccatcgtccaccgcaaatgcttctaggcggactgttactgagctgtgttttacaccctttctttgacaaaacctaacttgcgcagaaaaaaaaatgagacaacattggcatggctttnnnnnnnnnnnnnnnnnnnnnaannnnnnnnnnnnngnnnnnnnnnnnnnnnnnnnnnnngttgttttggcgcttttgactcaggatttaaaaactggaacggtgaaggcgacagcagtcggttggagcaaacatcccccaaagttctacaatgtggctgaggactttgattgcacattttttttcttttttaagtcattccaagtacccatgagatggctacaggaagtccctcaccctcccaaaagccatccccattccctagaagaggatggctgagtccattccctgagtccacaccggggaggtgacagcattgcttctgtgtaaattatggactcccaaaatttttttaaatcttccgccttaaaacttcttttgtttttaattttggatggtcaaccatcgtggcnnnnnnnnnnnnnnnnnnnnnnnnnccccccaacttgatgtatgaaggcttttggtctccctgggagtgggttgaggtgttgaggcagccagggcttgcctgtacactgacttgagaccagttnnnnnnnnnnnnnnnnttacaaacagtgctgcttgtttgtggctttgctagattctgggtagcagcgggggagggggtcactattacctttgctccaagaggttctagggtggtctgggccttgcctagtagtttttagtgggaggacacaagcatcatgacctttaaccagttatcacaaataccctgtccattgagttctgaagtcttaattgtgtcttggttggaagggtgtccatcctgaattgggaataccccctgggccaagttgggttcctgcagcaaacaaccctgtaatctcaaccttcctctacctttgtgggaagcaggaatcctgttgggagggtagctttactgcctttgagttctgcaagacagtgggaagtaaaagcagtctcggttctcttgctttaccagatacatgatcacaaagtttaagggtgttaaggctccccaggcatgggtatctttccccggtacc

SEQ ID NO: 1085 - DNA, 2100 bp, Cricetulus griseus
aggagctccggggtcccagtcatctgcccccccatggagctgaggccctggttgctatgggtggtagcagcagcaggagccttggtcctgctagcagctgatgctcgtggccaaaagatcttcaccaacacttgggctgtgcacatctctggaggcccagctgtggctgacagcgtggcacggaagcatgggttccacaacctgggccagatctttggtgactattaccacttcaggcatagagcagtgacaaagcggtccttgtcacctcaccgccagcgacacatccggctacagagggagcctcaagtaaagtggctggagcagcaggtagcaaaacggaggaccaagcgggacgtgtatcaggagcccacagaccccaagtttccccagcagtggtacctgtctggtgtcactcagcgagacctgaatgtgaaggaagcctgggcccagggcttcacaggtcacggcattgtggtctccatcctggacgacggcattgagaagaaccatcccgacttggcaggcaattatgatcctggagccagttttgatgtcaatgaccaggaccctgaccctcagcctcggtatacacagatgaatgacaacaggcacggcactcggtgtgcgggtgaggtggcagcagtagccaacaatggtgtctgtggtgtaggtgtagcttacaacgcccgaattggaggggtgcgcatgttggatggcgaggtgactgacgcagtagaggctcgttcgctgggtttgaaccccaaccacatccacatctacagtgccagctggggacctgaggatgatggcaagaccgtggatgggccagcccgtctcgctgaggaggccttttttcggggagttagccagggtcgtggtgggcttggctccatctttgtctgggcctcagggaacgggggccgggaacatgacagctgcaactgtgatggctacaccaacagcatctacacgttgtccatcagcagtgccacacagtttggcaatgtgccctggtacagtgaggcctgctcctccactctagccaccacctacagcagtggcaaccagaatgagaagcagattgtgacaactgacttaaggcagaagtgcacagaatcacacacaggaacctcggcttctgccccgctggcagctggcatcattgctctcaccctggaggccaataagaacctcacctggcgggacatgcagcacctggtggtacagacctctaagccaggccacctcaatgctaatgattgggccaccaatggtgtgggccggaaaggtgagggcatggtgacccggaatttcaggctctgagggacattggcaaacggctggaggtgcgcaaatccgtgacagcatgcctgggcgagcccaaccacatcacccggctggaacatgctcaggcacggctcaccctgtcttacaatcgccgtggtgacctggccatccaccttatcagccccatgggcacacgttccaccttattggctgccagtgtgcgaggaaggcttctcactgcaccagaaaagctgtgtccagcactgcccaccaggcttcacaccccaagtcctcgatacacactacagcactgagaatgatgtggagatcatccgcgccagcgtctgcactccctgtcatgcctcatgtgccacctgccagggcccagctcccacagactgcctcagctgccccagccatgcctccctggaccctgtggagcaaacctgctcccgacaaagccagagcagccgagagtctcggcctcagcagcagcctcctgcactgcatccagaggtggaggtggagccccggctgcaggctggactgctgccctctcatctgcctgaggtggtggccggcctcagctgcgttttcattgtgctggtctttggcactgtcttcctggtcttgcagctgcgctcaggctttagcttccggggagtgaaggtgtacaccatggaccgtggcctcgtttcctacaaggggctgccccctgaagcctggcaagaggagtgcccatctgactcagaagaggatgagggccggggcgagaggaccgcctttatcaaagaccagagcgccctttga

SEQ ID NO: 1086 - DNA, 2527 bp, Cricetulus griseus
aggagctccggggtcccagtcatctgcccccccatggagctgaggccctggttgctatgggtggtagcagcagcaggagccttggtcctgctagcagctgatgctcgtggccaaaagatcttcaccaacacttgggctgtgcacatctctggaggcccagctgtggctgacagcgtggcacggaagcatgggttccacaacctgggccagatctttggtgactattaccacttcaggcatagagcagtgacaaagcggtccttgtcacctcaccgccagcgacacatccggctacagagggagcctcaagtaaagtggctggagcagcaggtagcaaaacggaggaccaagcgggacgtgtatcaggagcccacagaccccaagtttccccagcagtggtacctgtctggtgtcactcagcgagacctgaatgtgaaggaagcctgggcccagggcttcacaggtcacggcattgtggtctccatcctggacgacggcattgagaagaaccatcccgacttggcaggcaattatgatcctggagccagttttgatgtcaatgaccaggaccctgaccctcagcctcggtatacacagatgaatgacaacaggcacggcactcggtgtgcgggtgaggtggcagcagtagccaacaatggtgtctgtggtgtaggtgtagcttacaacgcccgaattggaggggtgcgcatgttggatggcgaggtgactgacgcagtagaggctcgttcgctgggtttgaaccccaaccacatccacatctacagtgccagctggggacctgaggatgatggcaagaccgtggatgggccagcccgtctcgctgaggaggccttttttcggggagttagccagggtcgtggtgggcttggctccatctttgtctgggcctcagggaacgggggccgggaacatgacagctgcaactgtgatggctacaccaacagcatctacacgttgtccatcagcagtgccacacagtttggcaatgtgccctggtacagtgaggcctgctcctccactctagccaccacctacagcagtggcaaccagaatgagaagcagattgtgacaactgacttaaggcagaagtgcacagaatcacacacaggaacctcggcttctgccccgctggcagctggcatcattgctctcaccctggaggccaataagaacctcacctggcgggacatgcagcacctggtggtacagacctctaagccaggccacctcaatgctaatgattgggccaccaatggtgtgggccggaaagtgagccattcgtatggctacgggctgttggatgcaggtgccatggtggccctggcccagaactggacaacagtggccccccagcggaagtgcatcattgacatcctggtggagcccaaggacattggcaaacggctggaggtgcgcaaatccgtgacagcatgcctgggcgagcccaaccacatcacccggctggaacatgctcaggcacggctcaccctgtcttacaatcgccgtggtgacctggccatccaccttatcagccccatgggcacacgttccaccttattggctgccagaccccatgactactctgctgatgggtttaatgactgggctttcatgacaactcattcctgggatgaggacccctctggcgaatgggtcctagagattgaaaataccagcgaagccaacaactatggtattggaagcacttggagagtggaggaggggaaggagagctggtgggctctaggatgttgacatggtgttcacaccctgacccttgtctcttatcaactctggaatagggacgctgaccaagttcactcttgtgctatatggcacagcctctgaggggctctctacacctcctgaaagcagcggctgcaaaaccctcacgtccagccaggcctgtgtggtgtgcgaggaaggcttctcactgcaccagaaaagctgtgtccagcactgcccaccaggcttcacaccccaagtcctcgatacacactacagcactgagaatgatgtggagatcatccgcgccagcgtctgcactccctgtcatgcctcatgtgccacctgccagggcccagctcccacagactgcctcagctgccccagccatgcctccctggaccctgtggagcaaacctgctcccgacaaagccagagcagccgagagtctcggcctcagcagcagcctcctgcactgcatccagaggtggaggtggagccccggctgcaggctggactgctgccctctcatctgcctgaggtggtggccggcctcagctgcgttttcattgtgctggtctttggcactgtcttcctggtcttgcagctgcgctcaggctttagcttccggggagtgaaggtgtacaccatggaccgtggcctcgtttcctacaaggggctgccccctgaagcctggcaagaggagtgcccatctgactcagaagaggatgagggccggggcgagaggaccgcctttatcaaagaccagagcgccctttga

SEQ ID NO: 1087 - DNA, 2501 bp, Cricetulus griseus
  misc_feature (397)..(411): n is a, c, g, or t
  misc_feature (838)..(861): n is a, c, g, or t
  misc_feature (1334)..(1383): n is a, c, g, or t
  misc_feature (1395)..(1419): n is a, c, g, or t
  misc_feature (1495)..(1535): n is a, c, g, or t
  misc_feature (1683)..(1725): n is a, c, g, or t
  misc_feature (2109)..(2128): n is a, c, g, or t
cgcgagccgctttgtctcgggcggggcgcgcggagaggccgccaggtgccccccccgcgggcccgggcggcggggcggacgagcgcggtgccgggccccggggcggagggcgcgccgggatgggccccaagcggcggcagctgacgttccgggagaagtcgcggatcatccaggaggtggaggagaacccggacctacgcaagggcgagatcgcgcggcgcttcaacatcccgccgtccacgctgagcaccatcctgaagaacaagcgcgccatcctggcgtcggagcgcaagtacggagtggcctccacctgccgtaagaccaacaagctgtccccgtacgacaagctggaggggcttctcatcgcttggttccagcagatccgcgccgcgggccnnnnnnnnnnnnnnntcatcctgaaagagaaggcgctacggatagcggaggagctgggcatggacgacttcacggcttccaacggctggctggatcgcttccgccggcgccacggtgtagtggcctgcagcggcgtgacccgctcccgggcgcgaacgtctaccccacgggccccagcggcacctgccggcccagccgccgtgccctctgagggcagcggtggcagtacaccaggctggcgcactcgggaggagcagccgccgtcggtggctgaggggtacgcctcgcaggacgtgttcagcgccaccgagaccagcctgtggtacgactttctgtccgaccaggcctcggggctgtggggaggtgatggaacggctcgccaggccacccagcgtcttagcgttttgctgtgcgccaaccgcgatggcagcgaaaagcttcnnnnnnnnnnnnnnnnnnnnnnnnccaagccccgtgcaagccagggtggtctgccctgcgactacactgccaactctaagggtggagtcaccacccaggccctggctaagtacttgaaagctctggacacccgaatggctgcagaatctcgtcgggtccttctgcttgcaggccgtctggctgcccagtccttggacacctcgggcctgcggcacgtgcagctggccttcttcccccccggcaccgtgcatcctttggagcgaggagtggtccagcaggtgaagggccactaccgccaggctatgttgctcaaggccatggcagcactcgagggccaggatccctcaggcctgcagctgggcctagtggaggccttacactttgtggctgcagcctggcaggcagtggagcccgcggacatagcaacttgctttcgcgaggccggttttggaggtggccttaatgccactatcaccacttccttcaaaagcgagggnnnnnnnnnnnnnnnnnnnnnnnnnnnnnnnnnnnnnnnnnnnnnnnnnngagggtgaaggnnnnnnnnnnnnnnnnnnnnnnnnngaaggggaggaggaaggaggggaaggagaggaggtgggagaggaggaggaggtagaagaggagggtgatgagagtnnnnnnnnnnnnnnnnnnnnnnnnnnnnnnnnnnnnnnnnngctcctctgagggcttagaggctgaagactgggcacagggagtagtggaggccagtggtggctttgggggttacagtgtccaggaagaggcccagtgcccaactctccatttcctggaaggtggggaggactctgactcggacagtgnnnnnnnnnnnnnnnnnnnnnnnnnnnnnnnnnnnnnnnnnnnaagatgacgatgacgatgaggatggtgatgaggtccctgtgcccagctttggggaggccatggcttactttgccatggtcaagaggtacctgacctcctttcccattgacgaccgcgtacagagtcacatccttcacttggaacatgatctggtccatgtgactaggaagaaccatgcctggcaggcgggagttcggggtcttggacaccaaagctgagctgctggacatatctgtgctccagcccagatgcgagcacctgccaaggcaggagaactccgggcagctgctggagacagctggagaagtcccagggccttcagcaatgctttgccagcctgagacaggccaggggttgaggtctgcctcactgctattgcctctnnnnnnnnnnnnnnnnnnnnccccattagtccctgggctcagggcactgggtgggaggggagctgtccggtgctaccacaccatgccatcagtgggctagaccacagcagcagccagggacgggtcctggaagctcttggccagagagtgcctctccccctgcctcccaaccaggtctttggtggggggatcccaaagccattctggaagggctccagaggaaggtccagcctaggctcccacaaaattagcagcccccctcctgcacctctaggttgtctaaagaagcacagtgtaacttagggcaggctcctgaacctgcctcttcctgctttccacctccctaaatccctttctctggcccagtctttggcccttggttttctttctaga

SEQ ID NO: 1088 - DNA, 1906 bp, Mesocricetus auratus
  misc_feature (255)..(275): n is a, c, g, or t
  misc_feature (336)..(361): n is a, c, g, or t
  misc_feature (663)..(681): n is a, c, g, or t
  misc_feature (691)..(721): n is a, c, g, or t
  misc_feature (727)..(747): n is a, c, g, or t
  misc_feature (977)..(991): n is a, c, g, or t
  misc_feature (1442)..(1502): n is a, c, g, or t
  misc_feature (1505)..(1519): n is a, c, g, or t
ggtacctgagtttcttcttctacctcccctccacagaaataccacgctgcttcattttagaattatgtttctaccaggactccggtgggagtttccagtggcaagcattgactgagtcagctactgtgctttagctatacaagggctttaaagaagtttcctagcgaataatctcttgtaaaagtggtgagaactgggactcatcctccaaatctcttggaaatgcaactcaggcaggaagacctctgtgagtcnnnnnnnnnnnnnnnnnnnnnagtgagttccaagacagtcagctatacagtgaaaccctgtcttgaaaccctgctcccaaannnnnnnnnnnnnnnnnnnnnnnnnngggaaggaagaaaaagaaatgcaacgcacaaaaggcaggactctggtccccagtctggttacctgttggtacagagctctgctctggtggcctcagttggccctactagcacattaatggtggccttcctggtttgttccaacctctgtagtttcacataaagaacagtcacatttcccagacagaagatctaattcaatattatctttatcagtgcggtatgacttaaagtcataaaattaagagtgatttttataatgatttatgagtagtataaaaattaaaaaataagtcaagtggtnnnnnnnnnnnnnnnnnnngccagcactnnnnnnnnnnnnnnnnnnnnnnnnnnnnnnngttccnnnnnnnnnnnnnnnnnnnnnaaagttctaggacaaccaaggctacacagagaaactatctttaaaaacccaataaataaataagtaaataataataacgataggtaatgtgttctagttcagttgggctcagtggggttggggctaattgtacttcatcacgttttcattataaatagggaaatattctaacaggcagttaatgttctagctttggtgatgattttgtacttgagcagaaaagtatcacnnnnnnnnnnnnnnnttggtttctttggcatggctccttggtgcctctgcatttatgcatctgtaagactatgggctggtttagtttggctctcaagatgaaaacttccttgattttccttcttgaatgaaacacatttcttaaaagaccaaaaactgtagcccacctgtgtttaatcattaatagtcagccctcccatgaacttaggtcctgattttggagtttggaatctgacctttcccctatagataaacactgttgtcgcagattctgaggagggtcacttccttgctgcctgccaccagaagagtccgcttctcagagattcctgggaagtggatgccttagagggtagccaggcagcatgattctcctggcagtgcttttcctctgcttcttctcctcgtactctgcctctgttaaaggtaagtgtatgttgcgttttcttaaacgtggatctctctcnnnnnnnnnnnnnnnnnnnnnnnnnnnnnnnnnnnnnnnnnnnnnnnnnnnnnnnnnnnnnttnnnnnnnnnnnnnnnagagttcctaactatacaatttttgaaagtgtatatggttggaatatttgggggtaagtgactaagtggaaatgaaaaaaattaatttctgactctgttttacgagagtggaggtccctttttgcttcacgccatccctgagaccagtgtgtttctagcttcgacttgttattcctggaaaaagatttgagctattgttacctgctgctgacagacacacagaatgcaatgccttcatttgaattgtaaaatgggattttaaaaacccagtcccgaaaattccttccagttgcttagcaatgggacagcaaaaagaatcgaatccaactgggaaaaaaaggcatttgattgccaaagaattatgaatgaaatgttagagcatgtatg

SEQ ID NO: 1089 - DNA, 2449 bp, Mesocricetus auratus
tgaatctgcggctttcatgaagtctccctacaaggtccttcactttgctcctaaacgtggatttttttttcttccccctgccattctagtctccccgcctcttccttgcagccggactccctcctccggtccctgcccacacgcgcactcctctgccccgcgttggccccagcgcccagccctccagccagagggagccagtcaccagacggcagcacctggctggagaggttgggcgggccgcgagggtggggatccgcgggaaccggcgagccgggagctggagcagaagctggaccaagcgcgagcaggagaatggagtctcccgacagcctgccgaggctgatgtgaaattggaccatctgcttccagttggttctgtttcctcttcttcttgtattttcttccctcgccatccacagtggagtgaattatcagatcttgctccgctcccagaaagacgaccaccatggagtgagcccaccctgtccgccacaaggaaaagcacagagaagacatgacgatggccaagttaactgaatccatgacgaatgtcctggaaggcgattccatggaccaggacgtggaaagcccagtggccattcaccagccaaagttgcctaagcaggccagggacgaccttccgagacacatcagccgagacaggacaaagaggaaaatccagaggtatgtgaggaaggatgggaagtgcaacgtccaccatggcaatgtgagggagacctaccggtacctgacagacatcctcaccaccctcgtggacctaaagtggagattcaacctgctcatcttcgtcatggtctacacggtgacgtggctcttctttgggatgatctggtggctaattgcatacatccggggagatatggaccacgtagaggacccctcatggactccctgcgtcaccaacctcaatgggtttgtctctgcttttttattctcaatagagacagagaccaccatcggttatggctaccgggtcatcacggacaaatgccccgagggaattattctcctcttaatccagtccgtgttggggtccattgtcaatgcattcatggtaggatgtatgtttgtgaaaatatcccaacccaagaagagggcagagaccctggtcttttccacccacgcagtgatctccatgcgggatgggaaactgtgcctgatgttccgggttggggacctgaggaattcccacatcgtggaggcttccatcagagccaagttgatcaaatccaaacagacttcagagggggagtttatccccctcaaccagacagatatcaacgtagggtactacaccggagatgaccgtctctttttagtgtcaccattgatcattagccatgaaattaaccaacagagtcccttctgggagatctccaaagcccagctacccaaagaggaactggagattgtggtcatcctggagggaatggtggaagccacaggaatgacgtgccaagcccggagctcctacatcaccagtgagatcctgtggggttaccgcttcactccggtcctgacactggaagacgggttctacgaagtcgactacaacagcttccacgagacctatgagaccagcaccccgtcccttagtgccaaagagctagctgagctggctaacagggcagagctgcccctgagttggtctgtgtccagcaaactgaaccagcacgcggaactggagacagaggaggaagagaagaacccggaagagcagacggagaggaatggtgacgtggcaaacctagagaatgaatccaaagtgtaggccctgctgggtcggcctctccctccctctcagacgtgacccttccttgtctctctcattccccgcccccttccgtcgctctctttggctctgatcccggtttgtttacgtttaattttggcatttccagaaagcaaatcctcgaggtgtaaaatgcctacctgccctctctcggatgttcaggtggacaagcagacagggatttggttgcggtacaagtacctttcacttgtggcccaagcctggcctctctcctctcccttcaccccccccaggagagacttagacgcttacccccacccctgcactgtccaatgcaagtcactcaaaagagctgtcaaagggtttttacccagtgtcacaaaggtcacctgttcaccatggccataggtcacacagaacatgtcccttcagctttattgagcctggtccatctcacctagcacagggcaggcgcttgcccgcacagacgctgagggcgcaggacccagctgagctaaggttagaccactgtacatagatctgccccgtggaattactctcctttggcactcagtaatagaacatgacatgcagtggggcggagctcctggcaatgtacatagatgcatcattcctgtagctttagacgtgcaactttagagacaagaagca

SEQ ID NO: 1090 - DNA, 4410 bp, Cricetulus griseus
  misc_feature (327)..(352): n is a, c, g, or t
  misc_feature (355)..(367): n is a, c, g, or t
  misc_feature (2321)..(2349): n is a, c, g, or t
  misc_feature (2851)..(2866): n is a, c, g, or t
  misc_feature (2868)..(2882): n is a, c, g, or t
  misc_feature (2902)..(2923): n is a, c, g, or t
  misc_feature (2945)..(2962): n is a, c, g, or t
  misc_feature (3418)..(3480): n is a, c, g, or t
taacacgttggcggctggcacgggccggtgaggcggtaccaggtgggggccgtcgggtgtcatgggcggtggcggcggcaccgcctccgcgtctccctgagccggacctcacgggggactcagcgccaagctgggcgatggacgagagcagcgagctgggcggtctggagaccatggacaccctcacggagctgggcgacgagctgactctgggggacatcgatgaaatgctacagttcgtcagcaatcaagtgggagagttccctgatttgttttcagagcagctatgcagctccttccctggtggtggtagcagtggcagtagtnnnnnnnnnnnnnnnnnnnnnnnnnntgnnnnnnnnnnnnnaggcaatggtggtgcagccacagatcctggagtgcagcggtcgttcagccaggtcccattacctaccttctccccctcaactgcctcccctcaggctctagccttgcaggtcaaagtctctcctaccccacccagggcaacccctgttctccagcctagaccccagccccagccgcagccccagccttcagctcagcttcagcaacagacggtaatgatcaccccgacattcagcactgctccacagacaaggatcatccagcagcctttgatataccagaacgcagcaaccagcttccaagtcctgcaggctcaagtccaaagcctggtgacatcctcgcaggtacagccagtcacgatccagcagcaggtgcaaactgtacaggctcagcgggtgttgacacaaacagccaatggcacgctgcagacccttgccccagcaacagtgcagacagttgctgcaccccaggtgcagcaggtcccggtcctggttcagcctcagatcattaagacagattcccttgttttgaccacactgaaaacagatggcagccctgttatggctgcagtccagaacccagccctcactgccctcaccacccccctccagacgggcgcccttcaagtaccaactctggtgggcagcaatgggaccattctgaccacaatgcctgtgatgatgggacaagagaaagttcctattaagcaagtacctggcggtgtaaagcagctagagccccccaaagaaggagagaggaggacaacacacaacatcattgaaaagcgatatcgatcctctatcaatgacaaaatcatagagttgaaggacttggtcatgggaacagatgccaagatgcacaaatctggcgttctgaggaaggccattgattacatcaaatatttgcagcaggtcaatcacaagcttcgtcaggagaacatggtactgaagctggcaaatcagaaaaacaagctcctgaagggcattgatttaggcagtctggtggacagtgatgtggacttgaagattgaagactttaatcagaatgtccttctgatgtctcccccggcctctgactcggggtcccaagcaggcttctctccctattctattgactctgagccaggaagtcctctgctggatgatgcaaagaagtttcaggctcctgcaaaagagatctgtgtggggtgtcagaagaccgtgtaccccatggaacgtctcctggccaaccagcaagtgtttcatatcagctgtttccgctgctcctactgcaacaacaaacttagtctaggaacgtatgcatctttacacggacaaatctattgtaagcctcacttcaatcaactctttaagtctaaaggcaattatgacgaaggctttggccacagaccacataaggatctttgggcaaacaaaagtgaaaacgaagaaacctcagagagatcaccccagtctccagatgttggggagatcccccataactccggggtagaagatgcccccatctctaaggtgggtgtcctggctgcaaatatggaagccaaggcctctcctcagagagagaaggaagataagcctgctgagaccaagaagctgaggattgcctggccgcccccagctgagctgggcagctcaggaagtaccatggaggaagggttcaagggctctaagcccaagtggcctcctgaggatgaaaccagcaagaccgaggctcttggggatgtagatctggacctgaagaagctgaggcgatcttcttcgctgaaggagaggagccgcccattcacggtagccgcttcatttcgaacctcttcgctcaagagccccaagacattgtcacctctcaggaaaggttggagcatgtcggagcagaatgaggagtctggaggcgggatagtcacagcagggaaacaaacagaaaatgccaaagcccctgggaagaaagagaatgtgagnnnnnnnnnnnnnnnnnnnnnnnnnnnnnccagggaggaagtagcgaggaggagcaaggacattcatggtgttgagctggagagtgagaatttcatagaaaatggagcgaacatctatgaaggtgatagcggtgacctcgtgcagcagtctccactagatcccaagtctccaagttggtccggctttgtagacaccactcctactgaagagttcacaacccagaatcaaaaatctcatgatgtggggttccgggagggagaagtggtcagagagctgtcagtggaggaacagataaagagaaaccggtactatgatgaggatgaagatgaagaataacaggccgtcatggtgctggccttaaattcctgtcagcaccagtagtcactgccctttatcaagtggtgcctgagacaggcagccaggcgctagctgtcatttatgtgggagcgactttggaaaggaattccaaaagagaatcaattctaagtgcattattggaaccccatttgaagcctggtgtggtggtgcgnnnnnnnnnnnnnnnncnnnnnnnnnnnnnnngcagcagatctctgagtttnnnnnnnnnnnnnnnnnnnnnntgagttccaagacagccgggannnnnnnnnnnnnnnnnngtctcaaaaccaaaaaaagaaagtccatttcagcagtgaagatgtgccataagagctaagcagggggaaggctctcattggtgtagcccgtcgtccactgcattccccaaagtgaatattcaagtgtctaggcagtggcacattttcacactacaaataccattgtggaattggagacaaacaacagatttagatgcctacatatcatgaccagaagcactttagtataaagggcacagtgtagatatttttaccaatttcattttttagtactcaactgttgaaatcaaatatttagtctttcaaattctttaatgctttttctccctctggtagatatgggaacttattgctctgcattttttaattattgaggtataatacagcaacctctggcccagtgagatggctcactgagtaatggtgcttgctacacaaacctgaccacctgagttnnnnnnnnnnnnnnnnnnnnnnnnnnnnnnnnnnnnnnnnnnnnnnnnnnnnnnnnnnnnnnnagtgccctgtagcacacatgcccatcaataataataataaacaattaaaaaaataagtcaccctttcgagatacctttgagaacaaagaactggcctgtatgctttggtgcttggagagacccactatagcatttgccagagtgtcattctgaactctaggtgattgcttccctagagttcccctgtttgtgctctcacactttacagaaagctgcactgtctttacaagaccttctggatcagggttcaccgtgctttgggtaaaacaacaatggagactccaaaggagggaaaacaagagggactgccagagctcagatctccacggccaccctgaagcaaatcttgtcaatacctatcagctctgaaatgtattgacttttgtggcagatagtatctccggtttggatggtgtcctagcttgattcactgagtgtgtaataaaaccctgggcagaagtaaggaagaagttcatttccacttacaggtcacagccggttgtcaagggaagtgaggcaggaacatggctccctggctccatttccatgtcttactcagcttgcttttcttatacaaccagggccgcctgccaaggggtggctctgctcacaacagtaacaacaaaaagcacttcagacaatgcccacagactaatctgttagagacagtccctcaattgagatccccaggcaattatatttgtcaaattggcaaaacccagcacaggcggttttctctagcattaagactttagaacatttgagcacatttgttgtaagtgactgatatcccaaatcatgtatggctgagggtgtttttgcatttgtagagatttagctctattttagagatgtaaaataatgtttccttatagtcttgtttagcctaaaacatttttattcaataaagcttttaatttacatttcaac

SEQ ID NO: 1091 - DNA, 1747 bp, Cricetulus griseus
  misc_feature (330)..(355): n is a, c, g, or t
  misc_feature (358)..(370): n is a, c, g, or t
taacacgttggcggcggctggcacgggccggtgaggcggtaccaggtgggggccgtcgggtgtcatgggcggtggcggcggcaccgcctccgcgtctccctgagccggacctcacgggggactcagcgccaagctgggcgatggacgagagcagcgagctgggcggtctggagaccatggacaccctcacggagctgggcgacgagctgactctgggggacatcgatgaaatgctacagttcgtcagcaatcaagtgggagagttccctgatttgttttcagagcagctatgcagctccttccctggtggtggtagcagtggcagtagtnnnnnnnnnnnnnnnnnnnnnnnnnntgnnnnnnnnnnnnnaggcaatggtggtgcagccacagatcctggagtgcagcggtcgttcagccaggtcccattacctaccttctccccctcaactgcctcccctcaggctctagccttgcaggtcaaagtctctcctaccccacccagggcaacccctgttctccagcctagaccccagccccagccgcagccccagccttcagctcagcttcagcaacagacggtaatgatcaccccgacattcagcactgctccacagacaaggatcatccagcagcctttgatataccagaacgcagcaaccagcttccaagtcctgcaggctcaagtccaaagcctggtgacatcctcgcaggtacagccagtcacgatccagcagcaggtgcaaactgtacaggctcagcgggtgttgacacaaacagccaatggcacgctgcagacccttgccccagcaacagtgcagacagttgctgcaccccaggtgcagcaggtcccggtcctggttcagcctcagatcattaagacagattcccttgttttgaccacactgaaaacagatggcagccctgttatggctgcagtccagaacccagccctcactgccctcaccacccccctccagacgggcgcccttcaagtaccaactctggtgggcagcaatgggaccattctgaccacaatgcctgtgatgatgggacaagagaaagttcctattaagcaagtacctggcggtgtaaagcagctagagccccccaaagaaggagagaggaggacaacacacaacatcattgaaaagcgatatcgatcctctatcaatgacaaaatcatagagttgaaggacttggtcatgggaacagatgccaagatgcacaaatctggcgttctgaggaaggccattgattacatcaaatatttgcagcaggtcaatcacaagcttcgtcaggagaacatggtactgaagctggcaaatcagaaaaacaagctcctgaagggcattgatttaggcagtctggtggacagtgatgtggacttgaagattgaagactttaatcagaatgtccttctgatgtctcccccggcctctgactcggggtcccaagcaggcttctctccctattctattgactctgagccaggaagtcctctgctggatgatgcaaaggtatgagcttttgacatttctcaccctcagaatctcttgttttccctaaggcattagtggccaggtgactggatcactgcttaaaacaatgtggggtggagaggaccaggaattctgttatgttagctgcatttaaagtggtgaaaactggtggtgcatgcctgaaatcccagtgggagggaggatgaggcaggaagatcttgagatggtaccaagaccatctccaa

SEQ ID NO: 1092 - DNA, 2458 bp, Cricetinae
  misc_feature (289)..(308): n is a, c, g, or t
  misc_feature (542)..(559): n is a, c, g, or t
  misc_feature (1797)..(1816): n is a, c, g, or t
agaaggcaaagtgtcccgaggctccggggttatgagatcgtcactgctcaggacattctaacaacaggaagtggaaacatgaccaaatcatacagcgagagcggactgatgggtgagcctcagccccaaggtcccccaagctggacagacgagtgtcttagttctcaggacgaggatcatgaggcagacaagaaggaggacgagctcgaagccatgaatgcagaggaggactctctgagaaacggaggagatgaggaggatgaagatgaggacctggaagaggaagacnnnnnnnnnnnnnnnnnnnntcaaaagcccaagagacggggccccaaaaagaaaaagatgaccaaggcgcgcctagagcgttttaaattaaggcgcatgaaggccaacgcccgggaacggaaccgcatgcacgggctgaatgcagcgctggacaacctgcgcaaggtggtaccctgctactccaagacccagaagctgtccaagatcgagacactgcgcttggccaaaaactacatttgggctctgtcagagannnnnnnnnnnnnnnnnngccctgacctggtctccttcgttcaaacgctctgcaaaggcttgtcccagcccaccaccaacctggttgctggctgcctgcaactcaatcctcggactttcctgcccgaacagaacccggacatgcccccgcatctgcccacagccagtgcttccttcccggtacacccctactcctaccagtcccccgggctaccgagccctccctatggcaccatggacagctcccatgtcttccaagtgaagccgccgccacatgcctacagcgcgactttggaacccttctttgaaagccccctgactgattgcaccagcccgtcttttgatggacccctcagcccgccgctcagcatcaatggcaacttctctttcaaacacgaaccatccgccgagtttgaaaaaaattatgcctttaccatgcactaccctgcagcgaccctggcagggccccaaagccacggatcaatcttctcgggtgccactgcccctcgctgcgagatccccatagacaatattatgtctttcgatagccattcacatcatgagcgagtcatgagtgcccagctcaatgccatctttcacgattagaggcacgtcagtttcaccattcccgggaaacgaacccactgtgctttcagtgactgtcgtgtttacagaaggcagcctttttgctacgatttctgcaaagtgcaaatactcaaagcttcaagtgatatatgtatttattgtcgttactgcctttggaagaaacaggggatcaaagctcctgtttaccttatgtattgttttctatagctcttctattttaaaaataataacagtaaagtaaaaaagaaaatgtgtaccacgaatttcgtgtagctgtactcagatcatattaattatctgatcgggataaaaaaatcacaagcaataattaggatctatgcaatttttaaactagtaatgggccaattaaaatatatataaatatatatttttcaaccagcattttactacttgttacctttcccatgctgaattattttgttgtgattttgtacagaatttttaatgactttttataacgtggatttcctattttaaaaccatgcagcttcatcaatttttatacatatcagaaaagtagaattatatctaatttatacaagataatttaactaatttaaaccagcagaaaagtgcttagaaagttattgcgttgccttagcacttctttcttctctaattgtaaacagnnnnnnnnnnnnnnnnnnnnttgcacaatttgagcaatccatttcactttgaagttgttccctctccttaaaatagaaaccagattcatagtattcaagaggatgaaaaagagatgcatttcttatcaaaacatatcaattcattacttgcacaagcttgtatatacatattataaacaaatgccaacatacacacacactcctttaaatcaaaagctgcttgactatcacacacaatttgcactctttcatttttagtcttttctttgaattccatgattttatggagtgtctgacactgttgatgtttccagaaaatataaatgcatgattttatacatagtcaaacaaatggtggcttgtcatctattcatgtaataaatctgagcctaaaattattcaggttgttaaagttgggattgatacctacgtagtcagttagtacagtagcttaagtaaaattcaaaccattgaatccataattagaacaatagctattgcatgtaaaaatgcagtccagaacaagtgctgcctaggatgtgatgctggtaccactggaaatgacctgtactgtaatcttgtttgtaaccctgtgtattatggtgtaacgcacaatttagaaaacgctcatgcagttgcaataaaaatagtattgaaaatca

SEQ ID NO: 1093 - DNA, 1827 bp, Cricetulus griseus
acgcgcgatagtgccaaactagggtgagagtgcgaagatggcagctgctgaggagccaaagcccaaaaagctgaaggtggaacgccacaagcgctgagtgaaaatgtgttgtttggaatggggaatcctcttcttgacatctctgctgtagtagacaaagatttccttgataagtattcgctgaaaccaaatgaccagatcttggctgaagaaaagcacaaggaattgtttgatgaacttgtaagaaaattcaaagttgaatatcatgctggtggctctacccagaattcaattaaagtggctcagtggatgatccagaagccacacaaagcagcgaccttctttggatgcattgggatagataaatttggggagattctgaagagtaaagctgctgaggcccacgtggatgcccattactatgagcagaatgagcagccaactggaacctgcgctgcatgcatcactggtgacaacaggtctcttgttgctaaccttgctgctgccaactgttacaaaaaggaaaagcatcttgatttggagaataactgggtgctggtagagaaggccagagtatactacatagccggcttttttcttactgtctccccagagtcagtattgaaagttgctcgctatgctgctgagaacaacaggatcttcactttgaacttgtctgcaccgtttattagccagttcttcaaggaatccttgatggaagtcatgccttatgttgacatcctctttggaaatgagacggaagctgccacttttgctcgagagcaaggctttgagactaaagacattaaagagatagccaaaaaggcacaggctcttgcaaaggtgaactcgaagaggccgaggaccgtggtcttcacacaagggagagacgacactgtagtggctacagaaaatgaagtcatggcttttgctgtcttggatcaaaaccagaaagaaatcattgacaccaatggagctggagatgcatttgttggagggtttctctctcaactggtctataacaagcctctgactgaatgcatccgagccggccactatgcagcaagtgtcattattaggcgaactggctgtacctttcctgagaagccagacttccactgatggaagaaagaaaactcaagctgggaggtgcaggctgcagtgacctcgtcctaagtgttcctgccataagaaagaataattgtactgctatttttgccaaccatgattctcattaatttagagggctcagtattgctcctagaacctttagtctttgaaatctgggggaaaatgtttatttccataatttgttagtgcctcttaaatgtcaaaaaggaatatagcatttcagtagaaacttttatttcattttccattgtttgtaaattcatctgtatttagtaaattaattggtttttttacatttctgctttaaatacaggtgcaatttaatataatagactttttaaagaaattaatgctaacatcattcttgagctttttatataaatatatttaatttggaggtatgtatatgcacacatgtcatatatatacatatatatctgataactggtcagataaggtacagaaatgtttatcacaccaaaggtggccacataagctcttcattgtgcttcagacatatgatggacttggaacaaccgattcccccaacatttgcatcatgttattcaaatcataacctatgcttactgatggtactctgtaatttgatacaaataaattaccatataggaatcctttctgtcttggcttatgctcaataaaactaagaagaaattgtaaaaaaaaacctcgagg

SEQ ID NO: 1094 - DNA, 952 bp, Mesocricetus auratus
  misc_feature (51)..(67): n is a, c, g, or t
ccggccggcccaccccccatctgcagccatggacgccatcaagaagaagannnnnnnnnnnnnnnnngacaaggagaacgccatcgaccgcgcggagcaggccgaagccgacaagaagcaagctgaagaccgatgcaagcagctggaggaagagcagcaggccctccagaagaagctgaaggggactgaggatgaggtggaaaagatctactcagagtctgtgaaggatgcccaggagaaactggagcaggccgagacgaaggccactgacgctgaggcagatgtggcctccctgaaccgccgcatccagctggtagaggaggagttggatcgggcgcaggagcgcctggctacagccctgcaaaagttggaggaggccgagaaagccgccgatgagagcgagagaggaatgaaggtcattgaaaaccgggccatgaaggatgaggaaaagatggagctgcaggagatgcagctgaaggaggccaagcacatcgctgaggactcagaccgcaaatacgaggaggtggccaggaagctggtgatcctggaaggagagctggagcgctcagaagagaggacggaggtggctgagagccgagccaggcagttggaggaggagcttcgaaccatggaccaggccctcaagtcgctgatagcctcagaggaggagtattccaccaaggaggacaagtatgaagaggagatcaaacttctggaggagaagctgaaggaggctgagacccgagcagagtttgctgaaagatctgtggcaaagttggagaaaaccatcgacgacctggaagagactttggctagtgccaaggaagagaacgtggagattcaccagaccttggaccagacccttctggaactcaacaacttgtaagggctggccgtgctgccttccatatagctgcctcctcaggccaataaaacggatgttcctggcgca

SEQ ID NO: 1095 - DNA, 1290 bp, Cricetulus griseus
ccgtctctggtgtttctaccgtgtgtacctgctcgcgtgcaatccgccgccatcgcgctttgggcgagcattgtaatgggtagtagagaggcggcagccgagcggaggccgacctggctttggcgatggtggcgcgcgctctggaggaccgatcggagaccagcgccaggagcgctcactgatgtggaggtgacggaggagcttttggtgtgacctggcgccatgtgtgtgataccacacgagcttgaccgagcgtgccacgcaatcataattcagcgaaccttttgcttcgatgaggtgtgaagtggtgcgtccacctcttgcccctacagaaacttgcaagaaagaagcctatgggaagcaacttgaggcagaggcaggcatcgtgttggtgatgactagaagacatacgtggcttggaagatgacgtgaaatacacaggaaaggaaagaagtaaaaggatgttttgcttaagagtatgccatttgcaaattcattcaataatttggagatttatataagggcctgttcagacagtggtgtttctgattcctgctaaggaaagtgctccacacaagcctgatgacctgagctaattcctgaggcccacagggtggaagatgagagttgactcctgaaagtatcttcaaaccacacatacacaataagaaaaaacaatatagtaaagctgaaacattagagtgttgctgttttattgaaatgtaaaatggtacaagtaattatggaacaaatgtattccataccttgtgacagttttgtgtaaaaccttaccctcttctaaatgagaaagggattaaagttgtcaaaagaatttaacttttaagtctttcattttcttttataaaggtttatttctgatggtatgttgtatgtttgtgtgccctcatacagctggagttacagacagttgtgagctgcctgaggtgggtactgtgagcaacatgctctcacaagtaccaagtcatctctccagcccaactttttgtgaatgaatttgaaagtttttgcattttggagaaaaagcaaaagggaggtgtgctgttgtaatgtggcagttgccaatcaaaatgaactgtaacttcttgtcagttgctgcctggtaagaggctagcccagacacaacctactagaagtgtccttattacatttcaggaaccatgccaaatagggtggctgcccaatacaaccaggtagtttgtcttcagatccaattgtactgctgtctgtccggttcatttgtagtatacttaataaacatagttttctact

SEQ ID NO: 1096 - DNA, 431 bp, Cricetinae gen. sp.
gccgtgataggtgtgcatatggatgacacagaccccctggtcaccgtgatgaaggtggaaaaggccccccaggagacctatgcagatattgggggactggacaaccaaatccaggaaattaaggaatctgtggagcttcctcttacccatcctgagtactatgaagagatggggataaagccccctaaggtcattctctatggcccaccaggaacaggtaaaacattactggccaaagcagtagcaaaccaaacttcagccactttcttgagagtggttggctcagagcttattcagaagtacctgggggacggacccaaactcgttcgggagctcttccgagttgctgaagaacatgccccatccattgtgtttattgatgaaattgatgccattgggaccaaaagatatgattcaaactctggaggtga

SEQ ID NO: 1097 - DNA, 600 bp, Cricetulus griseus
atctcatcagccgttttaagattcccactgtgtttctgatgagttttctggaggccctggagacaggctatgggaaatataagaacccttaccacaatcagatccatgcagctgatgtgacccagacagtccattgctttctgctccgcacaggcatggtgcactgcctgtcagagattgaggtcttggccatcatctttgctgcagccatccatgactatgagcacacaggcacaaccaacagcttccacatccagaccaagtcagaatgtgccatcctgtacaacgatcgctcggtgctggagaatcaccacatcagctctgtttttcgaatgatgcaggatgatgagatgaacatttttatcaatctcaccaaggatgagtttgtagaacttcgggccttggttattgagatggtgttggccacagacatgtcctgccatttccagcaagtgaagtctatgaagacagccctgcagcagctggaaaggattgacaagtccaaggccctatctcttctgcttcatgctgctgacatcagccatccaaccaagcagtggtcagtccacagccattggaccaaggccctcatggaggagt

SEQ ID NO: 1098 - DNA, 504 bp, Mesocricetus auratus
  misc_feature (17)..(17): n is a, c, g, or t
  misc_feature (315)..(393): n is a, c, g, or t
atctgtgtctccacaantgactccatcgacactgctgtctgatcgaggatctaggaaacatcctacttcttctcaaatccctaaaagaacttctcagtctgccctaaattctctacaacatccatcatctgtcccaggatttctgaatccttcccaatctgaacagagcactccagcacctttgttatctcctccaggtactggaatacatggaccatctgcctcagtttctcagaaaatgttcccaggttctgcaacctcagggtatcctgaacctttgccatatgttggtgggcctctgaaactttccctgtnnnnnnnnnnnnnnnnnnnnnnnnnnnnnnnnnnnnnnnnnnnnnnnnnnnnnnnnnnnnnnnnnnnnnnnnnnnnnnnatcatctcaacctgcccaaaggaatcttggtcatttgtcatatgtgagagagcctgtgagaaattctccatctgtcccagttcatagagcgattcaccattgaacaaatcc

SEQ ID NO: 1099 - DNA, 766 bp, Mesocricetus auratus
gaaaaaacaccccagatctctgcaagacaggtaccatgatgcttcccatgaccctctgtaggatgtcttggatgctgctttcctgcctgatgttcctttcttgggtggaaggtgaagaatctcaaaagaaactgccttcttcacgtataacctgtcctcaaggctctgtagcctatgggtcctattgctattcactgattttgataccacagacctggtctaatgcagaactatcctgccagatgcatttctcaggacacctggcatttcttctcagtactggtgaaattaccttcgtgtcctcccttgtgaagaacagtttgacggcctaccagtacatctggattggactccatgatccctcacatggtacactacccaacggaagtggatggaagtggagcagttccaatgtgctgaccttctataactgggagaggaacccctctattgctgctgaccgtggttattgtgcagttttgtctcagaaatcaggttttcagaagtggagagattttaattgtgaaaatgagcttccctatatctgcaaattcaaggtctagggcagttctaatttcaacagcttgaaaatattatgaagctcacatggacaaggaagcaagtatgaggattcactcaggaagagcaagctctgcctacacacccacaccaattcccttatatcatctctgctgtttttctatcagtatattctgtggtggctgtaacctaaaggctcagagaacaaaaataaaatgtcatcaac

SEQ ID NO: 1100 - DNA, 2078 bp, Cricetinae
ccttcctcgccgccgcccgtgccccttctctggtctgtggtgtagccgggacccaggaccatgtcgctctcacgctcggaggagatgcaccggctcacggaaaatgtctataagaccatcatggagcagttcaaccccagcctccgcaacttcatcgccatggggaagaactacgagaaagccctggcaggtgtcaccttcgctgccaaaggctatttcgatgctctggtaaagatgggggagctggccagcgagagccagggctctaaggaacttggggacgtcctcttccagatggccgaagtccaccggcagatccagaaccaactggaagagatgctaaagtcttttcacaatgagctgctcacacagctggaacagaaggtagagctggactccaggtatctgagtgctgcactgaagaaataccaggcagagcagaggagcaaaggagatgctctggacaagtgtcaggctgagctgaagaagctccgtaagaagagccaagggagcaagaaccctcagaagtactcggacaaggagctgcagtacattgatgccatcagcaacaagcagggtgagctggagaactacgtatctgatggctacaagacagcactcaccgaggagcggaggaggttctgcttcctggtggaaaagcagtgtgctgtggccaagaactctgctgcttaccactccaagggcaaggagctgctagcccagaagctgcccgtgtggcagcaagcctgtgctgaccccaacaagattccagaccgcgctgtccagctgatgcagcagatagccagcagcaacggctccatccttcctagtaccctgtcagcctccaagtccaacctggtcatctcagaccccattcctggagccaaacccttgccagtgccacctgagctggcaccatttgtggggcggatgtctgctcaggagaatgtacctgtcatgaatggcgtcgcaggcccggacagcgaggactacaacccctgggctgaccgcaaggctgcccagcccaaatccctgtctcctccgcagtctcaaagcaagctgagcgactcgtactccaacacacttcccgtgcgcaagagcgtgaccccgaagaacagctatgccaccactgagaacaagacactgccacgttcaagctccatggcagctggcctagaacgtaacggccgcatgcgggtcaaagccattttctcccacgcggctggtgacaacagcactctgctgagcttcaaggagggcgacctcatcaccctgctagtgcctgaggcccgtgacggctggcactatggcgagagtgagaaaaccaaaatgcggggctggtttcctttctcctacactcgggtcctggacagtgacggaagtgacaggttgcacatgagcctgcagcagggcaagagcagcagcacgggcaaccttctggacaaggacgacctggccgtcccccctcctgactacggcacgtcctcccgggccttccccacccagacggccgggactttcaagcagagaccctacagtgtggccgttcctgccttctctcagggtctggatgactacggggcacggtctgtgagcagtgctgatgtcgaagtggccagattttgagctgcccctgactagagttagaatcccttcgctgatgtccatctgaaaccaacagtgaccaatgacagatcagcccctctgctcagctgacagctcatctgtgtcgcctgtgttcccactcacgcaaccgagggtagctgcgatgtgttcctgtctggagaagacagcctggctccactccctaacattgtctcacaccagcccagcctgggctggatcccaggtatccctggggaggtggctgcctcaagaagtcaatgcctgctggccatgggtgtgccccaacagagggggcaggcatctccagtcccgactgtggaaccttgaacacagaagaggacattctgtcagcttgtagttggaagggagcctattcccatgctgattttttttttatttttaattttttttagctcatatgtgtcagatcaataaacatgtgcctacctgta

SEQ ID NO: 1101 - DNA, 1910 bp, Mesocricetus auratus
  misc_feature (323)..(344): n is a, c, g, or t
  misc_feature (1396)..(1419): n is a, c, g, or t
  misc_feature (1761)..(1777): n is a, c, g, or t
  misc_feature (1779)..(1807): n is a, c, g, or t
gaagcaactggtggatggttctgtagccttccaaaggtagtaacaaatgatttgaattattgattctttctgagcctcaccagactatttcttgcaaaactgattgcaatttattcatgaataagaagcaagtcacatagaaaacactgtaatcatacctggaacgtgttgagaaacaagcgctacacggtgattcttctcctgcacgaggaaaatgggctgtgatcggaactgtgggctcattgccggagctgtcattggtgcagtcctggctgtgtttgggggtattctcatgccagttggagacatgcttgttgagaagnnnnnnnnnnnnnnnnnnnnnnttgaagaaggaacaattgctttcaaaaactgggttaaaacaggtaccactgtgtacagacagttttggatctttgatgtacaaaacccagatgaagtggcagtgaacagtagcaaaatcaaagttaaacagagaggtccttacacatacagagttcgctatctagccaaggagaatataactcaggacccggtggacagcactgtctcttttgtacagcccaatggagcaatctttgagccttccctgtctgttggaactgagaatgacaccttcacaattctcaatttggctgtggcagctgcaccacatatatacacaaattcctttgttcaagttgtgctcaattcacttatcaaaaagtccaagtcttctatgttccaaacaagaactttgagagaattgttgtggggttacaaggatccattcttgagtttggttccatatcctattcctactacagttggtgtgttttatccttacaatgatactgcagatggagtttataaagttttcaatggaaaggatgacataaacaaagttgcaataattgattcctataaaggaaaaaggaatttgtcctattgggaaagttattgtgacatgattaatggcacagatgcagcctctttcccaccttttgttgagaagtctcgggtactgcggtttttttcctccgacatttgcagatccatctacgctgtgtttggatctgatattgaacttaaaggaatcccagtgtacagatttattcttccagccaaggcctttgcatcaccagtccagaacccagacaatcactgtttctgcactgaaaaggtcatctctaataactgtacatcatatggtgtgctagacatcagcaaatgcaaacaaggaaggcctgtgtacatttcccttccacattttctacatgcaagtcctgacatctcagaacctattgaaggcttaaatccaaatgaagaagaacataggacatacttggatgtggagcctataactggattcactttacaatttgcaaaacgacttcaggtgaacatcctggtcaannnnnnnnnnnnnnnnnnnnnnnnaaagaatctgaagagaaattatattgtacctatactttggcttaatgagactggaactattggcgatgagaaagcagaaatgttcagaaatcaagtgactggaaaagtaaagcttcttggtctggtagaaatggtcttgcttgggcttggagtcgtgatgtttgttgcttttatgatttcatactgtgcttgcagatccaagaatagaaaataagtagcaaacacgactacatttacgcactggctacatgaagatttttgataaaaccaatctaaaaatgaagacttaatatatgctttgtttttacaaaacacacctatatttagttgaagaaatggtgnnnnnnnnnnnnnnnnngnnnnnnnnnnnnnnnnnnnnnnnnnnnnncatatatctcttatatatataatatatatatatgcactaagccaaagcatatttcaaaatgattaatttgacactgtagcctatattttataaaatccagtac

SEQ ID NO: 1102 - DNA, 225 bp, Cricetus cricetus
ggcacctgaagcagagcccagctagtccagagcgggactacagtgcttactacaagaccatagaggagctcaggattaaaatcctggaagccactactgacaacaaccgggtcatcctggagatcgacaatgccaggcttgctgcagatgacttccggctcaagtatgagaatgagctgaccctgcgccagagtgtggaggctgacatcaacggcctacgtaggg

SEQ ID NO: 1103 - DNA, 146 bp, Cricetus cricetus
gcaaaagctcccacggtggaggttttagctcagggggcttcagcggtggctcttttagccgtggaagctctggtggtggttgctttggaggctcatcaggtggctatggaggtttagggggctttggtggaggctatagaggaagc

SEQ ID NO: 1104 - DNA, 286 bp, Mesocricetus auratus
cgaggtgagaagggtttaatgaagaactgcttagtttgttcaactaacacaagtgatacatctcaaagtttggttggaaaagaaaacaccagtaaagctgaaatgagatttatagctctcatggaacaaatgaaggacatggaggagagaatccaaagcatttcagactcaaaagccaacctcatagattcagaacgcttccagaatttcagtatgacaaccgaccagagacttaatgatgttctactgcagttaaattccttgattaatcggttctcaccgcggc

SEQ ID NO: 1105 - DNA, 2500 bp, Mesocricetus auratus
  misc_feature (656)..(674): n is a, c, g, or t
  misc_feature (1172)..(1202): n is a, c, g, or t
  misc_feature (2474)..(2500): n is a, c, g, or t
gcaccagcagcagcagcactcattgccagcgtcatgccctcctacacggtcactgtggccaccggcagccagtggttcgcgggcaccgacgactacatttacctcagcctcattggctctgcgggctgcagcgagaagcacctgctggacaaagctttctacaatgacttcgagcgtggcgcggtggactcatacgacgtcactgtggatgaagaactgggtgagatccagctagtcagaattgagaagcgcaaatactggctgcatgatgactggtacctgaagtacatcaccctgaagacacccacggactacatcgagttcccatgctaccgctggatcacaggcgagggtgagattgtgctgagggatggacgagcaaagctagcccgagatgatcaaatccacatcctcaagcagcacagacgtaaagaactggaagctcggcaaaaacagtatcggtggatggagtggaaccctggcttcccgctgagtatcgatgccaaatgccacaaggatttgccccgagacatccagtttgatagtgaaaaaggagtggactttgttctgaactactcaaaagcgatggagaacctgttcatcaatcgcttcatgcacatgtttcagtcttcctggaatgactttgcagattttgnnnnnnnnnnnnnnnnnnncagcaacactatttctgagcgagtcaagaaccactggcaggaggaccttatgttcggctaccagttcctgaatggctgcaaccccgtactcatcaagcgctgcagagagttgcctcagaagctcccggtgaccacagagatggtggagtgcagcctagagcggcatctcagtttagaacaggaagtacaggaagggaacattttcatcgtggactacgagctactggatggcatcgatgccaacaaaactgacccctgcacacaccagttcctggctgcacccatctgcctgctgtataagaacctagccaacaagattgttcccattgccatccagctcaaccaagcccctggagagaagaacccaatttttctcccttcggatgcaaaatatgactggcttttggccaaaatctgggtgcgctccagtgacttccatgtccatcagacgatcacacaccttctgtgcacacatctggtgtctgaggtgtttggtannnnnnnnnnnnnnnnnnnnnnnnnnnnnnnccccattttcaagctgctggtagcccatgtgaggtttaccatagccatcaacactaaggcccgggaacagcttatctgcgagtatggcctttttgacaaggccaacgccaccgggggtggtgggcatgtgcagatggtgcagagggctgtccaggacctgacttattcctccctgtgcttcccggaggccatcaaggcccggggcatggacagcaccgaggacatcccctactacttctatcgagatgatgggctgctggtgtgggaagccatccagtcgttcacaagtgaggtggtaagcatctactacgaagatgaccaggtagtgatggaggaccaggaactacaggacttcgtgaaggatgtttacgtgtacggcatgcgtggcagaaaagcctcaggcttccccaagtccatcaagagcagggagaagttgtctgagtacctgactgtggtgatcttcacagcctcggcccagcacgcagctgtaaacttcggccagtatgactggtgctcctggatccccaatgctcctccaactatgcgggctccacccgccacggccaagggtgtggtgaccatcgagcagatcgtggctactctaccagaccgaggccgctcatgttggcatctaggcgcagtgtgggcattgagccagttccaagaaaatgagctgtttctgggcatgtaccccgaggaacatttcattgagaagccagtgaaggaagccatgacccgattccgcaagaacctggaggccatcgtcaatgtgatcgctgagcgcaataagaacaaaaagctcccctactactacctgtcaccagacaggattcccaacagtgtagccatctaagcctgccttcctggcccagcatctctctgggaaggccagtggttttggcagccagactcctggcaggctctagatgcaggtgatgtgtcttctttccatgctagctagcagtgctacccctgggcctggctattctagtttggggggacatgctcctgcttcttccggtctttggtggaagtatgtacacagtacagggacctccacctggatcccggctctgcagctgtgacccccagcccagctcagcacttccacactaagtagcaacagtccatcagagtaagtgacatctgtcctggttgggtcagggttaccttattctatttatgctttgtccaactgctttcatgtagtaggtgcctaaaaaaaaactcttgaatgaagattttgttatgaaataaaattcatttaaaacnnnnnnnnnnnnnnnnnnnnnnnnnnn

SEQ ID NO: 1106 - DNA, 3024 bp, Cricetulus griseus
  misc_feature (194)..(225): n is a, c, g, or t
ccacgcgtccgatctttctccgctgtcggactggccgcgttgtggaccggcgtagggacatcgttccacagcgatcctcccgcggctgcccagcctgcccccgacaccgccgcagctgtcctccgcccgcaggcagcttgatggtgggagaagaaaagatgtcactaaggaaccggctgtcaaaatctggtgannnnnnnnnnnnnnnnnnnnnnnnnnnnnnnntctcagatacacagagcaatggtcgcattaccatgaaacagttgatagccaagaagaggcagttggctgcagaggcagaggaattgaagccactgtttctgaaggaagttggttgtcactttgatgactttgtgactaatctcattgaaaagtctgcatctctggacaatggtgggtgtgctctcacaaccttctccattcttgaagaaatgaaaaacaaccacagagccaaagatctgagagcacctccagaaaaagggaagatttttatttcaaggcggtctctgttagatgagctgtttgaagtggaccacatcagaactatttaccacatgttcattggactcctcatcctctttatcctcagcacacttgtggtagattacattgatgaaggaaggctggtacttgagttcaatctcttgggctatgcttttgggaaacttcctactgttatttggacatggtgggccatgttcctgtctacactttcaattccctatttcttgttccaacgttgggcccatggctacagcaagacttctcatccactcatctattcccttagccacggctttttcttcttagtcttccagcttggaattctaggttttgtaccaacgtatgttgtgttagcatacacactgcccccagcctcacggttcattgttatacttgaacagattcgtatggtaatgaaggctcactcgtttgtcagagagaatgtacctagagtactaaatgccgccaaggaaaaatcaagcacagttccagtacccacagtcaaccagtacctgtacttcctgtttgctcctacacttatttaccgtgacagctatccgaggactcctactgtaagatggggctatgttgctgtccagtttttacaggtttttggctgtctgttttatgtgtactacatctttgagagactctgtgccccattgttccggaatatcaaacaggagcccttcagcgctcgtgttctggtcctgtgtgtgtttaactccatcttgccaggtgtactgatgctgttccttacgttctttgcctttttgcactgctggctcaatgcctttgctgagatgctacgctttggtgacaggatgttttataaggactggtggaactctacatcctactccaactactacaggacctggaatgtggtggtccatgattggctctactattatgcttacaaggacctcctctggtttttctcgaagaggttcaaatctgccgccatgttggctgtcttcgccttgtcagctgtagtgcatgaatacgccctcgctgtctgcttgagctatttctacccagtgctctttgtactcttcatgttctttggaatggcttttaactttattgttaacgacagccggaaaaggccaatatggaacattatggtatgggcttctctctttctgggccatggagtcattctgtgcttttattctcaagaatggtatgcccgccagcactgtcctctgaaaaatcccacctttctggattatgtccggccacgttcctggacttgtcagtacgtgttttagaagcctgggctctgcctactttcttgccgatgaggaatggatgttcttcctgattctggccagccgtcttcagcagttactgaatatatctaagccacattgtttggaccactccagcctctccaaatggctcacctgaagctgggctcggctcactaagttattatttttggtttgtttcctttgggagagaaaggagaccaattgctgaggtaaatggcgattttgggggggttatctcagctcaagctttggtagttttatctgtttgtttccttaattctgtccaaggagagactaagcatatcttgaccatgaattagccaaaacacttaggaagaaatcatttcagtacctgtgtcttagaagtttttcgtgcacactgttaggtgagctagctaactgtggcaactggggagaaataaattttgttatttctagtagaaagagagaaaatacctatttcccaaagataatcttgttatgctttctgctcatatctcttgttgctattttgttttgctttgtttctgtgctgggaatggaatccagggccttgcccagtggcagcacactgagccacacaccagtcccatgttgtatttttctgaaagttctggactattcttttttctttcttgtaacttttctgtttgttgtgatttttttaaaaataattagctttctttcaccttgaactcaatactagtacaaattcaagggtcaaaagtatgaaggggaaaatacattcccttttgaaacttcaaaagtcatttaaaacatatttgctgagttagtcataggttttaattatgctagcaaaaattctgtagaagattttattgtcactggtttgggttttttagacgtagggtcttgctatgtagctcaggctggacttgaacttgttatgtagcctggctagccttgaacccctgactgacctcctgcccatgcctcccaagtgctaggatcacagaagataccaccgtgcctggccaagattttcctttcttttagcttttaagttaattagaagtattctttggtacagttgctttattgtctaacaagtagtgactttccttgttatagactagagtccataatggaagtactaatctctctattactactaagcggctactaaggatccagaagctggcttctgaagcatccgctccatcattatactttaacagtatatttttagatgaaataaaatactatgtgatcatttgta

SEQ ID NO: 1107 - DNA, 1940 bp, Mesocricetus auratus
  misc_feature (1741)..(1755): n is a, c, g, or t
  misc_feature (1923)..(1940): n is a, c, g, or t
aattcggcacgagatcggacgccgccgtgggctcccgcccgccaccgtggggacgacgatggcagacgaccagaactgtgctccagagctggagaaagcggatccttccggtgaagacggggtcgatgctaagcccgaccgctcctccattatctcatcgattctcgggaagaagaagaaaaatgcctctgcgtgccccgtcaagactgcccgggaccgagtgcccacctacctgtatagaatggatttcgagaagatggggaaatgcatcattataaacaacaaaaacttcgacaaagtgacaggtatggacgtccggaacgggacagacaaagacgcagaggccctcttcaagtgcttccgcagtctgggctttgacgtggttgtctacaatgactgctcttgtgcgaagatgcaagacctgcttagaaaagcctcggaggaggaccacagcaactcagcctgcttcgcctgcgtcctgctgagccacggagaagagaatctaatttacgggaaagatggcgtgacgccgataaaggacctgacggctcattttaggggagatcggtgcaaaaccctgttagagaaacccaaactcttcttcatccaggcatgccgaggcacggagctcgatgacggggtccaggccgactctgggcctatcaacgaaactgacgccaacccccggtacaagatcccggtggaagccgacttcctcttcgcttactccacagttccaggctattactcatggaggaacccgggaaaaggctcctggtttgtgcaggccctctgttccatcctggatgagcatggcaaagacctggagatcatgcagatcctgaccagagtgaacgacagggtagccaggcacttcgagtcccagtgtgacgacccctgcttcaacgagaagaagcagatcccgtgtatggtttccatgctcaccaaagagctctacttcggccgttgaccatccttcccttccagccgagagcccgcagtcactcatccatgagtccaattgttagtctgcttttattgttttgatgctctcaaagtacccggaaatgttaaagagatttaatttcaggaaagtatattgattcagcagggaggaagttttctggcaatgtctgatattctggatttctagattttttttttaattattttgtttattggatgactttgtactttccttttaaggttaatttcctgttcacagttcttttacctggtcatcacattgagtgcgtgctatggacatgacctctggagaagacttaattggtgttggcatcaatggaaagtcaaaaaccttagtttaacttggcaaagaggattccagttcttaacaaacaaatatagttgagatactcgttgcctctcctggaaaaggtggctgttttgtagagtggttgttttcattggcttaggacagattcttatgcagacctccccccgggaagtgagaaaacagttaatattttagtatgcagggcccagtccagaaaacaagccgttctaggtgtttccatggagaagcgtcaatacagggaattctcttaagtggggaattaagaaaaagagccaacagtggaaatctcttacctcaggtgtgactgggaggttgtaagaggaggccggttccctggtcatcagtgagaaccgtggcagcgctgcctcctaggagctaggaccatagagggttgtggtaaatggagccatgccaaggacaaannnnnnnnnnnnnnngatagaaatcgagccggggctgagtcagataccaaggcctccccaggcctccccaggtttgtcctcatagcctcaccagcacctcagagttccaaggtacctgaaagcagctggtgagggccctggggatggagattccctgggttgcagagcagagcaagagctgtnnnnnnnnnnnnnnnnnn

SEQ ID NO: 1108 - DNA, 1399 bp, Cricetulus griseus
  misc_feature (126)..(143): n is a, c, g, or t
gtagccgggggaacggccggcgcgcttgccggtgggcggaggcgagactccacagcagttctctgccggtcgcccgcgagtgcacccgccatgcacctgccgcccgctgccgcagtcgggctgctnnnnnnnnnnnnnnnnnntcccgcgcgcgtggcctcccggaagccgacaatgtgccagaggtgccgggcgctggtggacaagttcaaccaggggatggccaacacggccaggaagaatttcggcggcggcaacacggcgtgggaggagaagagtctgtccaagtacgaattcagtgagattcggctcctggagattatggagggcctgtgtgacagcaacgactttgaatgcaaccaactcttggaacagcatgaggagcagctagaggcctggtggcagacactgaagaaggagtgccctaacctatttgagtggttctgtgtacacacactgaaagcatgctgtcttccaggcacctatgggccagactgtcaggaatgccagggtgggtctcagaggccttgtagcgggaatggccactgcgacggagatggcagcagacagggcgacgggtcctgccagtgtcacgtaggatacaaggggccgctgtgtatcgactgcatggatggctacttcagcttgctgaggaacgagacccacagcttctgcacagcctgtgatgagtcctgcaagacatgctcaggtccaaccaacaaaggctgtgtggagtgcgaagtgggctggacacgtgtggaggatgcctgtgtggatgttgacgagtgtgcagcagagaccccaccctgcagcaatgtacagtactgtgaaaatgtcaacggctcctacacatgtgaagagtgtgattctacctgtgtgggctgcacaggaaaaggcccagccaattgtaaagagtgtatctctggctacagcaagcagaaaggagagtgtgcagatatagatgaatgctcattagaaacaaaggtgtgtaagaaggaaaatgagaactgctacaatactccagggagctttgtctgcgtgtgtccggaaggtttcgaggaagacagaagatgcttgtgtacagacagcagaaggcgaagtggcagaggaaagtcccacacagccaccctcccatgaggatttgtgacgggcatccaggttcagaagctggactctcacccttttaagttattgagaggacatcctatagaaaatgtggcccatggacatcaaccccatttctccaggaagttttggaggaagaagctgcctgctttgaaacagtagatactcacttggccctttaaaacgctgcatttcttggtggttcttaaacagattcgtatattttgatactgttctttataataaaattgatcattgaaggtcaccaggaaca

SEQ ID NO: 1109 - DNA, 714 bp, Cricetulus griseus
agggggtggtccacacccgcccggggaggaagatgtcaaacgtacgagtatctaacgggagcccgagcctggagaggatggacgccagacaagcggagcaccccaagccctccgcctgcagaaacctcttcggcccggtcaatcacgaagagctcacccgggacttggagaagcactgccgagatatggaagaagcgagtcagcgcaagtggaatttcgactttcagaatcacaaccccctggaagggagataccagtggcaggaggtggacaagggcagcttgccggagttctactacagacccccgcgcccccccaagggcgcctgcaaggtgccggcgcaggagagccaggatgtcagcgggagccgccaggcggtgccttcaattggctcccaggcatactctgaggaccggcatttggtggagcaaatgcctgatccgacggacagtccagcggggttagcggagcagtgcccagggatgaggaagcgacctgctgcagacgattcttcttcgcaaaacaaaagggccaacagaacagaagaaaatgtttcagacggttccctgaacgctggctctgtggagcagacgcccaagaagcccggcctccgaagacaccagacgtaaacagctccaagcagctccgaattaagaatatttccttgtttattagatacatcactgctttatgaagcaaggaagatatacatgc

SEQ ID NO: 1110 - DNA, 2515 bp, Cricetulus griseus
  misc_feature (79)..(93): n is a, c, g, or t
  misc_feature (1075)..(1097): n is a, c, g, or t
ctcctgtcccgaatgacgttgggcaacaaagatggcggcggggaccagcaattactgggaagatctcaggaaacaagcnnnnnnnnnnnnnnntgaacttgacctgaaactagtttccttcagtaaactgtgcacaagttacagtcacagcagcgcccgagatggaggacgcgataggtatagttctgacacaacacccctattaaatggatcaagtcaagacagaatgtttgagacaatggcaattgaaattgaacagcttttggcaaggcttacaggggtaaatgataaaatggcagagtataccaacagtgcaggggtcccctcattgaatgcagcactgatgcacacgttgcagcgacatagagacattctacaggattatacacatgaattccataaaaccaaagcaaactttatggcaatacgggaaagggaaaatctcatgggatcagtacgaaaagatattgagtcatataaaagcgggtctggagtaaacaacaggagaactgaactgtttttgaaagaacatgaccaccttcgaaactctgatcgtctgatagaagaaacaataagtattgctatggcaacaaaagaaaatatgacttcacagagaggaatgctcaagtcaattcacagcaaaatgaacactctggccaaccgttttcctgctgtaaacagcctgatacaaaggatcaaccttaggaagcgacgggactcgctcatccttggaggggtcatcggcatctgtaccattctgttgctgctgtatgcgttccactgaaaggacagccccaggactctgcccaccgccttcatgccctgatctggagtggggaaatgaggaaggagaaaactgccctggctatgagcctggtagccagatgaattctaaactgcacccatgactcggacctggtcagactgagctgaagccacagttttcctgtgctatcttttctaatacacattactctgttttttaattttaaaaacaacaaaaggttttcagtcgcttgtgtctccctaggaggtaagcaagcagaggccgagaacctgggcttcagtgactggnnnnnnnnnnnnnnnnnnnnnnntcatagctggactcctcacagtaccaggctctccacatccaaagatggctttgctttcagccacgagattgggtgtgaataaaaataattcttgtccttttatttaacacttgtgatgagaagtcagctgtcctttgctgatactcggtgatctagattctcctctgtgtccctaattcttggtagtcaagaaaaattccattttgcgacaattttgtcagatgctgatagaccagcttcatcacatgtgaggttgtctgaaatggaaagctctgtagaaagggtgtgtcttttctgtttcagttgtgagcactaggtcagctgtgcggctggaaacgtcaagaatgcagatcttgcactgaggagctggacattgctcattagttctcccattgggttagtatatgcttctacgtggtaaaatcacattaccactggacagacaaacagccagtgtctgtcattgccctcagtggtccctcatcctgtgaagattaatattaggaactgagggaggggactgtggctctcagtgagatctgctcacgagccacatgtgagaagacactgaagggtggctctccatgtcattccatatgacagtgctcttcatcctggatcaaaggctttattactgtagcctgattcgaaggaactctgccctgtgaggacctatcattcctcatctgttaggctctacacccccaagccatggtcccaccattgaaggtgcctgtgactcctttccacctatttattgctatggacagtgacagagattaagtgcttttctaggttagccatttcttagcatctgaatttgataatttgtcttactgagctaacagatattttaaagacatccagcgtttttgctcaccgagagagatggctgctagtccccgctggcacatcctctggcaccacaggcaatgagagggtgttagggtggagctcttcaccacctcatggtgtggggatggtgcgctgggcggacttgatacacttaatgctcatggatagactgacatcggtctgggactgactgagaggtttgtcttctggtgttgaagtgttagtacattctgggtatgaaaggcattcgatatatttttcttaattatggggtttatttttctaaatatgggttaatcagcttgttgactgggcatgcccttaaaaggaatttaaatttcccactgtggaccttaaagaatcagggaattttgtttgttaaattctctttgggagaacagaacttctcttccctgaccactttattatctttgatttttttcaaagggcctcgattggtggttgtgcctcagctagactttatgggactttggttgttatatagtgggcatatataaagcctgaagtatactaaataaagttatttatttaaatataaaaaa

SEQ ID NO: 1111 - DNA, 434 bp, Cricetulus griseus
tggtgggttgagggagaagtaaccactgaggagggtgaagctggtgagagtgggctctgagagagtggggaggggcaaggccagtgtggggctgataagaggggtacagaaaatggcatctcaccagcattgactcccccagggttacaggatgaccaggacctccaggctcttctgaaaggcagccagctcctgaaggtcaaatccagctcatggcggagggaacgcttctacaagctacaagaggactgcaagaccatctggcaggagtcccgcaaggtcatgaggtccccggagtcccagctgtgtgagtgccgtgggtctcgtagtggtcggggggcacaaggtagggtggagaccaatcatggactgtgaccacaggcgggccatgcatgaaatgagaaccgaaaggaagaatcttaggctggttgggg

SEQ ID NO: 1112 - DNA, 983 bp, Cricetulus griseus
actagtagagcccgactgtgtctaacctgctgggctggccctggtcagtagaggggccaggaggctctcatagctataggggccccaaagtccagtgtggcctggaggatgtgtgacctctccctatctcaggcgccaggctccggaacggtgttgtcctgagaggcctgttctatctggtcgtctggtacctcatttcttcattcctgtgaccctggacctaggtcctagctgtccttcctagcccaagatttctgcctctgtctccccgtgcgttcccactctgccactatgggtcgtcctatgccctccctatactgtgccttcctccttttagtctccactcccctgccctcctgcccttctcagcggaccctcggtctgagcccccagtctggctgtgaccctaggccgggctcctcgctcttgtggccttggctgtgtcagagacagtcctttgtctcacagtctgttctgctgtcgaccccctccccctgcagtctccattgaggacatccaggaagtaaggatggggcaccgcacagaaggcctggagaagtttgcccgtgacatacccgaggatcgctgcttctccattgtcttcaaggaccagcgcaatacactagacctcattgccccgtcatcagctgatgctcagcactgggtgcagggcctgcgcaagatcatccatcactcgggctccatggaccagcggcagaagctgcaacagtatccttttgggggcagagggtcatggctgggtgtggaatgtgtgtcggtcattttgtgcagctcttaacaaaataccagaatgtattagttacttttctgattgctgggatacttgacaaaagcaaatcaagaagaagggtttattatcatggtttgagagaatgctgtccatcatggcggaagaggcagtaggagcaccggagacagccagtcacattgtgtctacagtcaggaagcagagtgctgggccc

SEQ ID NO: 1113 - DNA, 5679 bp, Cricetulus griseus
  misc_feature (567)..(586): n is a, c, g, or t
  misc_feature (625)..(669): n is a, c, g, or t
  misc_feature (1561)..(1601): n is a, c, g, or t
  misc_feature (3625)..(3683): n is a, c, g, or t
  misc_feature (4170)..(4191): n is a, c, g, or t
  misc_feature (4442)..(4466): n is a, c, g, or t
  misc_feature (5622)..(5637): n is a, c, g, or t
gaattcttcaaaaattccactgtccttttttttttaacacacccataaagttcattatctttgtttgactctgttctctaattttgaggactgtgctaggatgcccccccccccccgcccccagttcctcagagtctgcaaggaggaaagacgggtgaggtagtacggggccgagatgccccagtcatgatggcttggtccgggctttgggctttcgtgatctatttccactttctgatcagtggctggaaatctgcgcttctgtacattaagcttcaagcactggaggcaggctgactggtgatggtcgagaaacagagggcatgctttgcagtgataatggtggtgctggcattagcaccgggagagatggtccatcagctgggggcgtaattgacaggtttccttctctgagcctaaattgtctacagtgaaggtttttatagtaaatattttcaaacatcaggtttcagaatgagcaaacagaaaaaacaaggcctctagccgggcctggtggtacagtcctgtcatccgagctgctcaggtagctgaggcaggaggataacnnnnnnnnnnnnnnnnnnnnctaaagaactggctggtcggtggtggcgcacacctttgnnnnnnnnnnnnnnnnnnnnnnnnnnnnnnnnnnnnnnnnnnnnntgaggacagcctggtctacaagagcgagttccaggacagcctccaaagccacagagaaaccctgtcttgaaaaaccaataaaataaaataaataaataaaaatgagtttacattaatctgggtagtttcaggagctcctgacttaaaatacaaagtaaagaggactggggtggagtgcggtgtaaggccctgcgttcgttcagtccctagtcccaatcaaaccaacaagcaagaaaaggagggcagaggacaccccagaaggaaggcgtccaggtccttcctctgcttcctggccatccggcctgcaggacactgccccacaggtggctgtggcttcacatggctgggattctgtgggcatcaggcttctgtgtgttttcctaactgcttgcccagctggattcactcctgcttgcggaaggctgacaaaaacaaggacaacaagatgaacttcaaggagctgaaggacttcctgaaggaactcaacatacaggtggatgacagctacgccaggaagatcttcagggtgagctacctcccagtggctgtggggcctcggtcctggccgtgggcctgggctgagcccatgggctgtgctgcctttgcaggaatgtgaccactcccagacagactctctggaggatgaggagattgagaccttctacaagatgctgacccagcgggcggagattgaccgtgtctttgcagaggctgcaggatctgctgagaccctgtcagtggagaagctagtcactttcctgcagcatcagcagcgggaggaggcggcaggcccagcactggctctctccctcattgagcgctacgagcccagtgagaccggtgagggcccagcctcccagagccacaaggctgggagactctgatgaaactnnnnnnnnnnnnnnnnnnnnnnnnnnnnnnnnnnnnnnnnncagaagtgctagagggagccacccccagggctgcagatcagtgtgtgggtgtctatcccatgtgagagctccagtgtttgccctgtctggttttcacttcccttcagacccttcttcaaggggcgttgggtgtccctatcccaagacgtagaaagaagcagctggtgaagcctaggtcattgttactaccttctttttttctgctctggatgcagctttgagacatgacctacagaagacacagccctgctcaccatttccaggccagcctgtcagctcagtgagacccaggctcagagtacagagttaaagaggactagggatacagcacaggggtagagtgcttccctgagagcctgcattcaactctgaggcaatgtcacccagcttggaggcatttagaaaggaaggaaggaaaagagacagggcctcaccacactgtaaccacaatctcactgggagcctgagacgtccgctccccagggttccagggcgctagctgaaggcgggtgggcaggcagagtggagaaaaggcttgtctttccacagtggttaggcaactagctctgactggaaaccttggcttcttcctacctagccaaggctcagaggcagatgaccaaggacggcttcctcatgtacttgttatcagccgatggcagcgccttcagcctggcacaccgccgtgtctaccaggacatggaccagccactcagccactacttagtgtcgtcttcccacaacacctacctgctggaagaccagctcacagggcccagcagcacagaggcctacatccggtgcagtcccgggggcagaactgttaggggcgagtcagggtgggacctgggacaagacctggagggccctagcctacctgtcaccactccctgcagggctctgtgcaaaggttgtcgctgcttagaactcgactgctgggatggtcccaatcaggaacccatcatctaccatggttacacttttacgtctaagattcttttctacgacgtgctcagggccatccgcgactacgccttcaaggttgggtgtgcccatgggagtgaggagaggatactagggatggccattccttctaatgcatcttggggcttctaggcgtccccctaccccgtcatcctgtccctggagaatcactgcagcctggagcaacagcaagtgatggcgcgtcacctgaaggccatcctggggcccatgctgttggaccagcccctggatggggtgaccatgagcctaccctcccctgaggtacagagcgggtaccctgaaggcagggaagccaacctggctgggaggcctagatgggtcttaaccagttagcggtctgtccccagcaactgaagggcaagatcctgttgaaagggaagaagtttggagggctgctgcctgctggaggagaaaatggacccgagactaccgatgtgtccgacgaagatgaggccgccgaaatggaggacgaggcagtgcggagccaagtgcagcagaagtccaaggttctaggggaagctgacggggatggggtggcccgagtccttcccgctcccagtccatgggacagttgcctcgtcttaatttttctatggctgccattcagactttctgccccctctctctgtctgtctcctctctctctctctctgttgtctgggtttctggtgctcagtgcccaccttgtcctaccctctggctctaaccggggcctcctcgtggcctccaggaggataagctaaacgtggcgccggagctctctgacatggtcatttactgcaagagtgtccacttcggtggcttctccaatcctagcacctctgggcaggcattctacgagatggcttccttctctgagaaccgtgccctccggctgcttcaagaatcaggtgagcccctgctctcgcagacatttggtcctggccttctgaacttgtcaagaccaggcctgcccttcacccttgcaggggtcccaagttggtgttccctgctttgtgtctgggcagagctggcaagannnnnnnnnnnnnnnnnnnnnnnnnnnnnnnnnnnnnnnnnnnnnnnnnnnnnnnnnnnctgttctcaggaaataattttgtccgccacaacgtgagccacctgagcaggatatacccagctggtagaagaacagactcttccaactacagtcccgtggagatgtggaatgggggctgccagattggtacggaccggctgggctggagggaggttagaaagagaacccggccttgatgaaggggcccaaagccctggaggtcacgggagaggtctggggacctgagaaggtttggatgtggaccaagagctgagcatggaaattgcccggccagcaagtctgtctggtgtgcacgccagccatttgaattttgccatcagaaatggaacgtgtatttcagctgtgcttgcctggcattcatgacatcctaggttcaatcctctgcactgcggagatgggagtggtgtcacgcctgccatcccagcacttttaaggtagatgcaaggatgggtagggtgagtgggttaggtcttacttggctacatnnnnnnnnnnnnnnnnnnnnnntatgagaccctgactcaaaacccagcaaaacgggctggagagataaatgactcagtcagcaaaatgtctgccatacaaacatgaggccctgcgctgggattcctacccatgtaaagcaagaggagtgatgacatacatctgtagacacatctgtaatccctgcaccgagcaggcagagacatgctgctctctggagctagctcatggccagcccgcccagataaactggtgagctcggggttcagtagagnnnnnnnnnnnnnnnnnnnnnnnnngcaattgagaaagatgtcaggcattgacctctggcctccacatatgtgtaaagacaggcacacactcatgtgaacacacacttgtgttacacacacaaacacatagagcatgtagtcagtgtggtgggtcagttaggatgataggaaggcaggagacaccagaacatcttggatgctgcttcctggactacagcacactctgagcaggcggggccaggactctggggccagcccacagcttgcagctactctaatctaccaacagtggctctgaacttccaaaccccgggaccagaaatggatgtgtacctgggccgcttccaggacaacggagcctgcgggtatgtgctgaaacctgccttcctgagagaccccgacaccgccttcaacccccgtgccctgactcagggaccctggtgggcccagaagaggctccgtgtccgggtatgggcagacacagagggagggctgcctatgggggtccctcctgctcactgccatcccaggatgctcactgtccccacgtttccttaggtcatctctggacagcagctgccaaaagtcaacaagagtaagaattcaatcgtggatcccaaggtgatagtggaggtccacggcgtgggccaggacgtagccagccgtcagaccgcagtcattaccaataatggtacggtatgcgctggctgctttgggccaggctgctggtgctggcgaccttgctgttggtatagtgtttgtccttcctaggcttcaacccatggtgggacacagagtttgagtttgaagtggccgtgcccgaccttgccctcgtccgctttgtagtagaggactatgacgcctcctctaagaacgactttattggccagagcaccatcccctggaacagcctcaagcaaggtgagtattagaagcaggggggcagccaggagcagtgggaggagcctggcttctctcagcctgcccctcactacgccttgagtatcctctccgagtgaccagaactgtctgtccttcctgccagggtaccgccacgtccacctcttgtctaagaacggagaccagcatccatcagctaccctctttgtgaaaatctccctccaggactaagcctggggattgggtgagatccaccctgagtgggtcaagctgtgtccannnnnnnnnnnnnnnnagctttgtgtcgccgactgctgatgggagctttaggcctgga

SEQ ID NO: 1114 - DNA, 3816 bp, Cricetulus griseus
  misc_feature (184)..(205): n is a, c, g, or t
  misc_feature (2982)..(3055): n is a, c, g, or t
gggatgtttcgcttgtcggcggcgttgcagctgctgctgctagcggcaaccggggcccagaataaccacggtcaggtccaggttccgggggccaacattggacctttgctagggcaagctgaaggcggcagcccggcggggcagcagctgcttcagttatcgcagcagcagaagcagccgcctnnnnnnnnnnnnnnnnnnnnnnctgctttcccggcgggcgggcccccagcccggcggggcggagcggggcccggtgggactggcggaggctggaagctggcggaggaagagtcctgcagggaagacgtgacccgtgtgtgccccaagcacacctggagcaacaacctggcggtgctcgagtgcttgcaggacgtaagggagcccgagaatgaaatttcttcagactgcaatcatttgttgtggaattacaagctgaacctgactactgatcccaaatttgaatctgtggccagagaggtttgcaagtcaactatatcagagattaaagaatgtgctgaagaaccagttggtaaaggttacatggtttcttgcttggtggatcaccgaggcaacataactgaatatcagtgtcaccaatacattaccaaaatgacagctatcatcttcagtgattaccgattgatttgtggcttcatggatgactgcaaaaatgacatcaaccttttgaaatgtggaagtattcgccttggtgaaaaggatgcacattcacaaggtgaggtggtgtcctgtttggaaaaaggcctggtgaaagaagcagaagaaaaagagcccaagattcaagtttctgaactctgcaagaaagctattctccgtgtggctgagctgtcctcagatgactttcatttagaccggcatttgtattttgcttgccgagatgatcgggagcgcttttgtgaaaatacacaagctggtgaaggaagagtatataaatgcctttttaaccataaatttgaagaatccatgagtgaaaagtgtagagaagcattaactacacgccaaaagctcattgcccaggactataaagtcagttattcattggccaaatcctgtaagagtgacttgaagaaataccgatgtaatgtggaaaaccttcctcggtcccgggaagctaggctctcctaccttctgatgtgcctggagtcagctgtgcacagagggcgacaagtgagcagtgagtgccaaggggagatgttagattatcgacgtatgctgatggaagatttctctctgagccctgagatcatcctgagctgccgaggggagattgaacatcactgctctggattacatcgcaaagggcgaaccctccactgtctgatgaaagtaattcggggtgaaaaagggaaccttggaatgaactgccagcaggcgcttcagacactgattcaggagactgaccctggagcagattaccgcattgatcgagctttgaatgaagcttgtgaatctgtaatacagacagcctgcaaacacatacgatctggagacccaatgattctttcatgtttgatggaacatttatatacagagaaaatggtagaagactgtgaacaccgactcctagagctgcagtattttatctctcgggattggaagttggaccctgttttataccgaaagtgccagggagatgcttctcgcctttgccatacccatggttggaatgagaccagtgaacttatgccccctggagctgtgttttcctgcttatatagacatgcctaccgtacagaagaacagggaagaaggctttcacgagaatgccgagctgaagtacaaaggatcctacaccagcgtgccatggatgttaagctggatcctgccctccaggataagtgcctgatagaccttgggaaatggtgtagtgagaaaacagagactgggcaggagcttgagtgcctccaggatcatcttgatgacttagctgtggaatgcagagatatagtgggcaacctcaccgagttagagtctgaggatatccaaatagaagctttgctgatgagagcctgtgagcctataattcagaacttttgccacgatgtggcagacaaccagatagattctggggacctgatggagtgtctgatacagaacaaacaccagaaggacatgaatgagaagtgtgccattggagtcactcatttccagctggtacagatgaaggattttcgattctcttacaaattcaaaatggcctgcaaggaggatgtgttaaaactttgtcccaacataaagaagaaggttgatgtagtgatctgcctgagcaccactgtgcgaaacgatactctacaggaagccaaggaacaccgggtgtcactgaagtgccgcaagcaactccgtgtggaggagctagagatgacggaggacatccgtttggaaccagatttgtatgaagcctgcaagagtgacatcaggggctactgttctacagtgcaatatggaaatgctcagattattgaatgtctgaaagaaaacaagaagcagctgagtacccgttgccaccagaaagtatttaagcttcaggagacagagatgatggacccagaattagattatacactcatgcgagtctgcaagcagatgattaagaggttctgtccagaagcagattctaaaaccatgttacaatgtttgaagcaaaataaaaacagtgaattgatggatcccaaatgcaaacagatgataaccaagcgccaaatcacccagaacacagattaccgtttaaaccccgtgctaaggaaagcctgtaaagctgacattcctaaattctgtcacggtatcctgaccaaagcaaaggatgattcggaactagaaggccaagtcatctcctgcctcaagctgagatacgctgatcagcgcctgtcctcagactgtgaggaccagatccgcatcatcatccaggagtctgctctggattaccgcctggaccctcagctccagctgcactgttcagatgannnnnnnnnnnnnnnnnnnnnnnnnnnnnnnnnnnnnnnnnnnnnnnnnnnnnnnnnnnnnnnnnnnnnnnnnnacctgctcaagatcagaacagagctgtgtaaaaaggaagtgttaaacatgttgaaggagagtaaggcagacatttttgtggacccagttcttcacacagcgtgtgccttggacattaaacaccactgtgcagccatcacccctggccgagggcgtcagatgtcctgcctaatggaggccttggaagataagcgagtgaggttgcagccggagtgcaaaaagcgtctcaatgacagaattgaaatgtggagttacgcagccaaggtggccccagcagatggcttctctgatcttgccatgcaagtgatgacatctccctcaaagaactacatattatctgtgatcagtgggagcatctgcatattgttcctgattggcctgatgtgtggacggatcactaagcgtgtgacacgagagctcaaggacaggtagagctgcctgatcaccaaaggaactacctgcccagggcccagtttgtacagccttcctgtatagtgcaccctctcacttcgtccttctacgagtggcaccaacacccacwgtagagcagcatcaggtgccctctgcatcttcccatccagacttggccacatccgccgtgtcctcctcccacgctgccactgcagcattggcagctggctgctttggtggtagcctttgttggcgaagggtttacctgcctgtagacaattctgtcctaccaagagaactgccagtacttccagaaccgactcacctgacctgcaactcagattttttttt

SEQ ID NO: 1115 - DNA, 356 bp, Cricetulus longicaudatus
ttcacatcatgcttttatgttaaaatcttgcctgctatgacctatgcttggaggattacaagtgacctttaacggttgctgggaatgacttaaatatgttgatgaaatcagttcattggtaagatgtttcataggaaaaggtaaccttaaactaccaactgtgtttgaacagatgatgttttctacctcatgtgtccatattcattaaataaaagtatgtgctaaaagttcaggtctgaatataaatgaaatgggtttactttgtgcttacatgttaatctccacttggtcatcatttctcaatacttttgtgctattcctcaatgaactctcatgaacttctgtcttgttactag

SEQ ID NO: 1116 - DNA, 1046 bp, Mesocricetus auratus
  misc_feature (1028)..(1046): n is a, c, g, or t
cgaacggcgagcagcggcggcggcgcggagagtgcagcggaggtttttgctggtttcggaccccagcggccggatggtgaaatcctccctgcagcggatcctcaacagccactgcttcgccagagagaaggaaggggacaaacgcagcgccacgctccacgccagccgcaccatgccgctcctcagtcagcacagccgcggcggctgcagcagcgagagttctagggccgccctccattgctgtagtaacctgggtccggggcctcggtggtgctcctgatgtccctcacccacccctgaagatcccaggtgggcgagggaacagtcagcgggatcacagtctttcagctagcgtcctctactccgatgagcggctgaatgtgacagaggagccaactgctaacgacaagaccagggttctgagcatccagtccaggctcacggaggccaagcaggtcacctggagggcggtgtggaacggcggtggcctctacatcgagctcccagctgggccctcgcctgagggcagcaaggacagtttcgcagctctcctggagttcgcggaggagcagctccaggccgaccacgttttcatctgcttccccaagaaccgtgaggacagagccgccctactccgaaccttcagctttcttggctttgagattgtgagacccgggcatcccctcgtccccaagagacccgacgcttgcttcatggtctacacgctggagagagaggactaggtgccggccctgcccgtgtccctgtgcctctcccgggtttgtccacatgtcctgattgtgcagaataaacgctcactccattagcgggtgcttcttccgagctgaatgctgtgtttgtcacactcaagtgttggctttaattctaaataaaggtttctattttactgtttttattgctgtttaagatggtcaggtgacctgtgttagcgcagcctcctttgaagcctggcagagatagatagtgtcacctcccttggctcaaacccaataagtgatctcgctcannnnnnnnnnnnnnnnnnn

SEQ ID NO: 1117 - DNA, 314 bp, Cricetulus griseus
tctagagatgctgacgcgctgtgggtcgcccgcgccccacggaaccacacgatccagacggtgactaacctcactgggcagggcgcacgcactaggtgtctgtgggattagctgccggtgtggccaggtgtttgctccgccccctagttgttccgcggctgcgccctggactccccacgctggccactccttcgggggcgtggtcaatctaggtagtcactcccctccatgcttcgcttgggcctccgcgcgggtttgtgggtgttgtagtgcgcgtggtgctcgagccagaccgctgctgctggctgaaccag

SEQ ID NO: 1118 - DNA, 121 bp, Cricetulus griseus
aaccgagttcttttgccttcaaagtaccttcctgaggtcaggaaccaaccgtgtgtgtgctcctgccccagccgccttagagcacgtgttgcccgcaaggaaaccccactctccacgcctg

SEQ ID NO: 1119 - DNA, 4793 bp, Cricetinae gen. sp.
ctgggaggaaccggaaccagagaggatggccggggcgggctaccagcaccaccctccgggaggagcggccgttgggaccagcgcggtttccccaaccgctgcgggaccgggagaggattcatccgacagtgaagcggagcaggggggaccccagaagctgatccgcaaagtgtccacctctggacagatccggaccaagaccagtattaaggaagggcagctgctgaagcaaaccagctctttccaaaggtggaagaagagatacttcaaacttcgaggccgcacactttattatgccaaggactcaaagtccttgatatttgatgaagtcgacctctcagatgccagtgtcgctgaagcaagcacaaaaaatgcgaacaacagcttcacgataatcactccattccgaaggctgatgctgtgtgctgagaacaggaaggagatggaagactggatcagctctctgaagtcagtacagagcagagaaccctatgaggtggcccagtttaacgtggagcatttctcagggatgcataactggtacgcctgctcccatgcccggcccacattctgtaatgtgtgcagagagagcctctccggtgttacctcccacggcctgtcctgcgaagtgtgtaagttcaaggctcacaaaagatgtgcggtcagggcaaccaataactgcaaatggaccacactggcctccatcgggaaggatatcatagaggatgaggatggtgtcgccatgcctcaccaatggcttgaaggcaacttgcctgtgagtgccaagtgtgcagtctgtgacaaaacatgtggcagtgttctccgcctgcaagattggaaatgcctttggtgtaaagcaatggtacacaccgcctgcaaagatctgtaccatccggtctgtccacttggccagtgtaaagtgtctatcatacctccgattgcactaaatagcacagattctgatggtttctgtagagcgaccttttcattctgtgtcagccctctgttggtgtttgtcaattctaaaagtggagataaccagggagtaaagttccttcgtcgctttaaacagttgctcaacccggctcaggtgtttgatttaatgaatggaggacctcacttagggttaaggttatttcagaagtttgacaacttccgaattcttgtctgtggaggagatggaagtgtaggctgggttttgtcagagattgataaactgaacttgaacaaacagtgccagcttggggtattgcctttgggcacaggcaatgaccttgctcgagttcttggctggggaggttcctatgacgatgacacccaacttccgcagattctagagaagctggaacgagccagtaccaaaatgttggacaggtggagtataatgacgtatgaactcaaattgccagcgaaggcgtctctacttcctgaacccccagaagcatctggaggattttatatgacaatttatgaagactctgttgcgaatcaccttacgaaaatcctcaattccgatgagcatgcggtggtcatatcatctgccaagatactctgtgaaacagtgaaggacttcgttgccaaagtggagaaggcacaggacaaaacactggaaaatacagtagtagctgaagcggtggccaataaatgctcagtgctaaatgagaagctcgaacagctgctacaagccctgcacgcagacgctcaggccagtcgggtcccccctggggtcggccctgcgatccctgaagaagatgctgtagagtcctccagtgaagagtccttgggtgaaagcaaggaccagctcgtgaatgacattgcaaaaccctcctcccagaaagccgtaaagccccgggaaataatgctgcgggcaaacagtctaaagaaagcagtgaggcaagtcattgaagaagctggaaaagttatggatgagcagacggttcaaccctgtgaaccagttagtccgtcatgtgactatgatagcccagaagcagatgactctaaagacaatgataccaaagagtcaccagcagccaaatccacatctcaggctcctgaggcccaggcaattcgtggccatttccaaactgattctgtcgctggttcagctatggccaccaccaaagaaaatctccctgtgctcaacaccagaataatctgcccaggtttaagagcaggacttgccgcctcgattgctgggagttctatcatcaacaaaatgttgctggcaaacatcgacccttttggtgcaacaccgtttatcgacccagatcttgattcactagatggatactcagaaaaatgtgtcatgaacaattactttgggattggattagatgcaaaaatttcattagaatttaataataagagagaagaacaccctgaaaaatgcagaagccgaactaaaaacttgatgtggtatggggtccttgggactcgggagttgttacagagatcatacaaaaatctggaacaaagagttcaacttgagtgtgatgggcagtatattcctctacccagtttacaaggcatagcagtgttgaacatccctagctacgcaggaggcaccaacttctggggcggaaccaaagaggatgatatatttgctgcaccctcatttgatgacaagatcctggaagttgtcgccgtctttgacagtgtgcagatggcagtatcaagggtcattaagctgcagcatcaccggatagcacagtgccgcacggtaaagatcactatatttggtgatgagggagtccccgtgcaggtggatggtgaagcctgggttcagcctccagggatcatcaaaattgtgcacaaaaacagagctcagatgctaacaagagacagagcctttgagagcactctgaagtcttgggaagacaagcagaagtgtgactctggtaagccagttcttcggaccaacctgtacatccatcccgccgctgacctggcaacagaagaggtgtctcagatgcggctctgctcccaggcagcagaggaactcattactaggatttgtgacgcagccacgattcactgtctcctgggagcaggaactggctcatccgtaaatgcatgctctcatgccctgaacaaagccaacccccgcttcccggagagtctcacaagagacacggccactgaaatagccatcaacgtcaaggcgctgtataatgaaacagagtccttgctggttggcagggttcctttgcagttggaatctccccacgaagagcgggtgtccagtgccttacactctgtggaggtggagctgcagaagttaacggagatcccctggctttattacatcctccgccccaatgaggatgaggaacctcctatggattgcaccaaaagaaacagcaaaagcacagtctttcgtatcgtgccaaagtttaaaatggaaaaggctcagaaacagaaaacaagttcacagcctggacctggggataccgaaagtgggtcatatgaagcgaattctccagggaattaaagagcttgaaaggaaccctcccaacttggtctgaggtgtggtcataccggtgctatttcctggaagagaagtctcgggactcaatacagagttcttggaagcactggctgttctttcgatttactggtagataagcaccgctgaagcacctctctagatggattgtttgctgtgggtgaaagttttgatttgaggtattagaaaataagttttgtgccaaaaaaaaaacaacccaaaacccaatcccttccacaaagccattttattattgtgcaaacctgacatgctcgaaaatgcttgctgtagtgaagggttgggggagggggctaatgggggagacagttgccttgtttaaaggtggaattgcttgctcatcctcccttcttagaggtgggggccagcaggaggctcgttcctgtgtgctcctgcagctgtgttaacagtgtgcagctgaaacttctcaggcttggttagtgaaggctttggctccttcctagacacggttaggaggtgacgataggaattgtagtttgagtcttttcaccctaagttcccgttatccactggtcaaagaatacagtgagaccaacccatcacatactatgaatgaagcaaatgtcgtacacagtgttcctacccgagttgtctttctttttcttgcatgtcacaagaaatattgctgtagtgcttcagtagctttaatatctgttataatggaatttaatttattactacccaacttcccaagcactttctagctagttaagggcacttttcctcagtgtgaactctgaacatttgatctgtgccatgatcaaccaatgatatacatcttacacaaccaaatttatttgcctgtcccaagccataggtgtatgcactaagaggattgttgggtgttttcataagctttacatgttctcttgcctaacaaaacttactacaactttccaaacccaaatcctcgcattttgttcccagtttccttcattcaatttaataaccattttgagtttctgcttgaatttgtaagactgttgacacctaggaattgtcctaggcctcagctgagatttgcacctgaagcaattattgacatgaactccccaatggaagaaatttagttttgtttcttaagggctttttgtattattatctcacatacattttgataacctgtcaggtagacattattttccttttcttaaaccattatatgtcagtattgctcaatagaattatcaagtatttgaaagccaaaggtatagatgccaaaaaagtaaaaaaaaaaaaaactcgtgcc

SEQ ID NO: 1120 - DNA, 1421 bp, Mesocricetus auratus
cccctgcgccccgggcccgccaccctgggggtgctgctgggctccgactgcccgcatcctgccgtctgcgagggctgccagcggcccatctccgaccgcttcctgatgcgagtcaacgagtcgtcctggcacgaggagtgtttgcagtgcgcggcatgtcagcaagccctcaccaccagctgctacttccgggatcggaaactatactgcaaacaagactaccaacagctcttcgcggcgaaatgcagcggctgcatggagaagatcgcgcctacggagttcgtgatgcgggcgctcgagtgcgtgtaccacctgggctgcttctgctgctgtgtgtgtgagaggcagctgcgcaagggtgatgagttcgtgctcaaggagggccagctcttgtgcaagggcgactacgagaaggagaaggatcttctcagctccgtgagccctgacgagtctgactccgtgaagagtgaggacgaagacggagacatgaagccggcaaaggggcagggcagccagagtaagggcggtggggacgacgggaaggacccgagaaggcccaaacggccccggaccatcctcaccacgcagcagcggagagccttcaaggcttcttttgaggtctcctccaagccctgtcggaaggtccgggaaacgctggcagcagagacgggcctcagcgtgcgtgtggtccaggtctggtttcagaaccaaagagcaaagatgaagaagctggctcggcggcaccagcagcagcaggagcagcagaactcccagcggctgggccaagaggtcctgtcaagccgcatggagggcatgatggcttcctacacgccgctggcccctccgcagcagcagatcgtggccatggagcagagcccctgcggaagcagcgaccccttccagcagggcctcacgccaccccaaatgccaggtgaccacatgaacccctatgggaacgactccatcttccacgatatcgatagtgatacctccctcaccagcctcagcgactgcttcctcggctcctctgacgtgggctccctgcaggcccgcgtggggaaccccatcgaccggctctactccatgcagagctcctactttgcctcctgagagccagctgggccgcatggacgcttgggcctgggcctagggtgggaccacaggcctctgcagccagccggccccccagcccaccacccactcagactctacagacagccatacggtgccctcccctcggccagccggacctggctcaagtgcccactgggcacagccagacaggcagatgggtgcagcctgggcaggggttgtgtcctgcccacagagaccgcgtgactcctggggacccagagctctgggacagccactcacctcccagctctttgaccccatcacctcctctcccctccccatctctg

SEQ ID NO: 1121 - DNA, 2809 bp, Cricetulus griseus
  misc_feature (136)..(136): n is a, c, g, or t
  misc_feature (1197)..(1276): n is a, c, g, or t
tcagagaagttagggaggtcgagcagggaagggttggtagaaacctcgatcagatttcctttccgctcgtcctggtcgcttgggcccaggaggaacgtccctgcttgcgtctaggggcggacggtgaacgcgctgngcacggccccgccagggctggtagtttgcagaccgtccctgccgaggcccgctcgcccggcagccctgcggctcccgcggtggcggcagcggcggcggccccaggctcgatccaggccaggtagccgcgcctcaggctctgggggcgctgtgaccccgctcctggctgctcctgggacccccctgttccccagagcacggctgttggagagtgaccccgactgctgctgatggtgcctctgttgctcccctactagcaggagtgattcttcaccggaagtggactttggagaggggttcattagaccagaatggaagccaggcaaggaaatcagctgactcaggagccggagtgagagcgacacaccctccgccccagcctgcaccatgaacttgccttcaccttctgcacgttgagagccaagggaggggtacattgccagagagagatggctttctttactccctggaagttgtcctctcagaagctaggctttttcttggtgacttttggctttatatgggggatgatgcttctgcacttcaccatccagcagcggactcagcctgagagcagctccatgttgcgggagcaaatcctggatctcagcaaaaggtacatcaaagcactggcagaagaaaacagaaacgtggtggatggaccatacgctggcgtcatgacagcttatgatctgaagaaaacacttgctgtactactagataacatcttgcaacgcattggcaagctcgagtcgaaggtggacaatctcgtcaatggcacaggagcaaattctaccaactccaccacagctgtccccagcttggtatcgcttgaaaaaattagtgtggcagatatcattaatggagttcaagaaaaatgtgtattgcctcctatggatggctacccccactgcgaggggaaaatcaagtggatgaaagacatgtggcgctcggatccctgctacgcagactatggagtggacggcacctcctgctccttttttatttacctcagtgaggttgaaaattggtgtcctcgtttaccttggagagcaaaaaatnnnnnnnnnnnnnnnnnnnnnnnnnnnnnnnnnnnnnnnnnnnnnnnnnnnnnnnnnnnnnnnnnnnnnnnnnnnnnnnntgaggagttccggtggatgagacttcggatccggcgaatggctgatgcgtggatccaagcaatcaagtctctggcagagaaacaaaacctggaaaagagaaaacggaagaaaatccttgttcacctggggctcctgaccaaggaatctggcttcaagattgcagagacggcattcagtggtggccctcttggcgaactggttcagtggagtgacttaattacatctctctacctactgggccatgacatccggatctcggcttcactggctgagctaaaggagattatgaagaaggttgttggaaatcggtctggctgtcccactgtaggagacagaatcgttgagcttatttatattgatattgtgggacttgctcaatttaagaaaactctaggaccatcctgggttcactaccagtgcatgctccgagtgctagattcctttggaacagaacctgagttcaatcatgcaagttatgcccagtcgaaaggccacaagaccccctggggaaaatggaatctgaacccgcagcagttttacaccatgttccctcacaccccagataacagcttcctgggcttcgtggtcgagcagcacctgaactctagcgacatccaccacattaatgagatcaaaaggcagaaccagtcccttgtgtatggcaaagtggatagtttctggaagaataagaaaatctacttggatatcattcacacgtacatggaagttcatgccactgtttacggctccagcacaaagaacattcccagttacgtgaaaaatcatggcattctcagtgggcgtgacctgcagtttcttctccgggaaacaaagctgtttgttgggctgggattcccttatgagggtccagctcccctagaggccattgcaaatggatgtgctttcctgaaccccaagttcagccctcccaagagcagcaaaaatacagacttcttcattggcaagccgaccctgagagagctgacgtctcagcacccttatgcagaagtcttcatcggccggccacacgtctggaccgtggatctgaacaatcgagaggaagtagaggatgccgtgaaagccatcttaaaccagaagattgagccgtatatgccgtatgagttcacatgtgaagggatgctgcagagaatcaacgcgttcatagagaagcaggacttctgccatggccaggtgatgtggcctcccctgagcgccttgcaggtgaagctggctgagcctgggcagtcctgcaagcaagtgtgccaggagaaccagctcatctgtgagccatccttcttccagcacctcaacaaggaaaaggacttgctgaagtacagagtgacctgccaaagctcagaactgtacaaggacatcctggtgccatccttctaccccaagagcaagcactgtgtgctccaaggggatctcctgctcttcagttgtgccggggcccaccccacacaccagaggatctgcccctgccgggacttcatcaagggccaagtggccctatgcaaagactgcctatagca

SEQ ID NO: 1122 - DNA, 3883 bp, Cricetulus griseus
  misc_feature (2019)..(2098): n is a, c, g, or t
tcagagaagttagggaggtcgagcagggcaagggttggtagaaacctcgatcagatttcctttccgctcgtcctggtcgcttggacccaggaggaacgtccctgcttgtgtctaggggcggacggtgaacgcgctgcgcacggccccgccagggctggtagtttggagaccgcccctgccgaggtccgctcgcccgggagccctgcggctcccgcggtggcgggagcggcggcggccccaggctcgatccagcccagggagccgcgcctcaggctctgggggcgctgtgaccccgctcctggctgctcctgggacccccctgtcccccagagcacggctgttggagagtgaccccgactgctgctgatggtgcctctgttgctcccctactagcaggagtgattcttcaccggaagtggactttggagaggggttcattagaccagaatggaagccaggcaaggaaatcagctgactcaggagccggagtgagagcgacacaccctccgccccagcctgcaccatgaacttgccttcaccttctgcacgttgagagccaagggaggggtacattgccagagagagatggctttctttactccctggaagttgtcctctcagaagctaggctttttcttggtgacttttggctttatatgggggatgatgcttctgcacttcaccatccagcagcggactcagcctgagagcagctccatgttgcgggagcaaatcctggatctcagcaaaaggtacatcaaagcactggcagaagaaaacagaaacgtggtggatggaccatacgctggcgtcatgacagcttatgatctgaagaaaacacttgctgtactactagataacatcttgcaacgcattggcaagctcgagtcgaaggtggacaatctcgtcaatggcacaggagcaaattctaccaactccaccacagctgtccccagcttggtatcgcttgaaaaaattagtgtggcagttcaacaccccaactccataggatggtgctgcccacacttggaatgggtcttccctgtcagttaaacctctgtggaaacgccctcatagatacaaccagagttatatctccatggcaatcctaaatcatgccagactaacaactgaggattaaccaccacaatgacctaaggcttgacacccacaggaaggaaagacaaattggagctggaggagaggatgaatgtgctggcagctgaagagatggttcagtcaggaagatgcttgttaaacaagcatgaggacccgagttcaaaccccagaacacatgtaaaagagctgagtggagacagctcattggcctgcttcaggttctagcccagcgaaagatcctttctcaaaaaataaaatgcaccgcgcccacacacccccaaggcacagggaacattatagaagacgaagaaaggatgaggaagaggaggggtgccatgaaatgtgaccatccagatatggcatggcaatagaagccatggcagctgtggatactacactacactgtgccctccaactctctgtcatgggtaaaggaggtgcccatgaagccgccgttcctgtggagacactgatggttccaggagactatgccatttctttaatggtgtagccagtggggaccagttgggaaaagaggctcaaggggaaaggaagtgtggcaaaagagagtaaagggagtcaaatgtgatcacaatgcattgtctatgaaactgtcaaaaacaaagcaaaaaaactattggagagcagttggtgaagacacctgatgacaaaccctggcttcccacacagatatcattaatggagttcaagaaaaatgtgtattgcctcctatggatggctacccccactgcgaggggaaaatcaagtggatgaaagacatgtggcgctcggatccctgctacgcagactatggagtggacggcacctcctgctccttttttatttacctcagtgaggttgaaaattggtgtcctcgtttaccttggagagcaaaaaatnnnnnnnnnnnnnnnnnnnnnnnnnnnnnnnnnnnnnnnnnnnnnnnnnnnnnnnnnnnnnnnnnnnnnnnnnnnnnnnntgaggagttccggtggatgagacttcggatccggcgaatggctgatgcgtggatccaagcaatcaagtctctggcagagaaacaaaacctggaaaagagaaaacggaagaaaatccttgttcacctggggctcctgaccaaggaatctggcttcaagattgcagagacggcattcagtggtggccctcttggcgaactggttcagtggagtgacttaattacatctctctacctactgggccatgacatccggatctcggcttcactggctgagctaaaggagattatgaagaaggttgttggaaatcggtctggctgtcccactgtaggagacagaatcgttgagcttatttatattgatattgtgggacttgctcaatttaagaaaactctaggaccatcctgggttcactaccagtgcatgctccgagtgctagattcctttggaacagaacctgagttcaatcatgcaagttatgcccagtcgaaaggccacaagaccccctggggaaaatggaatctgaacccgcagcagttttacaccatgttccctcacaccccagataacagcttcctgggcttcgtggtcgagcagcacctgaactctagcgacatccaccacattaatgagatcaaaaggcagaaccagtcccttgtgtatggcaaagtggatagtttctggaagaataagaaaatctacttggatatcattcacacgtacatggaagttcatgccactgtttacggctccagcacaaagaacattcccagttacgtgaaaaatcatggcattctcagtgggcgtgacctgcagtttcttctccgggaaacaaagctgtttgttgggctgggattcccttatgagggtccagctcccctagaggccattgcaaatggatgtgctttcctgaaccccaagttcagccctcccaagagcagcaaaaatacagacttcttcattggcaagccgaccctgagagagctgacgtctcagcacccttatgcagaagtcttcatcggccggacacacgtctggaccgtggctctgaacaatcgagaggaagtagaggatgccgtgaaagccatcttaaaccagaagggatgctgcagatcggcactcggttctcatgcttacacagcaagcagccgagccatctcccccgtcttggcctcactctgggcagacgcctggaacaggaaagctcagcccaatcagcagagtcggcccgcagctccgctcaatccgcaactccgacccgcgcagcccgcggagctcccgccgccggtctgggcagcatgaggcgcgcggcgctctggctctggctctgcgcgctggcgctgcgcctgcagcctgtcctcccgattgagccgtatatgccgtatgagttcacatgtgaagggatgctgcagagaatcaacgcgttcatagagaagcaggacttctgccatggccaggtgatgtggcctcccctgagcgccttgcaggtgaagctggctgagcctgggcagtcctgcaagcaagtgtgccaggagaaccagctcatctgtgagccatccttcttccagcacctcaacaaggaaaaggacttgctgaagtacagagtgacctgccaaagctcagaactgtacaaggacatcctggtgccatccttctaccccaagagcaagcactgtgtgctccaaggggatctcctgctcttcagttgtgccggggcccaccccacacaccagaggatctgcccctgccgggacttcatcaagggccaagtggccctatgcaaagac

SEQ ID NO: 1123 - DNA, 2871 bp, Mesocricetus auratus
  misc_feature (62)..(62): n is a, c, g, or t
  misc_feature (1938)..(1955): n is a, c, g, or t
cggtcggggtgcgcaagtgggaggcctctccctcgggagcctgggagatccctgccgccagnaggggtcgtgccaccgccctcgcgggaaccccagctttgccccggagccttggcactttggtggtgctcgcagaccaaggcggtcgggatggatctgtcaccccgcaaccggccgctgctggagtcgtcgtcgctggacagcggcggctccctgagctcgctggactccagcgtcttctgcagcgagggcgaaggggaacccttggctctgggggactgcctcacggtcaacgtgggcggcagccgcttcgtgctctcgcagcaagctctgtcctgcttcccgcacacgcgcctgggcaagctggccgtggtggtggcctcctaccgccgcctgggagccctggctgccgcccccagccccctggagctctgcgatgatgccaacccggtggacaacgagtacttcttcgaccgcagctcccaggcgttccgctatgtcctgcactactaccgcacgggtcgcctgcacgtcatggagcagctgtgcgctctctccttccttcaggagatccagtattggggcatcgacgaactcagcatcgactcctgctgcagggacagatacttcagaagaaaggagctgagcgaaacgctggactttaagaaggacacagatgaccaggaaagtcaacatgagagtgaacaggacttctcccagggaccttgtcccacggtccgccaaaagctctgggacatcctggagaaacctgggtcttccacagcagccaggatctttggagtcatctccatcatttttgtggcagtgtccatcgtcaacatggccctgatgtcagctgagttaagctggctcaacctgcagctcctggagatcttggagtacgtgtgtatcagctggttcaccggggagttcatcctgcgcttcctgtgcgtgaaggacaggtgccgcttcctgcggaaggtgcccaacattatagacctccttgccatcttgccgttctacataactcttctggtggaaagcctgagcggcagccacaccacacaggagctggaaaacgtagggcgcctggttcaggttttgaggctcctcagggctcttcgcatgctaaagctgggaaggcattccacaggattgcgctcacttgggatgacgatcacccagtgctatgaagaagttggcctacttctcctctttctgtctgtggggatttctatattctcaacaatagaatactttgcggagcaaagcattcctgacacaaccttcacaagtgttccctgtgcatggtggtgggccacaacgtcaatgactacggtaggctatggggacattagaccagacaccaccacaggcaaaatcgtggccttcatgtgcattctgtcaggaatcttggtcttggccttgcctatcgccatcatcaacgatcgcttctctgcctgctacttcaccttgaaactcaaggaagctgccgtgagacagcgtgaagctctcaagaaactcaccaagaacatcgccactgactcgtatatcagtgttaacttgagagatgtctatgccaggagcatcatggagatgctccgattaaagggcagggagagagcaagtaccagaagcagtggtggagatgatttctggttttaaatttaccttctacttatttatagaacctatgcccatgtgactggactgctgaagccttgcttctgtggatgagtttcctgaacacttctcatcctcttcccggtgtattgattttctccgaatactaaacatctccttagcaactactgattattttgacacacctatcttcaacatagctaattaatacaaccaaaatcatttgggaaaagaaccacatgtctggattttcaaatattaattaatataatttcatacatcaaagtttaaagnnnnnnnnnnnnnnnnnntttcatacatcaaagtttaaagacccatgtgtcattgtttttaggttttcccacctttgcattttttttttactggaaattgaactgaacagcccagagtggggggggggaatgagtgaatgtttaaaaatatactgaacatcttttgggtatttagaaaatattctccaaatagattacctttttctctataaattaaagctgttgagtataacgataggctttgcaagcaaacactcaaccttggtggttatagagggtacctcatcttccatcaagtgctaatcactgggcccaaatggacagggctctgcctttcaccactccagttgcaagggacctcagactgctcagagtgcagtaggtgaggcttcaagtgcctagaaagcttcatcatcccagttaagtgcgatgtgtaaagaagaaagcagcatagtcatttgtgaaaagtagatggcttgtaaaatgtctcattacagatgaattatttaagttatgccttcaaaatcatgaaatcatgaatatggaaaagtgaagtcgttaagatcctaactttattcattgaaaagattggatagtctttttataagcgaaaatatgttgaaaggtatcgttagatgaacttgaagatctttttatttgttaaaaaatattgtggaaagctttctgattgtggaggtaaataacaaatgttcagactttgcaggtgctttgacagtgtttatggtaataatacgatgcctaaatgatgtggcatataattaaagccaaaagttttaaagctaagaaataaccctggttctaatataatagtaagtaatattttcaaaagtctaacaaaggattccctcattgcctactttcttgatgtatgcaataaagttcctaaagaaaataaaattggttctgggataga

SEQ ID NO: 1124 - DNA, 1900 bp, Mesocricetus auratus
  misc_feature (329)..(350): n is a, c, g, or t
  misc_feature (496)..(516): n is a, c, g, or t
  misc_feature (1172)..(1243): n is a, c, g, or t
ctcactctagccaggactgccgagggaaatcattgcaaaatgaagacggctttgattctgctcagcattttgggaatggcttgtgctttctcaatgaaaaatttccaccgcagggtgaaagctgaggactctgaggacaatggggtctttaaataccggccacgctattttctctacaagcatgcctacttctatccttctctaaagcggttttcagtccagggaggcagtgactcttctgaagaaaatggagacggtgatagttcagaggaagagggggaagaggagacttcaaatgaagaggaaaacaatgaagagtccgaggggannnnnnnnnnnnnnnnnnnnnntgagaacaccacactctctagtgtaacaactagctacggagctgagaccacaactggaacaggaaatatagggctagctgcgctccagctgcccaagaaggctggaaatgcagaaagcaaggctgcaaaaaagaaggaaagcgatnnnnnnnnnnnnnnnnnnnnngaaaatgaaaatgaagaagcggaagtagaagaaaacgagcaggtcaccaacggcaccagcacgaactccacagaggtgtacggtgggaacggcagtagcggaggatacaatggagaagaaggcgaggaacagagcgtcaccgaagcaggtgtagaaggaaccacagtgggcagggagcagatcagtgatggccccacgacagcagtccttatgaatgggtttcagtatacaaccccaccacctgaagcctatggcaccacctccccaccattcagaaaacccaccaccgttgagtactggggagaatatgaacaaacggggaacaatgagtacaatggtgagtatcaaatctatgacaatgagaatggggagcctcgtggggacaattaccgagcctatgaggatgaatacagctactacaaggggcgtggctatgaaggctatgatggccaagattactactaccaccagtgaagccccacaccgccggggagggggggaattacccattctgtcattgcatctggctaccatttattttcaaagttcaactcaggaaggtgcaatatatcaaatgtgcattttacaatgttgaatggtgctacagtcccagagcgatttctgcaaatgcttctatttgtaatggcttctttttnnnnnnnnnnnnnnnnnnnnnnnnnnnnnnnnnnnnnnnnnnnnnnnnnnnnnnnnnnnnnnnnnnnnnnnntggggctggatggaatgctttgaaatggtaactctacagtgtttgccctattgctaactgcccaaacatactctttgtacaagatagatcaaagagagatttagaaacgacactgtatacaataattgtgtattcctatatcatacccactatccaatactgtagtaggtttaattctcatcctcatgtatttatatggcctgtatgcacgggttttaccgtaaataaacatgcaattcttcaaatgtgttataactaagaaggaatggggaccatgggaaagcagagggctttaaggagggctgtacaagtcagctaaaaagcaggcttatttccatcagggtttaatactcagaggatctgaaaaccatctcagtgttctctcctcaataaatctgcatgactaaggtttgacaattgagggcagaatcagctatatacaccagggaataaaaacttcttagagttgccagatttaacaagcatagatccatggtgtgaaatgcccacttcagtttgaatttcagataaacaatgattggtttttaatgcaagtgttcccccccccatgaataattagtctctgtgaaatatctggaataaacttaacgctgaataaatgacatactttaatattcaactgtaaaaaaaaaaaaa

SEQ ID NO: 1125 - DNA, 1564 bp, Mesocricetus auratus
  misc_feature (527)..(596): n is a, c, g, or t
cacaagtgcagtgctgccacatctgcaggaaagcatgttgctagccacgtttaagctgtgtgctggaagctcctacagacatctgcggaacatgaaaggactgagacaccaagctgtgctggccattggccaggaactcaacagaagaacactgggagactccagccctggatggatcagtcaggttcggcgtcggagctctctgcttggttctcagctggaagcggcactctacagtgagcaggagctgtcctatatccagcagggagaggtggctatgcagaaggccttgagtatcctcagcaaccaggaaggctggaagaaagagaaccagcaggaaaacggggatgaggtgctgagtaaagtggtccctgatgtgggcaaggtatttcggctggaggtggtggtagaccagcccatggacagactctatgcagaacttgtggaccgcatggaggcaatgggagagtggaacccaaatgtcaaggagatcaaggtcctgcaaaagattgggaaagacacagtcnnnnnnnnnnnnnnnnnnnnnnnnnnnnnnnnnnnnnnnnnnnnnnnnnnnnnnnnnnnnnnnnnnnnnngtgccaagcgccgaggctccacctgtgtgctggcaggcatagccacacattttggggagatgcctgaacaaagcggtgttatcagagctgaacagggtcccacctgcatggtgcttcacccactggctgggagtccctcgaagactaaattcacttggctgctcagtattgacctcaaggggtggctgccgaaaagcatcatcaatcaggtcttatcacaaacccagatggagtttgccaaccacctgcgcaagcgcctggagtccagctctgcctctgaggcccggtgttaagactgtacccactacatcaacctgcatgccatcagcagcctcccgcaggaagcctgcaagtctgtttcaaatctccagttgatgactacgggaggggtagtacttatcagacactaggactgactggcgaaacatgaccatcaggaaattagcaatgaggctgagcagaagagagcctcagcctctcccacaagattagctgtgaagtgggctaagagatagacatgctaacacttttatgtaggcctgtgtatgctcacctaaaaaccctactcaaaacgcaagtagttagtgtgacaagggggggtgtttaggaactgttgtcttctgagctcaaagccactgcctgaagcagtgtgtgcacacagcaaggcttccccagggacttcagtgaccctctgttcctccataaaaggccaagaacatcaaaccactcacaaacagacccttccagagtacactccaagttctctctaaggagaaaggaaactaaatattacgttggcttccctacttattacatcacaataaagtaccacacatgaaatttcagcctatacttgtcaagtcctatggcacagaatctgtgctgggagccacagcttcatcagagctctggatcaagactgtgggttccaatttcctagttcattaaaggaacaaaacttcacattt

SEQ ID NO: 1126 - DNA, 1724 bp, Mesocricetus auratus
tggagcttctccgctccgcagcgggccatctgctgattgccatgtgggaacttgtggctctcctgctgctcaccctggcctatttcttttggtccaagtcaaagacgtgtggtgccaagtcgcccaagagcctcccattcctgccgcttgtgggcagcctgccgtttatccccagacatggccatccgcatgtcaacttcttcaagctgcaggaaaaatatggtcccatctattctcttcgtctgggttccacaacgacagtgatcatcggccaatatcagttggccaaggaagtgcttgtcaagaaaggaaaagaattctctggtcggccccacatggtgactctaggtctcttgtcggaccaaggaaaaggcatcgccttcgctgactctggtggctcctggcagctgcaccggaagctggcgctcagcagctttgccctgttcagggacggtaaccagaaactagagaagatcatatgtcagaaagccagctcgttgtgtgacttcctgctcacccacaatgaggagtccatagatctttccgaacctatcttcaactcaataaccaacatcatctgtatcatctgcttcggcatctcttatgagaacagggatccgatactggccaccattaagagctttacagaaggcatcctgaacagcctgggcaacgatcatctggtggacatattcccttggttgacgatttttcccaataaaactgtggacatgataaagaaaaatgttaaaattcgagatgaagttctaagtggaatattagaaaaatgcaaggagaaattcaacagtgactccatctccagcttgatggaccttctaatacaagccaagacaaatgcggacaacaacaacaccagtgaaggccagggttcaaatgcattttcagacatgcatatccttgccacaatagcagacatctttggcgctggcatagaaaccaccgcctctgtgttgagttggattattgcttttctgctgcataatcctgaagtgaagaagaagatccaaaaggagatcgaccagaatataggtttcagtcgcacgccaactttcaacgaccggaatcacctcctaatgctggaggccactatccgagaagtgcttcgtatcaggcctgtggcccccatgctcatcccccacagggcaaacagtgacatgagcattggtgagtttagcatccccaagttcacacccgtgatcatcaatttgtgggcactgcatcatagtgagaaggaatgggaccagccagatcggttcatgcctgagcgcttcctagacccaacgggaagccatcttatcacaccctcattaagctacctgccctttggagctggagcccgctcctgcatcggagaggttctggcccgccaggagctcttcctctttatggctcacctgctgcagaggtttgacctcgatgtcccagatgatgagcagccgccctgcctgaagggtaacgccaacgtggtctttttgatagaccccttcaaagtgaagatcacagtgcgccaggcatggaaggatgcccaggcagaggttaacacctggaggccataactaatgtcccctggtcctatattgtgcagctcacagcacaaaattagaggtgctactcctactgcctcctatagtcctcttccttcctgtcctgttttctggtttgcagcaatggagggtgatatgctaaattaaagattttccaat

SEQ ID NO: 1127 - DNA, 4119 bp, Cricetulus griseus
  misc_feature (1902)..(1923): n is a, c, g, or t
  misc_feature (3005)..(3035): n is a, c, g, or t
gcggcggagcgggaggggaaaggtacctgcagatgatgtccattgtctttggtatccaacatcttccgggctgatccatggtcactttccgggatggcagcaaggtgacttagctgaggatgaccctgactgaaaggctgcgtgagaagatatctcaggccttctacaaccatgggctgctctgtgcatcctaccctattcccatcatcctcttcacagggctctgcatcttagcctgctgctaccctctgctgaagctccccttgcctggaacaggacctgtggaattctctactcctgtgaaggactactcacccccgcctgtggactctgaccacaaacaaggagagcccagtgaacagccagagtggtatgtgggggccccagtggcatacatccaacagatatttgtgaagtcatcggtatctccctggcacaaaaatcttctggcagtagatgtgttccgattgcctctgtcccgggcattccaactggtggaggaaatccggaatcacgtactgagagacagctcagggaccaagagcctggaggaagtttgccttcaggtgaccgacttgctgccaggactcaggaaactccgaaacctacttcctgaacatggctgcctgctgctgtcccctggaaacttctggcagaatgactgggagcgattccatgctgaccctgacatcattgggactatccatcagcatgagcccaaaactctgcagacatcagccacactcaaagacctgctgtttggtgtgcctgggaagtacagtggggtgagcctctacacaaggaagaggacggtctcgtacaccatcaccctggtcttccagcgctaccatgccaagtttctgagcagcctacgtgcccggctcatgctcctgcaccctagccccaactgcagccttcgggccgagaacctggtccacgtgcacttcaaagaggagattggcattgcggagctcatccccctcgtgaccacctacattatcctgtttgcctacatctacttctccacacgtaagatcgacatggtcaagtctaagtggggactcgccctggcagctgtggtcacagtgcttagctctctgctcatgtctgtggggctctgcactctctttggcctgacacccacactcaatggcggtgagattttcccatacctggtggtggttattgggttagagaatgtgttggtgctcaccaagtcggttgtatcaaccccagtggacctcgaggtgaagcttcggattgcacaaggcttaagcagtgagagctggtccatcatgaagaacgtggcaactgaactgggcatcatcctcattggctatttcacccttgtgcctgctatccaggagttctgcctctttgctgttgtgggcctggtgtctgacttcttcctccagatgttctttttcaccactgtcctgtcgatcgacattcggcgaatggagctagcggacctgaacaagcgtctgccccccgagtcctgcctgccctcagctaagcctgtgggaaggccagcacgctatgagagacagctagctgttcggccggccatgccacacaccatcacactgcaaccgtcttccttccgaaacttgcggctccccaaaagactgcgtgtcatctacttcctggcccgaactcgcctggcacagcgcctcatcatggctggtaccgttgtttggattggcatcctggtatacacagacccagcagggctgcgtacctacctcgctgcccaggtgacagagcagagcccactgggtgagggctccctgggccccatgcctgtgcctagtggagtgctgcctgccagccgcccggaccctgccttctccatcttcccacctgacgctcctaaactgccagagaaccagacagtgccannnnnnnnnnnnnnnnnnnnnnctccagcagagggagtccatgacagccgagccccagaggtgacttgggggcctgaggatgaagagctgtggaggagactgtccttccgccactggcccaccctcttcaactactacaacatcacactggccaaaaggtacatcagcctgctgcctgtcatacctgtcacactgcgcctgaatccacaggaggccctggaggggcggcaacctcaggatggtcgcagtgcctgggccccacctgagtctttgcctgctggcctctgggaggctggacctaaggggccaggtggaacacaagcccatggcgacattaccttgtacaaggtggccgcacttggcctggcagcgggcatcgtccttgtgctgctgttgctctgcctctaccgggtgctgtgcccgcggaactatgggcagcccggtggtggtgcgggcaggcggaggcgcggagagctaccctgcgatgactacggctacgcgccgcctgagacggagatcgtgccgctggtgctgcgcgggcacctcatggacatcgagtgtctggctagcgatgggatgctgctagtgagctgctgcttggcgggccaagtctgcgtgtgggacgcacagaccggggactgcctcacgcgcatcccgcgcccagggtcgcgccgggacagctgtggaggcggagcttttgaaactcaggagaactgggaaaggctgtcggatggcggcaaaactagcccggaggagcctggggagagccctccgctgcgacaccgcccccgagggcctccacagcctgccctcttcggggaccagccagacctcacctgcttaatcgacaccaacttctcagtgcagctgcccccggagcccactcagcccgagcctcggcaccgggcgggctgcggccgcgccagggactctggctatgacttcagccgcctggtgcagcgtgtgtaccaggaggagggcctggccgctgtgcgcatgccggccctgcgcccgccctctccaggctccccgctgccccaggcttctcaagaagacggggctgcgcccgagaagggctcccctcctctggcctgggcccccagnnnnnnnnnnnnnnnnnnnnnnnnnnnnnnncaaggcaacctcatcgtggttggacgaagcagcggccggctggaggtgtgggacgccattgagggggtgctctgctgcagcaacgacgaggtctcctcgggcatcacagcccttgtcttcctggacaggaggattgtagctgctcggcttaatggttcccttgatttcttttccctggagacccacacttccctcagccctctgcagttcagagggaccccagggcgaggcagttctccttcctcatctgtgtacagcagcagcaacacagtggcctgccatctgactcacacagtgccctgcgcacaccaaaaacccatcacagccctgagagctgctgccgggcgcctggtgacagggagccaagaccatactctaagagtcttccgactagaggactcgtgttgcctttttaccctgcagggccactcaggggcaatcacaactgtgtacattgatcagaccatggtactggccagtggaggacaagatggagccatctgcctctgggatgtactcacaggtagccgggtcagccatacattcgctcaccgtggagatgtcacctccctcacctgtaccacttcctgtgtcattagcagtggtttggatgacctcatcaatatctgggaccgcagcacaggcatcaagctttactccattcagcaggatctgggctgtggtgcaagcttaggtgtcatctcagacaaccttctggtgactggcggccagggatgtgtgtccttttgggacctaaactacggggacctgttacagaccgtctacttgggcaagaacagtgaggcccagcctgcccggcagattctggtactggacaacgctgccattgtctgcaactttggcagtgagctcagcctagtgtatgtgccctctgtgctggagaaactggactgagggcaggttgaccatacaacccactcgcccccacccagagtggggcctgtgggcagcaattctttggacctagactggagacaagagctaggcatctcctttgcagctgtctctaaactgttgtctcctgactgtaatattaaacttttttaaaaaccaccaaaaaaaa

SEQ ID NO: 1128 - DNA, 834 bp, Cricetulus griseus
  misc_feature (814)..(834): n is a, c, g, or t
ggaagatggcggcggccgcggagctgaagctgctggagaagtctctgggactgaggccggggaataagtacagcgctcagggcgagcgacagattccagttctacaaacaaacaatggtccaagtctaacgggattggctaccattgccacccatctagtcaaacaagccagtaaagagcacctgctggggagcactgcagaagaaaaggccttggttcagcagtggttagagtacaggatcacccaagtggacggacactccagtaaagaagacacccacaccctgctgaaggatcttaattcttatcttgaagataaagtctaccttgcaggatataacatcaccttggcagatatcctactgtactacgggctccatcgctttatagttgacctgacagtgcaagaaaaggagaaatatcttaatgtgtctcgctggttttgccacattcagcattacccagacatcaggcaacatctgtctagtgttgtcttcatcaagaacagactgtatgctaactcccactagaagttcctgctgggcagcagcaagattagaagtgtaaaatgtattttggaccatggttctaatgtaaattaatgtgatgtcattgtttctttgttaatgttggtagaatttttaacatgtaaactcaagtctgaatgttttatttgtcccttagttgaaggtttgcagttttttaatgtaaaaattcaactgttattcaagcaaatcacgattagattataaattatctcatatttataggtgaaatttattttaataaaatttgcttatcagtggcagaaacnnnnnnnnnnnnnnnnnnnnn

SEQ ID NO: 1129 - DNA, 1321 bp, Mesocricetus auratus
  misc_feature (130)..(187): n is a, c, g, or t
gatttctgtctgtccaagtccaagcaccatccctgtcttaaccccaagcagaaagaatgaagcacattatcactccatatgaacacaccaatgacacagcaagaaacaattcagattgccctgatgtagnnnnnnnnnnnnnnnnnnnnnnnnnnnnnnnnnnnnnnnnnnnnnnnnnnnnnnnnnntgtcctcctggctgtggtcaagaataagaacctccagtgccccatgtactttttcatctgcagtttggccatttctgacatgttgggcagtctgtacaagatcttggaaaatatcctcatcatgttcagaaaccggggttacctccagcctcgtggcaactttgaaagcacagcagatgacatcattgactgcatgttcatcctctctttgctgggctctatcttcagcctgtctgtgattgctgctgaccgttacatcaccatcttccacgccctgcaataccacagcattgtgaccatgcgccgcaccatcatcaccctaacagttatctggatattctgcacagggagtggcatcgccatggttatcttctcccaccacgtccccacggtgctcaccttcacgtcactcttccctttgatgctggttttcatcctatgtctctacattcatatgttcttgcttgcccgctcccatgctagaaagatctctactcttcccagagccaacatgaaaggggccatcacactgactatccttcttggagtcttcatcttctgttgggccccctttatcctccatgtcctcttaatgaccttctgcccaaataacccttactgtgtttgctacatgtctctcttccagatcaatggcatgttgatcatgtgcaatgcagtcattgacccctttatatatgcctttcggagcccagagctcagggatgcattcaaaaagatgttttcctgccacaggtatcagtagactttttgatccctgatttaaataatgtaaagagaccaacacggcatgacagtctgacaagtgatgatgcatcttagcagcctttctttctttaatagatggagtcaatcaattaaactgactagtgtttagcatagctggctttctaatgaagtattactgcagctgcaaactttatattgtatctagagagatgaaatggtaggctaaatagacgtatcgagtacacatcaatacaaatgtgaggatttggggttaagcaagtatttgttcttctgtgggtacctggaaaactgtcctggaaggcctttccaggtcagaaaccatgacaaccaattctccaactaattaaatgtgttggttagattcct

SEQ ID NO: 1130 - DNA, 9046 bp, Mesocricetus auratus
  misc_feature (26)..(104): n is a, c, g, or t
  misc_feature (587)..(716): n is a, c, g, or t
  misc_feature (1073)..(1113): n is a, c, g, or t
  misc_feature (1169)..(1217): n is a, c, g, or t
  misc_feature (1253)..(1340): n is a, c, g, or t
  misc_feature (1600)..(1629): n is a, c, g, or t
  misc_feature (1669)..(1721): n is a, c, g, or t
  misc_feature (1873)..(1982): n is a, c, g, or t
  misc_feature (2049)..(2106): n is a, c, g, or t
  misc_feature (2489)..(2509): n is a, c, g, or t
  misc_feature (2598)..(2654): n is a, c, g, or t
  misc_feature (2690)..(2714): n is a, c, g, or t
  misc_feature (2956)..(3009): n is a, c, g, or t
  misc_feature (3083)..(3098): n is a, c, g, or t
  misc_feature (3149)..(3201): n is a, c, g, or t
  misc_feature (3247)..(3267): n is a, c, g, or t
  misc_feature (3578)..(3611): n is a, c, g, or t
  misc_feature (3618)..(3642): n is a, c, g, or t
  misc_feature (4012)..(4042): n is a, c, g, or t
  misc_feature (4606)..(4630): n is a, c, g, or t
  misc_feature (4912)..(4939): n is a, c, g, or t
  misc_feature (5062)..(5128): n is a, c, g, or t
  misc_feature (5159)..(5194): n is a, c, g, or t
  misc_feature (5239)..(5264): n is a, c, g, or t
  misc_feature (5367)..(5430): n is a, c, g, or t
  misc_feature (5486)..(5542): n is a, c, g, or t
  misc_feature (5785)..(5814): n is a, c, g, or t
  misc_feature (5834)..(5863): n is a, c, g, or t
  misc_feature (6156)..(6210): n is a, c, g, or t
  misc_feature (6219)..(6255): n is a, c, g, or t
  misc_feature (7151)..(7165): n is a, c, g, or t
  misc_feature (7390)..(7465): n is a, c, g, or t
  misc_feature (7486)..(7503): n is a, c, g, or t
  misc_feature (8685)..(8784): n is a, c, g, or t
  misc_feature (8852)..(8866): n is a, c, g, or t
  misc_feature (8892)..(8929): n is a, c, g, or t
gagctcaaatgtgccttgttccagannnnnnnnnnnnnnnnnnnnnnnnnnnnnnnnnnnnnnnnnnnnnnnnnnnnnnnnnnnnnnnnnnnnnnnnnnnnnnnttaaggttggggtgtctccgacgacgggcaacctttgggaagacccctcccacctaagacaggggttcaaggtcccccaaagacgggaaaaggagggtgaccctacttgacttaagccaggagtgcctcatttgaaaataaaaaggggtgaattgtgggaacaccagaccttgagcagagacccacttccccttctgcctgggagtaggcagctgtaagacaatgtttagtaaaaacatgtttactaaaaacgatacaatgcccggggcaataagttcctggaaaaggccttcccacggaaaccgccctaacctcgaccttgtccaaagactaaccgcaccttcaaaatccacacacatccacctctgggggcagagcagaaccagccagggtagaggagagagcagaagcttctctggtgggagcttttcttcggaggttttcttgaaccttttttggagcctgtttaaagttttctttacnnnnnnnnnnnnnnnnnnnnnnnnnnnnnnnnnnnnnnnnnnnnnnnnnnnnnnnnnnnnnnnnnnnnnnnnnnnnnnnnnnnnnnnnnnnnnnnnnnnnnnnnnnnnnnnnnnnnnnnnnnnnnnnnnnatggcagtgcttaacaaatggaagaaaaaccaggacaaagctcactctgtagttttagagagctttctaaaatgcatacacacacatatatgaagaggtaaatggagttgccctatgatagaagcataataccccaattagacagcacatgcttccaaaggaaaatctcaaaccagaaacaggctaccactttttgagttttaacaagtagggtcccttagaccccccaaaacattacagacttttgccaatcctatttgttttactccataactttgcagtaagaccctattgctggagatatcacatacttgagtcttagactatgaagaaaccaagttggcactcagctggaannnnnnnnnnnnnnnnnnnnnnnnnnnnnnnnnnnnnnnnntatgcatgctaacaaaggataaaagtaatcaccaatgtcactcagttgtgggcgtnnnnnnnnnnnnnnnnnnnnnnnnnnnnnnnnnnnnnnnnnnnnnnnnngtggtatgaattttatggaagtaaccaaccactttnnnnnnnnnnnnnnnnnnnnnnnnnnnnnnnnnnnnnnnnnnnnnnnnnnnnnnnnnnnnnnnnnnnnnnnnnnnnnnnnnnnnnnnnggaaaaaactacaactattattctgctaaatagacataacattcaaaatgactacttatgacttattgttacgcctatagatcagtgtatctttcaacccttattagagaaacttcttacagcagaggacaattaacccaaagaccctcaactggtcaaggcacagagactggagtgctcagtcttagatgggacatccatatcacacctctctcctcagggctaagggatctatgtggaagtgagggcacgaaggtttnnnnnnnnnnnnnnnnnnnnnnnnnnnnnngaaatgatttccacacgcatcagggcagatgtacatacgnnnnnnnnnnnnnnnnnnnnnnnnnnnnnnnnnnnnnnnnnnnnnnnnnnnnncaaaatcccggcatggaggaggggaggtgggtacacagtcccacccatggctgaggagatgtttagtcatgttctagagggatagaaacaatgcctttaaagtgatgacagccaaatcatacctgctgtaggaagcacagcttagagtaagnnnnnnnnnnnnnnnnnnnnnnnnnnnnnnnnnnnnnnnnnnnnnnnnnnnnnnnnnnnnnnnnnnnnnnnnnnnnnnnnnnnnnnnnnnnnnnnnnnnnnnnnnnnnnngttatcctttgctattctattggcatctgaatcccctcagtatctggagaattgtttaggccttaannnnnnnnnnnnnnnnnnnnnnnnnnnnnnnnnnnnnnnnnnnnnnnnnnnnnnnnnntttgcatccttcaccaatagaatctatcctgatgctgatcacagaccctccctctaggcgctatccctgaccttgatttatcagccaatagaactccttcttattgtaaaggtcacaggtactctactatgttgctagggactttagatgtagctcagcctaaaactttgttgtgatgactgtcatatggaaacccttttcaaaagttttcctatgcttaaagtgcaatgcatggtgtagtgacatatggtcacagggtccctgggctggctacatatctgcgtgaaatgctagtggatggatctcgctggaagacaggaggtgggatcaggataatgccaggatatcaaccatcaacatcatcaacaccacccaacaccacnnnnnnnnnnnnnnnnnnnnnccaccatcaacataattaaccatcatcattaaccatcatcaccaccactataatcattatcagcaccaccaccaccaccatcatcattnnnnnnnnnnnnnnnnnnnnnnnnnnnnnnnnnnnnnnnnnnnnnnnnnnnnnnnnnaatcaatggcaagctaaagtacaattccaccaacgnnnnnnnnnnnnnnnnnnnnnnnnntgtcagacttacttacagagaatggatgagggcatttggggcaggagattagtgaccataaagaagccgtgttggagggtctgcacccagctggaatgatggcgtctcccatggctgtgcagatgtagtccttcccctaattattcctgtcatatatactctagcctccctcagagatcctgaggccgtttgcaattagggtacaacaacgtgcagtgggtttggaggagtgatggagtgtnnnnnnnnnnnnnnnnnnnnnnnnnnnnnnnnnnnnnnnnnnnnnnnnnnnnnntcctgaagaaggtgaaaatctggcttggaggctagtcctgtgtaacactgttgtaccaagaaagcagacacctnnnnnnnnnnnnnnnntgacaagtgtcagaagagagaccagggctgagggtgtgactgtgcagaggnnnnnnnnnnnnnnnnnnnnnnnnnnnnnnnnnnnnnnnnnnnnnnnnnnnnnccgggtgacacttgcttcacatgtagcagcaacgaaaagctttccnnnnnnnnnnnnnnnnnnnnnaactgaattcaaacttgtggaaaaatataattctttcatacactttctggttcttagatttattttttttactaaagtcagtaaaaaaaagacaaagtctattaaaagaaaccaaggtcttctattatctcttcaaaagatgaaggatccatccatcttcttttttccaactatagggagaagagagagatttctgccccctctacttcagtcaacatagtcccccatgtagacactatagctgtttccagtccccacccaccagcaggcttttgagggatggtattagggagctggtaagacacttctannnnnnnnnnnnnnnnnnnnnnnnnnnnnnnnnngatctcnnnnnnnnnnnnnnnnnnnnnnnnntccatgacgtgattagtccaacagtacagtacacaggcaggataaaagcctgtgaccccgacagagtagggagggatggcaatggcactcagggcaaaggcagatgtgtggctggcaagaccctggcagtgcctgcccaggacgagggcactgggcaccacagcagcactggcccccaacacactgcggccctttgaagccataccgcagtactccagaaacaggtggctgaagatgctacagatcctgagggaggagggccaagagggcctgcacctggagatgcatgaggccttccgggagctggggcccattttcaggtgagggtctgctgggcctgtagctgagcatggacggagcttcctgggcnnnnnnnnnnnnnnnnnnnnnnnnnnnnnnnggctgctgcctccccagtaggcaccaggcaccccctccttaggaagacagggagggaccacaggaggttatgagcctgactcatggagaccatggttctccacatggacacagaaagcactgttcctcactgagaggacagagtcccaggagggctgacgtggagaggagtcaggcagacagtgggagagccctcctggagggaaagcaagggccaggagaggatgaggccagggagcacacagacagggctgtctgcagggtgctcagggggagggcattccacccacaggagggccctgttttcaccccataggtacagcatgggaagaacacaggttgtgtctgtgatgttgccagaggatgccgagaagctgcaccaggtggagagtatgcaccctcgtcggatgcacctggaaccttgggtagcccacagagaacaccgtggcctgagtcgtggagtgttcttgctgtgagtggtcactggggatgaggagggaggagagattggtggcccagacacaggttgcagatcctgcttgggtgggagtgtggaggccagtcnnnnnnnnnnnnnnnnnnnnnnnnngccacgcagaccctggacccgaggagaagagaggcggccgaggaatgccccgtcccaaatccctgctctgaatgggccttttcagcgtgtagttgcctcaggaaggggagccactgttcagggccatagctggtctctgccacagcctgatgcccatcaatacagtctcccttttgtaggggcaatttcacccacagaggtttgaggtagacagttctggggatgaagaagtggaaaataggatgttggagctcctgtgggctcaaagtcaaacgccgctcnnnnnnnnnnnnnnnnnnnnnnnnnnnntagctgcatacgtagctggagagctaagtaggaattcctggtgcttggggtggataggctgccacgaggtcaccagtgggtgtggagaagcctacacggggaagtcaggctgcacacaggcannnnnnnnnnnnnnnnnnnnnnnnnnnnnnnnnnnnnnnnnnnnnnnnnnnnnnnnnnnnnnnnnnngcaagtagccgagggacactggcagagaggnnnnnnnnnnnnnnnnnnnnnnnnnnnnnnnnnnnnatgtgcctctgagaaagcaggaagcctgtgtgtgtgcatgcatgnnnnnnnnnnnnnnnnnnnnnnnnnntaaatgtgtgaccacacatgttgcttacataggaaagtgtgtgttgtctgcatctgtgactctctgtgtgtctttccacctttgtactagtctgttggcttannnnnnnnnnnnnnnnnnnnnnnnnnnnnnnnnnnnnnnnnnnnnnnnnnnnnnnnnnnnnnnngcatatacatgtgcttatggccactgtcaattgttgcaggttttagcacactggannnnnnnnnnnnnnnnnnnnnnnnnnnnnnnnnnnnnnnnnnnnnnnnnnnnnnnnncgtcaatcactggagaatctccatgggaaccctgtgccctgggctgtggtttgtacatgttgtaagtggtcctctgctgtggcccctgccctagggaggacgagatcccttacctgagacagcagaggctggtgactcagagaccacacattggacagactgacagggttggtgagctcagctggggcttctcctctgtggggaggtggtataggccaggtgggcagagcttgacagcacagnnnnnnnnnnnnnnnnnnnnnnnnnnnnnnagtcctccttagactcagtnnnnnnnnnnnnnnnnnnnnnnnnnnnnnntgtagaaagaagtgtggacaggaccagcggagcctgcctctgagcctgacacgcctttcccaatttctttgagggttagaaagatggacacgggcctgggccaggcctatcctaggaggtatctgtgtagctctgttctgtgtcctgcagaaatgggcctgaatggcgcttcaaccgactgaggctcaacccacacgtgctgtccccaaaggccgttcagaagtttgtccccatggtggacatggtagcacgggacttcttggagtccctgaagaagaaggtgtttcagaatnnnnnnnnnnnnnnnnnnnnnnnnnnnnnnnnnnnnnnnnnnnnnnnnnnnnnnnaaggtgtgnnnnnnnnnnnnnnnnnnnnnnnnnnnnnnnnnnnnngggagttgtggggagggagacaggaagcagtttggaggccagggactgctttgtcccagggataccattttttcttcagccagcaactttgttctttttggggagcggctgggactccttggccatgacctgagccctgccagcctgacgttcatccatgccttgcattccgtgttcaagacgaccccacagctcatgttcttgcccaggagcctgactcgctggacaagcacccgggtgtggaaagagcattttgaggcctgggatgtcatctctgagtatggtgagggtcactgaggcagggggcaaagttcatctccttaccatccacccgtacttatggctacaccagggtcatctcaaatgacagcgactgctgcttcccgatcttttaatatattcctaccgattctgtggccgaactgacccagatacagtgggagaagagcagggattgtcgttgggcgcgagagggggactcacgacgggacagcgggagctgcctgccctcaagctcccacctcacatctccagtcaacagatgtatccggaaggtgcaccaggagctcagacttggcagccctcacacctacagtggcatcgtggcagaactaatgtcccagggagctttgcctctcgacgccatcagagccaactcaattgagctcaccgctgggagtgtagacacggtcaggccaccccggtggaatcccctgtgactccctgtttgtatcctccaaagcacttcctgtgagctgcattcccaggttgtttctgcctggagcctgttggccttccctgaaggccctacccagaggtgatggaagaggggaatcttcaggtgaaggcttaggcgcagtgcggagatcaagagagctcacgacagggctggaacnnnnnnnnnnnnnnntcacaaagctcatgggggtggctggctggctaaggcaagagacagggagacagatgacaccagtaggggtgagggccccataaggaagggtcatgcatcaggccatggatcagatgaatacgaattagcatgcccaggtggagcatgggggcaagctagggacctcagcaagagacttaagaggctgtttctgtaggctgagccataaggaggaattctggacannnnnnnnnnnnnnnnnnnnnnnnnnnnnnnnnnnnnnnnnnnnnnnnnnnnnnnnnnnnnnnnnnnnnnnnnnnnggcttgagcattgaggccagnnnnnnnnnnnnnnnnnntggcaatcagtcactggaaaaggcagatgtgagtggcagggtccctaagtgacaatgaaggcccaccccagtgggtaccagagcaggctctaagcatcagacccttcaggtgctgagactgtggccaggactgaaatggatttagggttatggttccaagagtcctatcctgctctggatatgcacttctcccagagaggggcatctttttgtagtaggggttcccttttgtggaggactagggacagtgtctgagacttctctggctcctgcagacaaccttccccctggtcatggctctctttgagctggctcggaacccagatgttcagcaggctgtgcggcaggagagcctggcagctgaggccagcgtggctgcaaatccccagagggctatgtcggatctgcccctgctgcgggctgtccttaaagagaccttgaggtgggtgccggctgccctttgcctgctgccttgctttcctgctctcttttctggggctggggaagcccttcatagctggggacagttctgctgtttcccgcctccaggctctatcctgttggtggctttttggagagaattctaagctcggacttggtgcttcagaactaccacgtccctgctggggtgagtgatcctcatatgcccccgattgccctgttctgtatcacctcaaagaggcagctgacctcgcccttggcatctgcccacagacattggtcctactttatctctactccatgggccgaaaccctgcagtatttccgaggcccgagcactacttgccccagcgctggctggagaggaatgggagtttccagcacctgaccttcggctttggggtgcgccagtgcctggggaagcgcctggctcaggtggagatgctcctcctgctgcaccatgtgagcagccctgggagggggcagtgggatgggggcgctgatggacagtatttgagctgaaaacacaggccttgatatccatctgggcttcctgtgtttagtgaggtctccagagcccggctaggccctcggggccccacaggaggtcccctttgccgcatggtggcagcactgagcggctcagcaggagctgggccagagctctgccctgctgaggaggtcggatggagctcccccctccctgtgttccaggtgctgaaatccttcagggtggagacnnnnnnnnnnnnnnnnnnnnnnnnnnnnnnnnnnnnnnnnnnnnnnnnnnnnnnnnnnnnnnnnnnnnnnnnnnnnnnnnnnnnnnnnnnnnnnnnnnnngcagctggggtcccagtcaggccagcagctccctcctgtcctgacacccaagggcgcacttctttgcnnnnnnnnnnnnnnnttgggcccacactgtcatccatcagnnnnnnnnnnnnnnnnnnnnnnnnnnnnnnnnnnnnnnaggagttgcaaggccagggaagggactgggatgatcttgcagctcacgagcagtccctgccgggtgatttcacccatcctttccaagagtcactccagccacctgtggccttccaaa

SEQ ID NO: 1131 - DNA, 752 bp, Mesocricetus auratus
cacgaggagtagcacactaccctgtacggctttgtctcagggcccgggaggttcactgttaagagatggccgggcaggcagacaaagatgtgaagtactacaccctggaagagattcagaagcacaaagacagcaagagcacctgggtgatcctgcaccacaaggtgtacgatctgaccaagtttttggaagagcaccctggtggggaagaggtactgagagagcaagcggggggcgatgccaccgagaactttgaggatgttgggcactctaccgacgcccgagaactgtccaaaaccttcatcatcggggagctccatccagatgacagatcaaagatagccaagccttcggaatctcttatcactactgtcgaatctaattccagttggtggactaactgggtgatcccagccgtctcagccctggctgtagccctgatgtaccgcctctacatgggcagaagactaacctgcttctccaaaccagggacgggggaaggactgccccagagaaggggagaaaagaagccagtgttaatcacttccgctgacagaaaccttcccctgaaaggtaagtaatatatctgtttccctttccttctgtgttcgttgaacaaataagaaactctttgtgctcttaaacttttcaaatgtgcctttttattcatcaactttattttgatgtttcttcactacgtaatttacttattgtaagctgatctttttaaaaatatatctggcttttaaaat

SEQ ID NO: 1132 - DNA, 1867 bp, Mesocricetus auratus
ccagcagggaggctctgggaccgtcttcagcccccagcaggcagacagctcctgtctctcacttccagggttggacttctaggccagcgatggctttcctgtggctcttctctttgtggctgctggtcccggggactcaaggtaccaaagatggggacatgcgtctggttaatggagcctcggccaatgagggccgcgtggagatcttctacagaggccagtgggggacagtgtgcgacaacctctggaacattttagatgccaatgtcgtttgccgggccctaggctacgagaatgccacccaggcgctgggcagagctgccttcgggccaggaaggggacctgtcatgctggacgaggtggagtgtacagggacggagccctcgctggccaattgcagctccctgggctggctgaagagccgctgcgggcacgagaaggacgcaggcgtggtctgctccaacgaaactgggggcgtccacatcctggacctctccggagacctcccaaatgcgttgggccagatctttgacagccagcagggctgtgacctgttcatccaggtgacggggcagggccacggggatctgacaatctgtgcccacaagctgattctgaacaccaacccggaggcccaggccctgtggcaagtggtgggtagcagcgtcatcatgagggtggacgcggagtgcatgcccgtggtcagagacttcctcaggtacttttactcccgaagaatcgaggtcaccatgtcttctgtcaagtgtttgcacaagctagcctctgcctacggggccacacagcttcaagactactgcgggcggctcttcgccaccctcctcccccaggaccccactttccgcacgcccctggaactctacgcctacgctcaggccaccagggactctgtgctggaagatctgtgtgtgcagttcctggcctggaactttgagcctctgacgcaggctgaggcctggctgagcgttcccaccgccctgctccaggctctcctctccaagagcgacctggcggtgtctagcgagctggacttgctgaaggcggtggatcagtggagcatggagagcagcgcctcccacgcggaggtagagcgcctgctggaacaggtccgcttccccatggtgctgccccaggagctgtttgagctgcagttcaacctgtccttgtacgagggtcaccgggagctgttccaaaggaagaccatggaggccctggagttccacaccgtgcctttccgagtactggccaagtaccgaggcctgaacctcaccgaggacacctaccagccccgactttacacctcctcaacctggagcaccttggtgacagagagttcctcgaggtcacgggcggcggtgcaagtgtatgggtatgcgcagtactatccatatggctatgattcaaggcggtggtactacccctaccagtccttccagaccccgcaacaccccagctttctcttcgtggacaagctgatctcctggtcagccacctacctccccactgtccagagctgctggaactacggcttctcttgcacccccgaggagctccccgtgctgggcctcaccaagtccagctactccgagcctgccatcggctatgaaaacaaagcgctgatgctctgcggagggtacagtgtggtggatgtcgccaacttcgcaggctctaaggctcctatccccagtgctctggataccaatagttccaagatttcgtctctctttccctgcagctcgggggccttcagcggcttccgcgtggtcatccgccccttctacctgactaactccactgacctggactaggtgggtccatctcactggtggggactcagacacccacgtgt

SEQ ID NO: 1133 - DNA, 1488 bp, Mesocricetus auratus
  misc_feature (1462)..(1483): n is a, c, g, or t
gaattccgcgttgggagtccgtgagcagcgccaaggcctgacttggagtttcctacccggggctactgtccctcccaagtgcccgctgccaccatgaacggtgaggagcagtactatgcggccacacagctctacaaggatccttgcgcattccagaggggcccggtgccagaattcagcgctaacccccctgcgtgcctgtacatgggccgccagcccccacctccgccgccaccccagttcgcaggagcattggggacactggagcagggaagtcccccggacatctccccgtacgaagtgcccccgctcgccgaagaccctgcggtggcgcacctccaccaccacctccctgctcaactcgggctcgcccacccgccctccgggcctttcccgaatggaacagagcctgggggcctggaagagcccagccgcggtcagctccctttcccgtggatgaaatccaccaaagctcatgcgtggaaaggccagtgggcaggcggcgcatacgcagtggaaccggaggagaacaagcggacccgtacagcctacacgcgggcgcagctgctggagctggagaaggaattcttatttaacaaatacatatcccgacctcgcagggtggagctggcagtgatgctgaacctgaccgagagacacatcaagatctggttccaaaaccgtcgcatgaagtggaagaaggaggaggataaaaagcgaagtagcgggaccgcgagtgggggagttggcggcgacgagccagaacaggatagtgcggtgacctctggcgaggagctgctggccctgccgccgccaccacctcccggtggtgctgtgcccccaggcgtccccgctgcagccagggagggccgcctgcctccgggccttagtgcgtcaccacagccctccagcatcgcgcctcggcgaccgcaagaacctcggtgaggacggcaggctgaaggtgacttccatgcgcgtgggcagctagatagggagggaatgatgaaacttaaccttgatgccacgcaagaaatcttgagggcacatgccagttgggtacggccgagagattctggcagacttgggggggaggggaaaaagaggcctggctcggaaaccttttgaggtggcgcctctgttggggacgtctctccctgcctccaagactctttccttggtcaaataaggagaactggactccacaggggcgaaaagggtacaaacttgagcattcgccgatgtccagcgggcaagccggtctgggtgcctttgtctgcccagaaacaacggctgggtcgaccattttaaggttaggaatcatgaaaatgaactgctagaggtttcaaagttgcggggacgcgtgtgcttcttcctgccggcccttcctcttcgcctgctccctcctttcctacttcccctcccctagattcttcccctctttagtaaaatatttcattacatnnnnnnnnnnnnnnnnnnnnnnaattc

SEQ ID NO: 1134 - DNA, 492 bp, Mesocricetus auratus
gaacgtgccatgtttgcttttgggaatctatctgagctgttcttatttccgttttcaaatactgccccatttttatgtgcctgtatttattagtggtttggtaatttgtatattagatggtatttcagtacttagatttattcatcaattctaatttttctttttcatgttttgaaggactcctgaatatattccaaaactgaacaatttcaactgagctgaagtactctgtttttctagaggtaccagttcagtttaggagagtcacagcagatcgtaagtgccctgtcaatcttggtagagggcttgaaaatctccaactgtctggggagatggggaccagaaaagactaagctccacacttgctccagaggctcctagtaacgtgggacataagccttgctgtgcactaatgtcctgtaaagtcagctttgtccaggggacaaaggccagagctttctctaggactgtgccggtttagggaactgcaag

SEQ ID NO: 1135 - DNA, 224 bp, Cricetulus griseus
gattcgagattgacagctcgcaaggtttgggccgaggacacgcctggaaaagtcgcaatgacgtcacaaagcccggaatttccgcgagaagttcggtgttgtttccctgtcccacctttcccggagcttccgaagccccgcctctccggtgacgtcagcaggtctcgccaggctataaaagcagtgttgcggcttccggcgcagattgagccagtcctcaagct

SEQ ID NO: 1136 - DNA, 2389 bp, Mesocricetus auratus
  misc_feature (322)..(350): n is a, c, g, or t
  misc_feature (501)..(521): n is a, c, g, or t
aagcccatccacagtaatggccacagccttacccagaaccctgggggagctgcagctgtatagaatattgcagaaagccaacctgctttcttactttggtgccttcattcaacaaggtggtgatgatgtccagcagctttgtgaagctggtgaagaagaatttttggaaatcatggcactcgtgggcatggcaagcaagccccttcacgttagaaggctacagaaggctttgagagactgggttacaaaccctggccttttcaaccagccgctgacttcccttcccgtcagtagcatacccatctataagttaccaaaaggnnnnnnnnnnnnnnnnnnnnnnnnnnnnnatagttacgaaaggaatagcagtgcgcgggaaccacatttaaaaatccctaagtgtgccgccaccacgtgtgtgcagagcttgggtcagggcaagtcagaggtggggagtttggcagtacagagtgtcagtgaatccagactctggcaagnnnnnnnnnnnnnnnnnnnnnagcacagcctctccccagcagacgtgggctccccggcgtcgccaaaggagagcagcgaggccctggatgctgccgccgcgctctctgtggctgagtgcgtggagcggatggcctccacactgcccaaaagtgacttgaatgaagtgaaagagctgctcaagaacaataagaagttggccaaaatgatcggtcacatcttcgagatgagtgacgaagacccacacaaagaagaggagattcgaaagtacagcgccatctatgggcgattcgactccaagagaaaggatggcaaacacctcacattgcatgagctcactgttaatgaagcagccgctcagctctgtgtgaaagacaatgccttgctgacgagaagagatgaactttttgccctggccaggcaggtttctcgagaagtcacctacaagtacacttacaggaccaccaggttaaaatgtggtgaaagagatgaattgtctccaaagagaattaaagtggaggacggatttccagacttccaggaacctgtgcaaacactcttccagcaggccagagccaagagtgaggagctcgcagccctgagttcacagcagactgaaaaggggatggcaaagcagatggagctcctgtgtgcccaggccagctatgagaggctgcagcaggagaggaggctgacggcggggctctacaggcagagctccggggaacacagcccggatggcctgccctctgatggctcagatggacaaggagaaagacctttgaatctccgaatgcctaatgtacagaacagacagccccatcattttgtggccgatggggagctaagcagactttactccagtgaggcgaagtcccactcatcagagaacctcgggattttaaaagactaccctcactctgcttttaccttggaaaagaaagttattaaaacagagcctgaagactcaagatagcctagattctcccactgtctctgaaaatggcaccagattcaaggataatgctccatcatagaataagccttaataaccagtgttgcctcattctgctcaaacagaccatagccaaagcataagaactcacagtagtctgtggaaaccaggacaaagcaacagccacagaagaagaaatcgagagagtgctgcaatgtaacaaacactgaccattaccttcctgtgtaagttgtttgtatggaaaggctcaatattgtaggcattcactatttaagaatgtacaatgtgtctgtgtaatttatagaagcaaatctaggtgttaagacctttggtctaatagatgtggagaccattctttttacttgaaattttgttgtctactttaagtgtatttacggtaaatgttactcatcaacatttaggacttttgagtcgtaaaaagaaagcttagcaatgtagttattggcaaggtgacagtggctggagagaaatggaaggcaaatactcagtttacaccaaggaaaagactgtgtacttaatacttgattaaaattgattttggttaataggaaatgtgtagccgtcactaaataatgccgctttcattggtttaatccatgcacgaattaaaaatggaataatatttccgagatgaggtaggctacatttatgacagctgctcaagatgtgagacagaagacttgaagtaagcaggctaacgtgtaagagccttgacttaaacattggtatttcagaggatgtcaagtaaattaaggcagagtaaattaaccctgaatgtttaagataaagatgccgtgggagaatgacatggaggctgtgttttgtttttagtcctgctttgaatcatggctgtaataaatatcggtcctagtctgttctgtgagaaaaaaaaaa

SEQ ID NO: 1137 - DNA, 849 bp, Cricetulus griseus
  misc_feature (217)..(290): n is a, c, g, or t
  misc_feature (498)..(548): n is a, c, g, or t
ggcacgaggcgggaggtgtaactggccaccgcgagagaagagaggacagtgaccgaggcgtccgagtctccataacctgggaagatggtgctgctgacaatgattgcccgcgtggccgacgggcttccgctggccgcttcgatgcaggaggacgaacagtcaggccgagaccttcagcagtatcagagtcaggctaaacaactctttcgaaaactgnnnnnnnnnnnnnnnnnnnnnnnnnnnnnnnnnnnnnnnnnnnnnnnnnnnnnnnnnnnnnnnnnnnnnnnnnngtgttacttagtcttgtgtgaagctgccttccctaagaagttggcctttgcctacctggaagacctgcactcggaatttgatgaacagcatgggaagaaggtgcctactgtgtctaggccctattccttcattgagtttgataccttcattcagaaaaccaagaaactctacattgatagtcgtgctcggagaaatctaggctccatnnnnnnnnnnnnnnnnnnnnnnnnnnnnnnnnnnnnnnnnnnnnnnnnnnnagtcttacagcggggggaagcactctcagcattggactcaaaggctaacaatttgtccagtctgtctaagaaataccgccaggatgcgaagtacctgaacatgcgttccacttacgccaaacttgcagcagtagctgtatttttcatcatgttgatagtgtatgtgcggttttggtggctgtgagatgtagtgagcctagtcactggtaagggagaatctagaacccggcaggtgtatgttttcaggaaactgagctcacagggctgtgtattagaacccaagtggaacttctgcctctaa

SEQ ID NO: 1138 - DNA, 1076 bp, Mesocricetus auratus
  misc_feature (8)..(8): n is a, c, g, or t
  misc_feature (17)..(17): n is a, c, g, or t
  misc_feature (19)..(19): n is a, c, g, or t
  misc_feature (25)..(25): n is a, c, g, or t
  misc_feature (45)..(45): n is a, c, g, or t
  misc_feature (57)..(57): n is a, c, g, or t
  misc_feature (85)..(85): n is a, c, g, or t
  misc_feature (107)..(107): n is a, c, g, or t
  misc_feature (324)..(324): n is a, c, g, or t
  misc_feature (378)..(378): n is a, c, g, or t
  misc_feature (384)..(384): n is a, c, g, or t
  misc_feature (836)..(836): n is a, c, g, or t
  misc_feature (838)..(838): n is a, c, g, or t
  misc_feature (855)..(855): n is a, c, g, or t
  misc_feature (875)..(875): n is a, c, g, or t
  misc_feature (900)..(900): n is a, c, g, or t
  misc_feature (902)..(902): n is a, c, g, or t
  misc_feature (914)..(914): n is a, c, g, or t
  misc_feature (920)..(920): n is a, c, g, or t
  misc_feature (927)..(927): n is a, c, g, or t
  misc_feature (935)..(937): n is a, c, g, or t
  misc_feature (943)..(943): n is a, c, g, or t
  misc_feature (948)..(948): n is a, c, g, or t
  misc_feature (956)..(956): n is a, c, g, or t
  misc_feature (958)..(958): n is a, c, g, or t
  misc_feature (966)..(966): n is a, c, g, or t
  misc_feature (976)..(976): n is a, c, g, or t
  misc_feature (994)..(995): n is a, c, g, or t
  misc_feature (998)..(998): n is a, c, g, or t
  misc_feature (1007)..(1007): n is a, c, g, or t
  misc_feature (1009)..(1009): n is a, c, g, or t
  misc_feature (1012)..(1012): n is a, c, g, or t
  misc_feature (1022)..(1022): n is a, c, g, or t
  misc_feature (1030)..(1031): n is a, c, g, or t
  misc_feature (1033)..(1034): n is a, c, g, or t
  misc_feature (1042)..(1042): n is a, c, g, or t
  misc_feature (1052)..(1052): n is a, c, g, or t
  misc_feature (1054)..(1054): n is a, c, g, or t
  misc_feature (1058)..(1058): n is a, c, g, or t
  misc_feature (1070)..(1070): n is a, c, g, or t
ggctaacnccatcctgncnatcgancaattcgaaggtctgctggncacccactgcangggggatctgctcttcttcctctgcgcnatgtatgcacccatctgcaccntcgacttccagcgcgaacccatcaagccctgcaagtctgtgtgcgagcgcgcccggcagggctgcgagcccattctcatcaagtaccgccactcgtggccggagagcctagcctgcgaggagctgccggtgtacgaccgtggtgtgtgcatctctccggaggccatcgtcaccgctgacggagcggactttcctatggattctagtactggacactnccggggggcaagcagtgaacgctgcaaatgcaagcctgtcagagccacacggangacctngttccggaacaactacaactatgtgatccgggctaaagttaaagaggtaaaggcaaagtgccatgacgtgactgctgtcgtggaggtaaaagagattctaaaggcatctctggtgaacatcccaagggataccgtcaacctctacaccacctctggatgcctctgccccccacttcatgttaatgaggaatacatcatcatgggttatgaagacgaggaacgctccaggctactcttggtcgagggcaccatcgttgagaagtggaaagatcgkmttggkrwgaargtcaagcgctgggatatgaaacttcgycatcttggactgggtaaaacggatgctagtgactccactcagaatcagaaggctggcaggaactctaatccccggccagcaggaagctaagtcctgaaatgcgaaagaccacacccattgactcccctactaagcagtngnatcgctggattagcaanggaaaatcgcattattccantattgtttactacagataccacgtngnatgagatgttanttctgnatcctcnccccctgnnntctatntggcntcagtctngntccgcaantctgcccatntcgtccttctcttccctnntcncacaggggnanctnctttcttctnggaggagnngnncctccccnccactattcntngttnttcccgctcctnctttgt

SEQ ID NO: 1139 - DNA, 215 bp, Mesocricetus auratus
ttgattgccctcatcctgtccacccctgtagcctccttgaacttctgtaatcttggtgactcctgtgtttcctttccttgtcactgtagtgactgaggcccagggtcacctgaaccccagcatggcatgcttgtctcagtctgccttctcaggcctgtggttccctagacctgttcacatagcatagcatctgataaaccagtgtgaccttctga

SEQ ID NO: 1140 - DNA, 191 bp, Mesocricetus auratus
gccagcactggtcctatggattgcgccctggaggaaagagaaacgctgaacgcttgggtgattctttccaagagatggacaaagaggtggatcagctggcagagcctcagcacctcgaatgcactgtccactggccccgctcgcccctcagggaccttcgaggagttctggaaagtctgattgaagaggaa

SEQ ID NO: 1141 - DNA, 338 bp, Mesocricetus auratus
gcagatgcatagttctacagtaataataataatagctgtattctggctctgagtttactgtgccatggttttttacatcactttaacttacattcctattattttacagtgaaacagaatatcttacactgtcagcagctacatctgtctagtattttcgtcgtctcatgattttcattcatctcatgatttcatcaaaaagtgacaagtgagtcacctgtaacacttaggtttgcataaagtcgctctttgttgtaaagacaatggcagtttgcctaatagttcagaacttgttctgttcactaagtaggctgtaaggtaagagccatacacatata

SEQ ID NO: 1142 - DNA, 243 bp, Mesocricetus auratus
aatttacctactttgttctcctagtttcttaaggaagatgaagtagttgtttttgagaccttccttttctaacaggcatttaaagtttatgtagttccacagatttatttttattattagtgaaatgtttgctgttttaatgacatagcttaatataaaaagacattatttattgatactgacccaggtttttctactaataccatttctttctgcatgaagaaattcactaggcgtcgattt

SEQ ID NO: 1143 - DNA, 264 bp, Mesocricetus auratus
  misc_feature (20)..(38): n is a, c, g, or t
gtaggcttcatcccagggannnnnnnnnnnnnnnnnnnacaaaaatccatcaatgtaatccaccactgaggtctgcaatcaataaatgggacctcctgaaactgagaagcttcggtaaggcaaaggaaacagtcagtaagacaaaaacgaccacccacagaatgggaaaagatcttcaccagccccacatctgacagaggactgatttccaaaatatacaaggagctcaagaagctagccaccaaaacaccaaacaatgaaatt

SEQ ID NO: 1144 - DNA, 145 bp, Mesocricetus auratus
tatctctatcgagggtgccaatgctgggattaggacatgtcttactctagtatgagtccagcttggctacaaacccctgcaaaccccagattaacgaaacgttattatgaggtaggctatacatctgtaggctatactctgctca

SEQ ID NO: 1145 - DNA, 381 bp, Mesocricetus auratus
aatttagatgacatatgtgtatttaaatacagacttgtgtgtattgtgggtttctttagttagtactatgattacttacaatctttttgccatccttagtgtttctcccgtatttgtctcctatacctaatgagaaccacgtttcccatttccctgagcacatcacactttaccctgctattcccctctctatggctccccatctccctttgctggccgtagtcctgttctactgtctttgtttctgaagttactatgggacacacactcacatctgaagatttgaagctaagaacctccagtaagagagaacattcaaatcattgtgggtctggtacctcactcaaatacaatctttctgggctattcatttatctgcaa

SEQ ID NO: 1146 - DNA, 412 bp, Mesocricetus auratus
cagaggttgtttgatttgagccaggctcccatgccaagctggccttgaactcctacccccaactcccaagagctgtgtttgcagatgtgccctaccaaatctagttttcttcttcctgtctctctttgattttcaccctgggagatttaactatttacccaggagttgtgtgttatagtcttccttctccccaagcctgatccccaaggggctgagtctctgccttctgagctgagtactggctgttcataaagcttcctggagattcacagtcagggctgggaacacttaaactagggtgagtgtggaaatgggtggcttggctctctgagcttgatctccctagctgtaaaatatggagctcatagaaactatatacatggctgggctgtggtggcgcacgctttaatcc

SEQ ID NO: 1147 - DNA, 224 bp, Mesocricetus auratus
ttctgtctctgtctgagtgcctctgaactctctgcctcctgaatgctggcatcaaaggcctgtaccaccacttcccaacctggccttgaactctcagcctcctgcccccctcattacccaagtacactactgcacccatcttggattgttaaaaactacttttaatttttctcctgtcatccctatattgatttaaaagtcctaaaggggctgaggaatgttgc

SEQ ID NO: 1148 - DNA, 3111 bp, Cricetulus griseus
  misc_feature (770)..(798): n is a, c, g, or t
  misc_feature (2543)..(2582): n is a, c, g, or t
atgtcactgaaaagcgagcacagggtgaacacctcagcactgcagaaaatcgctgcagacatgagcaatctaatagataacctcgacacccgggaactccactttgagggagaggaggtagagtttgacacatctcctggagaccccaaggctcaggaaaagtacatcccattctcttccatttacaacactcaaggatttaaggagcccaatatccagacctacctctccggctgtcctattaaagcccaagtactggaagtggagcgcttcacgtctacaaccagggtgccaagtatcaatctgtacactattgagttaacacatggggaattcacatggcaagtgaagaggaaattcaagcacttccaagagtttcatagagagctgctcaagtacaaagccttcatccgaatccccattcccacgaaaagacatacttttagaagacaaaatgtcaaagaagagccccgagagatgcccagtttgcctcgttcatcagaaaacaccatccaggaagaacagttctttggcaggaggaagcaactggaagattacttgacaaaaatactaaagatgcccatgtacagaaactatcatgccacgacagagttccttgatgtaagccagctgtctttcattcatgatttgggaccaaagggcctggaggggatgatcatgaaaagatctgggggacacaggataccaggtttgaattgctgtggccaaggaagagcctgctaccgatggtcaaaaaggtggttaatagnnnnnnnnnnnnnnnnnnnnnnnnnnnnnccagacagtggggccattgcctttgtcctccttgtagataaagaattcagaataaaagtgggaaggaaagaaacagaaacgaaatatggacttcgaatcgataatctttcaaggacactgattttaaaatgtaacagctaccgccacgctcgctggtggggaggagccatagaagaattcattcagaagcatggctcggacttcctcaaagaccatcgctttggttcctatgccgctgtccatgagaacatgttagctaaatggtacgtgaacgccaaaggttactttgaagatattgcaaatgcaatggaagaggcggcagaagagattttcatcactgattggtggttaagtccggaaatcttcctgaagcggccagtagtggaaggcaaccgctggaggctggactgcatcctcaaacggaaagcacaacaaggtgttcggattttcataatgctttacaaagaggtggaactagccctcgggatcaacagtgaatacagcaagcggactttgatgcggctgcaccccaacataaaggtgatgaggcacccagaccatgtgtcatccagtgtctatctgtgggctcatcatgagaagcttgtcatcatcgaccaatcggtggcttttgtgggtgggattgacctagcctatggaaggtgggatgacaatgaacacagactcacagacgtgggcagtgtgaagcgggtcacctcaggactgtctatgggctctctcgcagcagcaacaatggaatctatggaatccttaagcctcaaggataatcacagatctcataaaaatgaacccatcctgaagagtgtggatgatgtagaccccaagctgaaaggagtaggaaagccccggaaattctccaaattcagtctgtatcgacaactgcaccgtcgccatcttcacaactcggacagtgttagcagcattgacagcgcctccaacactggctccatccgaagtgtacagacgggtgtgggagagctgcatggggagaccaggttttggcatgggaaggattactgcaactttgtcttcaaggactgggtccaactggacaagccttttgctgatttcattgacaggtactccacccctcgaataccttggcatgatattggttctgtgcttcatgggaaggcagctcgagacgtggctcgtcacttcatccagcgctggaacttcacgaagattatgaagccaaaataccgctccctttcttaccctttcctgctcccaaagtctcaaagcactgcacatgagctgaggtatcaggtgccaggggcggtccccgccaaagtgcagttgctccgatctgctgctgattggtctgctggtataaagcaccacgaggagtcaatccactctgcctacatcaacgtaatagagaacagcaagcactacatctacattgaaaatcaatttttcataagctgtgctgacgataaagttgtgttcaacaaggtgggagatgctattgcacagagaatcctaaaagcccacagggaaggccagagataccgggtgtacatcgtgataccacggctgccgggattcgaaggcgacatctccacaggtggagggaacgctcttcaggcgataatgcacttcaactacaggaccatgtgcagaggggagaactccatccttggacaattaaagccagagcttggtaatcagtggataaattacatctctttttgtggtctgagaacacatgcagagcttgaagnnnnnnnnnnnnnnnnnnnnnnnnnnnnnnnnnnnnnnnngctaattgctgacgacaacacagttattattggctctgccaacatcaatgaccggagcatgctcgggaagcgagacagtgaaatggctgtcatagtgcaagacacagagacagtcccatcaataatggatggaaaagaataccaagctggctgctttgcccaaggacttcggctacagtgcttcaggcttgtccttggctatctttctgatccaagtgaggacctccaggatcctgtgagtgacaaattcttcaaggagatttgggtttcaacagcagctcgaaatgctaccatttatgataaggtgttccgttgccttccaaatgatgaagtgcacaatttaatgcagttgagagactttataagcaagcccatattagcaaaagatgatcccattcgtgctgaggaagaactgagaaagattcggggcttcttggtgcaattccccttttatttcttatctgaggaaaacctgctgccttctgtaggaaccaaagaagcaatagtgcccatggaggtttggacttaa

SEQ ID NO: 1149 - DNA, 2455 bp, Mesocricetus auratus
  misc_feature (1313)..(1327): n is a, c, g, or t
  misc_feature (1710)..(1752): n is a, c, g, or t
caggagcggacgcggcggcggcggtggtggtggcagccaggcgatgcgagagcagtccggactgtcaccacctttccttcttcgggctgtaagggcgccagacagaggccactggagcgaggccacgccggagacggcagcggcgggacccgggacgctagaccagccccgactcacctctgacggagcggacgtcaggtgaccgagcccacgccgctccccgcaggcgacaggcgacgcccccactcagctcggccgtccgctcttccctcctccggggacaaacttttctccaagcccttggatcaaacttgtgtcgcccagccggttccgcgtagagcgctcatcttcggcgagatgtccgagcgcaaagaaggcagaggcaaggggaagggcaagaagaaggaccggggatcccgcgggaagcccgctcccggcgagggcaacccgagtccagccttgcctccccgattgaaagagatgaaaatccaggagtcagctgcaggctccaagctagtgcttcggtgcgagaccagttccgaataccctgaactcagattcaaatggtttaagaacgggagtgagctgaacaaaagaactaaaccacagaacatcaagcttcagaaaaagccagggaagtcagaacttcgaattaacaaagcctcgctggctgattctggagagtatatgtgcaaagtgatcagcaagttaggaaatgacagcgcctctgccaacatcaccattgttgactcaaatgagttcatcactggcatgccagcctcaactgaaagagcatatgtgtcctcagagtctcccattaggatatcagtatcaacagaaggtgcaaatacttcctcatccacgtctacatccacgactgggaccagccatcttgtaaagtgtgcagagaaggagaagactttctgtgtgaatggtggcgaatgcttcatggtgaaagacttgtctaacccttcaagatatttgtgcaagtgccaacctggattcactggagccagatgtactgagaatgtgcccatgaaagtccaaacccaagaaaaagcggaggaactctaccagaagagagtgctgacaattactggcatctgtatcgccctgctggtggtcggcatcatgtgtgtggtggcctactgcaaaaccaagaaacagaggcaaaagcttcatgatcggcttcttcagagtcttagatcggaacggaacaacatggtgaacatagccaatgggcctcaccatccaaacccaccaccagagaccgtgcagctggtgaatcaatatgtatctaaaaacatcatctnnnnnnnnnnnnnnnttgagagagaagtggaaacctccttttccacaagtcactacacttccacagctcatcactccacgactgtcacccagactcctagtcacagttggagtaacgggcacacagaaagcatcgtttcagaaagtcactctgtaatcatgatgtcgtcagtagaaaacagtaggcacagcagccccgctgggggcccacgaggacgtcttcatggcctgggaggcctccagtgtaacagcttcctcaggcatgccagagaaacccctgactcgtaccgagactctcctcacagtgaaagacataaccttatagctgagctaaggagaaacaaggcttacagatccaaatgcatgcagatccagctgtcagcaactcatcttagatcnnnnnnnnnnnnnnnnnnnnnnnnnnnnnnnnnnnnnnnnnnngcctttaggaaggtatgtatcagccatgaccaccccaactcgtatgtcaccagtagatttccacacaccaagcacccctaaatcgcccccttcggaaatgtctccacctgtgtccagcatgacggtgtccatgccctccatggcagtcagcccatttgtggaagaagagaggcctctgcttcttgtgacgccaccaaggctccgggaaaagaagtatgatcacctccagcaactcaactcctttcatcacaaccctgcacatcagagtaccagcctcccccctagcccattgaggatagtggaggatgaggagtatgaaacgacccaggagtatgagccagttcaagagcctgttaagaaactcaccaacagccgacgggccaaaagaaccaagcccaatggccacattgccaataggttggaaatggacagcaacacaagttctttgagcagtaactcagaaagtgaaacagaagatgaaagagtgggtgaagatacaccattcctgggcatacagaaccccctggcagccactcttgaggcggctcctgccttcctgctggctgatgtcaggactggcccagcaggccgcttctcaacgcaggaagaattgcaagccaggctgtctagtgtaatcgctaaccaagaccctatcgctgtataaaacctaaataaacacatagattcacctgtaaaaaaaaaa

SEQ ID NO: 1150 - DNA, 501 bp, Cricetulus griseus
  misc_feature (11)..(26): n is a, c, g, or t
  misc_feature (28)..(60): n is a, c, g, or t
  misc_feature (86)..(104): n is a, c, g, or t
actatagggannnnnnnnnnnnnnnnannnnnnnnnnnnnnnnnnnnnnnnnnnnnnnnnaataagattgtttctaatttaaactnnnnnnnnnnnnnnnnnnngatttgtgatgcagaagttgacagatcatttaataggcaagacttttctgtgagactatttgaatattaagagcactgacctcaaacaaaactcatctctttcttatgggatcctgagttagtttatgatgtgaaagcaaattggtataaagcaagcctgatagctaaatcacactctggcttccaggcttgaatcctttcctcccccaccaggtctttcctgagtcaaaatgttgatacctgtgttatctccagaagcatatctttataagtctttagcaccgtaagctaaaccaattaaactataaagttagctggtctacctcgggttctgtgttttagcaacaaaaatgcatggatacacttggaatggtgcctctttaaatagtcactttaa

SEQ ID NO: 1151 - DNA, 567 bp, Cricetulus griseus
  misc_feature (562)..(562): n is a, c, g, or t
acttggcttcttcaccacttatttcttgcccctggccaccactcttaagagtaaagcaatggacctggcccaggcaggcagcacggtggagtccaagatttatgacacactccagtggcagatctggaccctcctgcctgggttctgcacaaggcccactgatgtggctgcctctttcaaaggcctggcacggacactgggcacagccattaatgagcgcccagacctgagggtcactgtgtgccaggccctacgcactctcatcaccaagggctgcgaagcagaggctgaccgtgctgaagtgagccgctttgctaagaacttcctgccaatcctcttcaacctgtatggacagcctgttgcagctggcgaggcggcagtccctcgccgtgctgtgttggaaaccatcaaaatttacctcaccataaccgagtctcagttggtgaacggcttcttggaaaaagccactgagaaagtgctcgatcctgccagctctgacttcaccaggttgtctgtcctggacctggttgtgggctttggctcctcacgcagatgaagccgncatca

SEQ ID NO: 1152 - DNA, 579 bp, Cricetulus griseus
gatatgaaggcaatcgaaccctacaaaaaattattagccatggaggatattatggggatggtttaaatgccattgttgtatttgctgtctgttttatgcctgaaagtggtcagcctaactatagatatctgatggacaatctctttaaatatgttattggcactttagagctgttggtagcagagaactacatgatcatttacttaaatggtgcgacaactcgaaggaaaatgcccagtctgggatggctgaggagatgctaccagcagattgatagacgattacgcaaaaacctgaagtctctaatcattgtccacccatcttggtttatccgaacacttttagctgttacaagaccatttatcagttcaaaattcagtcagaaaattagatacgtctttaatttggcagaactcgcggagcttgttcccatggagtatgttggcataccagagtgcatcaaacaagttgatcaagaacttaatggaaaacaagaaccaccaaacagtgagcagtatgttcggtgtcctgtccagatgagacaaagagcgcctgagaagtggggttgttgtgtgtcat

SEQ ID NO: 1153 - DNA, 135 bp, Cricetulus griseus
tcgacccacgcgttcgggtttttttaaatttattattatttcagacacctaagtttgaggtaacccttagccatgtttgtcaggccaaaaacatgaggaaaaaagggagtcacttgcagtattgagttagatttt

SEQ ID NO: 1154 - DNA, 299 bp, Cricetulus griseus
  misc_feature (85)..(101): n is a, c, g, or t
ggattttgtgttcatgtcaagcatccccataagatcattgtaatgtatttacaagtcttagaatgtgaacgtaaccaaaccctgnnnnnnnnnnnnnnnnnagtcgcttttttacatttcttctttagtcaggaaaacagaagcagaaataaagttagtttcatttttttctttccaaaataatgaaataagtttgttttggggcattttgtttttgttattttttaaccaaaaggtaaataatgcttatttctgctacctgttatcttggcttgactaattatttataatggagaact

SEQ ID NO: 1155 - DNA, 580 bp, Cricetulus griseus
ggattttgtttgtagctcacttctacagtgaggactagtctgtgctgtttttttagttttcagcattctagaatcacgttttctcaccaccctccaagctgcctccctaactaggcacttgggaggccttggtgtgggttctggaggatggccattctgagtgctgagacacttgttggagacctcaaaacacaagtgccttctccacggtgtgatacgggcttcagagaccagtggccaagattcctactcttcttaccagagcaattatatttcagtgaggaagtattcaggggccaggggagtctgtgtttcacgcaaatttatgtttgcaggaaaaaacttttcttaaaaaattaagatatttaaatttatgtaaaaatgttaggaaaagatatggcgagtgtatattaaactttattgcacggggcagagaagtcttaaaagagtaagtccttagtctctgtatccgctgtgcgttccctgtattttcatctgctgcttatttgtgaactgaaaccccagacaggcttgagggctgagggagggacagtgcagttaagtagggaatactcccgta

SEQ ID NO: 1156 - DNA, 131 bp, Cricetulus griseus
ctggcatggtctgctgatggccagactctgtttgccggttacacagacaacctggttcgagtgtggcaagtgactattggcacccgctaaaagtttatgacagagtcttagaaataaagtggctttctgaa

SEQ ID NO: 1157 - DNA, 446 bp, Cricetulus griseus
cttgctaggtagctaactaggaatgacatgggattttaaaatgtaaaagcctacccccagagacacatcttctccaataaggccacacacctcctaatcctgtccaagtggttccaccaactgaaggaacatgcattcaaacatatgagctttatgggggtcattcttgttcaaaccaccatagccatcttactgggaagggacccctagatttaaaaacaacgatatcatcattgactaacatgcttcaattagtagaaaatttaacagtagattctcctctcccccaaagaacagccctattgcttgttccatgcccgtttattaccttcagtcagaaatcagaatcgcttctgttctttagtgtcccccagacagtgctttgccagagcaatacattatcattcttgggtaggaactagcaagcactcttctcatttgtattt

SEQ ID NO: 1158 - DNA, 289 bp, Cricetulus griseus
actgcaaaacctactgtggaaatattctctgggagtgacgatgatgatgatgctaataaactttctaataaagcttataaagctcctaaatcaactcaaaaatgggatgggtcataggatgatgaagatgatggtgaaagaagtaaagagcgatctagagtacactcttctggggacagtggtggtgagtcagatgattttttacagtccttaatacgaccgataaaaacccagaaaaacacgccacttcctaacctacatagtgagattgaaaatgatgactccttcg

SEQ ID NO: 1159 - DNA, 463 bp, Cricetulus griseus
acaaactgaacactgtgattatggggttttgtaacttatcaaagctcttactgatagaaaaaatagacctgaattatgtataactttttagaaagtttaatctgatatcaaaatagtcactgaaagtacaattctgttgtaaagttgtacagaaagttgtagagagtccgttgtgatgtcaggacttaaggtgagatgctcgccattggcaccctgagtttggtaactcatggtaactttgcctgtggttgaggtcttattgatcagtatgggctgttgccactcaagttcatgaccacagatatctgcagtgtcttctcctgatgaaactcaaaaccaggaagtgaaattctttggctgataattgggctgtgacaccacaaaaaaggtcccgctcataccacatgtgtgactaaaccctttactacattagtgtgctcctgattagcatcttgtgaaaaca

SEQ ID NO: 1160 - DNA, 532 bp, Cricetulus griseus
  misc_feature (302)..(342): n is a, c, g, or t
aaggaggaagccactgttgtcgccgagagaatcctcacccccgccgctcgcgcgtggccatgtggaggctgctgacgcgcactcccgcgccgctcctgcgggtgcacgtttcagattcttgggcagcccttcccaccagtgctggtctgaagaccctcctcccagtgccaagttttgaagatatctccatccctgaaaggtccaagcttaagtttgttgaaagggtcccacttgtaccaaaagtaagaagagaacctaaaaatttgaaggacatacgaggaccttcaactgaagccactgannnnnnnnnnnnnnnnnnnnnnnnnnnnnnnnnnnnnnnnngttacctccactggggtcattttgaaatgatgcgcctgacaatcaaccgctctatggatcccaagaacatgtttgccaagtggcgagtaccggcccctttcaagcccgtcactctaaaaggtgtcgggcagcgcatggggggcggtaaaggtgccattgatcactacgtgacacctgtgaagactggcac

SEQ ID NO: 1161 - DNA, 543 bp, Cricetulus griseus
cggcggcgcctgacggagcagaagagacagcatggagttggagaggatcgtcagttcagccctccttgcctttgatcagacacacctcccagaggcggacctcagtggcttggatgaggtcatcttctcctatgtgcttggggtcctagaggacctgggcccctcaggcccctcagacgagaactttgatatggatgccttcacggagatgatggaggcttatgtgcctggctttggccacatccccagaggcatgataggggacatgatgcagaagctctccacacagctgagtgatgccaggaacaaagagaacctgcacccacagagctcctgtgtccaaggtcaggtgcccatttttccagagaccccgaggcaacttgaaaagctcaaagaagacaccaggtctccggctgccactgggggcacccaaaatgaggcagctggtgctgaggaagaacttctgccaggagtagatgtgctcttggaggtattccctacctgttctgtggaacaggcccagtgggcgttggccaaagcccg

SEQ ID NO: 1162 - DNA, 441 bp, Cricetulus griseus
ccattagtatttctgccaggagctgcacaaatagaagttaaagaataattctaagctgaaaggcttcctgtatcaaaccatctaacatttttcatagggctgttgaatagacataaaattgatttgattatctttccctctgtacacagagtatccaaatattactgtaccttaaggattcctacgaggtttccctgaaaagtaacttttcatgaggcaggaaggaagtagttgtagaatcattttctagttgttaaaatgagacaatcactttgttttctaacagatgtgaccggtgtaacttaaaaccctgaggtttggggggagattgcagtaggtttctaatgatgatgccctggctgataggctgttctctctcttttattttttggtctttaatccttttcttcctccttggtttcagatcccactgaagtgctg

SEQ ID NO: 1163 - DNA, 579 bp, Cricetulus griseus
cagaggattatagacagttcaggaaatcggtcctggcagatcaggggaaaagctttgctacttcatctcaccggaatactgaggaggaaggacccaaatataagtccaaagtttcactaaaaggcaatagagaaagtgatggatttagagaagaaaaaaattataaactgaaagagactggatacatagtggaaaggcctatcactgcaaaagataagcacaaggaagaagacaaaggttctgaaagaataacagtaaagaaagaaacacagtcacctgagcaggtaaagtctgaaaagctcaaagacctctttgattacagaccccctctacacaagaatctagatgcacgagaaaagtctatcttcagagaggagagcccgcttaggatcaaaatgatagccagtgattctcatcgtcctgaagtcaaactcaaaatggcacctgttcctcttgatgattctaacaggccagcttccttgactaaagacaggctacttgctattacgcttgtccattctgtcaagaaagagcaagaattccgatccatctttgaccacattaagttgcctcatgcca

SEQ ID NO: 1164 - DNA, 459 bp, Cricetulus griseus
atgcatgtgaccatttccttcagagcacctgtcattcagttacataggagtatacgcagtgctatttcaaatgcctgtgaaaggaacataggatgaatttcctcgtagatgtcagatcattgacaaaaaaaaaaagaagaaacaaccagcctcttgaacccacactagcagatactgtctatatggaaaggcaagcccgaggcgtcaggcccttcacatcatatcttttctggaagaggggccagattatgatcagcatcccttatcttcaagggtgctttcgcaaaggatctttgtttttaatgagaagtcctttccccaaacctgagcattgcagcacgaagcgtgtgtggcaaacccagctgtaggtgcttgctgtctgctggctggaagggtaaggctcattggccacatgcaagggcaggtggcacgtgcgcaaggttgggacactgtaatcac

SEQ ID NO: 1165 - DNA, 580 bp, Cricetulus griseus
  misc_feature (576)..(576): n is a, c, g, or t
gcatgccaaattggcaccacttgcagctatttatcaagaaattcaggaggccgaacaagccattgaagaattagagtcaatgtgtaaaactctacataaacaagacgaaaagcagttgcaagaacttgtatcagaagaaaggcaaatcattgatcaaaagatcaacacactgtatagtgagcttttggagcagctagtgccaaaggagaaatatgacaaaagtgatgttattttagaggtgacatctggaagaactactggaggtgatatctgccaacagtttacccgagaaatatttgatatgtaccagaattattcatactataaacactggaaatttgagctgctgaattacacaccagcagattatggtggactacatcatgcagctgccagaatttctggagacagtgtctataagcatttgaagtatgaaggtggaatccatagagttcagcgaatcccagatgtgggcctgtcgtcaaggatgcagcgtattcacacaggaacaatgtcagttattgtccttcttcagccagatgaggttgatgtgaaagtcgacccccaggatctgcngata

SEQ ID NO: 1166 - DNA, 244 bp, Cricetulus griseus
tgccatctccatggcctcacccatgtccatcccaaccaacaccatgcactacgggagctaggtgcctccagcagcaacaccactgcgcactgacagcaccaggaaaccaaatgaagtccacgcccagtgcagctggtggctgtcccccttgttctggagaagcgtgaacacccggtcacagccctctttgctatgggaacttggacacttttgtacacgatgtcgccgctgccctcaagtaacc

SEQ ID NO: 1167 - DNA, 498 bp, Cricetulus griseus
acctccttgcatcttagtttgcagagaacttgtaagtagctggccgccgcctcaggtgtttgaaccatgaatcttttactcctcctggccaccctgtgcttgggaacagccttggccactccaaaatttaatcaaacgtttaatgcgcaatggcacaagtggaagtccacatacagaaggctgtatggcacgaatgaggaagaatggaggagagcagtgtgggagaagaacatgaaaatgattgagctgcacaatggggaatacagcgaggggaagcatggctacaccatggagatgaacgcctttggtgacatgaccaatgaagagttccggcagttagtgaacggctataagcaccagaagcacaggaaggggaaggtgtttcaggagcctctgatgcttcagctccccaagtctgtggactggagagaaaaaggttgcgtgactcccgtgaagaatcagggacagtgtggttcttgttgggcttttagcgcttgt

SEQ ID NO: 1168 - DNA, 173 bp, Cricetulus griseus
  misc_feature (14)..(37): n is a, c, g, or t
tgccccccctcgtnnnnnnnnnnnnnnnnnnnnnnnngatgtggaatgtctggcagactcttgcatgaaacaggcaccctgaaagactgtccatcttctttagccatcattttcttgtgggtcctgaatgttcagtttatacaggatacagtcaagcataccatacaagagca

SEQ ID NO: 1169 - DNA, 567 bp, Cricetulus griseus
  misc_feature (57)..(91): n is a, c, g, or t
ctcctacatgaaacagaaaggaagcaccacctccaggcgttggtggggtggcacagnnnnnnnnnnnnnnnnnnnnnnnnnnnnnnnnnnntctgcctaactaaataaagtccaggtcctaatggtttcattgctgagtcctatgagaccttcaaagacttaacagcagtgtttttcaagctcctacatgaaacagaaaggaagcaccacctccaagctctttttgataggcctgatgctattgccctgatgctaaaacaagacaaacacacacacatattatagaacaacctctctgatggggataggatgcaaaaattctcagcaaagtacttgcaaatcaaattccaaatcacatcaaaacgatcattcgccctgatcaagttggctttattccagagatacagagtggttcaacataaacaagtctataaatataaaacatagtataaagggttaaggacagaaatcatgtgatcatttcagtaagatgtagaaaaggcttttgacattgctttatgaatagaaaggacatatctcaacataaaggttacatatgacaaacct

SEQ ID NO: 1170 - DNA, 580 bp, Cricetulus griseus
aatagaacttgatcacttgaaactcagacctattggtcctgattgaatctaactaagacaaccttagaaataagctattattttgcacagagcagcttgtaagacactcttctcaatgcagtacatattttgacagacctaaggattgccctataaacataacagcattttgagagcttgaagatttttccattgtggaagtcaatttctaaaatgccttaataggtctatgttgtaaattttttctttagtttttgtaagcatccaagatgatggggattcttttttcctggaaaagaattatcttaataaacataaaagactgttatattttgtgtagggcatcatggttatggggtcataagttaacctgctgcctggcaggctagtggacttctgtctgaggtgtctctattgcagtgatcggcagcctgagtagtttaactagtctcgtttcccagcagtaaactgtgtggcatttttattgctcatgcaataactagcttaatgctagtattatgacattttgaagtgttaattttgtttttaaacccttctagtaagtgaaatacagcctaat

SEQ ID NO: 1171 - DNA, 580 bp, Cricetulus griseus
  misc_feature (474)..(474): n is a, c, g, or t
ttgttttttaagcaatcaagttttcatttactctggaccacaaagctaatgctctaagagacctcagcttctttgtaagaagctcatggatcaccagaccaagaatgcagccgtcaactgggcctatgtatcatgtgagcgggggctgctggtggccccctgtgctgtctgcatgtatggaggggatggggatgtgatctcctgggggagtggttcagcaaatcatttttactggaattgtggggagcaaggggagacagatcccacacttcctatcacttaacagtcgcctgcagtagcagcaaagccttcagcagccacccagcacacactagtccttacaactttgcctttgttcatccatgggcccttttcagtaagtgaacaaggcctaagagtgtagttcagtggcatgtatgtgcctagcattacaaggccctcggttcagccctcaacagtgaacaaggaaacaanactttaaaatgtcttaagctaaatcatccaaagattgtgcttcttgtcctcaaatcctgtgactgggatcacccaacaacactgggatgtatttttcaatgaggtg

SEQ ID NO: 1172 - DNA, 564 bp, Cricetulus griseus
aagacaagaatagaagggggaagataaggggaggaaggaagagaaagaggaggaggaaatgggtaggggagaaggaacagagtgagaatgcaggcaggcaagcaggcagggtctattcacttctttctagtcaccatggtgacttcctatgcttgcagcatctatgagtttggcaagtcccagatataaagcagaagacagtagatgtgtggacagccaggcatctgatctgccaggcaacacttaccaaaacaaggcaagctcagacaaagcagtgccagagatgggagccccagtgtgccctgaggaacaggtcccaagggcttggtggggtcctcctccagggttgccagcaatggtctacacagtggatggtcatagtctttctggcccctgacccaggctctggcttccacagatagtttatccgaactccacttggtgtcccagagctcatgggagtgtgttccagctggctatccattcctgctctgagcactggctactctatgtctgtgtctgtaagctggcacaagttaagggtgctgcctggcagatccactt

SEQ ID NO: 1173 - DNA, 385 bp, Cricetulus griseus
  misc_feature (280)..(295): n is a, c, g, or t
agttcctttccaaaggccacctgtcggacgcagacgcactggagtgcaataacaactttcacctgttcggctccccggccaatgggacatcagtaggcaagagtttatccaaggtgtacgcaagacacaggaagctgtactccaaaaagcaccacagtcagacttcactgaaagtacaaactctggagcaagagaacgggtggaaaagcttatcccaggaacatttaaacggaaacgtcctttcccaactggaaaaggtgttctaccaccttccctcggnnnnnnnnnnnnnnnnggaagcagaagtgcggatgatatactttgctcatgtgttccctatcaacacagtatatgagggctatgtttacggtctgaagcatttgat

SEQ ID NO: 1174 - DNA, 365 bp, Cricetulus griseus
gaagtcagcaaaaaattatgtgtgtttagcacaccaataccagcaatgttattgaaagaggaacatcagagaaagccaagaagagaacataaagccttcggagaaacagtaggaacaggatccccagcacaaaaggatgtcaatcaacaagcacctctgaagcccatacccccaacctaggcacctaccctccatgtgacttttagttctcagatttctaccattacctttggaatattttccaacatttatttcctctatagcacaaccttcctaatgctgtaacattttaatgcagttcatcatgttgtgttgaccctcccccaaccaacaaccataaaatcattcttttgctactttgcaaa

SEQ ID NO: 1175 - DNA, 365 bp, Cricetulus griseus; identical to SEQ ID NO: 1174

SEQ ID NO: 1176 - DNA, 579 bp, Cricetulus griseus
  misc_feature (414)..(414): n is a, c, g, or t
ggaaatgttccctcaggttcagcacacagaagctgtggtccccagggtactgaggttcatctcatgtagacaaatttggtaatgtgcaacattttcccaggtagtactggatttgcaggcacgatgaggttatggagagcagtactgaggcttagtgctatgagagtccaggagaggtcattggtgaatgcccagcctcagctgaagtagctcaagaattgaagggaacatggagagaagctgatacttggcaacatgtttcagagtcccagaagaaagcccagggggctattggtgaaggtgaagcccagtttcagtggagaacccaacattttggagaagccagttccatgggataactgccaaggacagcaacagttagagtcaagtggagtagagccagctggagcttgngagacaagctgtgtgtgttgtggttgttagggccagagaagtgccactgccaagaccctcgggagtctacaagattgtgaatgggtcacagacatcaagcactgaacttgggaatttggttttgctttgagttgattgtgactctgccctgggtctcctctcttg

SEQ ID NO: 1177 - DNA, 432 bp, Cricetulus griseus
aagtttacgcacgctttctccagtgatctcacgaggactaagcagaccatatctggcattttggagaaaagcaaattttgcaaagacatgatggtgaagtatgaccccagactgcgagaaaggaagtatggagttgtagaaggcaagccgctaagcgagatgcgggccatggccagagccgctggggaagagtgtcccctgttcactccaccggagaggagagacactagagcaggtgaaagtacgtgcaaaggatttctttgattgtatttgtcaactaatcgtggatgagacaggccagagagaaatcgtcttccccggggctccaggcagctgtctggagagctgtttggcggaggtattccctgtaggaaaccgtttgcagttgcatcctgatggtggcacccctggtttagcagccagcatcttagt

SEQ ID NO: 1178 - DNA, 567 bp, Cricetulus griseus
gtgagagaccaggaactgttacaaaccacctctctgggagctggagatgaagtcagtttggattcttcaaccagagctgcttgtgagttttctgaggacgtaacaaatattgatctgcaccagtgcagtaataaagatttggaccccattgagaatcatgcaactggaagatatccagaaaaatgtcaggatatttctgtttcaaacttacatgtggagccatgtggcacagatattcatgccagctcgttacagcatgagaacagcagcttattactcactgaagacagaatgaatgtagaaaaggctgagttctataataaaagcaaacagtctggcttagccaggagccaacagaacagatgggctgaaagtaaagaaacatgtaatgataggcagattcccagcactgagaaaaaggtagatccaaatactgattccttctgtgggagaaaaaaatggaaaaatcagaaaagtctgtgtcctgagaattctagagctacccaggatgttccttggatgacactgaatagcagcattcagaaagtcaacgagtggttttccaaa

SEQ ID NO: 1179 - DNA, 580 bp, Cricetulus griseus
ccgtgtgggtgtacggagtgtgggaaagctttcagcacgagcacagaccttcttcagcactatatgggccttagcggggagtgcgggaaggccttcaaccgcaaggcccccttacccagcaccggggatccacagcggggagaagcctgacaaatgccaggggtgtggcagagccttcatcctccataacagaagccacaccggagagaaaccttttgtttgccaagaatgtggaaaagcttttcgagacaggccagggttcatccgacactacgtcatccacagcggggagaacccgtacgagtgctttgagtgggccaggccgtcaagcacaggtcctacctcctgtggcaccagcggacgcacactggggagtgcagcgagtgtgggaaagccttcctcgagagtgcggccctcatccaccacgccgtgatccacacgtgatccacacgggggagaagccctttgagtgccccgagtgcggcagatccttcaagcacaggccctacctcaagaggcaccagcgcatccacagcggggagaagccttacgtgtgcggcgagtgtggcagagccttcac

SEQ ID NO: 1180 - DNA, 578 bp, Cricetulus griseus
tgaaggtgggagccaccaccacctagctgtctacactcttttatttgactgtcagatcctgacacagatcccatgccacagactgtccagtcttccctcaccctccatgcttctcacctctctgctggtgactcacaagagtaagaagaaacagttctcacaaatgttaggagggaaggtagctccttccattttttttaaagatttctttattcatgtattttatgtatatagtgttctatcttctggcctacatacacacagacacatgagtaaaaattaaacgcctcctaaagattctgaattggaatcagaagctgtacaatgggcacaaacagagccttgactgatttcatgatgtttctcctgtcaggtccagtcttttccttgggaaatactctacccacagaccttgggtcactcccgatcattgttcacatgattttgcagcatttcctgggaatttagtgttgtcactgatttgtggccacaattttatagcccacactaatcatgtgttattaccaacctgtacaggcaggtatgtggctgaaaacagtgagcccatgaggtcgaca

SEQ ID NO: 1181 - DNA, 579 bp, Cricetulus griseus
tgcctacccatcagcacgtggcccatcccgcagacatcctgttgggctctcagttcctctacaccttcttctcgaagacccatggggacttgcacagcctggtgcgcagccgccgcggtattcccgagcccgaggctattgtgcttttccggcagatggctgctatggtggcacactgccaccaacatgggcttgtcttgcgtgacctcaagctgtgtcgctttgtcttcagcaaccgtgagaggacgaggctggtgctggagaacctggaggatgcttgtgtgataactggaccagacgactctctgtgggacaagcatgcatgccctgcctacgtgggaccagagatactcagctcccgaccatcctactctggcaaatcagctgatatctggagcctgggcgtggcactgttcactatgctggctggtcactatccgttccaagactctgagccggctttgctctttggcaagatccgtagagggacctttgccctgcctgaaggcctatcagccccagcccgatgcctgatccgatgtctccttcgaaaggaaccttcacagcgactagtggccc

SEQ ID NO: 1182 - DNA, 241 bp, Cricetulus griseus
  misc_feature (236)..(236): n is a, c, g, or t
tggcggcgtctgacgccgcgcgtctccctggcggcggtgtgtggtgacggcccgggtcagaatgacttcaacaagtaaggcgattgaattacaactacaagtgaagcagaatgcagaggaattgcaggacttcatgagggacttagagcactgggaaaatgacattaaacaaaaggacatggaactaagaagacaaagtggtgttcctgaagagaatttacctcctattcgaaatngggga

SEQ ID NO: 1183 - DNA, 418 bp, Cricetulus griseus
tgctgtggggaagagacagatttgtaaacctcagagtgaggttctgcctgccggaggccgctgtggtgcggagacccccgggcgaagccaccatcaccatgtctgaccaggaggcaaaaccttcaactgaggacttaggggataagaaggaaggagaatacattaaactcaaagttattggacaggatagcagtgaaatacatttcaaagtgaaaatgacaacacatctcaagaaactcaaagagtcatactgtcaaagacagggagttccaatgaattcactcaggtttctctttgaaggtcagagaattgctgataatcatactccaaaagaactgggaatggaggaagaagatgtgattgaagtttatcaggaacaaaccgggggtcattcgagggtttagataattctttttat

SEQ ID NO: 1184 - DNA, 579 bp, Cricetulus griseus
ttataaatcgaaatgacaccaaagaagatgtgtttgtacaccagactgccatcaagaagaacaatccacgcaagtatctgcgcagtgtgggagatggagagactgtagagtttgatgtggttgaaggagaaaagggcgctgaagcagctaatgtgactgggccagatggagttcctgtggaagggagccgttacgctgctgatcggcgccgctacaggcgcggctactatggcagacgccgtggacctccccgtaatgctggtgagattggagagatgaaggacggagtccctgaaggagcgcagctccaggttcatcggaatccaacttaccgcccaaggttccgcaggggacctgctcgcccacgacctgcccctgctattggagaggctgaagataaagagaatcagcaagcggccaatggtccaaaccagccgtctgctcgccgtggattccgacgcccctacaactatcgacgccgcccccgccccctgaacactgtttcacaagatggcaaagagaccaaggcaggtgatgcaccaactgagaaccccgctccagccgctgagcagagcagtg

SEQ ID NO: 1185 - DNA, 579 bp, Cricetulus griseus
ctccccttcttaagtccctacattctgctgggcccccactcctcgctgtatcagcagctcctccttctcagccccttgccaagaaaaaaggcgttaaacggaaagcagacaccaccacccctacacctacagccatgctggctcctggctccccagctagtccccctgggagtcttgagccaaaggcagcccggcttcctcctatgcgtagagagagtggccgtccaatcaaacccccacggaaagacttgcctgactcacagcagcaacatcagagctctaagaaaggcaagctgtcggaacagctgaagcactgcaacggtatcttgaaggagctgctctctaagaagcacgctgcctatgcctggcccttctataaacccgtggacgcttctgccctcggcctccacgactaccacgacatcattaagcaccccatggacctcagcactgtcaagcggaagatggagaatcgtgattaccgggacgcacaggagttcgctgctgacgtgcggctcatgttctccaactgctataagtacaatcctcctgaccatgatgttgtggtcatggcacgga

SEQ ID NO: 1186 - DNA, 579 bp, Cricetulus griseus
gaaggccattgttctttaagtgtagctaggggctgactcatatctcagggttttccatgtttgtgaagtggacagttctttgactaggatgtgacttactgtttcccatagtgatgcgaaaaccagcatggaatgacatggtttgaagctggtggaggattaggagcctcatgggcacactgtttctgtacggataagctgtgtctgggcataagatggaggcagaacagacactgcacaggagcaggttgccactctggggaggttctgttcagcaatctgtggttttgatatatatcaaaatcttgtgtaatcaaaagttttcaaagcttcacagtaaatttggacatacacactaaatttctaagaatccaccctcttgtcacactggtaagacataatttgaaaatgaaagcgacagctccatcattaagtgtgttccatgaggatcaggggatttggcttcagtgtctgcctttgccatatgtcatgtagggttctctgggccatggtcccttctctgtagctgatagtcctactctacagctgtcagtctttatcacaaatgccacagtatca

SEQ ID NO: 1187 - DNA, 579 bp, Cricetulus griseus
  misc_feature (518)..(539): n is a, c, g, or t
ttccccatgtcaacaagtggagagatttcacgtatcaatgttcctcctgaatcacttgttctgaatatgctggtgcatgtctcagtgactcaacaaaaagtactatcacagctgaaaacctctccgtctgttcctctcttctagtgagcactgcttcagggcttcatttgactatctcttgtgagttcacatatgggtatctttgtttaatagacatgcacacgcattgtaagttctatcttaaatgaaaactgcttttatgtggaaatgctcagccctcatgagaattgcctttgcacacgtgatctgaaccgtggagcctatcctcacgtagactgcttgagtgtggccatacaacattaaatctggtttctcgttgacaaaataaaaatcaaacaaggaaatgtactgcatgatagatttatttgctttatttggtgttaaaagtcttgttataactttacaattctgtggtatgactttataccaagaataggaacctgccacctatattagannnnnnnnnnnnnnnnnnnnnncacttaaatgacattcaagatgtaaaattttccttttaat

SEQ ID NO: 1188 - DNA, 173 bp, Cricetulus griseus
ataataaagttacagataaattattttgttttaaaatgcctaaaatttttctttaagtattctgagcagcagactttaaaaatatttcctgctaagtgtaaccatacagcttattccacaaaatgctatttaatgaaactgaaggttgttttggtttttggttttaggttttt

SEQ ID NO: 1189 - DNA, 426 bp, Cricetulus griseus
  misc_feature (60)..(107): n is a, c, g, or t
  misc_feature (118)..(140): n is a, c, g, or t
  misc_feature (151)..(165): n is a, c, g, or t
  misc_feature (167)..(187): n is a, c, g, or t
  misc_feature (190)..(247): n is a, c, g, or t
  misc_feature (275)..(347): n is a, c, g, or t
  misc_feature (392)..(415): n is a, c, g, or t
cgaaagacggaacgccgccgcgctccgggactacagcctgttgctggacttcgagactgnnnnnnnnnnnnnnnnnnnnnnnnnnnnnnnnnnnnnnnnnnnnnnnnagttccctatnnnnnnnnnnnnnnnnnnnnnnntctgcgcgggnnnnnnnnnnnnnnntnnnnnnnnnnnnnnnnnnnnnacnnnnnnnnnnnnnnnnnnnnnnnnnnnnnnnnnnnnnnnnnnnnnnnnnnnnnnnnnnccgcgtggagatcatagccaacgatcannnnnnnnnnnnnnnnnnnnnnnnnnnnnnnnnnnnnnnnnnnnnnnnnnnnnnnnnnnnnnnnnnnnnnnnntaaccagctcacctccaatcccgagaacacggatttcgacgcccnnnnnnnnnnnnnnnnnnnnnnnnatgacccttca

SEQ ID NO: 1190 - DNA, 284 bp, Cricetulus griseus
  misc_feature (34)..(62): n is a, c, g, or t
ggaaaggttgtttaaaatcctcaatgttgtcggnnnnnnnnnnnnnnnnnnnnnnnnnnnnnggagacgaatctgcattgacatactgcaccggatgaaggagctctgcaggcacatgagcatcttcgacagtgaggctcacgccaactataaaaaccaattgtctgtactccacgatgctggtcttcttcaagagtgcgtcccagtacatcaacagcatacagtcatctctcttccaaggtcctaactcccctacccaggtcccactggttcttctggaaaat

SEQ ID NO: 1191 - DNA, 579 bp, Cricetulus griseus
ctctcgccaaagccatccatgaaaggttcttcatcggcgttatggagcctcagctgatgcagacctccgagatggggatcctgtcgtcaaccgctctgctgcaccgcattgttcggcaagtgacctcggacgtcctgcttcaggaaatggtggtcttcatcctgggagaacagagggagccagaaactctgtcagagataagcaggcatcccctaagacataggttaatcgaacattgtgaccacatatctgacgagataagcataatgaccctgaggatgtttgagcatcttctacaaaaacccaacgagcacatcctttacaacttggtcctaagaaaccttgaagaaagaaactatacggaatacaaacctttatgcccggaagacaaggatgcagtggagaatgggctgatggcaggagccctagatctggaggaagatccattatttactgacatttcaccagataacactctgcctaaccaagaatggatcagttcaccccatgccagcccagaccatcccaaaaatgatggcaagacagaagtccataaaatcgtcaacagtttcctctgtg

SEQ ID NO: 1192 - DNA, 581 bp, Cricetulus griseus
acctcaacaacccatatgtccggaaggccctccacatccctgagaagctgcctcgctgggacatgtgcaacctcgtggtgaacctacagtaccgccgtctctatcaaagtatgaactcccagtacctgaagctgctcagctcacagaaataccagatcctactgtacaacggcgatgtggacatggcctgcaatttcatgggggatgagtggtttgtggattccctcaaccagaagatggaggtgcagcgtcggccctggctagtggactacggggagagcggagagcaggtagccggcttcgtgaaggagttctcacacattaccttcctcaccatcaagggcgctggacacatggtccccactgacaaacctcgagcagccttcaccatgttctctcgtttcctgaacaaagagccttactgaggggacctatggaagtctgcagtacctgatccagcctctcccagcctctctcagtggagagagatcctaccttatgcagaaagcccctgtggggcaggccctgctctaacactgtctctgacttctcagtcctgtgcatcccagcttaggcctcag

SEQ ID NO: 1193 - DNA, 514 bp, Cricetulus griseus
  misc_feature (268)..(289): n is a, c, g, or t
  misc_feature (378)..(417): n is a, c, g, or t
atgcagaaacacactttatagtaactatgcagaactatagccaaagttagtgtagaaataatatgaaactacagagcattcatgtctcaatgttgaatcagtttcattttaactctgaagttaatttcttagggcatcatttgggctagtttctgtgtaagtgtaaatactacaaaacttatttatactgttcttatttgttacattcatagatttttatgacatctggctaaaagcaaattattgcaaaactaaccaaaccactatnnnnnnnnnnnnnnnnnnnnnncaaaaatgacatttttatattaaattgtttggctctgacaaaaattaaaggagctgacactaataaaggaatatcgtgacttattttannnnnnnnnnnnnnnnnnnnnnnnnnnnnnnnnnnnnnnnaggggggcgccccccccgggggggcccccccttttttccccctttaagggggggaaatggccccccgggggaaaaagggggaaaaagtttttcgggg

SEQ ID NO: 1194 - DNA, 580 bp, Cricetulus griseus
  misc_feature (319)..(338): n is a, c, g, or t
tggcccagtttcagtttgaggatttgaatataaaaacaaaagccatttaaaacattacaaagaggtttttttttattttctttctctttaaattattgttgaaaagctcctttcaaagtcccggatagaatcaaggacctttaactctaagcgtgtgttccatagtaaagatttctgggctgttcactttggagaggatggtcctgaaacttaagagatggtcgtagtgtttgtgggtaataactccattgggccatacttgctttaatcagtgacaaaaacatgaaaatcaggccgggtgtgctggtacatacacatnnnnnnnnnnnnnnnnnnnntgacgtctctgaatttgaggccagcctgatcaacagaatgaaatctggggtgggggggtataagaaggaaagcataaaattcaggcatagaaaccaaagtgtgctttagaacctactgagtgtcttttgagattccaggccatccacctggagggtccttttcatgacggacttgatgtgggagcttggataccttggtacaatgttaagtcatgcaccgagatcctgagagttcatggacg

SEQ ID NO: 1195 - DNA, 580 bp, Cricetulus griseus
  misc_feature (4)..(4): n is a, c, g, or t
  misc_feature (514)..(567): n is a, c, g, or t
tggngaagaaataaatatggcattgaggctgagacctaaaggataagttgggatgggtggaataacactccagaacaaagactgtatttttaaaggtagtgaggagaaaagttatgttcatgcaacaaacataaaaggccagtatattttattgtaaatgtagtgggaagctgttgaagggttctgtgcgacagagtatatgacctattttatttgaacatctttgctggccagagaatgtgttctaaggtgtgactggaaacaaaataaaccatcctgagtgaggtgaactgttgttccaacttagagattataaggatttgtgcataacagatcagatgtgagagaggctgactcccagggtttgacttcagtaattgaatagtggggttctgctccctgacttgggaaagattgaaagtagaatggatttggagtgatgaatagaattctagttgtatttgtttgtaagggtaccttattctacaagtcatggagtgtggcaaaaaggtannnnnnnnnnnnnnnnnnnnnnnnnnnnnnnnnnnnnnnnnnnnnnnnnnnnnnaaatagatgatac

SEQ ID NO: 1196 - DNA, 481 bp, Cricetulus griseus
  misc_feature (97)..(97): n is a, c, g, or t
atcctgagtacagtcatcttggcaggagagggggcccttagtaacatagattgcccagagagggggcccttagtaacatagattgcccagggcctanacatcagagtgtggtaggagggagctggggtgacagatgagggtggcactgtggctgtggtcacacccatgtggcttctcaaagttactataccacctataccactccaggcccctctactagaagatcctctgctgaccaaggctcttcatgcctgagccagccaggggtcagggagagcgcttgttactgccagcaacagagcagggcttcccctggaaggaatgtgtgagccagagcagcaccagggagttctcccttggctctttgtgtcagaggctccttagtgagattagagcccttgtatttttgtacctttttatactgttaactgtggagaactgttgtgcttttttgtaacatgacctgttttctagaaaaaaa

SEQ ID NO: 1197 - DNA, 579 bp, Cricetulus griseus
  misc_feature (63)..(81): n is a, c, g, or t
ttaaacgggttggggctcccgggccgagggcagcccagggttttgttttattttattttatcnnnnnnnnnnnnnnnnnnnttggtaaggtttgtttttctggttgatggctcccaggggcggcctcctctccctctccaggacttctcagatttcgatgaacgggaatgaatcttctcgccggcttctcctaatcgatatctgtggagttccgagtctgtgtgggtaaaaccgtccagttgtgagttaccgagacagtgcttgcttgatcggaagatgtgcctggagagaggtcctgtgtctgtccagcttaacagtaccgcatttgtacctagcgcctggatgacagctcgggagtgagagagacaccattaagaacaaaagaaaaggattcttcagaacaacagttatggaagacagtaaacgtggagcgaattttcccagaatgaaaacaaatgtgaggtgtaaagatgatgaaaactttagaagaagaaagaggaagtgagatgcgaacaggagtcatgtggggacactggcctgctctgtcccctggtggtgaaacactgtatgtgttgtgta

SEQ ID NO: 1198 - DNA, 579 bp, Cricetulus griseus
tgccgaaatccaagcgggacaagaaagtttccttgacaaaaactgccaagaaaggcttggaactgaaacagaacctgatagaagagcttcggaaatgtgtggacacctacaagtacctctttatcttctctgtggccaacatgaggaacagcaagctaaaggacatccggaatgcctggaagcacagccggatgttctttggcaaaaacaaggtgatgatggtggccttaggtcgaagcccatctgacgaatacaaagacaacttgcatcaggtcagcaagaagttgagaggtgaagttgggctcctttttaccaaccgcacgaaggaggaggtgaacgagtggttcacaaagtatacagaaatggattttgctcgagctgggaacaaagcaactttaactgtgagcctggatccaggccccctggagcagttccctcattccatggagccacagctgaggcagctaggcttgcccactgcccttaagataggtgtggtgaccctgctatctgactacgaagtgtgcaaagagggggatgtgctgaccccagagcaggcccgtgtctagaagctttttg

SEQ ID NO: 1199 - DNA, 578 bp, Cricetulus griseus
ctgaacgcaggtcctcatgcttataagggaaaactaccacccaccggggcggtctctgcaacactttaaaaatatatacatatgtatatatctaacaagtatactcaccatgtgtgtgtatgtgtgtatgtggttgcggagggaaaccctggaggtctccgttgattactctctgccttacttcccacagtctttcactgaatctagagcttgccaatttggggcaaccctggtggctgggattagaaggcttcgtgaccacgacaagctttgtccatggctgctagggaactggattcaggtcctatgtttgtgcaaccatctcatcacaccctaaaactattttaacagccttcaatcacaaataccatgagtggggaagatgaccccttggtgaccaactggatcacttcctggtggatgcaggcagtgcctttttgattacagagaatagaaagcaagggagctaagggaatgttagagtcattgcccatcagaagacttgagaaagtctgaagacagggggaagatggcccacgacagacagtgagtaaatgcatttgttctgaggaatgggg

SEQ ID NO: 1200 - DNA, 352 bp, Cricetulus griseus
  misc_feature (241)..(279): n is a, c, g, or t
aaatcatccactctcaccatgtgcctgtgagatggaaattcccaggtagacttctgacaggccaactggtacattttgttattaaaaccacaaagctgaagacaggtgtagttagtggtacacacctataacctcagcacacagaactattcaagaaaatagttcaaggccagcttgggctacataatgagacattgcctcacaaaacaaaaactacaggtctgcaatttttaagtgtgtnnnnnnnnnnnnnnnnnnnnnnnnnnnnnnnnnnnnnnnagagtgtgagtgtggtctcttctaatatgcgtgtgagtctctaaacaatagtgtatgtgagcgctagctatct

SEQ ID NO: 1201 - DNA, 360 bp, Cricetulus griseus
gatgacatcagctccgtattcagacaccttctccgatgacatggccttcaagttagaccggagggacagcgacgagcgtctcgggacggaccggtacgaccgcctgcacagacatcgtcaccaccagcaccggcggtcccgaaacttgctaaaaactaaacatacggaaaaggagaaaaaccaggaagtctccaagtcgggatctgtgaaggaccggatatcgggaagttcaaagcgttcgttggaggggagcgatgactacgggaaggcgcagatatccaaaagcagcagcatggaatccaggtcatccaaactccacaaggagaagacacgcaaggaacgtgagttaaagtctggaca

SEQ ID NO: 1202 - DNA, 580 bp, Cricetulus griseus
aaaccccaaggaagtggcctagcatcccccaggccaggcctctctccccttgtgggccaaggcctactcaggttcaagggcctccaagactcgtctgtggcactagttctgttctgttatcaatgtagcttctcctgttcacatagtttgacctgaagttgtttgtgggctactcaagtttgtcccccatccttgaaaagttgggttgaaagtatttccccagggttggcaactgctgagagccaatcatcctaacacttgacattagacaaaagggcctttttgcaaagttgtcacttactcctgggctaccacttttctgggggagacctcacttgtcaccaacctgggatgagccacatctcctctaaagtgttttgggtgtccctaggggtgcagatggcctcctggggctgctgcatctgttacagcaaccctcctgcctgcttacctgttccctcattagttagcaatggaagcaagcagaggctgaggccccagctccctaaagtcagaatgttcctgccatgctcccactgcctataatcccctcctgtccacaccaagtctctgtatccct

SEQ ID NO: 1203 - DNA, 580 bp, Cricetulus griseus
tctgagcacagtcaagcctccactgtgtcccctcctgtaggcacttcaggggacaatgcgctgccgcatacctcagccaggacccatctgccccagtcaatgaagattatgcatgaaatcatgtacaaactggaagtgctctacgtcctgtgtgtgctgctgatggggcgtcaacgaaaccaggtccacaggatgattgctgagttcaagttgatcccaggactcaataatttgtttgacaaactgatttggaggaagcattcagcatctgcccttgtcctccatggtcacaaccagaactgtgactgtagcccggacattaccttgaagatccagtttttgaggcttctccagagtttcagtgaccaccatgagaacaagtacctgctgctcaacaatcaggagctaaatgaactcagtgccatctctctgaaagccaacatccctgagggggaagctgtcctcaacactgacaggagtttggtgtgtgatggcaagaggggcttactaactcggctgctgcaggtcatgaaaaaggagccagcagagtcttccttcaggttttggcaggcccgggctg

SEQ ID NO: 1204 - DNA, 466 bp, Cricetulus griseus
  misc_feature (241)..(294): n is a, c, g, or t
aaatcatccactctcaccatgtgcctgtgagatggaaattcccaggtagacttctgacaggccaactggtacattttgttattaaaaccacaaagctgaagacaggtgtagttagtggtacacacctataacctcagcacacagaactattcaagagaatagttcaaggccagcttgggctacataatgagacattgcctcacaaaacaaaaactacaggtctgcaatttttaagtgtgtnnnnnnnnnnnnnnnnnnnnnnnnnnnnnnnnnnnnnnnnnnnnnnnnnnnnnntttcaacctttactgtgtgtgcgctctcaacctttagtgtgtgtgtgcgctctcaacctttaaagtttatttttttccaagtggggaacattgtgaacaataaagggatgaacaggggcatacgccttcttagtgttcatctgtggggattctggggtgtgcgcatcacttg

SEQ ID NO: 1205 - DNA, 580 bp, Cricetulus griseus
  misc_feature (539)..(555): n is a, c, g, or t
attccagcattgcaatatgaggacatgaatagttgggatgagtgtaaattattaagtgcctttactactaagctgactcaccagcctgatacagggccttgccttatatatagccttgactagcctggaactcatactatagtcaagactgccttgattacatttatagttgccagttttagattaaaactaaaaagacatctcatagcagctttttaaaaatattacagttagcccttgctaacatagtggtatatgcctgtaatcaagcctgagtcatttgacaccctgtctcaaaacaaataaaatgagaatattacaattaagcctggaggtgtaatttggtgatttgtaaaatacatacatatttggaaatggtatgtgtaatagatcctcaaatgtaggtatgaatgaggacatattgcaatactctgataagaacagtcacaaaactagctaataattattaagcctttcttaagtgccctggacagtcctagagttttaaggtggaaatcattgccacctacttccatttnnnnnnnnnnnnnnnnncgtggtccaggcattccttatagcc

SEQ ID NO: 1206 - DNA, 366 bp, Cricetulus griseus
tcagcatcatcctgggagactccatctggggaggcatgtgcactccctgaggtggggacgggtgatgggggtgctgcagggggaggagcggctgtagctgttgttgttggaaaagacttctgattggctgctgctatagtggtggcggtggtggaagattctgtttttgtggaagagggattaatcttggagagtgagccacgacaggaggctgtgtaagaagcagggcgggcctgtgctctttcatccgtcccctcttagtgctctctctcctctggtctcccatcccacggcacatcatatagccttctggccttcctccccgtcgggaaccatattgcccctgtttatgctgccactctcttt

SEQ ID NO: 1207 - DNA, 551 bp, Cricetulus griseus
gaatgttgcttgtgggattataaattttattatatttgtgagggaagtgtttgagctgagcatgcatagtaaatttccaaagtgactagttttgtaaaagtttgatattttttgtattatgtttgtgtaactaaactgccattatccatgtttattgatttagaacaaactattcagtattaattttatttttatcatagtacctttgcagtaattgatagtaagaagtatatactatgttttattatctgctacacactgcctagattagtactttgcatgaatataatcatttcctgaattcaaaacagtattttaaaatttttgtttacattttactttgactttatgtatatgtcttacctgaatgtatgtatgttcacttcatgtgccctggggcctgagtaggtcaagaaagggcattaaaacaatagttgtaaaccactattgggtactggatactgaacctggagcaacagctgctcacctacatctccagccctaaaaaaaattgatttttatagggctgttttaagtgaaagctttattgc

SEQ ID NO: 1208 - DNA, 580 bp, Cricetulus griseus
ctttaaacatggacaccgcggattctggtcctggggaatcttcctcactgacgctccagggtcccaggacgatcgactcttcctgattaaaggtggaattttcctcggttctgcagcagcagcgggaatgctagccggatttgttacaacatttatcatttatctaataaagaaaagccctgaatggttcaataagggcactatgagcacatctgcctttccagagagtgggtcttcccttgctcttcgagccctgggctggggatctctttatgcctggtgtggggtcggcgtgatcagctttgcagtctggaaagctttgggagttcacagtatgcaagactttcgaagtaagatgcaatccatatttccaacaattcccaagaactccgagtcagctgttaagtgggaagaggcactggaatccaagtgagatggattcagagatggactccagacatacaggagcttcaaaaacaccatgtcagaaagggcttcggttgactcctctaggaacacgtgcagatggccgtgtaccccacggccacagccacagccatctgcctgcgtttatggtaca

SEQ ID NO: 1209 - DNA, 579 bp, Cricetulus griseus
ccgcggctgctcgggccggcggggtcggtcgtcgtcatggaatacctgtgggatgagatgaccctgaccttcgcccgcacgtccatgttccccttttttgacatcgcccactacctggtgtcggtgatggcgctgaagcagcggccaggggcagcagcagtggcatggattaatcccctgtccagctggttgagtgcaatgctccattgctttggtggaggaattttatcctgtataatgcttgcagagcctccgttgaagtttcttacaaaccacactaatattttactggcttcttcaatctggtatattgtatttttttgccctcgtgacctagtttcccagggctattcatatctacctattcaacttctggctgcgggaatgaaggaagtgaccagaacttggaaaatagtaggtggagtcacacatgctaatagctattacagaaatggctggatagtcatgatagctgctggatgggcccgaggggcaggtggtgttatcgtcacatcttgtgtagaattgctaaaaggagattggaaaccacaaagtgatgagtggctgaagttgtccttc

SEQ ID NO: 1210 - DNA, 568 bp, Cricetulus griseus
tcgctctccgggtcttgctacctcgcggaggacgctgcacagactttgccgccagtctcctagctctcctctccaagtccgccgcggcgaacatggcctcaggagttcaggttgcagatgaagtatgtcgcattttctatgatatgaaagttcggaaatgctcctcaccggaagaaatcaagaaaagaaagaaggctgtcattttttgtctcagtgcagacaaaaagtgcatagttgttgaagaaggcaaagagatcttggttggagatgttggtgataccataaccgatcctttcaagcattttgtgggaatgcttcctgagaaagattgtcgctacgctttgtacgatgcgagctttgagaccaaggagtccaggaaagaggagctgatgttcttcctgtgggcaccagaacaggcgcctctgaaaagcaaaatgatctatgcaagctcgaaggatgccatcaaaaagaaatttcaaggtataaagcatgaatatcaagcaaatgggccagaagatctcaaccggactagtattgctgaaaaactaggtggctccttaattgtagc

SEQ ID NO: 1211 - DNA, 505 bp, Cricetulus griseus
cactctcatctggtcctttattcctgtctctcttacctgtgttgagcagtctgaaatgcacagtggtctccatgggaagtagccttgctgccacaaagactcatccacagaagtcagaaatcaagtgttgcaagtagtttgcactaaaaaaaaaagattatcattatttgtcctcatcaccagaatctgccagcgcctgtggtgcccacaagtactcctgtcacagtctacactggaggacactcggaatcactgaatttaatcaccagaccagtcgcacagggaaaatgggaagggatctaatatgctggatgaattctaccaaagtcagccacagtggctgtcctcacaggatatcaaactgggcgtggtgtgaccgtccccagggcaccgaaggaaaagccatgcctgctgcggatagcgctctatacaaggggggctctttgccgcctgcgccctgagtcctcttagagccaggggctctccatacagcacatatggtagg

SEQ ID NO: 1212 - DNA, 579 bp, Cricetulus griseus
tgtctcggtgcccgagtgagtgatctcacccctcgcaccatgggcaagaaaggcaaagtcggcaagagccggcgggacaagttctatcacttggccaaggagaccggttatcgttcgcgctccgccttcaaactgatccagctcaatcgccgctttcagttcctgcaaaaagcccgggccttgctggacctgtgtgctgcgcccggaggatggttgcaggtggctgccaagtttatgcctgtatccagtcttattgtgggagtggacctggttccaatcaagcctcttcccaatgttgtgactcagcaggaagatatcacaacagagcgatgtaggcaggccctgaggaaggagctgaagacatggaaggttgatgttgtactcaatgatggggctcctaatgttggggctagttgggtccatgatgcttactcacaagctaacttgacactgatggcgctgcgtttggcttgtgattttttggcccgtggtggttgtttcatcacaaaagttttccgttcccgtgactatcagcccctgctatggatcttccagcagctgttccaccgtgtccaggcc

SEQ ID NO: 1213 - DNA, 578 bp, Cricetulus griseus
ttgcagtgccttcgctacattagaagaggaggcttgtacagagcttgtcccatacctcgcttatatactggataccctcgtcttcgccttcagtaaataccagcataagaacctgctcattctgtatgatgccatagggacactagcagattcagtgggacatcatttaaacaagccagaatatattcagatgctaatgcctcctctgatccaaaaatggaacatgttaaaggatgaagacaaagatctcttccctttacttgagtgcctctcatccgttgccacagccttgcagtctggcttccttccatattgtgaacctgtgtatcagcgttgtgtaaacctggtacagaagactctagcacaagctatgctaaacaatgctcaaccagaacaatatgaagctccagataaagactttatgattgtggctcttgacttactcagtggcctggctgaagggctgggaggtaacattgagcatctagtagccagaagtaacatcctaacactaatgtatcaatgcatgcaggataaaatgcccgaagttcggcagagttctttcgccttactagtga

SEQ ID NO: 1214 - DNA, 416 bp, Cricetulus griseus
  misc_feature (155)..(178): n is a, c, g, or t
  misc_feature (306)..(318): n is a, c, g, or t
  misc_feature (320)..(341): n is a, c, g, or t
acatctatatgatctgggattttgtttttattttgaaatgggagctttttgtttacaagttcattaaaaactaaaaactgtttctgtaaggaagtgaaatttttttaaacaacaaaatgccttgctgactcaacaagaagtatatcttcccccannnnnnnnnnnnnnnnnnnnnnnnagtcaaggtcttattttgtagctctgggtggcctggaactcattgtatagatcaagctggcctagaactctcatagatcctcctctgcctccctgaagtcctgggactaaaaaacatgagccaacacnnnnnnnnnnnnncnnnnnnnnnnnnnnnnnnnnnnttttccctaaatttttttttttgatagactacttcaagccatttgttatatatttctttgctgcaaaaaattttt

SEQ ID NO: 1215 - DNA, 578 bp, Cricetulus griseus
tttgaggagtatgagtggtgtgggcagaagcggatacgggccaccacactcctggaaggtggcttccgaggttccggcttcgtcatgtgcagtggcaaagaaaacccagacagtgatgctgacctggatgtggatggagatgacactctggagtatgggaaaccacaatacacagaggccgatgtcatcccttgcacaggagaagagcctggtgaagccaaagagagagaggcactccggggtgcagtcctaaatggtggcccccccagcacccgtatcacacctgagttctctaaatgggctagtgatgagatgccatccactagcaatggtgaaagcagcaagcaggaggccatgcagaagacctgcaagaacagtgacattgagaaaatcactgaagattccgctgtaactacatttgaggccctgaaagctcgtgtcaaggagcttgaacggcagctatctcggggggaccgatacaaatgcctcatttgcatggactcatactcgatgcccctaacgtcgatccagtgttggcatgtgcactgtgaagagtgctggctgcggactctgggtgc

SEQ ID NO: 1216 - DNA, 524 bp, Cricetulus griseus
acttgaggaggagctgcagtacggcctcactacaggagggatgggatcagagaacagtgctttaaagagctatacactgagagaaccaccattcaccttgccctctggacttgctgtttaccccgccatactgcaagatgggaaatgcgcctcggtgtttgtatataagagagaaaatgaagacaaggttaacaaagctgccaagcacttaaagacacttcgtcacccttgcttgctaagatttttatcttgtactgtggaagcagatggcattcatctcgtcactgagagagtgcagcccctggaagtggcgctggaaaccctgtctcctgcaaaagtctgtgctggaatctatgacgtattgctggctcttatcttcctccatgacagaggacacctgacacacaacaatgtctgcctgtcttctgtttttgtgagtgaagatgggcattggaagcttggaggcatggaaacagtgtgcaaagttcctcaggccacaccagagtttctcagaagcatccagt

SEQ ID NO: 1217 - DNA, 580 bp, Cricetulus griseus
acagcagttcgttgcattcccgaagctgctatagtggacaagggcatttggtcgcttagcgccctccgctcgagtgcccactgccgtcccgtcgagagcccgcgcaggaaccagcacctttgcagacatggagactgtggttcgacgatgcccattcttatctcgagtccctcaggcctttctgcagaaggcaggaaaatctctcttgttctatgctcagaactgccccaagatgatggaagttggggccaagccagcccctcgaaccctgtccacttcagcagcacactgccagcagatcagagaaacccctccagccaatgagaaagaaaaggctgccaaagctgcagtccagcaggctcctgacgaatcccagcagactccagatggcacacagctcccggctggacacccgtcacccactgcaagccagggctctgggagcaagtgccctttcctggctgcacagctgagccagacaggcagcaatgtcttccgcaaggccagtctggagcttcaggaggatgtgcaggatatgcatgctgtgaagaaagaggttgcccaaagcttaataaccccc

SEQ ID NO: 1218 - DNA, 578 bp, Cricetulus griseus
  misc_feature (448)..(467): n is a, c, g, or t
ccagttgaggatgcagaggagttgtgtaaagtccctggggacacaggtggtatggcttgtagtgcacagtgtctttcataccccacccccacccccatctggtttgttgctcgagctggccatagctgggtccacggggagagtggagcctgttgcctgtcagccgcttgctgtttgcagcctgattttgtggatgagcaacaagctttgtaaagaaatgatctggagagatctgttaaagcatttcgtaagtcaaactgctgcagtgacactgtagtacattttccattaactatggaatcactttctggcaaaactcagtacagggtttgtagcagttattatacaaaggttgctgttaatatgcttcatgttggtttaaaaaaatgaacaaggaataaagttgtccttttcttttgatgcatatacaatgagttacatgtgttannnnnnnnnnnnnnnnnnnnctccactgcaaaaagtctgaacgtgttattctttctctctcctcagcagacgctgctgatcctgttttttttcctgtacttttccctttagggagtctcattgtattgggt

SEQ ID NO: 1219 - DNA, 547 bp, Cricetulus griseus
cggctgaaggagctgcgtggactgaggcgttgggaggcccatctttggcgaggttggcccatgcttcggctcatggcaccgagcggcgtccgtcgtgagatcattcactgaagaccaaataagtagctatgctaaattctcacatggatgagtacagaaactctgataatggcagcacaggcaacagttcagaggtagcagtagaacatccagattttagtactgagattatgaacgttacagagatggagcaatcacccgatggttctcccagcgtgaatgcatctacagaagaaaatgatatggcaaatgctgtggaccttccagtgacagaaacagaaggaaacttccctccagaatttgaaaaattttggaaaacagtagaaactaatcctcaggattttacaggctgggtatattttgcttcagtacgtataacacgagaatcacttgacggctgccagaaaagcatttgacaaatttttcatacattacccatattgctatggttactggaaaaagtatgctgaccttgaaaaacgacatg

SEQ ID NO: 1220 - DNA, 567 bp, Cricetulus griseus
  misc_feature (357)..(392): n is a, c, g, or t
ttaccaagcctggcaaggtcagcgctggagaagaatctggcagatgctgcaatagaaataaatactaatgatagcctggagccagaactggagagctacaagtgtgagatagtatccgggtctctgaggattggcgctgtcagtgcaccagtgtacaatgcccaggagaagatgaaagtgcctgatgttctcttctatgacaacgttcagcacatgatagtgatggaagacatgctcaaagacttcgtcctcggagaacacttgctgttggtcggtaaccagggtgtaggaaaaaacaagatcatggaccggttccttcacctgctcaacagaccccgagaatacatccagctgcannnnnnnnnnnnnnnnnnnnnnnnnnnnnnnnnnnngcacaaggagagcagtagacctggagagactcacaagccctgggaacagcacagcccttagaagtctgagccgagtgatggcacctgagcctgcattgggtgctgtggtatggacagtaacctatgcagtgtatgctgcagaagtatggttcgttcatccttttgaaagctactc

SEQ ID NO: 1221 - DNA, 580 bp, Cricetulus griseus
  misc_feature (272)..(290): n is a, c, g, or t
cagcacatgtttgaagtactagctgccatggattaccgctctgttgtccttctgaatgaatgcagtaagaaggtcatagataatatccatggttgtccttctaaagtactgatcagcatactgcagtcctgtaaagccctccgataccaaaataaagatctcttcaagaggatagcagactatgtggctacaacttttgaaatttggaagttgaatcaagttatctttttcctcttgggatttgaaaaccttggttttcgaccttctgcttnnnnnnnnnnnnnnnnnnngaaagtaatggaggatcctgactctctaaacaaaaagaacattgtttctatccttcacgtgtattcttctctcaatcatgcccacaaggaccagaacagagagttcctagaagcaatggcaagtgctctgactgtttatcttcaccacatctcttccgaaaacctattgagtgctgtgtattcattttgcctgatgaattattttccccagaatctcattaaccagcttatcaaaaagaacatcatcaacgaactgctgacttcaggtgacacagagaagaatattccta

SEQ ID NO: 1222 - DNA, 271 bp, Cricetulus griseus
gtggagactatgcagaccgtctgtgttgctctgagcttacagggtgggaaagtagtgacatttagctcttttcctgctgcagtccaagccagggggaaatgctgatggtgagctaggaacagtttgaatgtggcacaggggcaggctatccatcctaagacccagctagatcctgaccattgctgctggcactgcttcctcttctcccacctcttcctctttctcctcttttttttaaaggaaggaacaatagctaggtaagatttttttt

SEQ ID NO: 1223 - DNA, 579 bp, Cricetulus griseus
tgagagcaacgcccgttattttcatgtggtcattgctggcccccaggattccccctttgagggagggacttttaaacttgaactattccttccagaagaatacccaatggcagcacctaaagtacgtttcatgaccaaaatttatcatcctaatgtagacaagttgggaagaatatgtttagatattttgaaagataagtggtccccagcactgcagattcgcacagttctgctatcaatccaagctttgttaagtgctcctaatccagatgatccgttagcaaatgatgtagccgagcagtggaagaccaatgaagcccaagccatagaaacagcgagagcatggactatgctatatgccatgaataatatttaagtcgatcagatcatcaagtgtacatcacttctcctgttctgccaagactcttcctttttttgtttgcatttaatggacacagtcttagaaacattacagaataaaagcccagacatcttcatctttggtgattacatgcacattagcaaatctatgtcttgtcctgattcactgttgtaaagcatgagcagaggctagaagta

SEQ ID NO: 1224 - DNA, 187 bp, Cricetulus griseus
gtgcagaggaggctgagggattcgagcccgtggtgagaggtttccgtacagtgtcttcgctttattcttctcctctgttttgaggtatgcgtccacccatgcccttgggcgtgatgtggcggatctgcccccgctgagggaccggggggcgcggcctcttgaaccgtcctttcagtgaccccaccgg

SEQ ID NO: 1225 - DNA, 580 bp, Cricetulus griseus
  misc_feature (578)..(578): n is a, c, g, or t
gcattcaagacccaggctaaggaacctggaacatacacgctgcgacagctacgggtcacactgggcccggtgtggtttgtccttgcacacatccaccccattgtacagtacgatgtgtactctcaggaacctcagctgcacgtggagccgctggctgatagccttttggctggcattcctcagaaagtcaagtttactgtcactactgggcattatacagtaaagaacggagacagcctccagctcagcaatgttgaagccatgctcatcttgtgtcaggcagagaacagggccgtggtctactctaactcaagagaagagtgttccactgcctcgctccggatccagtcctccgacaaggtcacgagtatcagtcttccctctgcacctgcataccatgtgatcgagtttgagctggaggttctgtctttaccttcagctccagcagttggtgaggatagcagtattctggggacaccagagccctacaggaagcagaaagacatgcagcaaactgactattgcatggtcaccacagatcacaaagtgtccattgattgcccgtggtctatctactnca

SEQ ID NO: 1226 - DNA, 457 bp, Cricetulus griseus
  misc_feature (71)..(86): n is a, c, g, or t
caactgtcctgtctgatcagcctggcctgcttggtcccaaggcactttttgttttcatggcattatctttnnnnnnnnnnnnnnnnatctggctacttcgtcatgcagataacatgccaaagaagagtgcagatgactttatagataagcatattgctgagctgatcttttacatggaagagcttacagcacacgtcaggaagtatgggcctgtaatgcagaggtactacgtgcagtacctctctggctttgacgctgtggtcctcaatgagctcgtgcagaatctatctgtttgccctgaatatgaatcaatcatcatgtcatcttttgttaacactatgacttccctaagtgtaaatcaagtcgaatatggggaagtatttgatttcacatggatgacattagattggtttatattacaggcatacactagtggctccaaagctttacttatcct

SEQ ID NO: 1227 - DNA, 580 bp, Cricetulus griseus
aactccccagcggcactggcaggcctgagacctcacagcgattacatcattggagccgacactgtcatgaatgagtctgaagacctgtttagccttatcgagacacacgaagcaaagcccctgaagctctacgtatacaacaccgacactgacaactgtcgagaagtgatcattacaccaaactctgcgtggggtggagaaggcagccttggatgtggcattggctatggttatttgcaccgaatacctacacgcccgtttgaagaaggaaagaaaatttcccttccaggacaaatgactggtacacccattactccccttaaggatgggtttacggaggtccagctgtcctcagttagtcccccatctttgtcaccaccaggaactgcaggaattgagcagagtctgtctggactttctattagctcagctccaccagctgtcagcagtgttctcagtacaggtgtaccaactggaccattgttgacacaagttaaccagtcccttgcttttgtgccaccagtgaccccagctactacattatcaagtctgatgcctttgccatcaaggatgcctaacc

SEQ ID NO: 1228 - DNA, 580 bp, Cricetulus griseus
ttctgtgctaagtggggttgcgaaactaccggggatgcttattggaaacccagctcctcctgggatctgataactgtcaagcggaactactcgcaacccctccaatgtagtccccatagttttggggactgggagcaaacttgcaaaggaactctttgcctccctttaagaattaacttcactaaccgagggaaggcaacctatacggcctggctaaccgggaaaacttggggtttaagatggcacatgacaggaacagatagaggagtcatattcaaggtccggttgctgatacagagccctactccacggacgatagggcctaatccagtccttagaaacctaggaaccccaaagctcccccaacctagagctctggctcgggccattaccccggttccaaccgccaccagccattccctcgccactgcctcccaagtagaaaatattccatctactagacagcgaatttttaatctggtcaggggagccttctctgcccttaaccaaaccaggccagagatgactaacccttgctggctatgccttgcttctacacccccctactatgaaagcatag

SEQ ID NO: 1229 - DNA, 579 bp, Cricetulus griseus
ctttgtgattagatataccatagtgactgacattctaaaacatttgtcatgttctagctggcctgtgagagtttgcagagcctgagcacacccctgctttccttggagaatgcatgaggactgtggtgcctgtcattttactgtgtgacttttctcagacaagaaatagggccctgaaagattggtcaactttgtggctcacaggcaatggtggtccttattctttactggcaggtatgagagctgggcctcttaagtgtgctaaaaagggatatgttcttgatagacctgatttgtcttggatttgaacttttgctgtctttttttgtttataaattccaatgttttcttgccttggtaatacatgagcttaagacatgtagtccaatatcagaagtacaggtgttgttagcataatttatccatacctgaatggttctacatctagtcctttttgccaaaaaagaatgtatcatttaaattcatggggttagcatatctccagtgccgatgaacatttgaacatgtgcacagtaacacttggtttgttctgtgttaatttagcatacatttttgtgc

SEQ ID NO: 1230 - DNA, 579 bp, Cricetulus griseus
agcgtctccagcagcagcaggacagcctgtgggctgagagactccagggtctcacacagcagcatcagactgcagtggagcagctgagaaagaagtatgaacaagataaagacgccttactaaaggagaaggagagtcttttccaggcccacatacgagacatgaatgaaaagaccttggagaagttggacgtgaagcagacagagctggaatcactatcttcggagctggcagaagcactgaaagcccgtgagcagctcgctgaggagctttctgttttgaggggtgatgcagagaaaatgaagcaggctttagaggccgagctggaggagcagaggcggcaccaccagcacgaggtcgacagcatgagtaaggaacaagaaataactgtccagagaaccgagaagaccctgaaagatgaactcaaccagctggggcttctcctgaaggagagagacgaacacctgatagagcagcaggctcgaatagacgatcttgaagctcatcttcacaagtctgctgaggagctgcagcaggccttggctaagctggacctcctacactcacatcagagcacca

SEQ ID NO: 1231 - DNA, 568 bp, Cricetulus griseus
  misc_feature (373)..(373): n is a, c, g, or t
aaactggagctcacacagctaatcctggctcctggctctatgaccttaaacttgttgacttctgctcttgaagggcaggaaggttgattttcaggaatcaagattggcagccagtggagagacacatgaaatatcaccagagtctacaaagcctcacccctttggattgctgacaaaggtttcttgtgctgacagagtacagtggaatgtttcccttgaaaagttgcactgtaaggagatggctcctaccaaagaaaagtcattttcaggattattttttaaaggtagaatacttgaagcatatttttctagagtgtgtagatggtgatggcccagctgagacatccacaccaagggctgggctggcatgtanaaagcacaagaagccacaagtagcacttctgtagactattctgcgcttgctctcctgctcagcttttggctgaaggttcgtttcttaaggggaacctgcttgtcatacatgttaatagtttgctttcctgctatggattatagaagccacttctggaccaaacaactaactatatgtgcaaacatgttttaccct

SEQ ID NO: 1232 - DNA, 579 bp, Cricetulus griseus
  misc_feature (160)..(182): n is a, c, g, or t
  misc_feature (249)..(269): n is a, c, g, or t
cttccccatgcgtcactcctgatactggttttgccttccctaccccacctctgcctggggctgcttgctggcattctaaatgcttgttcaagggcttaatttaagggtcacctatcaattctttcaattcttttttttaatttttaaatttttctttggnnnnnnnnnnnnnnnnnnnnnnnagacaaggtctcactctgtagaccagactggcctcaaattcacagagatctgcctgcctctgactcnnnnnnnnnnnnnnnnnnnnngtgcattgcatcactactatgcctggcatctatctgccaatctgatttttaactttcatcagctgggctctttccccgagtgtctaccaaatgactgctatgtgacttctctgatcttgaggaacttggaatgaagtatagcaaaatatcacaaattctaacagcaggcagtgagacacgtgctatgtcggtagggcacgtaatgctgtcttgtgtgagatacacgggataatcacagggttctccttcatcacaagcacacagtggtagctgggcctgttagacccttgctataaggcagacgagtcaa

SEQ ID NO: 1233 - DNA, 579 bp, Cricetulus griseus
  misc_feature (320)..(335): n is a, c, g, or t
  misc_feature (425)..(458): n is a, c, g, or t
aggagtcttaccctaatgtaagatggtggcccgtctagctgtggaacccaccgaaagctgagagtctctctcagccgtaaaggtcggactcgctgaagcagtcaggcccgcttctgaagagttatttcgccggctctcgttcattggtctcctgtgaggacgcggcagcgcgtggagtcggcgaagggaaaagcgaggcaaggcaggcgggtcttcagagttctacattttagctctcagtgctgaatttccttctcccttaaattattataaacctttgctgctgtataacaagcgtgaagatgtctcgcagtcctgannnnnnnnnnnnnnnngtggaatgccctctttgcatggagcccttggagatagacgatattaactttttcccttgcacctgtggctaccagatatgccgattttgnnnnnnnnnnnnnnnnnnnnnnnnnnnnnnnnnntgtcctgcctgtagaaagccatatccagaagacccagcagtttataaaccactttcccaggaagaattgcaaaggataaaaaatgagaaaaaacagatacaaaatgagagataacagaaaa

SEQ ID NO: 1234 - DNA, 581 bp, Cricetulus griseus
  misc_feature (535)..(535): n is a, c, g, or t
gaaaggaggagaggggacagagacctagaccctgagaaaagcagttacttgaactattgtgatacaggccacatctttggggactgtcttatgaggccatcaagtgcattttaagtgtgtttctagggatggtagtgggtggagaagagagtaagtaccttacagcctaccaagcctgtagagtaggggagcgaccatgtatgcttaaaccactaggggccaggcagcatctgagtgatgaacacctttgtcatttaagatggggagagcatgtagaggaagaaggaaggtgcctagaggagggtagtaagagggagaataaattgcttttcaccccaccatctattcagatctggagtggcatagattcagatggtatcagatgttggcatggtactgttttcttgttctatgttgaattgtgaagcactttgtcagaagggggaaggactttgtgttatcaatatatagttatttggttgtgtgtttctcttaatatgtccaaattactcactctggtgtcttttaacactanggattcatgttgggacagcgtagaagaaatatatgttcaggcaggt

SEQ ID NO: 1235 - DNA, 567 bp, Cricetulus griseus
agaactcagtaatggaaatttggaggttggagttcatattgctgacgttagtcattttatcaggccaggaaatgcgttggatcaagagtcagccagaagaggaacaactgtttatctttgtgaaaagaggattgacatggttccagagttgcttagctctaacttatgctccttacgatccaatgtggacaggttggcattttcctgtatttgggaaatgaatcataatgctgaaatcttaaaaacaagatttaccaaaagtgtaattaattcaaaggcttctcttacgtatgctgaagcacagatgagaattgattcagcagccatgaatgatgatattaccactagtctccgtggactaaataaactggccaaaattctaaaaaagggaaggattgaaaagggggctttgactctgtcttctccagaagttcgattccacatggacagtgaaactcatgatccaatatatctgcagaccaaggagctgagagaaacaaattccatggtggaagaatctatgttacttgcaaatatttctgttgcaaaaaaaattcatgaagaaat

SEQ ID NO: 1236 - DNA, 567 bp, Cricetulus griseus
tgttgaaaacatcccactccacgtgaatgcagacttgccgtcgtttggacgtgtcagagagtcattacctgtcaggtaccacttacagaataagacagacttggttcaagatgtggaaatttctgtggagcccagtgatgccttcatgttctcaggtctcaaacagattcgattacgcattctgcctggcaccaaacaggaaatgctgtataatttttatcctctgatggcggggtatcagcagctaccatcgctcaacatcaacttgcttggatttcccagcttcaccaaccagctactcatgcgctttttaccaaccagcatctttgtgaagccacagggtcgactcctggatgatgcatttattgctgctgcatgatgtccaagaccagcccttggtgttcttacaaaggagtcgagagagtacctaagagacccactgggacttgttgctttgatcatggggaaaaggtaatcctgcctattttttaatgggtatgataccagctatttttagaaactcctgctctaaatttttacacaatcaactttctcccatagtttggc

SEQ ID NO: 1237 - DNA, 578 bp, Cricetulus griseus
actgttaggatatttgttcggcagcaatagggcggcgacccccttctcagactcatggtactacccatcttaccctccatcctaccctggcacctggaatagtcgtgcctactcaccactgggtggaggtgcagggagctattctgcatcctccagcttgaatgcagactcaagaaccagaacagcatcaggatatggtggcaccagaagacggtaaaatagaaagttggaggcaaacattggatgcaaagtttctgacttgttatcaccatctctttaacatctggataatgggaatatccaaaagttgtgtgatgctttgtccttgtatagcttttcatgtcctgttgtttgtggtcaagagttgatatgtgacaaaatacttacattttgtatgttagtgtaacgtgcagttcaaagtgatggctactgtgggatgctgaaattactctgcttgtttctaaagcctgtgatgccagagggagcattaagaatgtaggatccctctcccagagactgagcacaggcagcttgagccgaggctcattccctcatagaaacagtaatcctctatttgg

SEQ ID NO: 1238 - DNA, 580 bp, Cricetulus griseus
tggccacgctgcgccggcttttcgccgctccgcggcacttaatggtctgtgagaaatccaacttcggccacgaaaagtctcgtcacaaacaacacgtggagactcattatcacaattacagggtttcatttcttattcctgaatgtgggctgctaccaaaagaactgaaaagcctggccatggaatttgggccctattactctgtgaagaatttacctcttcatgaactagttacacatgagttcatccacacatttgtaaagaaaggttcattctctgcactaacatacaatacaaatattgatgaagataatactgctgcccttctaccaaatgggaagttaattttatcactaaacaaagatacttatgaagaaactggacttcaaggtcatccatctcggtattctggcagaaaacctatgaagtttattatttccattgatttaatggacgttaacctggattctaagaagtatgaaagaataacttggtccttcaaagaaaagaaacctttgaagtttgattttcttttggcttggtatcagacaggtacagaagaatcaacaataatgtcata

SEQ ID NO: 1239 - DNA, 579 bp, Cricetulus griseus
ttgtcttgggcagaacatttctggacatatcccctgaagtgtgtcatattggcattcagattccctctgctttattcagcacagacataaaggccaatttcagtgtgatgcctcatcttgtagttgctgtgatttgtggcctatttcttaagcagggagttattaccatacctggccagtactgatgctagcagaaggaactgctgcagcaggtggcccattacctttataggtaatgataagctatacatggttaagggggggggggatctccaggttctgtaaggtgctgtcaccaaggacttgcacactcagccagcagtgtgaatcaacactgggtagaaaactcaacagatgtccttctgcacttcttcagggtgggaagctgccctctggctgttgtctttgccccatgcctgtaccttctcaatctgccattttttttcagcaccacactccctatctttctccggtcaccattgctctgtttccagaaaggtatacagaatctgtgacatttaggcataggcctgtaaggcacatatattattaaggggagagttcaggaaacattatgag

SEQ ID NO: 1240 - DNA, 187 bp, Cricetulus griseus
  misc_feature (3)..(3): n is a, c, g, or t
  misc_feature (10)..(10): n is a, c, g, or t
ggngataagnaactaactactcttccatctaagagatgcttagcacagattttcctaagaaaaatgggattttttttcctagtaagttatttgattagttactgtaaagaaatatagggaactgtgcttccttggattagacattgaaatggaaaatactgtgggaattttgatattcttgaaaaaa

SEQ ID NO: 1241 - DNA, 579 bp, Cricetulus griseus
tgcatccgttgtctgaagttcaaattctttttgtgatcaatactagtggccactatactatttgtttgcctaagtatttgtgtgctaacaaactggcatgctgtattgtgtattttatagtatattttaatggagcagaaaattatgactcagtatgcacttttgagctgtctcaaagaatatctgaacatatccactagtctgaattttgactttttcctttgattagtgataatagaatcacatttatagaaataaagtactctatattatggaatagtgtaaatgtaaggattttaccttttaacatcatatagtgtcctttatatggcttcaaaaatcctctgtgctcagggatgatacacctagagataatattctattggtattctaaaattggtgttctcagtgttaagaatcaaacatgtattatggcctaaactatcagatatactgttaagagctcaaaggctagatctagttacatagtcttgatccttcccagaacaagttttatcatagagataatttgaaaatcatgcacaagcaggaagtccaataattctactccacgggacc

SEQ ID NO: 1242 - DNA, 578 bp, Cricetulus griseus
gctcctttatattggcgaataaaagcacaaacataagagtgatacagcggaaaggacctgggtgtggttagttacactgctctgggtccatcctagttcctccatatactcattgaatcatcttagactatttgcctctctgaacattaattcatttatttgtaatatggagataactattttcaaattttattgtggcaaatagaagtgatgttttttttagtatttattgaaatgttttacataagcaggtattcagtaaatttcttttgagtgtcagacaagcagctcattgtctccaggaccctttgttttagaaagactgtacaatccatttcttagaaactcacttactctcctattacccaagaacaagtgcttgggggaaaggtccttatttgaacttgagccatggctgaattgaacctttctgcacttaagcttctctggcctttcacagtccagccttccaattccacttaccattgtgttctgagcctttaaaacagtacataatccgggcattggtggcgcacgcctttaatcccatcgctctggaggcatacgcggatggatct

SEQ ID NO: 1243 - DNA, 578 bp, Cricetulus griseus
  misc_feature (480)..(496): n is a, c, g, or t
ctcggtgcgtgaagctggcgcggcgcattctcccggcgttggcgctgtcgttcaggccttctcctcgcttggtgagcacagctaccaaacagaagaatggccagaacctggaagaggacttgggtcattgtgagccaaagacagagccaccctctgcaaacaagaccctcctggaagaaaaggtgaagctggaatatcagctgaaggagaccatggaaaaatacaaacgagctttggcagatactgagaatctacggcagaaaagccataatctggtggaggaagccaatttgtatggcatccacggtttctgcaatgacttgctggaggttgcagacatcctggataaggcaacccagattgtgccaaaggaggagatcagtaactacaaccctcacttgaagagcctatatgaagggcttgtgatgactgaagtccagattcagaaggtgttcacaaaacatggcttgctcatgctcnnnnnnnnnnnnnnnnngtgtgacccttacgaacatgaagccttgttccacacccctgtggaaaggaaagagccgggcactgtggcactagttagcata

SEQ ID NO: 1244 - DNA, 123 bp, Cricetulus griseus
attgtgttcaagggcaccactagtttttctgccattttagaagggagggagaactggctcactaaaaaaggctcaatatgatttcagttacaaaaagttcttaacctgtatttttttttgggg

SEQ ID NO: 1245 - DNA, 567 bp, Cricetulus griseus
attgaggaggcccagaaggaggccaaggaagttcctgtgcagttcttcgacagagatgatgatgatgaagatgggcctgatactgatttcctcacagtgaagcggcgtgatgtgtttgggttggatcttaaagagaatgaagcattatcgaaaaaggaaccttctaaatccagtgtcaagaaaaaattaacaaaagttgcagaagcgaaaaaaatagtgaagagaaattttaaagtgaataagaaaataacatttactgatgaaggggagctggttcagcagtggccacagattcagaaatctgctacgaacgatgtggaggaagaagatgacactggtggtatcaacttatacaaggcaaaggaaaggcttcaggaagaggacaagttcgacaaagaagagtataggaagaaaattaaggcaaagcatcgggaaagacgtctaaaagaaaaagaagccagaagagaagacaacaaaagacatacaaaggccagagatgaagaggaagcctttctggactggagtgatgaagaagatggtggatttgatccaagcacacttccagat

SEQ ID NO: 1246 - DNA, 580 bp, Cricetulus griseus
  misc_feature (570)..(570): n is a, c, g, or t
agacctgccgcatgttttccctgcctaccatccgggggcactagttgctaggagaattgacacactgagacatgaatgctgctaacacatttctggctgatctgcgcaacgctgacatctatgtgtcggatgctgaggaggaggatgagacttctctggaaagtgacctggattcagaagagctggcaggagtcaggacacattccagtcagaaggacaggaagtgcttgcagtctgctcaagtggatgacactaaagaggaagaaggagagaatccattgctggtaccactagaagaaaaggcagtgctgcaggaagagcaagctaacctgtggttctccaaggacggcttcagtgggattgaggatgatgctgatgaggccctggagatcagtcaggcaaagctgctgctcaagagtcgtcagaaggagccatctacaccacctagtagtctgaagactgaacagaaacaccccccgtgccagaatgaggtccctaaggagacagaggctgtctcatggacagaagctgtcattgaccctatgggggaggacaaagtcaacagctcanacagtgacag

SEQ ID NO: 1247 - DNA, 578 bp, Cricetulus griseus
  misc_feature (30)..(48): n is a, c, g, or t
atggctgttttgtttgtttgttgtttgttnnnnnnnnnnnnnnnnnnnaggtaacattagagaggattttgaggagaagacagatttaggaaagtagttgaaaactttggaatattttttctgactctagctgccaaatggccatcatatgcttttaatctttgttgccatatctgtctagatttgaattaagctactggtttattcccacagtttgatgcctctagatgttttggaaaccaaccccccctttgttgtcgttggcccagaggggccacttgaaaaatctgacttgagaggcagagagcataaataacattttgtggggagaaaattagttggctgcttgatgttaattatggcacagtaacattggaaaaggttgtgtctgtgtttttaagtttttctttattctgcttttttgctgctataagagttttctgaaatttatattttaaacttttcatgcactttactgtttctagtatcaaaatgtgatatttttaataaacaagaaattttccattatgtgaatgaaattttaaaagaaaatagcctatattttgtggctcactaat

SEQ ID NO: 1248 - DNA, 579 bp, Cricetulus griseus
cacgcaccgtgctgtgtgggacttgtgggcagcctgccgacaaggctgccagtggctcaagagcccaggtgggcggatccatctcctctggctcttctgcctccagtgtcacagtcactcgaagctaccgcagtgtggggggcagtgggggtggcagcttcggggacagcctagtcacccgctcctacctcctgggcaactccagtccccggacccagagctcccagaactgcagcatcatgtaatctgggacctgccaagcaggggtggggccagaggccacctgctcccacctcacctcatgcccacctcctgctctgcacctaatgggagcaggcctgaagccaaagaaaaaatttatttcctgcctttgggttttttttcttcttcttctatttttttttctaagagaagttattttctacagtggttttatactgaaggaaaaacacaagcaaaaaaaaaagtctctatctaaatcctaagcccttcccatactttccctgtttctgccttaaaatcaatgggcttctttctccaaggagcccagggaaaggactgcttttataacggctagtt

SEQ ID NO: 1249 - DNA, 578 bp, Cricetulus griseus
  misc_feature (296)..(327): n is a, c, g, or t
  misc_feature (432)..(451): n is a, c, g, or t
  misc_feature (456)..(456): n is a, c, g, or t
atttcttctttgtcaaaagtggcccctgtggccccttgtgaaaatgagtttgcagaggacagtgctaagactgctgtccctgtgccagagagggaagagcctccccaggctgctcccatgctgtgagcgaggaaccctcagcaaagactgaagattgcctgcccacagcagaacccagcagtgctgcggcagcccaggagcctgatgaaagttctgccagacaggctgagcctgcgcccaggacagaggaggtgcgggcacctgtgcttcagatggacagcagcgtctttctagannnnnnnnnnnnnnnnnnnnnnnnnnnnnnnngcttcttcgggaatgttgagcttatgcaggatctgccaccagcctcttcatcttgtccttccatgagcaggcgagaattccgaaaaatgcatttcagggccaaannnnnnnnnnnnnnnnnnnncgcanagatgtagagtggtgtcttcactgcttagtagttcactcaaacggcacagcaagtgttaagatttctgtatacatctccaagagaacatgtttgtaactgaacacaactgacatgaacgtca

SEQ ID NO: 1250 - DNA, 579 bp, Cricetulus griseus
  misc_feature (479)..(497): n is a, c, g, or t
tgccagggtcatggagaacgcatcagtcctaaagacagatgtaaaagttgcaatggaagaaagatagttcgagagaagaagattttagaagttcatattgataaaggcatgaaagatggtcagaagataacattccatggtgaaggagaccaagaaccaggactggaaccaggagatattatcattgtgttagaccagaaggaccatgctgtttttacacgacgaggagaagatcttttcatgtgtatggacatacagctggttgaagcattgtgcggcttccaaaagccaatatccactcttgacaaccgaaccatagtcatcacttctcatccaggtcagattgtcaagcatggagatataaaatgtgtgctaaatgaaggtatgccaatatatcgtcggccatatgaaaagggacgtcttatcattgagtttaaggtaaactttcctgaaaatggctttctctctcctgataagcnnnnnnnnnnnnnnnnnnnccttcctgaaaggaaggaagtggaagagactgatgaaatggatcaggtagaactggtggactttgatccaaatcaggaaaga

SEQ ID NO: 1251 - DNA, 580 bp, Cricetulus griseus
tgattgacaagtaccgggctttgatggatggcctttctcttgattctctgatgaactttgtcaaggattttaaatcccagctctttgttgagggcctggtacaagggaatgtcaccagcacggagtctatggatttcctgaagtatgttgttgacaagctgaacttcacgcccctggagcaggagatgcctgtgcagttccaggtggtgcagctgccaagtggccaccacttatgcaaagtcagagccctgaataaaggtgatgccaactctgaagtcactgtgtactaccagtcaggtaccaggagtctaaaagaatacactcttatggagctgcttgtgatgcacatggaagagccctgctttgatttccttcgaaccaagcagacccttgggtaccatgtctacccgacctgtaggaacacatctgggattctaggattctctgtaactgttgggagtcaggcaaccaaatacaactctgaaactgttgacaagaagatagaagagtttctctccagctttgaggagaagattgagaacctcactgaagaagcattcaatactcaggtcacagctct

SEQ ID NO: 1252 - DNA, 418 bp, Cricetulus griseus
gaaagtgctcataaggtaaaaacaaaatgcatgcatctctggcctgccaaaggcagtacttctaaagaagctattcgagaaaagtgtggctctaacttggtgtttggtgcaggaaatgttggccatcatacccagaacagcagcactggtacagtccctctgtgatgagtctcatgtggtccaagctggcattcaacatacgaagttgctgaggatggccttgagttctgatccttctgtgtgtacctcccaagtgttaggatgacagacacccaccatcatacccagcttctgtggtgctgacgatcagactcaggacttcatgcatgctatgatcgtgctctgccaactgagtgacatctttagttcaccgttgacatctttagcatgcaaaacacatcaatatatgccaaataaa

SEQ ID NO: 1253 - DNA, 578 bp, Cricetulus griseus
tcagaataactttttgtacaaattaccattttttttaaatctaggtatattcagcatgcagctttactttttccaagatcccttcaccatacaccttatcaaaacgggtaagaaagtctttgggttgtaatctgtctcaatgttctttttagccttttggaaatccatttcctttcacactctcgttaaaacactttctgggattttacagaaatcaagggaaacaagtgtttgctattttggttagaataaaagatcatcagtggaaatagaaaacaagtaatcctagagaaaggattagtataaccttgcttgttaaaagtccacttgcatgaactcagagaatttgaaaatagcttgcattgtgggtaaaataaaagtgcagaagtttctagggagaattcctggtgggagaacaatttaataattgagtgagaggtggagtatagtaaagcagcctggttggatgaagacttatatggtcagtgacaaagattgaagaaacacactcaaaccatggtggaatcagaatgtgaaattttgttaagacaaactctattttgtagattaatggaaag

SEQ ID NO: 1254 - DNA, 194 bp, Cricetulus griseus
cctcgccttttttttttcccggggaaagggaaactcttttgaaaaaaaacctttgttggtcaaacctaaccgggaatttaaccgggggtaagaaatggcccccagggccccgggggcccaaaaaccccggggggggtaaggggccccctttaaaggggggggccctttaaatggccccaaaggggaaatggttt

SEQ ID NO: 1255 - DNA, 389 bp, Cricetulus griseus
actgctgaactttgtactcctgtgaaaagtcaatctgatgaactttctaccaccagcaaagagatgattccatctaaaacttcagatccttccatcgatggcatggaaagcccaggagatttaaataaagttgtggtgcatggaccaaacactggacagcccagaagtttctctccaggtgattttagaactgatccgaacattgttcaccaaaccaagcaattagagagctgcaacggtgaaaagcctccttgtctggaaattctaacaaatgggtttgcaggtttacaaactgtaaatgctcatggatcatatgacctggacaatcatgactgattcaaatggattgaagcctcttatcacttgtggcactgaatgtggtttagatt

SEQ ID NO: 1256 - DNA, 569 bp, Cricetulus griseus
  misc_feature (464)..(484): n is a, c, g, or t
tgacagcaggaggcctaaaatgctcactagctggctttcttaaaaatttaattcccagcaagggtgcagcctccctctgcccatatttgactttaaatgaatgaactaggccgccctaagcactcgtgtaaaactgtcatccacccaggaggacggctgccctgctggaggcatttatctataatcctagcacttggacgacagaggcagaaacatcagactgggctacacagaaaaccctctttacaaaacaaaacacctgcatttgtcttggtacccatctgcccagggttgcatctctttttgggccaaccttggggagatgcccactagggctggctgaccaggcaggctttctcctaccaccttgacactctggcccagggatgggtataaagtagcgcatagtgagttccacctgagagtccacgggaaccctaccagcagccctgtcacacctaccnnnnnnnnnnnnnnnnnnnnnctgggcccacggttgagctgttcctgcaggctatacaccactgcattgttgccaggtacccggtatatgccaagggattctattc

SEQ ID NO: 1257 - DNA, 569 bp, Cricetulus griseus
tggctccatctgcatcacttaggaagtgatggcctgcggacggccccagggcacggccgtctacaaggtggctgagtatgcccggcgctttggggtgccggtaatagctgatggtggcatccaaaccgtgggccacgtggtcaaggccctggcacttggagcctccacagtgatgatgggctccctgctggctgccaccacggaggcccctggcgaatacttcttctcagatggggtgaggcttaagaagtaccggggcatgggctctctggacgccatggagaagagcagcagcagccagaaacgatacttcagtgagggggataaggtgaagattgcacagggtgtttcgggctccatccaagataaaggctccattcagaagtttgtgccctacctcatagcggggatccatcatggctgccaagatattggggcccagatcctgtctgtcctgcgatccatgatgtactcacgagagctcaagtttgagaagcggaccatgtcagcccagatagaaagcggcgtgcactgcttacactcttacgataagccgctgtactgaagac

SEQ ID NO: 1258 - DNA, 578 bp, Cricetulus griseus
  misc_feature (249)..(263): n is a, c, g, or t
agacaagtgtgctgatcatttccaattaaaataattttgacacagttgatttacaaaggccattgggaaaattcagagaggtggaaggaaaaacttagctttaaaacctgtgtgccattgtgagttacttgatcccgtaactcttgacgccttctctttataaatccaagcttggataccagtcctgggaacttctctgctaaagagtccctgactattcacataaaggccataattttcataccattnnnnnnnnnnnnnnntttttgatgagtttattttactgtttttgttgttgttgttgtttgtttaattcctggtgctctattgtcacctcctctgaccttttaatgtgtctgttgcagtttggggttaagactttttatcattactttttcatttacttggctgtacatttgcttttttcacaaacacctaagctgccctgctgcttgcaaggctacagggcctgggcaggctcccctcagcagcgattcaaccactgtgcgccttccctaccgtgcttgctctgtctcacactagtcacaatcttgttttaagtgccttttaattttgac

SEQ ID NO: 1259 - DNA, 361 bp, Cricetulus griseus
cagtggaggctctttgctgatgtcctcaacgatatagccatgttcttggagattatggctcccatgtaccccatctttttcaccatgactgtcagtatcagcaacctagccaagtgcattgtgggtgtggctggtggggccactcgagcggcactgaccatgcaccaggcccgaagaaacaacatggctgatgtatcatccaaggacagcagccaggagacagtggtgaacctagcaggactcctggtcatccttttgatgcttcctctggtatcagattgcccaagcctcagccttggatgcttcatcctcctgaccgctctccacatctatgccaactaccgggcagtccgagcccttg

SEQ ID NO: 1260 - DNA, 568 bp, Cricetulus griseus
  misc_feature (192)..(208): n is a, c, g, or t
  misc_feature (448)..(448): n is a, c, g, or t
cttccaaagcctccaagtcactggatgggaagcactgctgaaaatcccagccatagcagggagctgatggcagtgcacttgaaaacactcctcaaagttcagacttagattttagttttcaatgtgtatgttaaatatagattttccccaactccttggactctaaaaggaaatggatacaacagtggaaannnnnnnnnnnnnnnnntatgacaggagattaagtcacatacaagcagcttgtattatattttatattttgtaaatactgtataccatgtattatgtgtatattgttcatacatgagaggtacattatagttttgttatgaaagtatgtattttgccctgcagatgtggtgggtgttttgtatatatatagtggagctattttaagtgggtgcttaaagcacatggaagactgtttgcacaggtactgaattttttntaaggacagctgtcaaatctcaagttcaaaatctcaatgtgaaacagcctacttatatactactgaaggttaaatttggcacaatcactgtaaacatggaacttggctgtgtgtctctaa

SEQ ID NO: 1261 - DNA, 578 bp, Cricetulus griseus
  misc_feature (468)..(485): n is a, c, g, or t
gtagctggtactggggccgcttgagccggcaggaggcggtggcgctattgcagggccagcggcacggggtgttcctggtgcgggactcgagcaccagccccggggactatgtgctcagcgtttcggaaaactcgcgtgtctcccactacatcatcaacagcagcggcccgcgccctccagtgcctccgtcgcccgctcatcctccgccgggagtgagtccctcccggctccgaataggagatcaagaatttgattcattgcctgctttactggaattctacaaaatacactatttggacactacaacattgatagaaccagtttccagatccaggcagggtagtggagtgattctcaggcaggaggaggcagagtatgtgcgagccctttttgactttaatgggaatgatgaagaagatcttccctttaagaaaggagacatcctgagaatccgggataagcctgaannnnnnnnnnnnnnnnnntaggacagcgaatgaaagagggggatgattccagtcccttacgtggagaagtatagacctgcctccgcctcagtatcggctctgattggaggt

SEQ ID NO: 1262 - DNA, 580 bp, Cricetulus griseus
gggggggatctaataaaatcagaactacaacatttataagggggatatcctttcctaaaggggtaagaataattagaaacaaacatttttaagtcttaaataagggtatacttaaatccttggtttaaacttactttggatgctatcttcaacagacaatactgtactacattcaaaacaagctgttaaaattaactgggatagctgttctgctcaatgcagtctcactagcagccctggctggcctccaactcccatggctccccctctgcctcatgaatgctagggttatagtcaggtgccgccatcctcagttaacaccactttataacaagatgggcacagtaactttactattttagataactataaaatatttctacctgaatcagtaaaatattttacatgtattatattttttaaagatacactcatgtttttaaaaaatacattcattacagatagtgccaaagcgctttttgttctgttttgtactattcggtaattaattaagtatgtccgaaaatgtgggcgcacacacacgtgatgggagtttgggtgcacacatgctatggggtgc

SEQ ID NO: 1263 - DNA, 580 bp, Cricetulus griseus; identical to SEQ ID NO: 1262

SEQ ID NO: 1264 - DNA, 579 bp, Cricetulus griseus
ttttcgccgccggccaagatgaaccgattcttcgggaaagcaaagcccaaggctccgccgcctagcttgactgactgcattgggacggtggatagcagggcagaatccattgacaaaaaaatttcccggttggatgctgagctggtgaaatataaggaccaaatcaagaagatgagagagggccctgccaagaatatggtcaaacagaaagccctgagggttttaaagcaaaagcggatgtatgagcagcagcgagacaaccttgcccagcagtcctttaacatggagcaggctaattacaccattcagtcactgaaggacaccaagaccacggttgatgccatgaaattgggagtaaaggaaatgaagaaggcatacaaacaagtaaaagttgaccagattgaggatttacaagaccagctggaagatatgatggaagatgcaaatgaaatccaggaagcactgggtcgcagctacggcaccccagagttagatgaggatgacctggaagcatagttggatgcgttgggcgatgagcttctggctgatgaagatagttcttacttagacgaagcagca

SEQ ID NO: 1265 - DNA, 578 bp, Cricetulus griseus
ggattgcaaaagagtggtttccttcgccggtggtgtctcgttctccatcgctgacttcagagaccctttaaggagttggctggaggtcaccgcccttatcagagggggacgcctggtcacagaggctcagggatccacgcagtgtcctctccagccctccgcggtggcagacacccagcgctcctggaattgcatttcaggcgaccttgaactcaagagtgacgcctgggtatttaagttcctgcctgcaggaactttgtgggaatttcagtatatggaaattctgtgttgcagctgatgtgaatccagaggtctcagtatagtactgggaccaaactactgtgtcagccagctgaggactccagaatcccatgggtttctaaattacatttgcccaggagcaccatggcccatgctgtctttattcctgggttgtctcggggtactgctttgtggagattgacagccagcactttgcgtcacctcactctaaccagaaacacctcctagctcgtcagagcagcactgacagctgagacaggaaggtggacaagctccctgcccttcccctgcagact

SEQ ID NO: 1266 - DNA, 579 bp, Cricetulus griseus
gagcaggacatatatgggaaggaaatggagggcatttccttgcatgtccccttaaataaactggagtacaggagcactgtgaaacacagaacagagcaccccacccaggccaacctgaccttctgtacataattacaacacaagggtgtccaggagagaaaaaaacagccttggcccccagaaagacagtggggtgacaggcagggccccaagacaagaaaaggaacctagctccaccatctaagggaagcccactggagtgtaagaatctgtaactgctaactgccattgccaagagtcaccctgtgacaaaaggcaaattaagacagcaccccagaaggaattcgtaggagtgacagagacccaagctgggcctaattggacaaaagagtctccagacttggtcactgctaccctaggaaatacagctgtcccatgcactgtggctgtcctggccatgtagggatcagcagctggcaaggagtcaggggaatcaagccactttcctcagaaaagggaagcctgccaagggagctgggaagaatacccctgccaggcctgctcctgactgagggaaaa

SEQ ID NO: 1267 - DNA, 487 bp, Cricetulus griseus
tggtgaagagcagaataaagaagcgctgcaggatgtggaagatgaaaatcagtgagacataataaagccaacaagagaacacatctctgaccaccctccctccccaccctcccctggaagtccccattgtcactgagaaccaccaaatttgactttcacgtttggtctcagaatttaagttcctgccctgttgtttttctttctttttctttttctctcccctcccccttttttaaaacaaacaaacagttttcagaagttcttaaaggcaagagtgaatttctgtggattttactggtcccagcttttaggttctttacaacactaacaggactgcatagaggctttttcagcattactgtattgtctccagccacatgtggcaagatcatcagtagaaatggaaatgacatttgaaagacattagacttctaggtgatgcatctaagaaagattaatcacatgatagaggcatatgtgctgtcat

SEQ ID NO: 1268 - DNA, 542 bp, Cricetulus griseus
ggatgagcctgccaaagcggctctaaagggtgactctcgccagcagaagcagaagcgcgagacccaagatgaggcagaactcctcactgtccctgatggctggaaggaaccagctttctccaaagaggacaatcccagagggctcttggaggaaagcagctttgcaaccttgttcccgaaatacagagaggcttacctgaaggagtgctggcctttggtgcagaaagctttgaacgaacatcatgttaaagcaacactggacttgattgagggtagcatgactgtgtgtacgacgaagaagacttttgacccttacatcatcattagggccagagacctaataaaactcttggcgaggagcgtttcatttgaacaggcagtacggatacttcaggatgatgttgcatgtgacatcattaaaatcggttccctagtgagaaataaagagagatttgttaaaagaagacagcggcttattggtcccaaaggatctacattgaaggcattggaactcctaacaaactgttacgtcatggttcagg

SEQ ID NO: 1269 - DNA, 544 bp, Cricetulus griseus
  misc_feature (325)..(343): n is a, c, g, or t
tttcaatatgttcaatatgacttttcaatatgtgctggcttgaagtacaagaaagtgttagtgttctcttatcttgtattaaagcactttattggtaatggggaccactcaaaacaacagatacagttccttcttggttgctggctgacttgacccaagtcactgctcaaactctgttttcataatatgatggttttggtgtacttggcacaagacacaagtgtatgacttgtgagaaaaacaacaaacaaacgttacccgtttgcaaacaaactgtctctttgcaattgtctaatatatgcacagcagccagtagaattccccnnnnnnnnnnnnnnnnnnngcagaccatcttgattcaaaacatctatcgtaatccccaaaacagtgcacagacggctgacggctcacactgtaagtcccacagttggagaaatttttttaaacgatggtgttcaagagcccactcttaattgagacataacgctggctctgagctgctgacatagagctgttgcaaacaggacacggtgctggaaccgcg

SEQ ID NO: 1270 - DNA, 557 bp, Cricetulus griseus
  misc_feature (266)..(291): n is a, c, g, or t
acagtccagaaaaggacagaaaaaaacccagaaaaacaagccacttcctaacatagagagtgggaatgaagatgatgactccttcaaaattaagacagtggcccagaagaaggcagaaaagagggaacgcgagaaaaaaaagagagatgaagaaaaagcaaaattgcggaaactgaaagaaaaagaagagctagaaaaaggtaaaaaggaccagagtaaacagaaagaacctcagaagaaatctgaagaggaaggtttgaaactcnnnnnnnnnnnnnnnnnnnnnnnnnnctctgaagagaaaggagacattcctacagctgtagaagtagatgacaatgaaggagacaaaaagaaaaaagataggaagaaaaagaaaacagaaaaagatgaaaaagagaaagagaaaaagaaaggccctagcaaatctactgttaaagctatccaagaagctttggctaagcttaaagaggaggaggagagacaaaagatggaagaggaagaacggattaaacgtcttgaagagctagaagccaaacgaaaagaagatgaacgat

SEQ ID NO: 1271 - DNA, 567 bp, Cricetulus griseus
tcacgggctacagtatccatggattacatcatcacgggctgcagtatccatggattacatcatcacgggttgcagtatccatggattacatcatcacgggctgcagtatctatggattacatcatcaccggctgcaggatccatgggttacatcatcacgggctgcagctcaccctgggcttccagaaacccacagcagaaaaacaaattcattcctcaagctgaaggatcaaggctgaaatgttgacctctcagtgtctgccaagcttaagtactaagccaagaagcgtgtcatgtataacaagagtctgcacctgcagtgggctggagaccatcaaaatgcagttgcctcctgcccactgaacctctgaggtgaagaacaaagaagacttataggtgtcttatgtccaggaaagaccatgatgaactcacagctgcttctccctcaaactccactccacacagctccttcaagccaggtgtggtggaacacctctttaatccccgcactatcatgcagaggcaggtggatatctgagttcgaggccagcattgtctacagagtga

SEQ ID NO: 1272 - DNA, 483 bp, Cricetulus griseus
actatacaaaaacattttacgagagcatcctaactacgttgactgtaagaattttaggcttcttttgtataataaaatttctaaattctcataataacagaaaacttactaagaaaagaaaatcttttgttaggaaccttaattttttttttataaagagaggtcaaatattccctttcccccaatgcaaatttgtctccttaaaaaaaagatgcagcctacagttgtagttctcatctataatcctgacactcaggaggcagaggcaggagcatcagggattcaaggccagcctccctacctatcggttttgagggccccctagccacatattagaccctgtctcaaaaagtggaataaaacataaggtgcagtttattgacttacaggggaaaatataaagatcagcaaaagccacttgaaccatgttcagtggcaggttgtgcctctgcccagtgagtcagctacagttccctgacatgt

SEQ ID NO: 1273 - DNA, 578 bp, Cricetulus griseus
tttgcttcctactcaaatgatattttatatgggtatagttaaaataggcacatttgctagtggtttcagaatatttctgtagtcttgataaaaatagattccaatagtaggtattttggatagctatttaattagaggggtgacatacatttaaaaatctttagtaaaatctaaattattgattcacatattcaataatccatgatagtgaaattcagaagttaagccccaaaacattaatggccagtgtgccaaataaattctcatttataaatattttcttattttttagagagacataaacatctttatgtcaaacagaagtcctcctgttctgacttcacatgcaagacaatataagatagtgaaaaatagtttcacccaagcattccatcctctaccagaagcaaatgtaatttatgctagtagcatatcattacaagttaaaaatggaaatcaagttggagatttatacattatgcgagtactttatttcattgatgtactttaatctaaattttaaatgtctacccttgctatgtggatagaattgataaccttaacgcaaaagagaaaat

SEQ ID NO: 1274 - DNA, 151 bp, Cricetulus griseus
aacatattttagatggattgctagtattataaagaagataaataactttgtaatagatgactgactgctaaaatacaattaaacgcttgttcgttgaatacaaattccaataggggtcaagttttcatttcaacatgtccaaggatcttcg

SEQ ID NO: 1275 - DNA, 240 bp, Cricetulus griseus
atttctcatgttcattctagtttatattttcatttaaatctttaggttaagtttaagctttttaaaagttagttttgagaattgagacacaatactaatactgtaggaattggtgaggccttgacttaaagctttctttgtactgtgatttccttttgggtgtattttgctaagtgaaacttgttaaattttttgttaactaaatttttttcttaaaataaagactttttcacagtgaaa

SEQ ID NO: 1276 - DNA, 579 bp, Cricetulus griseus
ggagccggagccaggcggggccgcgggatcgccgagggagttcacagctctgtttttacgaagcttcactaccagagcactatgaatgttaatgacctcaaactcaggttgtccaaagctgggcaagagcacctgctgcggttttggaatgagttggaagaagcccaacagacagaactttatatggagctccaggccatgaactttgaagagttgaacttatttttccagaaggccattggaggatttgatcattcctctcaccaagaaaaggtggatacccgaatggagcctgtgccccgagaggtgttgggcagtgctaccagagatcaagaccagctgcaggcctgggagaatgaaggactttcccagatttctcggaacaaagtagcagttctccttctggctggagggcaggggacaagacttggagttgcttatcccaagggcatgtatgatgttggcttgccatcccacaagacactttttcagattcaagcagaacgtattctgaagctacagcggttagcggaaaagcagtatggcaacaagtgtgtcattccatggtatataatgacc

SEQ ID NO: 1277 - DNA, 430 bp, Cricetulus griseus
tttacatgaatgtatggtgaataaatttaaaaaagcatctattcgtaagcaacagacacttaatcacccagaagcttacaaaataattgaaaaagatgttatggaaggtgagtattttgtcaagttgttttataaatttacatttgtgttttatgtatcacaacctaagacctttgagattgatgcagggcacagttgcacttgctgtagttctgactggtttgtcagaacagacttcctaacttcttgtttccatgcttacaagctacctcttttccttcagtatagaggagcaattctcaacttgtgggttcctgcccctttggcaaacttctgtctccaaaaatatttatattatagttcatgacagtagcaaaattacagtcatgaagtaccaatataataattttatggatgggtcactacaaca

SEQ ID NO: 1278 - DNA, 314 bp, Cricetulus griseus
gagtgtggaatgcatgcctcgaccctgacactcagaaggtaatacagaaaaatgatgggtctgactacatgctggtcctttgttctccggttgtctgagtacacatgtacatgtgtggcttctttcaccatgcaatcgctgtgtaaacggctccctgtcctgcactcatttagctttagatagctttttctcttgggaaagtgaaaaaaattgagaaatgctttctaaaacatcatacatgtgtttagcagatttggtgtgtatccacatacatatgattttgtttgtttgtcttggttaggtttggtttggtg

SEQ ID NO: 1279 - DNA, 567 bp, Cricetulus griseus
actcccagggctgcttctgtgcaggctgctcacggcagattggcttctcctttgtacgacccaagctctgtgccttctctggcctgtattactgtgatttctgccatcaagatgatgcctcagtgattccagcgaggatcatccacaactgggacctcacaaagcgcccggtcggccggcaggccctgaagttcctggcacagatccgggcccagccccttatcaacctgcagctggtgaatgcctctctgtatgaacacgtggagcgcatgcatctcattggcaggagccgggaacagctgaaacttctgggggactacctgggcctgtgcagaagtggtgccctgaaggagctgagcaaaaggctaagccacaggaattatctcttggagtctcctcacaaattcagcgttgctgacctccatcatattgcatagggggtgtatgaaggattcctcaaagccctgattgagttcgcctcccagcatgtctaccactgtgacctgtgcacccagcgaggcttcatctgccagatctgccaccaccatgacatcatctttccctctg

SEQ ID NO: 1280 - DNA, 485 bp, Cricetulus griseus
  misc_feature (151)..(165): n is a, c, g, or t
acatctgtgctgtcagcaggcctgtttcccagagcaaattcaaggaagaaacaggtgattaaagtctacagtgaggatgagaccagcagggcgttagaagtacccattgacatcaccgcccgagatgtttgccagctcttgatcctgaagnnnnnnnnnnnnnnngacaacagctggactctttttgagtacctgtctcacacaggtgtagaaagaataatagaagaccatgagctggtgattgaagtgctgtctcactgggggatggaagaagaaaataaactctatcttaggaaaaattatgccaaatatgaattctttaagaacccaatgtatttctttccagagaacatggtgtcttttgcagctgagaccaatggtgacagatcccctacacaaatcctgcagatgtttttaagctcaagcacctatcctgaaatccatggcttcttacatgcaaaggaacagggaaagaagtcttggaa

SEQ ID NO: 1281 - DNA, 481 bp, Cricetulus griseus
  misc_feature (75)..(75): n is a, c, g, or t
ttcatcattagttattgttgctaatctcttactactttactatattgaactttatcacagatacgttaagtatangaaaaaacatagtatagataatgtttgggcagccactgggggaaatatcagaatgtatcctctacagatagaaggggactgctctaatttgggtaagtcactaactttaactcttcggtatgcatttccaccaaagggagttttatacctgctctggaaaatggaggtatcagccctcttactcccccacccccaccctggttgagttagccaaggctgtcctatccttcatcgagcctccttggaaatttaaattatatgagaacctaaaatagtgcccagcgtaggcagtctcctgccactgacttaaaatataaaattaaaaaaaaaatactttaagttgccactgagtcaccagtttgagtcccatgacaaagagaagaagctaaatgcaggaagctggtat

SEQ ID NO: 1282 - DNA, 131 bp, Cricetulus griseus
tttcattcccacagatgagagacacttgcaaagtgccagtgaggttagatcttttgccacttctctgattttactgatttgggtttttaaagggctgtttaaaaataaataaatgaaatgataaaaaaaaa

SEQ ID NO: 1283 - DNA, 530 bp, Cricetulus griseus
aattcaaacctctccaaagtatatggtcaaactaaagaagacaagaaccaacaccatctgaattgtgactggctgatattcccaggaaaaattagagatcactactccagcataagccccagtttcctgcttgctacgaagatgctgggtataaaggcttgggctgagtatgtagtggagtgggctgccaaggacccatatggcttccttacaacagttatcttggcccttacgccactgttcctagccagtgctgtactgtcctggaagttagccaagatgattgaagccagagagaaggagcaaaagaagaaacaaaaacgtcaagaaaacattgcaaaagctaaacgactaaaaaaggactgaaggagtgaacagactctgcaactagacaaaaatcatctggaaaattttgcagctttggaaggactcactaaggttccagtcaatttcatgatagtcttatttaacctgactgaatagaagagtcatgttctgacctcaatacaatagtaacttttaggtgtgga

SEQ ID NO: 1284 - DNA, 490 bp, Cricetulus griseus
  misc_feature (29)..(59): n is a, c, g, or t
caatgaaagccattgagagtcccaacaannnnnnnnnnnnnnnnnnnnnnnnnnnnnnngtggtgtacggcgtgttcagtattgcagaattcttttctgacctcttcttgtcctggttccccttctactacatgctgaagtgtggcttcctgttgtggtgcatggcccccagcccgtctaatggggcagagctgctctacaggcgcatcatccgtcctgtcttcctgaagcatgagtcccaggtagacagcgtggtgaaggacatgaaagacaaagccagagagaccgcagataccatcactaaagaagtcaagaaagctacggtgaacttactgggtgaagaaaagaagagcacctgagccctggctggaagctccccattccacttccttagagccccatgttacgctagggacagtggcatagtcgttgaataatgttgccttggaaacgttttgatgtattaaaaatggaatgtgttgtaagctgt

SEQ ID NO: 1285 - DNA, 571 bp, Cricetulus griseus
  misc_feature (24)..(61): n is a, c, g, or t
  misc_feature (69)..(142): n is a, c, g, or t
  misc_feature (158)..(339): n is a, c, g, or t
  misc_feature (341)..(371): n is a, c, g, or t
  misc_feature (382)..(405): n is a, c, g, or t
  misc_feature (411)..(441): n is a, c, g, or t
  misc_feature (490)..(531): n is a, c, g, or t
tcctcattagagtgacatcgtctnnnnnnnnnnnnnnnnnnnnnnnnnnnnnnnnnnnnnnatgcccannnnnnnnnnnnnnnnnnnnnnnnnnnnnnnnnnnnnnnnnnnnnnnnnnnnnnnnnnnnnnnnnnnnnnnnnnctttattgtgggagcnnnnnnnnnnnnnnnnnnnnnnnnnnnnnnnnnnnnnnnnnnnnnnnnnnnnnnnnnnnnnnnnnnnnnnnnnnnnnnnnnnnnnnnnnnnnnnnnnnnnnnnnnnnnnnnnnnnnnnnnnnnnnnnnnnnnnnnnnnnnnnnnnnnnnnnnnnnnnnnnnnnnnnnnnnnnnnnnnnnnnntnnnnnnnnnnnnnnnnnnnnnnnnnnnnnnntggccaataannnnnnnnnnnnnnnnnnnnnnnntgccannnnnnnnnnnnnnnnnnnnnnnnnnnnnnntaacactggtctggggcccgagaagacctctttcttccaagctttgggnnnnnnnnnnnnnnnnnnnnnnnnnnnnnnnnnnnnnnnnnntgatgtgcagctgataaaaactggagacatagtaggagcc

SEQ ID NO: 1286 - DNA, 580 bp, Cricetulus griseus
  misc_feature (343)..(361): n is a, c, g, or t
ctggttgccatggcaaatgctggtccacatgataatggcagccagtttttctttaccctgggtcgagcagatgaacttaacaataagcacaccatctttggaaaggtcacaggggatacagtctacaacatgctacgcctgacagaagtggacattgatgatgaagaaagaccccgcaatccacatagagtcaaaagctgtgaggttctgtttaatccttttgatgacatcattccaagagaaattaaaaggcccaaaaaagagaaaccggatgaagaaatcaagaaattgaagcctaaaggcacaaaaaactttagtttactttcttttggggaagaagctnnnnnnnnnnnnnnnnnnntgaaccgagtcagtcagagcatgaagggaagaagtaaaagcagccatgacctgcttaaagacgatccacacctaagttccgtgccagctgtggaaagtgaaaaggatgatgcaacaggagatttagaagatgatggagaagatgagagtgcagatcctgatgaatacattgatgatgatgaaaagaacctgatgagagaaagaattgcaaaaaggttaa

SEQ ID NO: 1287 - DNA, 580 bp, Cricetulus griseus
tttggacctgcatggtgggatagggacctggtaagacctatttattggaccagaccatgaagtacttacaagtacgtgctgttccttcacatatctgtgaaatttacttaacggtaaatttacttaatggaaatgtttgttttgtctgtgagactgaactagactacaagaatgagtaactgctctagatcttaaggtgaggaaggacagagctttgggaagagctggaggaggagcctgtcaggcataggcaggggtaacccttgttgaactacagtcagtctgtttggtttgctgttggtaaatgagcagtgtgatcttgcttgtgtttctctttttggcttttcatgttaaaagggggcatgtaaggctatcattgataaatagtttactgggaagcctttttggagaatacttacctaaatatcaacatttttctttttaaaataggcttttcatctcagcctagtgatgaggaatccagtagcgatgacaccagtcatgagcccagccctgtcccaagacgccgtcgcaacaagaagaagactgtttctgtctcatagcctgaggagccaccact

SEQ ID NO: 1288 - DNA, 515 bp, Cricetulus griseus
actggggaaagatgggtcaaagtcagagtggtggccatggtcctgggggtggcaagaaggatgacaaggacaagaaaaagaaatatgagcctcctgtcccaactagagtggggaaaaagaagaagaaaacaaagggaccggatgctgccagcaaactgccactggtaacacctcacactcagtgccgcctcaagttactgaagttagagagaataaaagattatcttctcatggaggaagagttcattagaaatcaggagcagatgaaaccattggaagaaaagcaagaggaggaaagatcgaaagtggatgatctcagggggacccccatgtctgtaggaaccttggaagagatcattgatgataatcccgccattgtgtccacatctgtgggctcggaacactacgtcagcatcctgtcatttgtggacaaggatcttctggagccatgctgttcaatcctgctcaaccacaaggtgcatgccgtgataggtgtgctaatggatgacacagac

SEQ ID NO: 1289 - DNA, 544 bp, Cricetulus griseus
atgtggtaggtgcccgccgttcttcctggcgtgttatctccagcatcgaacagaaaacagagaggaatgagaagaagcaacagatgggcaaagagtaccgtgagaagatagaggctgagctgcaggacatctgcaatgacgtactggagctgttggacaaatatctcattcccaatgctacacagccagaaagcaaggtgttctacttgaaaatgaaaggagactattttaggtatctttctgaggttgcatctggagacaataaacaaaccactgtgtcaaactcccagcaggcttaccaagaagcctttgaaattagtaagaaagaaatgcagcctacacacccaattcgacttggcctggcgctgaatttctcagtcttctactatgagattctaaactctcctgaaaaggcctgcagcctggccaaaacggcatttgatgaagcaattgctgaactggatacgctcaatgaagagtcttacaaagacagcaccctgatcatgcagctactcagggataatctcactttgtggacgtcaga

SEQ ID NO: 1290 - DNA, 499 bp, Cricetulus griseus
ttttatcttttatttcttatattttgtgcatatgtctctgtgtgtggtgtgcttacatgtatacatgcacatttgcatatgtgtgtgtgcacatatgtgtgtggaggaccgaggtccttggtcactctctatctaattgacagaggaggcatcttattgtcagagcttactacgttggctagtccatctaggcagcttgctttcgggaatcctctgtctctgggagtacaagaggacagccatacaagcttgcttatctcatgtgggtgctgggcatccatcctccagtctgcacacgtgtggaaagtgctttacccatggagacgccccaaaccctaaattcctgtcttgatacatcatttgccagttgtgtgacctgcagtaaattgttcagtctctacttcctcaactgcaaatgggaatacagtctcaaaggggcttgacagcacaaatcagtagctgtaaaggtgtctggagtaatataagcctcggaaatcta

SEQ ID NO: 1291 - DNA, 579 bp, Cricetulus griseus
  misc_feature (48)..(48): n is a, c, g, or t
aattgtactttattttacatatatgatgtcatgtaaaacttggcttanatagtatgtttcggggggattttctttcattttggtgttttctttttacacaaaaactaaagttgactacttgccattctttgatttaggatttaggaggtgagagaatcaagaaggcccttaagatgatctatctctaagaattgaggggcagtgggttttttttataaatttgttagtagctttcagcatcagggataacatggtgactgttctattttgcaaaaagtgctcgcatactttattctggaccaaaatgcacaaagttgaaagactgttagcccaagaactgtgcgctgtgtccttggtgcagcttacacacaaagtaatctagtcatcacccattcaccagggttcctagagccacactggcagtcaggaatgtctccacattgtttcagggcattttaaaggtcttcagattgtaggctagtcagtactcccaacacaaggaagaaaacctcaaaattaaccaatagtcatgcaacataatcacaagcacagttttaagaagagttattatttaatgtg

SEQ ID NO: 1292 - DNA, 437 bp, Cricetulus griseus
ttttccatagatgtgacatgtcctaccatcctttccagccccaccctcctccctgtaccagggctgtgatctctcaagggacctctgagtctgctggtctttcaagtgtgaggcaggagggaacagttgcccaagctggttggtgtaatccattgttttaagtcagctccccagtggctgggccaaggggaaggactaaagggaggggctggacacgtgaaagcctgggcaggggcaagagcatggatttaaggcttgacacgggattcagaaatagccccccacttttggggaagtcccaaaagacttttttttcttgcacagcacactttttccatcctcctggtccttaagcctaagtgtggactaaggatggggaaatgtgtcctgggttggacccatcagagcacaagagaaggtggctatcctggggtctc

SEQ ID NO: 1293 - DNA, 518 bp, Cricetulus griseus
ttgtttgttatgcatacagattatagttaaacttcccctttcacttaaaggaattcatacctctacattagcatgttcaaactgccaacatcactagtgttcttcatagactattaagtaaaataaaagtcccttgcatgcaaactctactatagaacgatggtccatcaccctgtgagatggttgctgatggacaggtagtgtccaccgtgggctaatggtggaatggatggagtgaggtttccactattccaggcagcacacagggttgttgttgcttgttttgttgttgaggagtgctacttggtttgggggttagaggtttgggcatttttgcttgtagctcttcatctagggataggaccctgtgagacccctgcccaccgtctactttggaatgctactgttgttggaattgttcatgcctcggttagggagctgtgttaagatttcatgggtgtaactagcctcacagcagaccttctggtcctttggctcttaggatctctccacccgct

SEQ ID NO: 1294 - DNA, 579 bp, Cricetulus griseus
  misc_feature (17)..(74): n is a, c, g, or t
  misc_feature (316)..(330): n is a, c, g, or t
  misc_feature (388)..(419): n is a, c, g, or t
  misc_feature (431)..(449): n is a, c, g, or t
  misc_feature (465)..(482): n is a, c, g, or t
gtatctccacactcgtnnnnnnnnnnnnnnnnnnnnnnnnnnnnnnnnnnnnnnnnnnnnnnnnnnnnnnnnnnactggggttcaaggaacgacagtatcatgaagccagaaaaagtgctccattacgattctttataaggcaggcggtttggttgacaggtgcgaggagtatcacctttgacctttggtgtcaagggttcccctttgagcagcaatgaatgatgaccggagctagaacagggctcggggcaggccagcgcaccaggactgcagaggttttggacaaccagatcctgatcacctactggacttctnnnnnnnnnnnnnnnaaagcaactttctagccatccatttaggaggctttttgtgtttgtttttacttttcannnnnnnnnnnnnnnnnnnnnnnnnnnnnnnnggcactcgctcnnnnnnnnnnnnnnnnnnnaaactcacagagatcnnnnnnnnnnnnnnnnnntagtgctgggatcaaaggcgtgtgccaccaacgcccggctcatttaggaggctattaattgagctactgatttccatacttgttcttccaaaaggca

SEQ ID NO: 1295 - DNA, 582 bp, Cricetulus griseus
  misc_feature (528)..(528): n is a, c, g, or t
aggagaagtccaattccaacccacactgagcttccggtgtttagagattctaagatgcctgagccagccaagtccgctcccgccccgaagaagggctccaagaaggccgtgaccaaggcccagaagaaggacggcaagaagcgcaagcgcagccgcaaggagagctactcggtgtacgtgtacaaggtgctgaagcaggttcacccggacaccggcatctcctccaaggccatgggcatcatgaactcgttcgtcaacgacatcttcgagcgcatcgcgggcgaggcttctcgcctggcgcattacaacaagcgctcgaccatcacgtcccgggagatccagacggctgtgcgcttgctgctgcccggggagctggccaagcatgcggtgtccgatggcaccaaagccgtcaccaagtacaccagctccaagtgaaaaggacgtcccacgaggagtagacctgatgatgtcttttctaccactcatcagtgctggacgttgtttcatttggcaattgagacaatgganataggtgatactagaagactagtggctgtattttcaaaacttgaggaacaactc

SEQ ID NO: 1296 - DNA, 475 bp, Cricetulus griseus
gtatatagatggaaattgatggtagacagatacttaagtgggcagctcagcttctgagtatcagtttctgtcatttccttattataggttagaaaaatctggagtcaggggtgaaatataactgtagagcttaaacacctcaaacccagcatacacaaaggaatattaccctttttcctcccgtgtttcttctcttggggagtgacatgatggttccgagaagtcatctaaaccctaattctgataagtggttacctgtctactctgcggtggtacttttgactagcctggatattaagtctgtccagtcccactccacaagtgttgactgttcattgagctttgttgggtattaggttcctgactctaaaaaggccccatctaattcatatattaataatagcactatacatttatagatgatacatgtttcctggtgtcacctttaacatcatttgccgaatcgttctgacac

SEQ ID NO: 1297 - DNA, 176 bp, Cricetulus griseus
tataacgttactttcacttaccaggggtcgtatatttggcgttatccgcggtctctcctcaccttcgttagctccgcaccccacgccgtcctcggcccatctgtcactaccttctttaccacctggttacagtgctaagcacggttcactcttccacgccattccccagttccctc

SEQ ID NO: 1298 - DNA, 474 bp, Cricetulus griseus
aaccttgaggggccctctgaccaggagaccaagttggatcttatcagtaaaggagaggaaccaagaggaggaagagaggaatccggggtaccagctcgcagctctccacccagcagcaaaaaccactctatcaaggctatacttaagaatatctcagtcctggctttgtccgtctgcttcattttcactgtcaccattgggttgttccctgctgtgactactgaggttgaatccagcattgccggcaccagtgcctggaagagctactacttcattcctgtggcttgtttcttaaatttcaatgtctttgactggctaggccggagtctcacagctatttgcatgtggcctggtaaggatagcctctggttgccagttttggtgggctccaagatcgtgtttattcccctgcttttgctatgcaaagtgaaacatcgctactacttgcgttccatctttacccacgacgcctgg

SEQ ID NO: 1299 - DNA, 579 bp, Cricetulus griseus
aggaggaggagcaggaggaggagggggaggaggagctatattatgaagggacaatgccagaagtgtgtgtgcttgtgctgtctccacgctactggcctgtcacctcggtctgccacatgctcagttctacggcacgcctgccctcatatctgagggggactttaaaccactactccaacttctacaacaagagtcagacccatgccagagaggaagatccaaatcggcaacttcagtggacctggcaaggccgggctgagctgcagtttggggaccagaccctgcatgtgtccacagtgcagatgtggctgctgctacatttcaaccacctaaaggtggtgtctgttgagagcctgctggcgctctcagagctccctccagatgtgcttaatcacgcaattgggcctctcacctcatcaagaggccccttggaccttcaggagcagagagataaaccacgaggagtgctcaagattcgacatgacagtgaggaacccacaccatgaagggcattgtgcggctcatcccacctcacaagtacccgaaagctgaggatgaagagggccggaacttgtagaa

SEQ ID NO: 1300 - DNA, 479 bp, Cricetulus griseus
  misc_feature (327)..(344): n is a, c, g, or t
cattgaactttgcatcaagagaaggctttccgaaataaccctttacagcagctgtatgtactgaggtctttatgggaagatggcttgcatttttgagatgatcacaacacactgtgcagaagcggacagatgttccatggtgtttggttcccctttcttctctctcctgctcactcagccctacagcagtagctcatctctctgaggctggaaagccttgctccttgcagtgacatcctcccacgcctggttgtggtagtggctgtgctatacacagcatcaggcttactggtttgttgctcttctgagcctttttattcacttacnnnnnnnnnnnnnnnnnnatatctattataaagaggtacaataaacagcttctcatggatacctgagtggttgatttacctgcccaggagatctcagtaatacctagggctgggtgattcatggccacccttctgtgaatgggtaccatggac

SEQ ID NO: 1301 - DNA, 534 bp, Cricetulus griseus
ccctgatcttgttctgcccaattttgacatgctttatagccatgtgaaacaactcctctcgaatgagctactcctaacccagatggagaagagtgccctcatggaagccctggttctcattagcaaccagtttaagaattacgagcgacagaagctattcttagaagagctgatggcaccaatggtcaacatctggctttctgaagaaatgtgcagagtgctcaaagacattgatgccttcattgcctatgttggagccgatctgaaaggctgtgacccagctgtggaggatccatgttgcgcaaaccgtgctcgaataaccttttgtgtgcacagcattctgggggttttgagacgaactagctggccttccgacatagaagaagccagagcaggggggtttttggtgggttacacacccagtggaaatccaatcttccgtaacccctgcacagagcaggtcctgagacttctggacaatttgctggcccttgtaagaacccacaatactttatatgcaccataaatgctagc

SEQ ID NO: 1302 - DNA, 508 bp, Cricetulus griseus
tggcccatgaaagagtaccacgcaaactcaaatgtacttttacatcccccaagactctagagcatgaaggtcgtcattatgaatgtgatgtccttcctttcatggaaattgggtcagtggctcataagtattatcttctaaatatccggctaccagtgaatgagaagaagaaaatcaatgttgggattggggagataaaggatattcgattggtgggaatccaccaaaatggaggcttcactaaagtgtggtttgctatgaagaccttcctcacacccagtatcttcatcattatggtgtggtattggaggaggatctccatgatgtccagacccccagtgctactggaaaaagtcatttttgcccttgggatttccatgacctttatcaatatccctgtggaatggctttccattggatttgactggacctggatgctgttatttggcgacatccgacagggcattttctatgcaatgcttgtttctttctggatcatcttctgtgg

SEQ ID NO: 1303 - DNA, 499 bp, Cricetulus griseus
acggcacgcctgctggaaagccggggagccctcacctggtggccccggccaccaggtgcactggctcccactccctcattcacaagcttttctggaattctcagtatctgcacttttggggttgtttttttttgtttgtttgtgcgtttgtttattgagagcatctatcccaagctcgaagcttactgaggaatgcatccaaacgccttagtgattgcctccatttgtctcccctttacaaagcagtaatgtgctcatccgttggtgggttcgtgctttcgttgattcattttgtaaatgattcttgagctcctgatgcaaccgtttgcaaacacctttctgacccaaggccggctttcccttttactcctgctttatttactctgcaggggtgtgagtcagaattatgtatgggtcgttgttcattcactcgataggccttacgggcttaaagctgctggaaggtcaaatgctcaagtcaagcacatactatgaatct

SEQ ID NO: 1304 - DNA, 527 bp, Cricetulus griseus
gtcgacccacgcgttccgaaccaatataccgaagtcagggagcctggctgacccttcattgatatgcattctatacttttatcaacccagtcatcttgttcctgtgtctgctgtagaagggaactttttgttaaaccatagagattatcatggtatacatgctgtgaacatgtatatgtacaagttgtaatgtattctgtgttgtaggcatattatttaatttcaccacttcatcacttttgtacagtggccaagcagacacctcagactccagcatttacattaagtgcatttgtatattttaggccactggatccaaattttatattggcagttattgacggcaaaagcaatatattgtaacagaatgtataaatatttttgataaaacagtctatattttataaaaagttattataacactaaaactgtacctcaaaagtctcacaaataatttgatcaaatactctaacatcttcacaagatccgcctggggctttttatctttcttaccatatgccctttta

SEQ ID NO: 1305 - DNA, 580 bp, Cricetulus griseus
tctcatcgggaatagcacaactcctggagaagcaccaggtcagggatctgacagacttccactgggtccgccaactgaagtatcacctgggttcatctcacttgaactccaacagtcccttgcagtgtcttaagactattgcatctgctgagccctctctgtcaccagctgcatgctggatagatgtgcttggccggtctttcatatataattatgagtacctggggcccaaactggggcctctacccagcctgatgcatgaacgggaagtgttggttctcttattggccctggaggaggtagcctgtgggaccctactgggccgggatggtttgggaaagacagaaatggtgactagcttggcatggaccctatgccgccagctggtaatgatgccctgcttgccccagatagaattccgatgtctgagcaattacctgaatggtgcccttcagggtggggcctggctgctgttggagaatattcaccaactacctgctagctagctctctgcactgggccagcgtctggatgagctacaccatctttatgccccattgtgtcagaagccttccaaaac

SEQ ID NO: 1306 - DNA, 436 bp, Cricetulus griseus
atttaagaagccaccccctaaggcaggtacctcaaagctattggcagaacgaattccccaaacagctaattctactgggtcatttgaattaagaatcaatggttatgggtagctaggggctagaagaatcatctgtgattaacaaggttccagaactactaagctgaaacctttgctttactgggatactccatgctgctcagcaggagctgagaaattagtggtgattacaaagagaccatcatctttagctgaagtcttcaggaaagtctggagacttggccaaggttgtatcctgtgctggcagccaaacttggtagtgtaagatccacccgggtggtgctagtttataacatgtgaaggggtcatggagagcagttgaagcttgcaatgtgtaccacagtagggctccatgcaaacagcccacgataggcta

SEQ ID NO: 1307 - DNA, 578 bp, Cricetulus griseus
  misc_feature (561)..(561): n is a, c, g, or t
  misc_feature (577)..(577): n is a, c, g, or t
agtcagcttttaatagcatatcggcggagagagagaagctgaagcagctgatggagctggaggtctcctcttctccttctgctcaggtcgtcggtctgaagcatgccctgtcatctgaaaactccggggatgaaagccgagccctggtgcaccagctctccaacgagagcaggctgtctatcacggactccctttctgagttttttgatgcccaggaagttctgctatctcctagctcttcagaaaatgagatttctgatgacgattcatatgtcagtgacataagtgacaatctgtccttagacaacctcagtaatgatttagacaatgaaagacagaccttatggcctgttctggagagtggtggggaagccaggtccaaaaggcggacctgcttgcccgcacagggtcccaacaccagcagtgtcagcttgtggaccatcctgcggaacaacattgggaaggacctgtccaaggtggccatgcccgtggagctgaatgagcccctgaacacactgcagcggctctgtgaggagctggagtacagcgagcttctggacnaggctgcgcgcatccnc

SEQ ID NO: 1308 - DNA, 579 bp, Cricetulus griseus
ttgcattaaagctttacaaagttttaaactaattatttttgtagttacttctaccaaatagcctttccttttcaataacattccttagtatttttatagtgaagtgcattttatttgtggctgatgagctgggattggataaatactacaagtggatgctttgggaattacgcactttgaaaagcatccacagtttactccttagttggctatggacttgatgaaattaaatggtgagcctttataacgcattctaagatgaggagattgttagtgatgagatctaaaaatacacacagatttggcttttctattgtttacaacaatattcagcttaagtatttattctggctgagtgtgatttaaattagacatttcaccagtgtagtttactgtgtggataaagaactacttcagccttagcaagtggatttggcagtatgttttttacaaagaacttttcttctcttgtacatagactatatataagtactatttatgagtataagaaagcatagtcctattttctgtaactgaataaacttgactattgatttatataagctgattcaacaaagt

SEQ ID NO: 1309 - DNA, 579 bp, Cricetulus griseus
  misc_feature (59)..(76): n is a, c, g, or t
ctgcaagcttttaaaagtacttttttacttcttagatttaaaaaattacaattacttgnnnnnnnnnnnnnnnnnntattggttaaaaacactggctgctcttgaagaggacccagttcccattcccagcacccatgtggtgaccaacaatgcctgtaactccagttccagggggtaccacaccctcttctggcctccatgaataccaggcttacacatgggacatataaatacttgcaagcaaaatacccacacataaataatacaattttaaaaataacaattattcattatgtgtgtgtggttggtgatgggagcatgctgtgggcttgtgaaagtcagagaacaacttgcaagatttaattttctccaccttacaggtcctagagattgtacacaggttgtctgctggaaaggcattgattgttttgtttttagagtgtgtctatggcactctcttaagactcttctggcattctccctgtagcaaaatggaccactacgttaaaatgcttgcttgtgcaaggtctacagctagtgaatgatggtgtcagtgcttgggaactccaccactagctc

SEQ ID NO: 1310 - DNA, 132 bp, Cricetulus griseus
ctaggtccaaaagttgtttcaaaagaaattccagtggagtctattagaagaggtttctaagatcatcaagatagcaccggtgatctggggaacaattatttcatggcctaaatgaattattggaattccagg

SEQ ID NO: 1311 - DNA, 578 bp, Cricetulus griseus
gcccatctgtaccgtggcatcttccctgtgctgtgtaaggatgcggtacaggatgcctgggctgaggatgtagacctccgtgtgaatttggccatgaatgttggcaaggcccgaggcttcttcaagacgggggatgtggtcattgtactgactgggtggcgccctggctctggctacaccaacaccatgcgtgtcgtgcctgtgccttgatggccctctggagcccctcttctagcccctgtcccatcccctcccccatcccatccattaagccagcaacgcttgtagtgctcactctgggccatactgtggcgctggtgggctgggacacccaggaaaatttactggctttgaaatatggactagagcccagctgtctcatggccctacccaagctagggatgaaggaagaatgcagaattgtaaaccctctgcctttatcacaaaagggcagcaacacctctgtgtgttttgctcctgtagaaagttgcccagaggactcccagccctgggagacagcaagagtgtaagggcttaggacatggggcccaggtccctgtgtgtagataacccttgac

SEQ ID NO: 1312 - DNA, 568 bp, Cricetulus griseus
  misc_feature (44)..(75): n is a, c, g, or t
acgtgtgaacagggagacggcgtgggtccctatggctgggagtnnnnnnnnnnnnnnnnnnnnnnnnnnnnnnnnatcagcgatggggctttaaggctcaccactgagttcgtcaagaggcctgggggtcagcacggaggggattggagctggagagtgaccgtaaaacctcacgcctcaggtacctcttccctcccttaggtgtccctgttcttctacgtggtaacggatggccaagaagtcctactaccagaagttggagccaaaggacagttgaagttcattagtggacactccagtgaacttggtgacttccgccttacacttctgccaccaaccattccatgagacactgtccctaagcatggcatctacaatgtcttctggtcctccaacccatggctgccactgctcacagacatggtaaagaatactctaaacagctggtttcatcaccggcccccaggggcctctcccgaacgctaccttggcttgcctggatctctgaagtgggaggagagacgccctagtgggcaaagacagttcttgatacagcaggtgacactga

SEQ ID NO: 1313 - DNA, 567 bp, Cricetulus griseus
  misc_feature (504)..(504): n is a, c, g, or t
gatttaagcacattcctcgattccagcaaagccctacaacatgaccgagatgagcttcctgaacagcgaagtgttggctggggacttgatgtcccccttcgaccagtcgggtttgggggctgaagaaagcctaaggctcttatatgactacctggaggtggccaagcacttcaaacctcatgggttctccagcgacaaggctaaagcgggctcctccgaatggctggctgtggatgggttggtcagtgcctcatacaccggcaaggaggatgcattctccgggacagactggatgttggagaaaatggatcttaaagagtttgactttgatgctctgtttcgaatggatgacctggataccatgccagatgagcttttggccacgttggatgacacatgtgatctttttgcccctctagtccaagagactaacaaggagcccatgacagtgaacccaattggccatctcccacatagtgcaacaaaaatagaccaagttgcccnctttgcattcttgcaacctttttcctgttccccaagggggcctgtctttcacttcagaatatt

SEQ ID NO: 1314 - DNA, 556 bp, Cricetulus griseus
  misc_feature (5)..(24): n is a, c, g, or t
cagannnnnnnnnnnnnnnnnnnncatgacatgaacaaagttctggatctggaaatgaagggtgacatcgagaagtgcctcactgcccttgtgaaatgttccaccagcaccccagctttctttgctgagaaactttatgaagccatgaagggagctggaactcgccataaggcattgatcaggattatggtctcccgttctgaaatcgacatgaatgaaatcaaagcattttacctgaagaagtatggaatctctctttgccaagccatcctggatgaaaccaaaggagactatgaaaagatcttggtggctctgtgtgatggcaactagatgtccccgctgctcagaagcactgtgatgagagcatctcttagctgttgctttcctctatcacacaagcttaagtaagagggttgctttagcagataacaagctaattacccactttgaataatataacatatgaataagttttacatcatacctctgtacaatagagaaataattgttttattatgttttccccagattataaatccctataagcaagttactc

SEQ ID NO: 1315 - DNA, 580 bp, Cricetulus griseus
  misc_feature (433)..(451): n is a, c, g, or t
  misc_feature (504)..(532): n is a, c, g, or t
agatgagaaaggatatagagtgggagggagcaatacccgctctttaaggactcaaggagatgatggatagcaaatactgtgtaggctgtaaatgggcaccacaatactattttccttcagttcctattgttttctccatcatttcataggtaccatcttgttcaggaggcaatatgattcctaaaaatatgctggttaaaggtgtcctacctaagtttaaaatctagcttttctacttactaactccacaacatccagaaaaattccttaactattatgtttttcagttttctaacctgcaaattgtaaaactaatagcaaaattgtagatttttattttaatattctaatatgtataaaatactcatactgagccgggcattggtggcgcatgcctttaaaaccagcacatgggaggcagaggcagcagacnnnnnnnnnnnnnnnnnnnccctggtctacagagggagttccaggacagcctccaaaacaatacagagaatnnnnnnnnnnnnnnnnnnnnnnnnnnnnnactactcatattgggtctgacacatagtaaacattaaacagcatcacc

SEQ ID NO: 1316 - DNA, 580 bp, Cricetulus griseus; identical to SEQ ID NO: 1315
  misc_feature (433)..(451): n is a, c, g, or t
  misc_feature (504)..(532): n is a, c, g, or t

SEQ ID NO: 1317 - DNA, 579 bp, Cricetulus griseus
ggtgatgcagatgctgctgaacggcctctactacatccacaggaacaagatcctgcacagggacatgaaggcggccaacgtgctcatcacccgggatggggtcttgaagctggcagattttgggctggcccgtgccttcagcctagccaagaacagccagcccaaccgctataccaaccgagtggtgacattgtggtaccggcccccagagctgttgctcggagagcgggactacggcccacccattgacctgtggggtgctgggtgcatcatggcagagatgtggactcgcagccctatcatgcagggcaacacggagcagcaccagcttgccctcatcagccagctctgtggctccatcaccccagaggtgtggccaaacgtagacaagtatgagctgtttgaaaagctagaactggtcaaaggccaaaagcggaaggtgaaggaccggctgaaggcctatgtacgtgacccctatgctctggacctcattgacaagctgctggtgctggaccctgcacaacgaattgacagtgacgacgccctcaaccatgacttcttctggtcagaccccatgcc

SEQ ID NO: 1318 - DNA, 494 bp, Cricetulus griseus
  misc_feature (65)..(82): n is a, c, g, or t
gtctccctactctgccgggctatataataaactagtcaacatgtctcattttaaagctttctctnnnnnnnnnnnnnnnnnntaaaaacctaacagaccagctccgaaattatgacatgagatccttattagtcatgaatgcttggcctaccttaagctcatttttggtgagcccttttaactttaattaacctgtatctctttatcaaccttttgccttgcgcctttttccttttcttctgtatatctgactttcactgcttcttttgtctggctggctggaggctgcctggcttatgggctcagccatgtccctctgcttattctctcctccttagtctttactctctttctgcctgccagcctctcctagcctttctttgcctaacgattgggtgttcagctttttactaaacccatcaggtgcctggggcaggcaagacgaggaccttgccctgggctggaagcaaccacccttaaatgcagaaatgacg

SEQ ID NO: 1319 - DNA, 579 bp, Cricetulus griseus
aattggggagaaagtggagaaaggaatgtgtttgaggcgctttctgagctcataattttaacagctagccattgtttacacggaaaggaaattagaagtcaactcaatgagaaggtggcccagctgtatgcagatttggatggaggttttagccatgctgcctggctgttgccaggttggctgcctctgcctatcttcagacgcagggacagagcccatcgggaaatcaagaatattttctacaaagccatcaagaaacgcaggcagtcagaagaaaaagttgatgacattctccaaacgttactagactccacatacaaggatgggaaccctctgacagatgacgaaatagcagggatgctcatcggcctgctactcgcagggcagcacacctcctccaccaccagtgcctggatgggcttcttcttggccagagataaaccacttcaagaaaagtgcttcttagaacagaaagcagtgtgttgcgaggacctgcctcccttaacttatgagcagctgaaggatctgaatttacttgatcgatgcataaaagaaacattaagactgagacctccaata

SEQ ID NO: 1320 - DNA, 379 bp, Cricetulus griseus
gctcctgttccagcggcacaatgtgatccaccagcaaggagggacgccaataaggcccccgtaagtcttataaaatatataggtttatgatagttaagactgagctaacagctagtcattggccaagcagcattgtacctaatacaagtttctgtgtattcatttgggccctaactcaggcaggcagctgacgtaaagcgcacacgtggcggtggggctcggcagcttttggcagaaagatttatcgcaacatgtctacttgtgggactcctaacaatgggagcaggggctgtccctaacagttttagctggctcttgggaacctattcctcatactgtattgccttgccacccttaaggggcttacacttattgccac

SEQ ID NO: 1321 - DNA, 579 bp, Cricetulus griseus
cgataacagcccttgttcaatagcttttgctaaggccagagaagctgtcagggagattacaggtctgttcccttccccgaccacgttcccactcactattgacctatctattcatacctgacaactctgctgcatgcccgtctgcatctccatattcaaactccagagtagggcagtccacagagccctataatagagaaaattttccggtaatgggaaaagaggttgtcaaagaaagaatatgccctattttcacctttttcccctcttggaagtcaaggtccgatcagagagtcatctagaaagtcctattggccctttcatctgagaggcaacctcccctttcaagccaaaatctgagatccaatgtagggaagggctggggattgctatccagtatcagaaagtctaagtaaataaaggacaagactataaacaacaaaaaagctgccatttgaagcaagccagggtaacatgtgcctatgatgctccattctgaaggcagaagcaggagatccacgtctgaggtcagcctgggctacatagtgaaatgtggtcacacacatacaaaaaggactg

SEQ ID NO: 1322 - DNA, 448 bp, Cricetulus griseus
agacctggcagtgcagcaacgatatcttcctctacaagtaacattgtgcccccaagacaccagaaacctgcaggggccccagcaacaaaaaagaaacagcaacagaagaagaagaaaggaggcaaaagtggctggtgaagacagtgtacttgttgcaggctattgttatccagtgtcagtgacattgggaacataataaaggtaacacagcaagaagcacagagctccctcctccatccccatagtccagaaatgattccttatacttcaaatgggaaaacatcctcctcaaactgcctaatcagatttggcctacttgtaccaaatagctttacgaatactgaagatgactgagcattaaagcacgttatctaaggttcaccaagattcaaatggaaagtgtttgtcctgctccaactagtgaagatatgtgcgcctattcaagtct

SEQ ID NO: 1323 - DNA, 299 bp, Cricetulus griseus
acacataagaaaaggagtgagattaatagagtaccagaatgggaaaagctttgtattcaaaataaagtgccaggaagccaaatagagacttgacatggtcagcactgtgggaaacccagacagccatgagcacacaggtagtctatagcaaaggaagagtttccagaggaatagttctgaaatctgaatgaccatgagaatcagctggaagctttaacatttaaatactatcccagccacccataagtggtgaagcacatggcccctacaaagaaaacctgcattccacctgtaatgga

SEQ ID NO: 1324 - DNA, 510 bp, Cricetulus griseus
  misc_feature (6)..(6): n is a, c, g, or t
  misc_feature (304)..(337): n is a, c, g, or t
catggnaaaagacaatagatgagccccccatatccgctgacttgctggaacattgcagtttctctcaagtggtgtttaacagtgtggagaagttctatattcctggaggagatgtcatgtgctattacaccttcacccaacagttcgtccctcgtcgcaaggactggattggcatctttaaagtggggtggaagacaacccgagagtattataccttcatgtgggttgctttgcccagtgacctaaacaaggaatcaaccaagcagcaagaagtccagttcaaagcctactatctgcccaaggnnnnnnnnnnnnnnnnnnnnnnnnnnnnnnnnnnaggtggtgtggtccggggagcaagtatccccttccagttccgtccagaaactgaggaggacatagtggttgttaccactaagggaaaggtggaagagatagagcaacacattaacgagcttctacgggaaaaccacgagctgaaagacagctgtgccagcctccagaatcata

SEQ ID NO: 1325 - DNA, 570 bp, Cricetulus griseus
attggttctggatgtcagatatttgctgtgtctctcattgttattattgttgccatgatagaggatttatatacagagaggggatcaatgctcagtaccgccatatttgtctatgctgctacatctccagtgaatgggtattttggaggaagtctgtatgccagacaaggaggaaggagatggataaagcagatgtttattggggcattccttattccagctatggtctgtggcactgccttcttcatcaactttatagccatttattatcatgcctctagagccattccttttggaacaatggtggccgtttgttgcatctgtttttttgttattcttcctctaaatcttgttggtacaatacttggccgaaatctgtcaggtcagcccaacttcccctgtcgtgtcaatgctgtgcctggtcctatcccagacaaaatatggtttatggatcctgcatttatcgttcgcctgctagcaattttaccatttggctccatcttcattgaaaatgacttcatcgtaacatctttctgggcatacaagacccacttatgtctatggctttat

SEQ ID NO: 1326 - DNA, 579 bp, Cricetulus griseus
  misc_feature (331)..(348): n is a, c, g, or t
tttcatgagggtgttgtttgaggccaggatttggaacctgatttataacatgaccttatactttacaagatacccaatccatctgataaagtttgtataagtaagaaagccatttcgaatgtcttgccatgcttttacaggagacagagcacatggtcaggggttgcagctagggaggaccgtgatgccaggggcttctgtgagatgcacttgtagcgactgacgagagtcagtgagactgaagaatagagtgcacagtgaacaaattaaagcaaaattaagaagcaaaacacgcagggcattggtggcacatgcctttaatccaagagannnnnnnnnnnnnnnnnngcttcaggaattagagctgagttttcatcctctctagaactcagtctccattttcttttcttctagaattgtttatgaaaatgtaatgggatgttgaaagcaaacaggaaaaaaaatctcctgtaataaacagatgtttaaccttttacactacatcacagtcttcaagagttgagtccaggtgaaatgcggaagcagactccaaagcaaatttggtggaaggagctaggc

SEQ ID NO: 1327 - DNA, 580 bp, Cricetulus griseus
tcactcatgtcccatgctctttgctacagctgaagccatggaagcccaccacaagagccattatgctttccactgcccccactgtgactttgcctgctccaataagcacttgttccgcaagcataagaaacaaggccacccaggcagtgaagagctacggtgtaccttctgcccctttgccaccttcaacccagtagcctaccaggaccacgttggcaagatgcatgctcatgagaagatccaccagtgccctgagtgcaactttgccactgcccacaagagggtgcttatccgacacatgctgctgcatactggtgagatggcttccagccttatgatgatgatgtaaatggtggtgacggtgatgactggcatgagcttttgctgtgtaccaagcatcacacaaagggcatttcatacattgtttcacttgacctcaagtttatgtgcacaactctagtatcccaagtttacaaggatataaggcataagttgagtgtcattcaacaaatgaagtagtcaagtcagtttctgaatccatgcactccgatttcagaacctgtgttctaacactaactag

SEQ ID NO: 1328 - DNA, 580 bp, Cricetulus griseus
ccgtccccttccttcccttgagttgatttcttccttccagccaaagcgaaaagcattctcttcaccccaggaagaagaagaagctggattcacaggacgcaggatgaattctaagatgcaggtgtattcaggttccaagtgtgcctatctccccaaaatgatgaccttgcaccagcagtgtatccgggtgcttaaaaacaatattgactctatctttgaagtgggaggagtcccctattcagttcttgagcctgtcttggagaggtgtacacctgatcagctctatcgaatagaggagtgcaatcacgtattaattgaggaaacagatcagttatggaaagttcactgtcaccgagactttaaggaggaaagaccagaagagtatgaatcctggcgggagatgtatctgcggcttcaggatgcccgagagcagcggctgcgcctgctaacaaacaacatccggtctgcacatgccaataagccgaaaggacgacaagcaaagatggcatttgtcaactctgtggccaaaccacctcgagatgtccgacgaaggcaagagaagtttggaaccggaggagca

SEQ ID NO: 1329 - DNA, 579 bp, Cricetulus griseus
  misc_feature (441)..(441): n is a, c, g, or t
  misc_feature (578)..(578): n is a, c, g, or t
tgcagtggctccagagcccgggcgggcgatctgcggctgccgcacggcactgtggccaccccggtgttcatgcctgtggggacacaggccaccatgaagggcatcacggcggagcagctgcacggcctgggttgccgcctctgcctgggcaacacctaccacctggggctgaggccgggcccggagctgatccagaaggcccgcggcctccacggcttcatggactggccgcacaacctcctcacggacagtggcggcttccagatggtgtccctgttctccctgtccgaggtgacggaagagggcgtccgcttccgctcgccctacgacggccaagagatgctgttgagcccggagaggtccgtgcagatccagaacgccctgggctctgacatcatcatgcagttggatgacgtggtgagcagcacagtgacaggcccncgagtggaggaggccatgcacaggtcagtccgctggctagacaggtgcattgcagcccatcagcgtgaggacaagcagaacctctttgccatcatccagggtggactgaatgccgatctgcggaccacttgcctgana

SEQ ID NO: 1330 - DNA, 579 bp, Cricetulus griseus
  misc_feature (171)..(188): n is a, c, g, or t
atggaacatgtgacggagggtgcctgggagtccctgcaggtgccgctgcatcctcgtgtgctgagcgcgctgcgcgagctgggattcccacacatgaccccggtgcagtctgccacaatccctctgttcatgaaaaacaaagatgtcgctgcagaagctgtaacaggtagnnnnnnnnnnnnnnnnnntgtcatccccattgtggagattcttctgagaagggaagagaagttaaagaagagccaggtgggagccattgtcatcacccccactcgggaactggccattcagatcgatgaggtcctgtcacacttcacgaagcacttcccacagttcagccagattttgtggattggaggccggaaccctggagaagatgtagagaggttcaagcagcacggtgggaacatcattgtggcaaccccaggccgcctggaggacatgttccggaggaagtctgagggcctggacctagccagctgtgtgaagagcttggatgtcctggtgttggatgaggcagacagacttcttgacatgggctttgaagcaagcataaacacaatcctggagtttttgcca

SEQ ID NO: 1331 - DNA, 211 bp, Cricetulus griseus
tccgaaacatccagtttgaggcctttcacgtgttcaaggtgtttgtggccaaccccaacaagacacagcccatcctagacatcctcctcaagaaccagaccaaactcattgagttcctcagcaagtttcagaacgacaggacggaggacgagcagttcaatgatgagaagacctatttagtcaaacagatcagggatttgaagagaccagc

SEQ ID NO: 1332 - DNA, 578 bp, Cricetulus griseus
tggctggtagggaggtgcattaggatcctcatcccgcagaggcgtgtactctcctacagtgtcctggttcagaggcgtggtctcgggcacactctggttggggtactcaggaggtgggagaggagccttctcttcctgcaagatgagtggcatgctagaagagggtgggggcttggagtcatccagctcatctgcaaagatgataggcacccccttcttgataaaggtggcctggtcctcaagggtcagcttgcccttccgcttcttgcgatagcagatcatagcaatgattccagcaatgagcaggatggctgcaaccacaacagctggaatgactgtgtgcagataaacatcatcctcactgctcttctcaaggtccctgtctggaacctctgtggctggtgctgctgaggttccaggagacggtggtgccacagggataaattgtaagtgccgacaactgccagcgcctgtcacagcaatactcactgccttaaagtcaggctccagatcattggagaaagcaggccgaggtttcccattttcatcagcaatcctgcggctcagccctatgatct

SEQ ID NO: 1333 - DNA, 578 bp, Cricetulus griseus
ttcagaattcagaatatggagatgacagcatcaaaaaagcccaaaatgtaatcaactgtttccccaagcagtggtttgtgaatctgaaaggagaaagaactatttctcagttagaaaatttttgccggtatcttgtacatttagcagatacaatttatagaaatagtattgggtgctctgacgtggaaaaaagaaatgcaagagaaaacataaaacagatagtaaagcttcttgcaagtgttcgggctttggatcatgctgtgtctgttgcaagtgaccacaatgtgaaagaacttaagtctctgattgaaggaaaatagatctgagaccgaaaagtgtttgctttgctaccattcccagtgtgtaaattttgtatatatgtaaagtttcttaaactgtaagataactgcttaaatacaaaaacattatattaatactgagtccttaaatgtgatttcttcagaacgaaaggaattcagattatttctaggagtctatgaatgttttccttactgcctgtcatattttgtttatggaagtattttgtatcggcattaaattaacttgggttaagtgtc

SEQ ID NO: 1334 - DNA, 578 bp, Cricetulus griseus
tccctgagctcggccggccatggcggcggtgaagagcctaaaccctaaagccgaggtggcccgggcgcaggcagcgttggccgtgaacatcagcgcggcacggggcctgcaggatgtactgaggaccaacttggggccgaagggcaccatgaagatgcttgtttctggtgctggagacatcaagcttactaaagatggcaatgtgctgcttcacgaaatgcaaattcaacacccaacagcttctttaatagcaaaagtagctacagcccaggatgacataactggtgatggtactacatccaatgtccttatcattggggagctgctaaaacaggcagatctctacatttctgagggtcttcatcccaggataataactgaaggttttgaagctgcaaaggaaaaggcactccagtttttggaacaagtcaaagtaagcagagagatggacagagaaacactcatcgatgtggccagaacatctcttcgaactaaagttcatgctgaactcgcagatgtcttaacagatgctgtagtggattccgttttgtccattaagataacaaatgaacccattg

SEQ ID NO: 1335 - DNA, 579 bp, Cricetulus griseus
  misc_feature (537)..(537): n is a, c, g, or t
agcagccctgccaacaaacttgcattctgccttgatgtcaacagttgtcacaatgcccaacgtgggtaacaaagttatggtttctgagggacagtccgctgctcaatctaatgcccggcctcagttcattacacctgtctttatcaattcatcttcaattattcaagttatgaaaggatcacagccaagcacaattcctgcaaccccattgacaaccaacagtggcctgatgcctccctccgtcgcagttgttggacctttacacatacctcaaaacataaaattttcttcagctcctgtagcacctaatgttccctccagcagtcctgctccaaacatacagacaggccggccgttggtccttatctcacgtgccactcctgttcagctgccttcccctccttgtacatcctctccagtcggcgctcctaattcttctatccagcaagtaaaagaattaaatccagatgaggctagtcctcacatgaacccctcatcagatcagatcactctggtttcttcacaggccatcacagnagtttcttcccttttgaccaataggccaagctcccttgtcat

SEQ ID NO: 1336 - DNA, 338 bp, Cricetulus griseus
ctgtgagagaaacaaggccagcactacagagccaatctgtgtgtgacatgcatgcaaaataccaatggctaaaatgaatctacaatgccagaatggaataggagctggttttaagtggagagacagtgactggaagtgcctgggagatttcatctgggtaagctccataaaccgatctcagaatatttcataaaaatctcattggattatttgttcataatttgtgagcttttgtgcttatgttatgtttttaaaaggggatatccaaactttcttggtgggaggtgggtgtggtggtggtacatacctgtgataccaacacttaagattcaaaggca

SEQ ID NO: 1337 - DNA, 579 bp, Cricetulus griseus
acctgtgtgcttctctgtatcctgtcccaggtattctgcagctgtgtctgtccttcctcaattctgaccagtcacgctcaagcatcccactgacctgctgggtgccagccccactcagcaagctgacgttcaaagggagggaagttgagcttgctttaatgtagaagtctgcacaccatccccagctgtctctgatcttctgccatggcttgccctaaaactcagcttgcctctccaagcagcctagactgaacaagtttttacaggcgcaggaggagagaacactgggagaaaagcagttatgtgccctatcatggaggaagtcggggcattcttaaaagagtagtaatttcccacaattgacttgaaaagtcttttacttcacaaattaaggttctctgtggcccacttcgtctctgtggctccgtagttgttcggaattcctgttaactttgaagctcaccctagagttgtaaaaagaacaaaggtgatcaggctgaggaatctgccgaggtggacagtttgccacactgcagtctgtgcctcgcttgagttattttaaaaagcgaaactagattt

SEQ ID NO: 1338 - DNA, 498 bp, Cricetulus griseus
gtgcctgcgctgtggagtgaggtgaaccgttatggccagaacggcgacttcacccgtgccctcaagaccgtcaacaagatattgcagattaacaaggatgatgtaactgccctgcactgtaaagttgtttgccttatccagaatggaagtttcaaagaagccttgaatgtcatcaacactcacaccaaagtgttagccaataactctctctcctttgagaaggcatattgcgagtacaggctgaacagaattgaaaatgccttgaagacaatagaaagtgccaaccagcagacagacaaactaaaggagctttatggacaagtgctgtaccgcttggaacgatatgacgagtgcttggctgtgtacagagatcttgtccggaactcccatgatgattatgatgaggagaggaaaacaaacctttctgcagttgttgcagcacaaagcaattgggaaaaagtggttccagagaacttgggtctccaagaaggcacatga

SEQ ID NO: 1339 - DNA, 578 bp, Cricetulus griseus
tgggcttttagaaacacacatactcttgttgaagacctcaccttttaatcctttcaaatagtgccacactctgttgtcttagcattcaaatatatgagcctatggggccattcctattccagccaccacagaatgtcttcacatctttacacatttaagatctaacttcttttcagagtgctttattgcatgctgattctacagtgtaatttatcccctatttgtgtaaactgtttaggttttgttataaacaatggtgcgatggacatgggcatccatacaagttgtcaacatttgtccgtttatctgtgaggtaggttttttagagtgaggatagaaagccctttctttatgaagctgatctgttggaaggtaaaagataaataaatgcatgaaaatactaggtgtcagagaatgtgactgtccctctgtcctttgctctgcctcatccactaggttctcattctacatgtacataaatccccagcattggcatccatttcccctcatcttaaatttgtgcttcctctgtagtgagcagggctggggagaagtcttgtttcctagcttccttttgg

SEQ ID NO: 1340 - DNA, 509 bp, Cricetulus griseus
  misc_feature (300)..(319): n is a, c, g, or t
tattgtacttgatgaaattcatgaaaggaatctacagtcagatgttttaatgaccattattaaagatcttctcaattttcgatctgacctgaaagtaatattaatgagtgcaacattgaatgctgagaaattttcagaatattttggtgactgtcctatgatacatatacctggttttacttttccagttgtggaatatcttttggaagatatcattgaaaaaataagatatattccagaacaaaaagaacatagatcccagttcaagaggggtttcatgcagggccatgtaaatagacnnnnnnnnnnnnnnnnnnnnggctatctataaagagcgctggccagtttatataaaggaacttcgaacaagatactctgcaagtaccgtagatgttttggaaaggatggatgatgataaagttgatctgaatttgattgctgcccttattcgatacattgttttggaagaagaggatggtgcaatactggtctttctaccaggctgggac

SEQ ID NO: 1341 - DNA, 579 bp, Cricetulus griseus
ctttcctcgcggatcgaagagactctagctacagcttgtggctggaagggagacggaggccgcagctcagggaaagtgaagctgcagtagtggtggtaggaagatgtcgggcgaagacgagcagcaggagcaaactatcgccgaggacctggtcgtgaccaagtataagatggggggcgacatcgccaaccgggtactccgatctttggtggaagcctccagctcaagtgtatcagtgctgagcctgtgtgagaaaggcgatgccatgataatggaagagacagggaaaatcttcaagaaggaaaaggaaatgaagaaaggtgttgccttccctaccagcatttccgtaaataactgtgtgtgtcacttctcccctttgaagagtgaccaggactatatactcaaggaaggtgacttggtaaaaattgaccttggggtccatgtggatggcttcattgctaatgtggctcacacttttgtaattggtgtggctcatgggacccacgtaacaggccggatagcagatgtcattaaggcagctcatctttgtgccgaagctgccttacgactggtcaaacc

SEQ ID NO: 1342 - DNA, 579 bp, Cricetulus griseus
  misc_feature (510)..(552): n is a, c, g, or t
taacgttaactgtattgcattcttctcttccctaaaatacaagactgtgctctcatagtatttcagagtctgttagttacatgccattgattttcatatctaagaaagtaatggaaagtcatatttcttcccaccaaatagttcataaagtttcatcattgcggtctcccccaagtgttcctaattactttggaaataccctgtcattcttttggcttgggcatggtcccagtggtacctctgactacattgcttactgtgtcaaactgacctcttgccacaattctgaagccagttacagatttacctggtgcctccgttgaacaagtgaatgacagaaccctggagtactgatctgatcacagtgtttatataatggggccagctttgtgatcttacagagtagatgcttctgtcttcctagtagggcagcctgaattagtcacagccattctgagtagtggggagagctatattatctcttggatccaacttaaatatacctcactnnnnnnnnnnnnnnnnnnnnnnnnnnnnnnnnnnnnnnnnnnnttgtctgtacaatcataaactttttgt

SEQ ID NO: 1343 - DNA, 568 bp, Cricetulus griseus
  misc_feature (551)..(551): n is a, c, g, or t
ccctacccccagggactcacttactctttgcccagactgggaagattgaacgcctccctctggagggaaacaccatgaagaagacagaagccaaggcctttttccatatccctgcaaaagtcatcattggactggcctttgactgtgtggacaaggtggtttactggacagacatcagtgagccttccattgggagagccagcctacatggtggagagccaaccaccatcattcgacaagatcttggaagccctgaaggcattgcccttgaccatctcggccgcaacatcttctggacagactctcagctagatcggatagaagttgcaagaatggatggcacacagcgaagagtgctgtttgacacgggtttggtgaaccccagaggcattgtgacagactccgtaggagggaacctttattggacagattggaacagagaaaatcccaaaattgaaacttcttacatggatggcaccaaccggaggattctcgcacaggacaacttgggcctgcctaatggcctgacctttgatgcattctcgtctcanctctgctgggtggatgc

SEQ ID NO: 1344 - DNA, 511 bp, Cricetulus griseus
tcgacccacagcgttccggaaagaatacattcctggaaacaaggaatttttgggggaaagggaaatacaaagacctttacctttcctaaaggatgggagactgggaaaaatgacgccaaacccaaaggacaccatgctaagggcttataaaggagacacgtctcagaactgggaaaaaggctgtcttgtgcttttgaaataaactgtcactctcaagcagcctgtcaatgctaaatgttaggacttctgtctctgctggagacacaacctggtgcatgtcagcgtttattgtttggcagctttctcatcactccctgactccgtttacctttactccgcatcccattctcttactgcctatctgaaggattggatgggcagagtatacgtggcggtggttggtcttccccgtatgttgtccatttaattccatagcactgattttttctgaatgtgctctgccctgggaaaatggacacatattcctcacaatgggaataactaattactt

SEQ ID NO: 1345 - DNA, 507 bp, Cricetulus griseus
cgccaccagaagtccatgtcaacctctggccaccccattaaagttgcactgccaaccatcaaagatggctctgaagcttaccggcctggtacaactcatagagcgcctgctgcttctccatctgctcacagcatcagtgcctccactccagacaggacccgtttcccccgagggagctccagccgaagcactttccatggggaacagctccgatagcgacgcagtgcggcttataacggcccccctgcctccccatcccatgaaccgggagcgttcgcacatgccagaagggggacctcaacggggataataagcaaaatcacttccaagttcgtacgcagggatccaagtgaaggcgaatccagcggcagaagcgacacagccagtacatcaggggagccaaaagagagagaaaaggaagagggcaaagactccaagcctcgttctctgcgattcacgtggagcatgaagaccaccagttccatggaccccatcgacatgatgaga

SEQ ID NO: 1346 - DNA, 178 bp, Cricetulus griseus
ggaagcggtgtccccgccaaagagttgcagggggtctgacactgcgacgcgagcgctgtgtttggtctcagatcatcatcacgatgcctctcagatgttccaaggatttaatttaatgcaagtggggatctaggcctatcagctacaagggggacactgcatcaaaaatatttaaggg

SEQ ID NO: 1347 - DNA, 128 bp, Cricetulus griseus
gtggatttatttttaatctgttagatgaatatatccaaaaagcagtgttgccagtctatctgctcagcccgggtctgttgtcaattttatcaatgactggattgagaaatgtcaatagcaagtcaatc

SEQ ID NO: 1348 - DNA, 466 bp, Cricetulus griseus
  misc_feature (35)..(56): n is a, c, g, or t
  misc_feature (137)..(187): n is a, c, g, or t
tgggggtgcatgcctttagccccagcacttaggtnnnnnnnnnnnnnnnnnnnnnntgagttcaaagccagcctggttagcatattgagttccaggacagtcagaactacatgagagggacccttcgaaagaaagannnnnnnnnnnnnnnnnnnnnnnnnnnnnnnnnnnnnnnnnnnnnnnnnnngaaagaaaggaaagaaaagaaaaaaagaagaaacaagaaaataaacacaacatcaagcaaacagaaactaacccaaccatatagccagggagctgggttactgagtagaaaagaaaagcccaggacaccaactcacagcaaagcaccaaccacatgttcatacatttcatttagattaaggctgtcatgacaccctgaagtcaggaatcataatctccagtttttaattgacatattcaaaagcacacactccggccaatatataatgatcccagaggc

SEQ ID NO: 1349 - DNA, 579 bp, Cricetulus griseus
atcttgcgactgcgttcatggcgttccctgtcaaggcagtgattgttcccgggaacggaggcggggatgtagccacccaaggctggtacggctgggtgagaaagaggctagagcagattcctggtttccattgtttggctaaaaacatgcctgacccaatcacagcccgagagagcatctggctgcccttcatggagacagagctgcactgtgatgagaagaccatcatcataggccacagctccggggccattgcggctatgaggtatgcagagacacatcaggtttatggtcttgtattggtgtctgcatacacatcagacttgggagatgaaaacgagcgtgcaagtgggtactttagccgcccctggcagtgggagaagatcaaggccaactgccctcacattgtacagtttggctccactgatgaccccttccttccctggaaggaacaagcagaagtggcagataggctgaacgccaaattgtacaaattcgacaaccgtggtcactttcagaacacagagtttcatgaactgattagtgtggtgaagtctatgctaaaagtgccataatagt

SEQ ID NO: 1350 - DNA, 289 bp, Cricetulus griseus
tggaggggttttgcttctgcttggtggcatggtctgcccagggctatctggaagatcgctggggcttataatgccactcaccattccactgcagggctcactctgaacagatctggcaatggaacgactctcaaaactggcagagggagctgacacatacacatctgctgaatacaagtggagtctcctggacataccgtactgggggacttttgggcgtctgcccaccaccttttggagggagactcggcccctgcagaaaactcaacagccttatgcctgggtgatt

SEQ ID NO: 1351 - DNA, 497 bp, Cricetulus griseus
gcctacatactcactcccagcatttgggaggccaaaggcaggtagagcccccataagtacaaggccatcatttattacatgattccaggacagtcagggctacacagtgagatcctgtctctcagtacaagacaaaaaaactaaatgtggtttccaaaaaatttgttacatttaattcctgccaaatctctaaattacagaattgaggtaaaattgaaggcttgggaaattagtactcaggtgaccatggtgtatgatcttgactttcttcatcctgtaaatacatacttgaaaaacactgtgtaaggcagcatgctgtgaggtttttctgtctgttacgtatgttttatgaacaaaggatgctgggcccctcccaaattttgagtacctaccatgctgaacacctcctctgccttgagacttagaggaggaaacaaacaagaatctgttggagcttgtcttcaagggaagaaaaccctaggcttgtaaatagttgc

SEQ ID NO: 1352 - DNA, 579 bp, Cricetulus griseus
tctggtcacaaacccaacagcggatgagttctcaagctttatcactgctgtttctggtgatgtcacatctcctgcagtcacacccacctttggcatacatggatttcatactggccaccacactgagctcttttgatatatcactgatggcatagagtccctaatggatggagagggctgacttctccccagctgcagtatcaggcaaaagaagtgtcttggaagcctttaaaagttcagttgtgggtttttgtctgttttttcatggcccacctgcatcggcctcatgagagtgccagagttgctggctcatgtcctcatgcccatctctgagtgtttcaagtgagctcttttattcagacctaatgaagaactggtgggccaagacactacttatggcactcccataatcccacttgacccaaggcacctactttgtgcctgctgtcactctctgggtggtctccttgccatcttctctgaagctgaccagtggcagaagactggtctaaagtctcaagtcacaaactaaaatgtgatacatggcctggctgtggtggctcacgcctgtaatctcaa

SEQ ID NO: 1353 - DNA, 455 bp, Cricetulus griseus
aattagacatgagtaatttctgtatgaagacaggccagccatacatgaataactccaataaaaaaggatgaatagagctagctgggctttgtataacaattacaatgtttaacagttgtatagcagtgtttaacgatttataagcactttaatgtgtgtcttcgtaagttttccttgcaggaatgccatgagcttttagtacaagtgtcattacccaaccttaaacatgagtacacagagaaccaggaaatcatacagttctctcattttccagccaccagtaggtagctcttcagtcccaaccttctcaccaagtcacttgttagcagacactgaaccctttctcagtagaatctggggcttggtagtacttaatttggaacattcataaggattttgtagtaacattgaaagtggcctgatccttaatagatttggacaggttggaagatatt

SEQ ID NO: 1354 - DNA, 578 bp, Cricetulus griseus
  misc_feature (296)..(296): n is a, c, g, or t
  misc_feature (542)..(542): n is a, c, g, or t
tgggggggtggggggggaacctgtaaaacaatcttatcaatggaataatcctcaagtaactttgtgttaaaagcaatgagtcaataaatttgaatttttaaagatgtcaaaaaaacacaattaacaaaagatagcctgaagctagaggagagcagccagtgctcacgattaagaaattcccaccactcacaactatctgtaacttcagtttcatgaatctgacaccctcagacatacatgctgacaaaacaccaatacagataaaatataaataaattataaaaacaaaaaattancctattcaacacataattttagcaaagtatattcagttgaaatcacacaaaatgtctccccccttgcaagaaaaaaaaccagtggcaattttcaaacacccttatttacaccttagattaagtttgctaataaaaaacacttccaataaatcctggagattctaaaaaatcgtcagtctgtctaacctcatgactcaagccttgtttccctttccactccaccctcttaccgtcacaatttcacanttacaatccgtacccgtagtctctcattccttggga

SEQ ID NO: 1355 - DNA, 579 bp, Cricetulus griseus
tcatcattgtcttcaacctgaatgacgtggcatccttggaacataccaagcagtggctcgctgatgcactcaaggaaaatgacccatccaacgtacttctcttccttgtgggttccaagaaggacctgagtactcctgctcagtgttccctaatggagaaggatgccctcaaggtggcccaagagattaaggctgagtattgggcagtgtcctccctcactggtgagaatgtccgggaattcttcttccgtgtggcagcattgacctttgaggccaatgtcctggctgagcttgagaagtcgggggctcggcgcattggagatgttgttcgcatcaacagtgatgacaaaaacctctatctaactgccagcaagaaaaagaccacatgttgtccctgaagagtgaggattatccagaaactgcccattcctggggtactgtgccaccccaacttcagaattcaacccctggacgtttgcactgacttttcagaccaaagagcttccccttgaaagcagcgcccccagagtgtaactgggaccatgctagtctcttcctgcccatggcaccatgccaaag

SEQ ID NO: 1356 - DNA, 554 bp, Cricetulus griseus
  misc_feature (378)..(393): n is a, c, g, or t
agcatgaggagaaaacggggatctgagttcactctgttaacaactttaatccatttgcgaggaaagaacacgtaaacatatctcagcatttttgcattaaggacttaagttttcaacacaggaaccttggcggatacaattaaaccttagttcattctattaaagaaatactaatgaagaactaaaactcccaagcccaaccaagtacaggacttttcttgagtttttacagtgttacaatatgccccaaaacagtgtgaagaattctgctttaacagatcgttgtaacaatacacaagacacataataataaattttaacttacatattaggataaaatgaatatagcattcaaaccagcaatttctttgagatagnnnnnnnnnnnnnnnntaatttttggtcttctaagtttttccttaagtgaatagatatttagttggctgtgtttctgggtatatgtataagtctggaagaaacagggaattgaaatagtgaaatgctgcttaagaaatacctgttagtctttagcagcaagtataaaactaagatct

SEQ ID NO: 1357 - DNA, 411 bp, Cricetulus griseus
cacttcgacaggtacgtcagacacaaggtcagaaggtaaaaggatgtcaaacagaattgaaatatctgaagcaaaataaggagaaagcttgtgagattcgtgaccagattactagtaaggaagcccagttagcatcttcacaggaaattgtcaagtcctatgatatatgtaacttgagccattgaagatatcgtctgaaagtaaattgaacacaacctctctaaaataatgagacttgacaatgaaattaaagccttggatagtcgaaagaaacaaatggcagaaagataacagtgagttataacagaaaatggaaaaggtttttcaagggactgatgagcaactgaatgacttgtaccacaatcaccagataacagtgatggagaaagaacggcgcttggtattactgtc

SEQ ID NO: 1358 - DNA, 231 bp, Cricetulus griseus
tgcatataaaaatagaaagtaaaaaattggcccataatgttactacctgcagttcacaaccccatgcagttttgaaagatgtttcttaatgctgattccatacacagtacagccttgctttaagtttccatctttgcaacttcaccaaagagggtggagcactttttcagatatgcgataactttccattgacttacaaggcacattctatctttactgttctaaaattca

SEQ ID NO: 1359 - DNA, 579 bp, Cricetulus griseus
agaatggctgtgctgtctgtgagacagagcggtgtgaaggcactgtaggctttggaggaagtcctgatgaagttggggagaccaccctggacgccatgatcatggatggcgccaccatgaatgtgggagcagtgggagacctcagaagaattaaaaatgccatcggagtggcacggagagtcctggaccacacaacacacacgcttttagtaggggactcagccaccaactttgctgaaagcatggggtttaccgttgaagatttgtctaccaccacctcaaaaagtcttcattcagagtgggcttctaagaattgccagccaaatttttggagaagagttacaccagatccttcaaaatactgtggaccctataaaccatctggtagcttggagtgggctatttctgcccacaaacaagtggatatccataatcatgatactattggcatggttgtaatccataagacgggacatgttgctgcgggcacatccacaaatggtttaaaattcaaaatacctggtcgtgtaggagactcaccaatacctggagccggggcctatgctgaagacatgattg

SEQ ID NO: 1360 - DNA, 444 bp, Cricetulus griseus
ttgtggagtctccgacgacggctgcgtcgccgccagctcggcatccttgaacgctgccgagccgccgacgccgcagacatggagcccgagccgcagcccgagcaggtcacgctgctggtgaagagtcccaaccagcgtcaccgggacttggagctaagtggcgaccgcagttggagtgtgagccgccttaaggcccacttgagccgagtctaccccgagcgcccgcgcccggaggaccagaggctaatttattctgggaagctgctgttggatcaccagtgtctccgagacttgcttccaaaggaaaagcgacatgttttgcaccttgtgtgtaatgtgaagaatccctcaaaaatgctagaagccaaaacaaagggtgctgaatccacagagcagccagctaacactgatcaggcacagcatcctcaggcacagcatccgggg

SEQ ID NO: 1361 - DNA, 579 bp, Cricetulus griseus
accaccaagcgtgtgctgtacgtgggtgggctggcagaagaggtggacgacaaggttcttcatgctgcttttatcccttttggagacatcacagatattcagattcctctggattatgaaacagaaaagcaccgaggatttgcttttgttgaatttgagttggcagaagatgctgcagcagctatcgacaacatgaatgaatctgaactctttggacggacaattcgtgtcaatttggccaaaccaatgagaattaaagagggctcttccagaccagtttggtcagatgatgactggttgaagaagttttctgggaagactctagaagagaataaagaagaagaagggcccgaacctcccaaagcagaaacccaagagggagagcccactacaaaaaaagcacgggcaaatcctcatgtgtacatggacatcaagattgggaacaagccagctggccgcattcaaatgctcctacgatctgatgttgtacccatgacagcagagaatttgccgtgcctgtgcacccaccaaaggggtttggcttcaatgggagcagctttcaccgcatcatcccccatt

SEQ ID NO: 1362 - DNA, 380 bp, Cricetulus griseus
tactccacaccaagcaaaacaggctgtgcactgtatccatgccattttctcaaataaagaagtccagcttgcacagatttttgagccactcagtaggagtctgaatgctgatgtaccagagcaacttataactccgttagtttcacttggccacatttccatgttatcaccagatcagtttgcttctccaatgaaatctgtggtggcaaactttattgttaaagatcttctgatgaatgacaggtcaacaggtgagaagaatggaaaattatggtctcccgatgaggaagtttctcctgaagtactagcaaaggtacaggcaattaaacttctggtaaagtggctgttgggtatgaaaaacaaccacgctaaatctgcca

SEQ ID NO: 1363 - DNA, 578 bp, Cricetulus griseus
ctgggcctgcagtgtctgctgctgtgctgacgagtccgagtcactctcattgtcctgaggactggggatactgggggacgtgctgcgattgtcctggtcgatgtctttcgggtcactgctgccctcatcgttcacactgcgactgtgcgaactctccccctcaccttcagagggagagttggggcggctgatctcctgggtctttgtcttcttggaggtggtcctatcaggctcctctgtgtcagaggccaccttctcccgctggcgcttggtgctcttcagaggggaagcagcctcttctttcgccttcttggctgacttcttcaccgtttctgctttgctgtcattgctggaagtgctagcagcactgggggagttccggccactggaccggatgtcttcattgataggtgaggcgcggccatcaagactggcgggctgcttcttccgaccactgcgtagtgtagacatcgagccccgactccgccgtgttctcatgctatgcttcccactgagcccatcgtcctcctccttgacaggcttgaacattaagggctggggggccacatgcttctcga

SEQ ID NO: 1364 - DNA, 505 bp, Cricetulus griseus
gtccgcccacgcgttccgggggaataacacaggagcagcaaaataagagataccataatacagggagccattataggtttaaagagaaatcaggcgctagggaaatgtctgtagatctacaatgatgacaccaactaacaatctaagcaacagaggagaggctaccttaaatgccctcccctgataatgagattgatgactgacttatatcccatcctacagccttcatccagcagctggtggaagtggaagcagacacccacagctaaacactgaactgaactggaatagttgcagaggaggaggtcaagacagctggtgaaacccacagaaacagctgatctgaacaaggggaaactcttggttcccagattgatagctgggatatcagcatgggactgatccagaccccatgaacgtgggtactagtgaggagaccttggaagtctatggggccttttgtagtagatcagtacttatcccaagcataggaatagactttggg

SEQ ID NO: 1365 - DNA, 578 bp, Cricetulus griseus
  misc_feature (222)..(245): n is a, c, g, or t
caggagccactgtcctcaattgcttccatgatatcttgtcagggaagctgagaggtggctctcctggggtccccgtgaacggactcatttcagaagagaatgtgagtctccttgctgcagctctgcggatacagaacatgatcagcagtggcaggagatggctccgagagcagcagcacaggaggtggcgacttcactgcttgaaactgcaacccctctccnnnnnnnnnnnnnnnnnnnnnnnntcaaggagacagactccaaaagctgtggatgtccttgccaaggagataggattgcttgcagatgaaattgaaatctatggcaagaccaaagccaaagtccgtttgtccctgctggagaggttaaaggatcaaaaagatggaaaatacgtcttggttgctgggatcacgcccaccccacttggagaagggaagagtacagtcaccatcggactggtacaggcactgacagcccacctgaacgtcaactcctttgcctgtctgaggcaaccttcccacggacccactttcggagtgaaaggaggagctgcaggtggtggatatgcccaggtcatc

SEQ ID NO: 1366 - DNA, 153 bp, Cricetulus griseus
  misc_feature (81)..(102): n is a, c, g, or t
atatatcatggtatggttattacttgaatagaggagattggaatgttgtgtgagatgatgaatcctgcaaaaatgcttccnnnnnnnnnnnnnnnnnnnnnnttcatgagtattttgttggtctcgtttataataattactggtgggaatggg

SEQ ID NO: 1367 - DNA, 131 bp, Cricetulus griseus
tgcattcgaggaaaactaaataccacaagtttgcagtttaagaactctgtagtttctgaagatgtagcagaaactggcattgaagagttgctgaaaaatttcaagaagagagatgagatgatgagacggac

SEQ ID NO: 1368 - DNA, 578 bp, Cricetulus griseus
catcatggtccaccttacaacctttctcagcagagcataccatgggggccacctaaccatccgccttgctttgggtggctgcgccaaccggcccttttaccgcattgtggctgctcacaacaagtgccccagggatggccgctttgtggagcagttaggctcctacgatccactgcccaacagtaatggagaaaaactggttgccctcaacctggaccggatccggcattggattggctgtggggctcacctctctaagcctatggagaaacttctgggtctttctgggttttaccccctgcatccgatgatgatcacaaatgctgagagacttcgaaggaagagagctcgagaagtcctcttagcatctcagaaaacagaatcggagcctggagaaacagaagcaagctgacttcagtgtacacagttgtggctgcaaggtcaagggccttcacaactcttgcatagaactttttgttgggtttgaggatcaataaatggagttttccaagtctcagtcttccagcacagcctgagcaggggtcagacagatttgttatctgatgttagagctgggt

SEQ ID NO: 1369 - DNA, 418 bp, Cricetulus griseus
ttgtggctttttatctttcttacgatatgcctttttacaaatcatgacttcacttggctggaattttttaagtttttgtttgtttttacttttttcctcctagcttatcacttcattttcctcaatttagtatcattgatgatcctgtgcttatcatgttagggccattatacctcacgaataacaagttggtaactaaccacacttgaattaaccacgcagtcacagtcagctcatctcttaaaactgtccaaatttgagtctaataagaaccctaaaagcacaatgatacatgaagagttgagcttaaaacagccttgctgagatacattggcatgtttttattgtaccatgagaacaattaaaattgttcagagatattttatattacctttccaattcattataatttttctcc

SEQ ID NO: 1370 - DNA, 579 bp, Cricetulus griseus
tcttgtaaaaatacctcttataaactaaatgtagctgacaggtgtaggggacaccataaccaggcctgctagggtgacataggaaggtttaagtgtgaggagcacgcacatggaagctccttcttccttttcatcttcggcttgctgtacttacttctgccctgctggctggctaggttgctctgtaagtaaggcctttccctaataaattcccttatatttttacctgactccgtattggtaattcccacattagaggctaaaattagatgtatattttccatttctttctttttctttcctctctctcttttctcccccccccccactcactttttttcaatgaaaactttaaatgagaagcttgtgctactggatgtctgggacatattaatttatggtaacattacctttttgtggggagggtgttgtttgtttttgggggaaggatcttgcttataagcccaagttagcttagaacttgaaatcctgtctcatccttccaattgctaggatcattggcatgttccacctggctgtttgttgcattcaaaaagtccatttgattgatacagcctt

SEQ ID NO: 1371 - DNA, 579 bp, Cricetulus griseus
tagaaaaacgtcaacaattgtggtaaatgttgcctgtacctgagggtttttgtttgtttgtttgaaccctttttgtgctctttgagataggatgtgcagaagggatgtagtattcatctggtatgggaggtttgcgctaaagagtaggtggcattttgggtgaatatgaggattacaaaggcttttatgcatgttcaaagacacagtcagtcaatgaacctgaacagatgggcactaatcaaaaatggtagttctttaccccagtctacctcctaaagctcctgatatggtttctaccctcattttttcatttgtgaatgatacgatcagaatatactaaatggtaggataatgcaacatgtattgtttgcagccttctttgtgtgttggaggataaaatttagcttgaatctcagccttattttccccaacatcaggttgacttgaacaaagatgcttttgcttcttcttttgtaaaatagcaaaaatatcagtatttatgattaaatgaagtacagtatgtgaagcacttatgacaagtgttaaaaatatggtattagtgaaaaaatatggcagctg

SEQ ID NO: 1372 - DNA, 579 bp, Cricetulus griseus
cattcaaggcctacctggatgtggatattaccctctcctcagaagctttccacaactacatgaatgctgcaatggtgcatgtcaacagagccctcaaactcatcattcgtctcttcctggtagaagatctggttgactccttgaagctggctgtctccatgtggctgatgacctatgttggtgctgtttttaatgggatcacccttctgattcttgccgagctgcttgttttcagcgtcccaattgtctatgagaagtacaagacgcagattgatcattatgttgggattgcccgggatcagaccaagtcaattgttgaaaagatccaagcaaagcttcccggaatcgccaaaaaaaaggcagaataagcacatggaaaccagaagtgcaacagttactaaaacgccatttaatagttataacatcgtcacttgtaccatgaaggaacttgctcagtgtcagcttgagcctggctccaagctgtctgttctttttaatctggtgttctctcccctgcttttccctttaccctcaggtccaagcacaagatgtgttagactcgaaaaaaagaactggtct

SEQ ID NO: 1373 - DNA, 466 bp, Cricetulus griseus
  misc_feature (92)..(119): n is a, c, g, or t
gagatgctgagtcagcgctgtagcgccatgactcctggccgtttgctttgtctttctacaaggatgtctgcgcagaagtaggtcaggctccnnnnnnnnnnnnnnnnnnnnnnnnnnnnttgtgcacatctcaggagtatgctccatcgcagcccagaagtgtctagggaccagacacaggggaaaggaggccctggccatgcaccttacgattccttcggcagggagagtggccatgcccactaatccttactgcctgcctggcaccagtccttccttttggcttacaaaggctgtgatttctctggcctggctctggccgctctctctgtcccttggcgtctcacatacagatcacttcctttccttgctctcaactgagcagactcggctaacttttgtaggcacttctgctccaaagcagcagcttgctctagtgggcttgtttaaaatcttgatccgaaac

SEQ ID NO: 1374 - DNA, 539 bp, Cricetulus griseus
  misc_feature (170)..(170): n is a, c, g, or t
cgctttggcaaaaaaaacaagaccaaaaaaggcaaaaaggggggcctcctctcgcacagggtggacctccaaacccaactttttttttgggggaaaattcttccccgcaggcatgccaagctatcaagtactatctccaactgaatattatgaggagactggtgccttantggttggccctggagcaagaactggtcttggagccccagtacggttaatggctccaacccctgtcttaataagttctgcagcagcacaagctgcagcagccgcagcagctggaggaactgcaaatagtcttacaggcagcacaaatggtttgtttcggccaattggcactcagccaccacagcagccgcagcaacaacaaccaagctctaacctgcagtctaattcattttatgggagcagctctttgactaatagctcccaaagtagctctttgttttctcacggacctggccaacctggatacgcatctcttggctttagaagtggtagctctttgggagctgctataggctcatccctcattggat

SEQ ID NO: 1375 - DNA, 577 bp, Cricetulus griseus
tgctattccaaaaataagaagaacaagagatgtcaattgcactccttagatacacacaaacctaaacctttgggaggatgttggatggatgtatgggaactaatgtcccaggaatgcagggatgaagtagttttaattgactccaggtgtcttttagaaacactagaaacatatctgcgaaagcacaggttttgcactgattgcaaaaataaagttctccgagcgtacaatatcctcattggtgaacttgactgcagcaaagagaagggctactgcgctgcactttatgaggggctgcggtgctgtccacacgatcgacacatacatgtttgctgtgaaacagacttcattgcgcatctcctgggccgtgctgagccatagttcgcaagagggcgaagagaacggcatgctaagacaatagatatagctcaagaagaagttctgacctgcttggggattcatctttatgaacgattgcatcggatctggcaaaaactgcgggccgaagagcaaacgtggcagatgctcttctatcttggtgttgatgctttacgtaaaagctttgagatgactgtgg

SEQ ID NO: 1376 - DNA, 579 bp, Cricetulus griseus
  misc_feature (62)..(77): n is a, c, g, or t
  misc_feature (526)..(526): n is a, c, g, or t
agtgggacgagcgattgcggttaccgagcatgctgtaccgatgtctgggaattgccacgtgnnnnnnnnnnnnnnnngaaggaaaccaaagtcgtgtggaccccgaggcacccatcccgagagctggcaagcagggcgtgatgcccgggtgaatgaaatgtgtcccggagccaccatacacgacgtggaaggctgttttctgcgccacattacgtagaaattgtgttcatcacacgataaattgccggatgagcctatcgaggttcttcctaaataaactgaatctgaaaaactaaagtaaaggtgttttgcaccagcattcagaagacaacagtgttaaactaatgtgttagcttgctagtgggataaatcctacagttattgacagcatctggctaccgtgcttcactcagagcaaatagtcagccttgaacttctgagatcaatcaatcctcctgcatactgtgcatgataccagtgagatagcacgcccagacttcctcctcagagaaactattatcatcangagatggaggctgtggagtctgagctgtgacagatgctctcctagtgacctac

SEQ ID NO: 1377 - DNA, 290 bp, Cricetulus griseus
  misc_feature (102)..(116): n is a, c, g, or t
attccatgagtcaagtagttactgtcagtgttccatgccgccagtgttgtggttattcttttaatgtccaaccacctgaaaaacagagtagggagggaaggnnnnnnnnnnnnnnncgtttcaggttgagagaaaccatcaaggcccttgaacaggtcctgagctgtgggagggattgaaggaagttcatggcaaactaagattctgtagacattgctcacccgtgcctgctttgtcagtgaactgtaatgtgactctgagccagacaaatttagtatgtttgctgccaa

SEQ ID NO: 1378 - DNA, 544 bp, Cricetulus griseus
  misc_feature (308)..(325): n is a, c, g, or t
tttgccacagtgacacgtggtccattagcacaaaatgggacaatcccagaaaataaacaatccatgcatctcaaaggctttccctgtagtgttttatcactccatttagttactgctgtcagtctctctcgaggaggcctgctttgtagggggcccataggtgtctatatgatccgctaggcacaggaaaaggcataggagacacagacttagaactgtgtgtgcttttaagcacacacacacacctcacagatgagagacgacctgtggccacacagttttcagtcgttgagtagcccgctttttcnnnnnnnnnnnnnnnnnntcagtgggaacctggataagcaaacatccgtggggaataccgttctgcactactgcagcatgtacggcaagccggagtgcctgaagctgctgcttaagagcaagcctactgtggacattggtgagtgcggccgttctcagactctccacgggcctgagacggcatatgcatcatacttcatgtgttgcttccagtatcccagacaattaaccgactttg

SEQ ID NO: 1379 - DNA, 229 bp, Cricetulus griseus
  misc_feature (147)..(147): n is a, c, g, or t
catctggggacctgagaggccatacccctttcccttacttttctggtttgtttggttggctttcttttcttctttgttttgttttgcacttcaatggatggtggaacccggtctggtcagctctgcccttgggttccggtgcactangccaaggcggcctctctggggcttctgcggttcaaggaatcactttttaaaagataaggagaaatttaaggggttttaattt

SEQ ID NO: 1380 - DNA, 579 bp, Cricetulus griseus
gggggatttgagctgccgatctccaagtgggggtgagcatgctcccagcgaagacagtggcaaagacagggactcggacgaagctgtgtttctcactgcctgaggcttccctttggagttccaaagtaaaagacagaagcacttccaaattaaagggacagtgcaattcataacaaaaaaatatctcaagaaatggcacgttccatcaagaaccataaaatacagctggggaagcttctcttctttagctcttctacaggggcaaattgttctcttttccttgaagctactgagaaaatcatctatttcagtttttccctccaagaaatcctcggcaatattatcagactcttcctcagcttcatgtgcagctactttcaatcttgcctgtagggcacttgcactacaactctcactgagttcatgtagtctttgcatcttcttttcaaaggtagacttcatttgtataagtaattcatacttatctaaaacggtttgccttttggtttccaagctgtgctccaaaaggagattttttcttgctaatgcctcaatacttcttactaaggcctccttgtc

SEQ ID NO: 1381 - DNA, 427 bp, Cricetulus griseus
  misc_feature (49)..(68): n is a, c, g, or t
ccgcaagtgtacctcaatggcgagtttgtggggggctgtgacatccttnnnnnnnnnnnnnnnnnnnnggacctggtggaggaactgaaaaagctgggaatccgctctgccctgatagatgagaagaaccaagactcaaagtgagggctccaggtcctcgctgagcagagtgccctcttcatcacattcgctgccagaaaagccttaccgagtcatgtcctgtgctgtgggtgcttgcactgggcctccagccttgcaagcaggcagtggttttacttggcctttggctcagaatcccctatggtgaacttccttgtaaccactgccctgtaaattggcattgtaatccggtgttgctgtgacccaaatttgttcttatattgtcttttattctctgcctgggtcaagagtcattcctgactcttgt

SEQ ID NO: 1382 - DNA, 580 bp, Cricetulus griseus
ttgcggcccatgcggttgactacatccaggatggcttcggattcccgggacggtgggaccatgtgtgcgctggagtttgcagtgcatatgacctgtcagagctgtgtggacgcggtgcacaagaccctgaaaggggtggcaggtgtgcagagtgtataagtgcaattggagaaccaaatggtgttggtgcagaccactcttcccatccaggaggtgcaagcgctcctggaaagcacaggaaggcaggctgtactcaagggcatgggcagcggccagttacagaatctgggagctgcagtagccattgtggagagctctaacaccatacgtggggtggtccgattcctacagctgacctctgaactctgcctgattgaggggaccattgatggcctggagcctgggctgcatggattccacgtccatcagtatggggatctcacaagggattgcaatagctgtggggaccattttaaccctgatggaacatctcatgggagccctcaggatactgaccggcaccggggagatctcggcaacatcctggctgatgctgatggccgagccaccttccggatag

SEQ ID NO: 1383 - DNA, 579 bp, Cricetulus griseus
  misc_feature (192)..(282): n is a, c, g, or t
  misc_feature (470)..(470): n is a, c, g, or t
  misc_feature (551)..(551): n is a, c, g, or t
ttgtggactcctgtagcaaacatgaatgggaggaggctgcagtttggtgttgcggtgttagatgacaaactgtacgtggttggagggcgcgacggactgaagactttgaacactgtagaatgctacaaccccaaaactaaaacctgggagtgtgatgccgcctatgtccacacataggcatggtcttggtgnnnnnnnnnnnnnnnnnnnnnnnnnnnnnnnnnnnnnnnnnnnnnnnnnnnnnnnnnnnnnnnnnnnnnnnnnnnnnnnnnnnnnnnnnnnccagtggaattttgttgccactatgtccacccccaggagcacagtaggtgtggcagtactaagtggaaaactttatgcagttggtggtcgcgatgggagttcttgtctcaagtcagtagaatgctttgatcctcacactaataaatggacaccgtgtgcccagatgtcaaaaaggagaggtggcgtangagtgacaacatggaacggactgctgtatgctattggaggacacgatgctcccacatccaacttgacttccagactttcanactgtgtggagagatatgatccccaaac

SEQ ID NO: 1384 - DNA, 293 bp, Cricetulus griseus
ctgatgccttctgctacaacacaccaggatccttcacatgccaatgcaaacctggatatcagggggatggcttccaatgtgttcctggagaggtggggaaaacgcgatgtcaactggagcgagagcacattcttggagcatcaggcgtggcaaatgcccaacagcccaggctgctggggatgtatgtaccccagtgtgatgagtatggacactatgaacccacccagtgccaccatggcactggctactgctggtgtgtggacagagatggtcgggaactggaaggtacccgt

SEQ ID NO: 1385 - DNA, 579 bp, Cricetulus griseus
  misc_feature (560)..(560): n is a, c, g, or t
acattgtatcttttctttttaatttcagttttactaaagtgttttatatatgttaaaattcatacacctaaatgtataatcgagtgaatttttgaagactatttactgttttgtatagcttttgccataaactacttttagaacattgtgattataacagtaagttccttcatactcattctgtttctaccacctgtagacagctatgaatccatgatctatagatttacctttcttgtacattttatgtaagtttcaaggctcattcatgtatatgtttctttgtaattgctggatagtgtctcatatactgttatgctgcatttttgttaattcattcagcatttgatggacatttagatcagttccaatttttggctattgtggattgtgttgctacaaacacatatatacaaatctttgcacattctaattttttattgggttagtgtttttagcttatcttttcaaacaaataaatattgcctacagggaaattcttaaagaagatgaaactggatcacttaaggctacgatagaggatattctttttaaggcanagagaaaaagagtgtttga

SEQ ID NO: 1386 - DNA, 546 bp, Cricetulus griseus
  misc_feature (353)..(383): n is a, c, g, or t
gggtgaagaaggagcgggtcctcgccactcgctctcactccgtcgctcgctctctcgggcaacatggcgggcgtggaggaggcagcgtcctttgggagccacctgaatggcgacctcgatccggacgacagggaggaggggacgtgcagcgcggctgaggaagctgccaagaagaagagacggaagaagaagaagggcaaaggggctgtgtcagcagtgcaacaagaacctgataaagagtcaggcgcctcagtggatgagatagcaggacagttggaaagacaagcactggatgagaaagagagagatgatgatgatgaagatggagatggtgatggtgacggtgcagctgnnnnnnnnnnnnnnnnnnnnnnnnnnnnnnngaggaccaaaggttcaaacagaccctccctcagttccaatatgtgacctgtatcctaatggtgtgtttcccaaaggacaagagtgtgaatacccacccacacaagatgggcgaacagctgcttggagaactacaagtgaagaaaagaaagcattagatcaggc

SEQ ID NO: 1387 - DNA, 410 bp, Cricetulus griseus
  misc_feature (8)..(25): n is a, c, g, or t
gaggaatnnnnnnnnnnnnnnnnnngtggggcaagtccacacattgagaatttgctccatattcttagcttaatattaccattctttttaataacctcgtgcacagcttgtttcttcaacagaagacttgcagacttatagtccgctggctcaagtctagaatggaggctggccccccacaagtgcccaccgtatgtttctggaatgaatggatgcatcctccttgatgtgaagccataaagagacctttgctgtgaccttaacacagagatcatcatccactctggatatagactgtgcaggctccatgaatgggaaagggaccccacctcacataaaggacaatctgatttgctttgcctaaatgttgaactctgcgttgcgaatgcaagataaggatggggggaggt

SEQ ID NO: 1388 - DNA, 251 bp, Cricetulus griseus
gtcgacccacgcgggcgtgtgattccgtctttgcggtgggagtcatggccactcgtcgagctctgcacttcgtcttcaaagtggggaaccgcttccagacggtgcatttctttctagatgtcctggggatgcaggttctacgccatgaggaatttgaagaaggctgggggggctgcatgtaatgggccttatgatgggaaatggagtaaaacaatggtgggatttgcgcctgaggatgatcattttgttgc

SEQ ID NO: 1389 - DNA, 313 bp, Cricetulus griseus
gaaactggccaggcttctacttacccattccctatttcagccagtcccaggaccctgtatcccaagaggtggcttcctgccattttaatcttggtatagtataaccatttagtggttggtggcaaaaatcggggtaggggtatatacctctatattatatatcaacttacatatatacatatatttttaggtgtggggggagatgggtgtggctacctccacctgctttcacatgcaaaaggcctagagagctgcttgacttcatacagggtcatcatgaggagccacatggcccagttcccaacctggcatg

SEQ ID NO: 1390 - DNA, 578 bp, Cricetulus griseus
  misc_feature (341)..(341): n is a, c, g, or t
gcagtcttatcttctgggaacagagaaagtgttgtgtaatgagaacagaactctcagctgtgtagctggaatagtgatgggcaaacagaaatcacttgctttatgtccacttttttgagtggtgcttaaatataaagtcacaacctgaattgagtcattgctttctgagggaatcatgtcttttctctaatttctctttcaggatgcaaagaatatttcagaagcaacgttttaagacttaaatgtttggtttcggtaccagataattgctaacctgttactgataatttacccatgtacgcttgtcatttttccctttgttatcttaaggtctgccctantagtggctcctttctctatcatgttgacctcttttgaaagtttcccaggccataagagaggcatgaagaaaattcccactcaagactaagttccattatgtgttttgtaagtgattaactaaaactataccatccccagttattgacacaaattcagtcacattctgaatattgtttgttcaccttccataataggtgacatggacatatcattgtaaataacactaaacagttagg

SEQ ID NO: 1391 - DNA, 482 bp, Cricetulus griseus
tgatccactgtgtgggtgattggaactgagcccaagtcctgtggaagagcaagtgctctaaaccactcaacaatttccttaagttctcattatttcacccctcctcctgccaaaaccttctccagcagattctagccgcgcagcaggacagcacctggaaatggctgtttccaggtgttctatagtgtcttgatgctgtggcatccgtgtatcttcaggagggagatatttcccccatccccacacccccgagtattctcctgatcagtgttagttatgttattctgttattctgagagtaagccttgtacctgtatgcagatgttggaattgtacatcagggtttgttgggctctgtacccagccccaacaataggtgtagggtttaccctcacatttgatgtcctttcttgcctgcccttggaaacatgttggtaacatgaaatgaaacaaggcatgccattaggtacaaaatactcaat

SEQ ID NO: 1392 - DNA, 544 bp, Cricetulus griseus
  misc_feature (232)..(299): n is a, c, g, or t
acttcaccagaaaacagtttctgaagttgaaatactactcagtcatccttcagtccaggataagaatgaaaattgctcttacagcttacaaacgatatctttgggccacagtgactattcagaggcgttggcgtgcatgtttaagaagcaaacaagatcaacaaagatttaagatgctgaaatcttcagcccttataatccagtgtatgttcagaaggtggaagcgacgcannnnnnnnnnnnnnnnnnnnnnnnnnnnnnnnnnnnnnnnnnnnnnnnnnnnnnnnnnnnnnnnnnnncaagcaagagaaagatccgctgttgtgatacagtcatggtatagaaggcacaggcaagtgcagaaatatactcatattaagtcttgtgttgtagccatccaaagaagatttcggtgctgtcaagcgccaaagttatacaagatacggaaagtcgctgtcctgactctccagaagccctatagggcctaccggaaggggaagctagcacgccccggctattttcagaaacaagctgctggctttct

SEQ ID NO: 1393 - DNA, 186 bp, Cricetulus griseus
gctgagatgtagctcactggcagagtacttagcacacataaggtcctgaatttgatttcaagtattttgaaaacaggaataaaaaataccagcatatgtctaaacttaatattttggctttgcttttctgcctaacaaagcaaatgggccttggggggtgctctgcttgtccctgtggagagaggc

SEQ ID NO: 1394 - DNA, 392 bp, Cricetulus griseus
  misc_feature (329)..(356): n is a, c, g, or t
ggaggcccaaagcggagggaagtggggagtcggagagacccatccggagtcctatcggcggagacccctgtgcggtccggagggggcggcggccccgactctgacccgcgccggggggtgggccatggcggaaatcatcgacctggggcgggagatcgagcaactgcggcgctgcgagctcatcaaagagagcgaagtcaaggccctttgcgcgaaggccagagagatcttggtagaagatagcaacgtgcagagggtggactcgccattcacagtatgtggtgacattcatggacaattctatgacctcaaggagcttttcatattannnnnnnnnnnnnnnnnnnnnnnnnnnntcttcatgggagactttgtggaccgtggtttctaca

SEQ ID NO: 1395 - DNA, 492 bp, Cricetulus griseus
  misc_feature (101)..(120): n is a, c, g, or t
ggaggtggatttttttttgagcctggaggaaacaaaacccctttaatgaaggctttactgatggagtgaacaattttttattccacaaagtcaaaattttnnnnnnnnnnnnnnnnnnnnttgccgggggggccggggtttttttgcccagggggcggggtaaattttttttcctaaaaaaaaaatattaaataaggaggggaaaaccttttttttctaaacctgtggggggtgggggaaaaatcttccttgtgatagggtttatcgctaatctagtgcctttttccctcactgatttttgatttttcctctcggtctttatgtttcacattgttttttgttgtgaagcgttttaaaatttcgttgggcttcttcggtcggagtacctgttggttactttgcatgccttctatattttcgttcttcgatcttattgtcacagcatttcttaattctcgttctctttcattgtcctttcttaccgctttattt

SEQ ID NO: 1396 - DNA, 581 bp, Cricetulus griseus
aggacacagagcaaggctcaaaggttcagtgatgctttggatactgtaaggtgttatcctctactgtttcacattctcaggcacaaactccgatgcccgattgtagctcacagcccttctgtgttcatgatgacattgtgctgcagcgctttgagtgaccagccacagaaatgtaggacagagttccacagaaagtaggcatttcggagcccccagctcctgcttccatcctggatggctcattttagcagtcattagattcacgttgacaatttctgtaattcacaggctaggaatgtagctcagtttgtagagtgcttgcctgaaatgcatgatccgtgtggattcagttcccagagccgcataaaactgggtgtggtggtacacacctgtgatcccagaggcaggaggactagaaattaaaggccttcctccgctacaaagtgaatttagggccagcctgggctgcaggagtccttgactaaaacaaaacaaacatcagcgacgaagagtgcagcccctataacttctctttttttattactgggtattggcttcatctataaattaaatttgggcat

SEQ ID NO: 1397 - DNA, 481 bp, Cricetulus griseus
gactctcgggcagccacatgtttcccgacaggatctcgccacattggacgtgaccaagttgacaccactttcccatgaaggtatcagcagacaagctacaattaatattggtacaattggtcatgtagctcatgggaagtccactgtgggggaggctatttctggagttcacaccgtcagattcaaaaatgaactggaaagaaacattaccatcaagcttggatatgctaatgctaagatttataaacttgatgacccaagttgtcctagaccagaatgttacaggtcctgtggaagtagtacaccagatgagtttcctacagacattccagggaccaaagggaacttcaaattactcaggcatgtttcctttggtgactgtcctggacatgacattttgatggctacgatgctgaacggtgcaccagtgatggatgcagctcttctgttgatagctggcaatgaatcatgccctcaacct

SEQ ID NO: 1398 - DNA, 581 bp, Cricetulus griseus
ggagccctgtgtgtgtggcagtgtgatacaccccctgaggcctgaagctgaaaccccctaaggctggaaggcagacctacttcagagggagaaggaagaataagaggaggaggagggggaggatgaagaggagggagaccgagggaccactatccgagggaagaccatgccagctgaacaggagaaggctgggaaagtgaagtactcacggctggccaagtacttcttgaataaagaaggggactttaacaacctaacggccgctgcctatcataagaagactcatcttttggtcacgggttttgcttctggaatcttccatctgcatgagctcccagagttcaacctcatccactccctgagtatctccgatcagagggttgcttcggttgccatcaacagctctggggactggatcgcctttggctgctcacgcctgggccatctgctggtgtgggaatggcagagtgaatcctatatactcaagcaacagggccacttcaacagcatggtatcactggcctactctcctgatgggcagtatatcgtcactggtggggacaatggcaaggtcaaggtgt

SEQ ID NO: 1399 - DNA, 581 bp, Cricetulus griseus; identical to SEQ ID NO: 1398

SEQ ID NO: 1400 - DNA, 300 bp, Cricetulus griseus
gcatccccgggctacgaccatacccatggctggatcagatgagcttcctaccacatatggcctatacctacccaacgggagcagctacctttgctgacatgcagcaaaggaggaaataccatcggaaacaatgctttcagggagaagggggtgatggagcacaagactacatgccaggcctagacgacatgacagactccgattcctgtctgtctcgaaagaagataaagaagacagaaagtggcatgtatgcatgtgacttatgtgacaagacattccagaaaagcatgtcccttctgc

SEQ ID NO: 1401 - DNA, 578 bp, Cricetulus griseus
gcagctagtggtggtcatctgtaactcataccttcaagtatctggtggcctctgtcctgcacacgggtgcatgcacaaacatacacacatacatgtactcagggcatcagattccagagagctggagctacaagaagttgtgagttgcccagtgtgggtactgaaaccaaacttgggtttctgcaagaggagtgcatacttttaaccactgagccgtctcttcaacctggtggaaattcttgacatgaactggacatgatggtacatgcttgtaatcccagtacttggaaagtagagaaaaagaggatctggagttcaaggccagcttgggctacataaggctgtgtcttagaaaacaaaaataaagtattcacagaaacttctgaaagacaagttatatgtctttcaaaggacatatgaaggcagttttgatggtccaatttgctaggcatttccgacacccgtctgcctttactgaagaacctgggaaagctgtctgcccttggtctctgttgaaactatatccggctataaattgcaactgcaggatttctggggatttatttgcttctcttttc

SEQ ID NO: 1402 - DNA, 248 bp, Cricetulus griseus
  misc_feature (187)..(187): n is a, c, g, or t
  misc_feature (190)..(190): n is a, c, g, or t
ggggggaggaaagggagaaaggaaagagggagggaggagggcatgaaagaaagattctgattccccctttaatttgctaatttaaaactataactagccctctgctgcaacctgctgacagactggagaattgcaaatgataaaatcgtacttgcagcaagaattttacagttattgttcattcttnaanatccccacctcatttggcttccattaattttaccacaacaatgaatccccaccttgac

SEQ ID NO: 1403 - DNA, 578 bp, Cricetulus griseus
  misc_feature (329)..(346): n is a, c, g, or t
agcaggaggaagaagaaatggagacagatactcgctcgtctctgggacagtcagcatcagagaccgaagaggacaccgtgtccatatctaaaaaagagaaaaatcgcaagcgtcgtaaccgaaagaagaagaaaaagccccagcgggggcgggcagcatcttcagagagctctggggaccgagagaaagaatcagctcgttctcgaggctctgactcccctgctgctgatgttgagattgaatatgtgactgaagaacctgaaatctatgagcccaacttcatcttcttcaagaggatttttgaggctttcaagctcactgatgatgtnnnnnnnnnnnnnnnnnnggagccagagaaacttgacaaaatggagaactctgcagtccctaagaagaagggctttgaggaggagcacaaggacagtgatgatgacagcagtgatgatgaacaggaaaagaagccagaagcccctaagctgtccaagaagaagttgcgccgaatgaatcgctttactgtggcggaactcaagcagctggtggctcggcctgatgttgtaaagatgcacgacgtgactgca

SEQ ID NO: 1404 - DNA, 579 bp, Cricetulus griseus
acttgctcttctacttccgggtacccttcatttatggccacaaatacgacttcacgtccagtcggcacacagtggtgcacctcgcttgcatctgccactcatcccactacgtcaagcgtctgctggagaccctcttcgtgcaccgcttgtgtcacggaaccatgcccttgcgaaacatcttcaaaaactgcacctactactggggctttgctgcatggatggcctattacatcaaccaccctctctacacaccccctacctacggagcccagcaggttaagttggcgctgaccatctttgtgatctgccagcttggcaacttctccatccacatggctcttcgggaccttcggccagctgggtccaaaaccaggaagatcccatatcccaccaagaaccccttcacctggctatttctgttggtgtcctgtcccaactacacttacgaggtggggtcctggattggctttgccatcatgacgcagtgtgttccagtggccctcttctccttggtgggcttcacccagatgaccatctgggccaagggcaagcaccgcagctacctgaaggagttccgtg

SEQ ID NO: 1405 - DNA, 580 bp, Cricetulus griseus
  misc_feature (261)..(275): n is a, c, g, or t
caagatgtcaccactcatgccaagatcatggctgacaacccatcttgggatggcgagaagacaattatcatcacctgcagcttcaccccaggctcctgcacactgacagcctacaagttgacccccagtggctatgagtggggccgacagaacactgacaaaggcaacaaccccaaaggctacctgccctcacactatgagagggtccagatgctcctctcagaccgattcctcggcttctttatggttcctgcccagtcnnnnnnnnnnnnnnnctttatgggtgttcggcatgatccaaacatgaaatatgagctgcagctggcaaaccccaaggaattctatcatgaggtccataggccctcccacttcctcaactttgccctcctgcaggagggtgaggtctactctgcagacagagaggacctctacgcctagttattttcttgcttccttctgcttcggattccccaaaggctggagcccatagacaagctgctgacattcagcagcctggccccttttgtgttttgtgtttgtgttgttgatagactgtaatcctgaacaaaatgtaataaat

SEQ ID NO: 1406 - DNA, 581 bp, Cricetulus griseus
tgatgtcaatgaaggtggaccatcatataaattaccatataatgtcagtgaggatccctggctagctgcatacaacttcttgcagaagaatgatttgaatcccatgtttttggatcaggtggctaaatttattattgataacacaaaaggtgaaacgttgggacttgggaataccagtttttcagacccatttacaggtggtggtcgctatgttccaagaacttcaggaccttccaacacagtgcaggcagcagatcctttcacaggtgctggtcgttacatgccaagttctgcaggtatgggcacctccatggctggagtcgatccatttacaggaagtagtgcctaccgatcagcagcatctaaaacagtgaatatttatttccccaaaaaagaagctcttacctttgaccaagcaaaccctatacaaatattaggaaaactgaaggaacttaatggaactgcgccggaagacaagaagctcactgaagatgacttggtacttcttgaaaagatactgtctctaatttgtgataattcttcagaaaagcccacagcccagcaactttaaattttgtgga

SEQ ID NO: 1407 - DNA, 548 bp, Cricetulus griseus
  misc_feature (469)..(469): n is a, c, g, or t
agaaaattttcccattttcatcatttttatttttctacttaatagaatttttcaatataatatttgaagcaaactgtaaatctgttaatctctttgaggtagatatttttgaacatttattcatcttattgaagtcttttaaaaggtattagcatgtaatcgtacataataatgaacttcattatggcattcatagacgtacataatgtattttgattatattcacacaaataccttgttatctccctcctcctaattttcttccttttcccaactgcccctctcttctgtttggttcttgtttttgggggtgagtgtgtggcatgcatgtgcatgtgtgagttgaggtttgtttacagaaccatggacagcttatattaactttaccactgaagaaaatgtccccatctatcattaactttgtgcaaatccttggggagctatgtagaccccgatcttttcccccttncacaatgaaggtgttgatgagctgagtctgtggagatctttgcgggtaatcacagctgcctgtagttcaataggggaat

SEQ ID NO: 1408 - DNA, 348 bp, Cricetulus griseus
  misc_feature (3)..(15): n is a, c, g, or t
ccnnnnnnnnnnnnnagccctgccctcccccttgtcccgggatcgctccgtcgcacccaccatgatggaagacgacggacagccccggactctatatgtaggtaacctttccagagatgtgacagaagtccttatactccaggtggggggggagatcggaccctgtaaaagctgtaaaatgataacagagcatacaagcaatgatccatattgctttgtggaattttatgaacacagagatgcagctgctgcattagctgctatgaatgggagaaaaattttgggaaaggaggtcaaagtaaactgggcaacaacaccaagtagccagaaaaaagatactttcaatca

SEQ ID NO: 1409 - DNA, 354 bp, Cricetulus griseus
attcattttctacagtgttctggttggtaaagcttcagcaaccgccagtggagactggaacacaaccatagcctgctttgtagccatattaattggcctgtgccttacgttactactactcgccatcttcaagaaggcgctggcgggtctgcccatctccatcacctttgggctggttttctactttgccacagactatctcgtgcagccctttatggaccatcttgcattccatcaattttacatctaacatacctgcagttagaacccatggatgtttcttctttgatcattaaatacctcgagaggacataggggactttcctgtgtcgtcatctaacgaagtcatgactc

SEQ ID NO: 1410 - DNA, 580 bp, Cricetulus griseus
cttgtgtcttcccaatgtgatcgggcagaactgtgatcagtgtgcacccaatacctggcagctggccagtgggaccggctgtgagtcatgcaactgcaatgctgcacattcctttgggccatcctgcaatgagttcaccgggcagggggagtgcatgccgggcttcggaggccggacctgcagcgagtgccaagagctcttctggggagaccccgatgtggaatgccgagcctgtgactgtgatcccaggggtattgagacaccacagtgtgaccagtccacgggccagtgtgtctgtgtggagggtgttgagggtccccgctgtgacaagtgcaccagagggtactcgggggtcttccctgactgcacaccctgccaccagtgctttgctctctgggatgtcatcattggtgagctgaccaacaggacccacaaattcctggagaaagccaaagctttgaaaatcagtggtgtgattggtccgtatcgggagaccgtggactctgtggagaagaaagtcatgagataaaagacatcctggctaagagcccagcatcagaaccactgaaaaacattggca

SEQ ID NO: 1411 - DNA, 373 bp, Cricetulus griseus
gatcgagcgccggggcatggaggaggtgggcatctaccgagtatccggagtggccacagacatccaggcactgaaggcggcctttgatgtcaataataaggatgtgtcggtgatgatgagcgagatggatgtgaacgccattgctggcacgctgaagctctacttccgtgagctgcccgagcccctcttcactgatgagttctaccctaacttcgcagagggcatcactctttcagaccctgttgcaaaggagagctgcatgctcaacttgctgctgcccctcccaaaagccaacctagtgaccttccttttccttctggaccacttgaaaagggtggctgataaggagacagtgaacaagatgtcccttcac

SEQ ID NO: 1412 - DNA, 600 bp, Cricetulus griseus
  misc_feature (395)..(412): n is a, c, g, or t
  misc_feature (540)..(540): n is a, c, g, or t
tcgacccacgcgctccggaaacccaaaaggaagtagttttggaaagtgaagaaatgagccaaaccaataaggacaaaatggaatacgaagaacaaaaagtctcagatgagctcatgagcgaaagtgactccagcagtctcagcagcactgacgccggcttgttcaccaatgatgagggaagacaaggggacgatgaacagagcgattggttctatgagaaggagtcagggggagcctgtggtattgctggagttgtgccctggtgggaaaaggaagaccctgcagagctagacagagacctacctgaccccgtgtttgaaagcatcctcagtggttctttccccctcatgtcacatcctggcagaagaggtttccaagctagactcagttgcctnnnnnnnnnnnnnnnnnngaatattaaaaaatctggaggggctccaccttcaatggctgcaaactggaccagtgagattcccctataaaccaaatcttctattgctaataaattagttacgttttgaacacctggggaatggcatntcgaggaccctggctcctgtcctcttccctgggagaatacactgaagtgcgagcctcttt

SEQ ID NO: 1413 - DNA, 581 bp, Cricetulus griseus
ggcatctgcgctctgtgacagacattctaaattgtttgaagaacctgaagatcccagcaacaggtcttttttttctgaaatcatctcctctatttctgatgtaaaattcagccatagtggtcgctatatgatgactagagactattggggaggcaaaatttgggacttgaatatggaaaacaggcctgtggagacataccaggtacatgaatacctcagaagtaaactttgctcactctatgaaaatgactgcatatttgacaaatttgaatgttgttggaatgggtctgacagtgttgtcatgactggatcctacaataatttcttcagaatgttcgacaggaacacaaagcgggatataactctagaagcatcacgagaaaacaataagcctcgcacagttttgaagccacgcaaagtctgtgcgagcggcaagcgaaagaaagatgaaataagtgttgacagcctagacttcaacaagaaaatccttcatacagcctggcaccccaaggaaaacatcattgctgtagcaactacaaacaatctgtacatatttcaagacaaagtgaattaagctggca

SEQ ID NO: 1414 - DNA, 580 bp, Cricetulus griseus
gaaagctctggtttccacctggacctgctgctcattgtagccatgggtggtatctgtgccctctttggccttccttggttggctgctgccactgtccgctctgtcactcatgccaatgccctcactgtcatgagcaaggctgtggcgcctggggacaaacccaagattcaagaggtcaaggaacagcgtgtgacagggctgctggtggccctgcttgtgggcctctccatggtcattggagacctactacgacaaatccccctggctgtactgtttggcattttcttatacatgggagttacttcccttaatggaatccaattctacgagcggttgcacctgctgctcatgccacccaaacaccacccagatgttacctatgtcaagaaggttcggaccatacggatgcacctgttcaccgccttgcagttgctctgcctggccctactctgggcagtcatgtccacagccgcctccctggccttccccttcatcctcatcctcacagtgcctctgcgcatggtggtacttacccgcatcttcaccgagcgagaaatgaaatgtctggatgctaatgaag

SEQ ID NO: 1415 - DNA, 392 bp, Cricetulus griseus
cactaaatatatttataagtcatctttgtctggaacccattgggaaaaaaacaggtgcaaagggagggggtagggaacaggaggggaggcttaaaagttccaatcattcacacaaaataaaaacatcttctgatagcagcactgaatcatccggctgtgccgagcaaaccgtcctggtcagctgctgaccgactgtcccaacaggagtctcaaagccctgctcctcgctgatccatccggggaatccgggtaggagtgggattgttgttcatcctggtcttggcagatatgttaaatactgcaacattaacgagtcccgggcaagtatgaggtcagtgttgggttatttatctggaaatgtaggtgtatgtcccaaaaggggagcggggtgg

SEQ ID NO: 1416 - DNA, 189 bp, Cricetulus griseus
ggacctcatgaagagcaatcagggctcttaacctctgagccatctctgcagccccctaaagtcatctttttgaattaaatgccctttatctaaaaagtccaattgcgtcgacattaaacattatggttacccttactaagatacaaattttagtgtccaaatattttattctgtaaacccatgctggcg

SEQ ID NO: 1417 - DNA, 580 bp, Cricetulus griseus
gctcgcccagcctacccctgtctagccgggcttcggccgaggtccctgccggctggcgagcccagcgagggcacgatcgggagtccaactttcagaagagagactccccagcaagcccgcttggagggtcccccccggctgctcacctcgtgggccagacggcccttgcaaggggcagcagcagcacccccacctcgcaggctctgtaccctgacttctctcctcccgagggcctggaggagctcctgtctgctccccctcctgacctaggggcccagcgacaccacggctggaaccccaaggattgctccgagaacatcgacgtcaaggaaggggggctgtgctttgagcggcgccccgtggcccaaagcactgatggagtccggggaaagagggggtactccaggggcctgcatgcctgggagatcatctggcccctggagcatatgggcacacacgccgtggtgggcgtgggcaccgccctcgtcccgctgcagggtgaccactatgcggggcccttgggcagcaacatcgatttctggggctgggattttgggcggcgatattgcgtcatcctagt

SEQ ID NO: 1418 - DNA, 459 bp, Cricetulus griseus
gtttaaaagttaaatttggtaagttcttctatgtgaatatcttctactgaaaagtaattattgtttttatttagctcatatttctgaacatccaaatcagcaacccagccacaaaatacagatcaccatgggttctactgaatctcggggggattacatgggctcaagtatcctcatgggtatcttcagcaatgctgatcttaagcttcaggatgaatggaaagtaaatctatataacaccctggattcaagcatgactgataaaagtgagatttttgtgcatggagatttgaagtgggatattttccaagtaatgatatcaagatcaaccacaccagacctgataaaaatatgaatgaagctccaggaatttttcacacaacagtttgataccagcaaacgagctctatcaacctggggacctgttccttttcttccacccaagacaatgactaacac

SEQ ID NO: 1419 - DNA, 194 bp, Cricetulus griseus
acaatttaaggatagtgatctctctcatgtgcagaacaaaagtgcctttttatgtggagtcatgaagacttacaggcagagagagaaacaagggaccaaagtagcggactccagtaaaggaccagatgagtcaaagattaaggtatgtgtttgagaactttctgtagctttaagtgtgtgtgttttgcttgtgg

SEQ ID NO: 1420 - DNA, 555 bp, Cricetulus griseus
ggtgtggagaattaattctgtttttaaactactgattgaatgtcatggctaaggcaaagatgatgttcctgtaatgcaataaatacattgagataactgtatatttatttccagacaccagatggatattggttttcaaagttaactctttttccttattagttttaaaaagtatcaaccttgtatttcacaaattatagtaacacttttagttatcaaaatgatacaggtaatgcctcttggttttgtgtaatattccagtgatatatggttcaaagtaacagccattgcatatgttttacttatgtcagtacatattctccctaaaggaatatgcatagtctttgtttacatgaattcaaatacttgggggaattgcctacaaatgccttattactaacgtgtgcggccttctgtgtgttaatacttactcataaagacctgttctttccacctgctctaatgatttcgagtagtagtagatacactattttgaatagcagtaatctttgaaaggaaatctattttacagagctacttatgttctagctggct

SEQ ID NO: 1421 - DNA, 568 bp, Cricetulus griseus
aaacccgggagctacaccgtgaaggtgccaactttgactccatctacatctgccccagcacctttgcctgtgcgcagcttgccacaggggctgcctgctgcctcgtggaagctgtgctttcaggacaggtgtggagtggcattgcaatagtgcgtcctccaggacaccacgcagaaccagatgctgcttgtggtttctgctttttcaactctgtagctgtggctgctcgacatgctcaagccattgctgggcgtgccctgcggatcctgatcgtggactgggatgttcatcatggtaatggaactcagcacatgtttgaagatgaccccagtgtattatatgtgtccgtgcaccggtatgaccatggcactttcttccccatgggggatgagggtgccagtagccaagtaggccgagctgccggtataggcttcactgtcaatgtgccctggaatgggccccgcatgggtgatgctgactacctgactgcctggcatcgtctggtactttccatcgcctatgagtttaacccggaactggtactggtttcagctgggtttgatgctgc

SEQ ID NO: 1422 - DNA, 580 bp, Cricetulus griseus
ttgacagggaaggtaagtgagtttgctttgaattttccgattctaatgccctgtgttatggcgaattcaatgttatgacaaatactttgactcactggtaatgaagccaaataacaggaggcctccctgcttggaagctgtgttcgcagggactaaacggtgttgccatgactaccagcctctggccagctattttgtctgatgtttcttaatgtcagccattgtttattacctgttcagtttttccagtgttgcgtattttgcccagcataagtacctgtaattgtgttcatttagatctatattttctagtatttcattgccagagttacctttgtagctgagtcactatttaaagtgttatttgtcatgcatcatttattacaaataaaaagcattgcatttttggttagatgtttttcttccttttagattgagtttgtaaaattggactcacagcaataaatgactacctttctatttgaggggttctctatattcaattgtatagacaagcattcttgctcaaaattcagacttcccaggatttaaacctataagtatagattaatggacaaga

SEQ ID NO: 1423 - DNA, 581 bp, Cricetulus griseus
ataggcagaatggagttcctggaaacagctcttggcatagaacctgccctatgggtactcaagatgacaggtggacagcaggcctgggtaggagtccatgaaatagaaggataaccaacatcttattaaactggttctgcctatattggcagcccaacaggggccttcagtgtctgcctaagcatgtctctgggcatttgttttgagcatacctacccttagtacaggacagagctatgtttaaaggccttgcttcagggccctgaagaattccagggttcctgatgtgccctgaattcttgtatcatgaactccctgctccatctccagcaccttagattctgcttccacccctgccagcagagtccacccctggtgaccagagtggcctccttggctgaattttgtggcagctcagccctttgccttttcaggctatggttcccatgtagcctgggatttggcctcctcagtcacccaggggtgctagccagctgcccctcccactagcagacatgtgaagggtggtccataagccggggggctggtgctaagaattacatatccattacgtcttctgc

SEQ ID NO: 1424 - DNA, 235 bp, Cricetulus griseus
ataagtaatttccacagagcacagagcaactgctaaggtataaacaacccccaggcaacctgaccattgcctgtactatttgctcttctgttgattacatggcaattagttcgaggccaccctggtctacagagctagttccaggatagctaggttgttacatagagaaaccttgccttgaaaaacaaattcttaataccgggcccactggagacagcctataaggcaaaggtgt

SEQ ID NO: 1425 - DNA, 578 bp, Cricetulus griseus
agggagagctgggacaatagctcaatcaataaataagtgcctgtttcctcagaaccgtactttcccatgcacagatgcacacacgcaaacatatatatacacacatcagaaaaatacaccaatacaaagaaagaaatcaggatatcacgggagtaatctaggtaatatttacaaattaaaaatacataggtttcgagggaataaagctactctgatactaccactgtggatacatgtcactatatatttctccaaatatattgtgtggacaatgtaaactgggtgacaacgatgtatcaatgtgggttcactgactgtaatacatttctttcttttcttttttggtctgttgagacagggtctctctcggctgtgctagaactcaccatgtagagcaaactgatttcaaactcacaaagatctgcctatgtctgcctcccaagtgctaggattaaaggcatgagccatcacgcctggctgcaatatatttcttcttctggtgggaggtactgatgataagagaatgtatgggaataggaaggaaatgagaaatttccataactactttttaattttgc

SEQ ID NO: 1426 - DNA, 580 bp, Cricetulus griseus
aggcttgtgctggtggatttttataagtttggcacagactatgaagactctaaggctaagaaagaacactgtgaaattttcattgtataggcattttataaatacactcatctttgctgtgctggcttctatagtgtttatggtgtgggcgacaaagaccttcaggattgcaaaatgccaatcagactggatggagctctgggttgatgatgcattttggagctttctcttttcactcatccttattgtgataatgttcttatggaggccatcagcgaataatcagaggtatgccttcatgcccttgatagatgattctgatgatgaagttgaggaattcatggtaacatctgaaaatttaactgaaggaataaaactaagagcttcaaaaacagtttcaaacggaacagctaaacctacttgtgataattttgatgaagatttgaagtgggtggaagaaaatattccctcttcattcacagacgtagctctccccgtcttagtggactcagatgaggaaattatgaccagatctgaaatagctgaaaagatgttctcttcagaaagataatgtgactgg

SEQ ID NO: 1427 - DNA, 432 bp, Cricetulus griseus
ttgttggagcgcggccgggcagcagctcgtgtggtactcgggggccatcgcctcggcgctcccctcagaggaagcctcctcctcctcctccaccatctcctcctcgggcccagatgctcttcaactcggtgctccgccagccccaggggggcgtcccgcggcacggatggtcttcacattatcctctgcagtcccttctcagtggttatcagtgcaactgtaatgatgagcacacatcttacggagaaacaggagtccctgttcctccttttggatgcactttctgtacagctcccactatggagcatatattagcagtggccaatgaagaaggcttcgccagattggataacacagaatcacaaaccagcagaaagacatgcttcaaggagtggatggctcactggaatgctgtctttgacctggcctggg

SEQ ID NO: 1428 - DNA, 580 bp, Cricetulus griseus
tatcatcatggccaccaactgcgagaattgtgggcatcggactaatgaggtgaagtccggaggagcggtagagcccttgggtaccaagattaccctccacatcacagatccctcagacatgaccagagacctcctcaagtctgagacgtggggtgtggaaatcccagagctagagtttgaactgggaatggctgtccttgggggcaaattcaccactctggaagggcttctgaaagacatcagagaactgaacccattcacactgggcgatagctcaaatcctgaccagtcggagaaactgcaggagtttagccagaagttggatcagatcatcgagggcaagatgaaggcccactttactatggacgatccagcaggaaacagttacctgcagaatgtgtatgcccctgaagatgatccggagatgaaggtagagcggtaccagcgtacctttgaccaaaatgaggagctcgggctcaatgacatgaagacagagggctatgaggcatgcctggccccacagcggtagcagtgcacagctcacaggccagcttcagtgccaccagcaccacaggcgtat

SEQ ID NO: 1429 - DNA, 418 bp, Cricetulus griseus
cgcctccatgtaccggttcttcaccaccggctaaaacaaagagatgcgagtcatccttgtccggggaggagttggacaccaagcccgtctgggggaactacggcagacgggctttgttactgagtgaagatgaggaggatacaaagagagttgcccgaagtgcaaaggacaagaggtttgaggagctgaccaaccttatacgaaccatccgtaatgccatgaagattcgagatgtcaccaagtgtctagaagagtttgagctcctgggaaaagcatatgggaaagccaagagtattgtggataaggagggtgtcccccgattctatatccgaatcctggctgacctggaggactatcttaatgagctgtgggaagataaggaagggaaaaagaagatgaacaagaacaatgccaaggc

SEQ ID NO: 1430 - DNA, 506 bp, Cricetulus griseus
aactagagttacagagtgagccaccatggggtgctgtgtattgaacctcggtcctctacaagagtagcaagtgggcctggagaaatggctcagccgttaaagactaagttcacaaccaaaaatataagtgtcaagtgtttttaactgacagccatttcatcagcccctgttggtgatattctaaatgtacttttataaataatttctgtgaaaaacaaaacctattcaaaagaaaacaatgtctcattatttttgctgatagactattctattctcctcagggaacaccgcctgtggccgggcacaggtggaggctgcctaccattaagggatcccacacagtgcattggttcttgctctgtgactggcctgaggcaccacagtttgttctgtgggtacttcagcaatagtagctgtcgctgtcatggcttcatgggcactgctaaaatctgctttatcgaatcacctaatttcatcacagagtatcacacttcgatgaaaacttt

SEQ ID NO: 1431 - DNA, 580 bp, Cricetulus griseus
gtttcttggtgtgtaatttttctctgatgggaggagttcaaactggcagcactttggttaaggcaggagggggcagggactgtgaaactctgttgacgagtgggcagatgaaaacacggagagggctgaatgtctagccaggaacactcagcatttaatgatgacaccagctcattagcatgaagtgaagcagaactttgtgtggtgatcagacagacacaggcaaggcaaggcttattgattcttcgtttatatgtgggatccttgattgaatcatgaaccagaaatgggactgatggggaaatttgcgtcagatctgtagacttgtttgcacaattatatcaatgttaaccctctggtttctattgtcatgccctggttatgtaggatattcacattttggaaggcgacttgaaggaaacatgagaattttgtatgctatttttacagcttatttttataagtctaagatcattttaagacaaagtttataaggatatgaggcacaaatggtcatcatattatttctgggcagagggggtataaagaagtgagaagactgtttatatcagagaacagt

SEQ ID NO: 1432 - DNA, 554 bp, Cricetulus griseus
  misc_feature (217)..(236): n is a, c, g, or t
tataagtcaaatgaactctttcctttccaagttgctttggtcatggtgttccatcacagccatagaaaccccaactaagacagcaaggaagcatttctcacccctcctcctgggctcattggtgtccgccactacacctgcttaagaagagtgaaccgcttagattgttgacgttttcctagaaagctcaccagcatatgggtctttaaaatttgcnnnnnnnnnnnnnnnnnnnnacatagggcttcattctatagcccaggctagcctcaaattcaagaatccttttgccgcagattggggttacagtgctagaattacggcagtttttcaaagttggtgatagcaataaattcaagatttgtgtggattgtcaaccttaatctgtcctggagcagtgtcttcatttcctagtcactacctgtgtggatgacgtttctgagcaagcgacaggagcagacctaggtcaagagctattctttttttctcagtccatacagcagccacctaagtttcggtggaaaactggagggccaggtgtttgcactctgtag

SEQ ID NO: 1433 - DNA, 578 bp, Cricetulus griseus
ttcagttagcagatttatacgagccaaggggacgcatgaccttagcagacattgagcggattgctcccctggaagaaggaatgctgcccttcaacttggctgagacccagaggcagaaagcctcaggggatgcagctcgaccctttcttctccagctcgctgagccagcctacaggtttggtctgggttctattgctggagctgttggagccactgctgtgtatcctattgaccttgtaaagactcggatgcagaaccaacggtcaaccggctcgtttgtgggggagctcatgtataaaaacagctttgactgttttaagaaagtgctccgctatgaaggcttctttggactgtacagaggtttgctgccgcagttactgggagtcgccccggagaaggccataaaacttacagtgaatgattttgtgagagataaatttatgcacaaagatggctcggtcccactttcggcagagattttggctggaggctgtgcaggaggctcccaagtgattttcacaaatcctttagagatcgtcaagatccgcttgcaagtggctggagagatcaccactggc

SEQ ID NO: 1434 - DNA, 544 bp, Cricetulus griseus
  misc_feature (22)..(87): n is a, c, g, or t
  misc_feature (102)..(162): n is a, c, g, or t
  misc_feature (183)..(241): n is a, c, g, or t
  misc_feature (263)..(308): n is a, c, g, or t
  misc_feature (310)..(326): n is a, c, g, or t
  misc_feature (344)..(416): n is a, c, g, or t
  misc_feature (425)..(479): n is a, c, g, or t
aatgtctacgcttctatgtttnnnnnnnnnnnnnnnnnnnnnnnnnnnnnnnnnnnnnnnnnnnnnnnnnnnnnnnnnnnnnnnnnntatgtattcaaatcnnnnnnnnnnnnnnnnnnnnnnnnnnnnnnnnnnnnnnnnnnnnnnnnnnnnnnnnnnnnntagtgtcaaacacttacggannnnnnnnnnnnnnnnnnnnnnnnnnnnnnnnnnnnnnnnnnnnnnnnnnnnnnnnnnnatactcctacctctaacctgannnnnnnnnnnnnnnnnnnnnnnnnnnnnnnnnnnnnnnnnnnnnntnnnnnnnnnnnnnnnnngctatagcaactttatgnnnnnnnnnnnnnnnnnnnnnnnnnnnnnnnnnnnnnnnnnnnnnnnnnnnnnnnnnnnnnnnnnnnnnnnnnattagttannnnnnnnnnnnnnnnnnnnnnnnnnnnnnnnnnnnnnnnnnnnnnnnnnnnnnncgactacaacaaaaaactttatatttctatactaattattctacaaactcttctaatcccaacat

SEQ ID NO: 1435 - DNA, 566 bp, Cricetulus griseus
aaggctacttccctggagaagactccctctgtagcaaccattcttctgacattgtgcggctttattgtcacctccagagttcacactttagacccaggaagtagatgacaaatgagtaaaaatgaaaaaattaggactgtgattttattgttaggctgtgttcatagttatcttcagcctcatgtggtccatggaccacagattagacacgccagctggacagcgaccctcgtctctgtgttttgctttgatttctccatgataaaatgaaaatgaaacattgccactcctgtgtcatcccttcactaagagaactttcacactcatgggccttttgtcccccagagcaccagatgtaacgtgaaccctactccatccacaatggaaatttggcaacacgctgccctcatccctgtagaaatgccgtggctccctagatagttctaggaagaactgcagtttcctatattttgtactagtcagctcttaattaagcacttgaatggagagaagcagtggtgcgcataatccaaaatcagtggatgccattttctggtgaatcaccc

SEQ ID NO: 1436 - DNA, 99 bp, Cricetulus griseus
atcgcagaggatgaggagacacccgctagggaaaatgcaaaacgggttaagcgtatactagagctaacatccaagccactggacaacgaacattcaggc

SEQ ID NO: 1437 - DNA, 600 bp, Cricetulus griseus
  misc_feature (34)..(77): n is a, c, g, or t
gtcgacccacgcgttcgggggggggcgggcgggnnnnnnnnnnnnnnnnnnnnnnnnnnnnnnnnnnnnnnnnnnnngagacagagagacagaaacagatccctgagtagcctgtttgtttaataatgggagatagaatataaagggggggaatctggatagaaggggaggtggggaggaattgggagtagagggagggaaactataatctgaatatactatatgagagaaagatccattttgaccagaagagaaggacagaaaggaggaggaaaagtaacagaagacaaccttatggtcaaccagagcgcaacctcaatctccagctgttttcctcctctgatcttctaatccttcacatgttcttcctttctatggccagagaccaacaaagatgcttcttatagtaaagtctcatctgcaaatccaaattcagcaaataactaagccatattttaaaatgctattcaagaaaagtccatgatgaacaacctttagaaaaggtaagcatccttctaaaagaggatggagccacatatgcatttcttttctttaaatgttggcttctcaccatgtgtaaagctcgatgacgggcatggt

SEQ ID NO: 1438 - DNA, 600 bp, Cricetulus griseus
  misc_feature (5)..(5): n is a, c, g, or t
  misc_feature (19)..(19): n is a, c, g, or t
  misc_feature (24)..(24): n is a, c, g, or t
  misc_feature (33)..(33): n is a, c, g, or t
  misc_feature (41)..(41): n is a, c, g, or t
  misc_feature (54)..(54): n is a, c, g, or t
gtcgnaccccatcgccgtncaggnaggaatggnagtcgtgnagcacccaatggnataatggaagcatgaggcaagggtaggcagtaagatccgggcaagaaaaggataagagcaaggaactgcacgctattaaggaacgttatctgggtggcaccaaaacacggcgccgaacaaggcatctcaatgcccgaaagtttgtctttgagtgggaagcatctgaagatacctccattgactacaaccctctgtacaaagagcggcaccaggtgcatttgttggggcgaggcttcattgcaggcattgacctaaagcagcagaaacgagaacagtcacgtttctatggagacctaatggaaaacaagcgcaccctggaagaaaaggagcaagaggaggcaagactccgtaaactccgtaagaaggaagccaagcaacgctgggatgaccgccattggtcccagaagacgttagatgagatgacagacagggactggaggatcttccgggaagactatagcatcaccaccaaaggtggcaagatccccaatcccatccgggcctggaaagattcatctctgcccccacatattttggaagtcattg

SEQ ID NO: 1439 - DNA, 580 bp, Cricetulus griseus
  misc_feature (151)..(169): n is a, c, g, or t
taagtgtgtctaatgagaatgtcttacagatccaaatccacctacagacttgtttcaacaagttgttgtttcaacaacaagctacaccttggctgcccactagaaacacaaggttagccctgacctctcctaggtatttcttgccagtatnnnnnnnnnnnnnnnnnnnttaaagggtcaaaggtaatagagcaaatgtcatcccaaggatcaaagtcagagaaagcagcttaaattctttgaccaaatcaactagagtagaaagctgatttactttgcaagacctagagtagaaaaacacataggaagggtttcttcattctctcttcaaacttgtggttcactgactctcggttcctggaccaaggtgtgagttgctaataaatggggtacaatgaggtgatgtgggaagtatgaggacaagggagccataattgagtcccaatgccagtaacagtgcatctccagattcattgatcaggcacaaattctttctaatgggtggagaaactcctaggcactcaaccatgtctcctgcatgtggctatggtacatagccattcttgcaccattccaactc

SEQ ID NO: 1440 - DNA, 567 bp, Cricetulus griseus
caagtggattgctgggaattgaacctgggtcatttggaagacagctcttaactgcctagctatccttccagcccctcttttgttttgaatcaatttgtgtctagcactgtgccctataactattaactgtgtatgtagtccattcactggctgaagtattctgcacagtattatagttttctgttgcataatgaagagttggtgatgcagcacagtagtagagaacctgttcagcatttgtgaatccctagacccaaacatagaaaaagattgtaatggggagaggggcagagggaaggaagagacaaacagctcaacccctcttcattctgacatttcagcgagagcaatgatggaatcaacatgtcccggctcattatcaatcaactaaaatggctggataggattgtggatagcaaggtaggtttgggggctttatcaattttaagttttttgttttgctttttacagctgggcgtaccatcgtatgcctataatcccatcacttaagaggcaaatgcaggctggattccgtcagctctatgccagcctggtctgcctagcgag

SEQ ID NO: 1441 - DNA, 483 bp, Cricetulus griseus
agtttggcaaaagtcaaacattatcacacctttttaaatacttggtctttttctcaagaagtaccagtcacttaaatatataggtagaaaagttctgaatgtttgggaaataaaaactaggttttggggatttttgttttgttttcttgtggtgagcgatcttagtatgttaccttagcactttccttaccaggtttttaatgtaagaaagatagctccaattatgtctctgatttcctggaaagtcgtaatgggactagcttgaagtaaaatatgaagcctttggccagatgccactaaagacaactgttttattaggtacggggtattggggacattgcaataattctgcattttccacttttgccttctgatatagagcttcacataataaattcctagctaggctggaacttcataagtagcacaagctggccctgaactgacaatgctcctgcatgtgctcaaaaagcaaaaaaaggt

SEQ ID NO: 1442 - DNA, 578 bp, Cricetulus griseus
aggccaatgacctatttgaaagcgggaacatgacacaggtgcaggtgtcactgcttgcgctggcaggaaaggccaataccaaggggctgcagagaggtgtggacattggagtcaaatactcagagaaacaagaaaggaactttgatgatgccaccatgatagccggccagtgcgtcattgagctgcatatgggcaccaacaaatgtgccagccaatctggcatgacggcttacggtaccagacggcatctctatgaccccaaaaaccacatcctgcctcccatggaccactgcaccatcagcctccatatgggtaccaacaagtgtgccagccaagtgggcatgacatctccaggtactcaaatgcaaccctatcacatcataccggacaccgtctagcgtgacaactttaccctgtccctacaaatggtctattatcaggcgtgcctccaacatggccagacccattatctgttaccgctacacatccgaatattttgtatttcgccactttttcccccattttttattttatccagcccccaattttccgtttttatccccccttttcactatacc

SEQ ID NO: 1443 - DNA, 580 bp, Cricetulus griseus
  misc_feature (117)..(138): n is a, c, g, or t
  misc_feature (170)..(195): n is a, c, g, or t
  misc_feature (198)..(252): n is a, c, g, or t
  misc_feature (279)..(300): n is a, c, g, or t
  misc_feature (317)..(350): n is a, c, g, or t
  misc_feature (361)..(379): n is a, c, g, or t
  misc_feature (400)..(427): n is a, c, g, or t
  misc_feature (439)..(458): n is a, c, g, or t
ccaccgctaattcatatcccacatggagaaacgaaaagactcatatcatcatcgttgtcattggacacgtacattcaggcaatgccaccacaatccggccaccgtgatctacaaatnnnnnnnnnnnnnnnnnnnnnncatctaaaagtttgagaaagacgctgccgaannnnnnnnnnnnnnnnnnnnnnnnnnctnnnnnnnnnnnnnnnnnnnnnnnnnnnnnnnnnnnnnnnnnnnnnnnnnnnnnnnacctgcggaaatttgagaccagcctannnnnnnnnnnnnnnnnnnnnngccccaggacacatacnnnnnnnnnnnnnnnnnnnnnnnnnnnnnnnnnnggctgactgannnnnnnnnnnnnnnnnnnatggagccggtgaatccgacnnnnnnnnnnnnnnnnnnnnnnnnnnnnatgagcatgccnnnnnnnnnnnnnnnnnnnnagtgaaacatctaattgctggagataacaaaatggattccaccgagccaccttacagccaaagtagatgcgaggaaattgtgaaagaagccagcacctacattaataaaattggctacaacc

SEQ ID NO: 1444 - DNA, 600 bp, Cricetulus griseus
  misc_feature (27)..(80): n is a, c, g, or t
  misc_feature (464)..(485): n is a, c, g, or t
catcgtatggacatggaatcgcgctcnnnnnnnnnnnnnnnnnnnnnnnnnnnnnnnnnnnnnnnnnnnnnnnnnnnnnncgcgtccgaagatggataatcactccacatgttggggaagttgatttggtttggtcctgatgttccctcaccaaaaatcattttgagccatcatctcagacttctgtgaacactgtaaaagcccacagttttcaggccttgctatcactctgttggaatctgtgccttcgagaacatgttttagaatggcctgactgtattgtgcctaaaaactgtgtgttagtgatgaaaagaaatctactctccgtgaaaaagtattcaaaggttgaaggtggaagtgagtataaaattggcttttcacatcttttcaaaacttactttctgttctttttgtgtgtgattattttcctacatctatttttaataaaaaatgaaagtgtgttnnnnnnnnnnnnnnnnnnnnnncaatttgacaataattattttgttttctctaagacttagtaaagtgaaaacttttataacatacttaaaatgttagttgggatgatttttttttaaatctttacttatttattta

SEQ ID NO: 1445 - DNA, 579 bp, Cricetulus griseus
caccagatctagtgacttaatatgtgaatgtttttattgcagatgaaaccgaatttagaaactttattgtttggcttgaggaccagaaaatcagacactacaagattgaagacagaggtaacttgagaaacatccacagcagtgactggcccaagttctttgagaaggtaatgaattaggaagtaaaaggaagcatgaagtagagttgaaaattcctgtgttctttcaagatactatagtaagcggtataagtaaggctaatttcatggatttcaaatttttgctcttttgatttttaaagcaagttatctctttccaccaagccttcagtatttaggttaaacatcattttctaaatggcacaatattccttaatagggctgcctactctaatttttatacatgtgttggtatgtttgttgagtgtccacagaaaccagaagaatgtatcagagctcctggagctggagttatattaagacacaaaaaatgcaagaatatacttttgagtgcttgtctttgttacttctctattgctataaagagacaccatgactgagaaaacttataaaaggaagc

SEQ ID NO: 1446 - DNA, 579 bp, Cricetulus griseus
  misc_feature (195)..(223): n is a, c, g, or t
atcccgggtctggaacccatcacctacgaggggaagatgcacttcgtccccgggctggctcggccgatcttcccgccgtgggatcgcggctggaaggatccacggtaccaccgcacggccccgatccccgagcagcctctgtacaaggagcagccctgctacatattccaccggcgctgccgactccttgagggnnnnnnnnnnnnnnnnnnnnnnnnnnnnnccaagttaatagaaggccttcccaagaaagtgcttagtcttgttgatgatccaaggaatcacatagagaaccaagaagaacgtgttctaaacatcatctctcatgcccgtctctggcactctcctgaggacatccccaagagagagacctactgcccagtcattgtgaacagcctcatacagctgtgtaagtcccagattttcaagcacccttctctggcaaggcggatgtctgcccaaaactactccttagccaccacctggaatcgagagtctcttctccttcaagtccgaagtagtaatggtaccatactgagtaccaaggaccctctgcccaccattgcctccagagaggaa

SEQ ID NO: 1447 - DNA, 567 bp, Cricetulus griseus
caaaattaaccattgtttcctgcagcctgtcaaaaacctggggctgaacccacagggatgtcaacattaatgtcacaggaacaaacattcctgtgccacctaaaaggcacccatgcaaaattaccatgctcaggccaaccgttaggttaaaaaagtcagggggttcaaagggatgaaactggggagcaagtgcaaaaactgaaaacccccgtgtgcccctcgaaacagtgtcccctaagggtaacaccatgctctggcactggcatcccactgtgccaaaaaccccaatggctttgccatatagcaagtccagggctttgctgccagtcgtctgtacttcttaaacctgaccctggaggaaaaacagggaaattttttaaacccattgctaaccactgaattctgctctatgttaaattaaaaaaactttccaaaagccataaccctgaaggttggcctgcgaacacgcacacccgggtgcgtgcatgcacacttgcccacacccacacacgagacttaaagctgatacaaaaaacaggcgtggtccttttaactcaagcccaagaa

SEQ ID NO: 1448 - DNA, 578 bp, Cricetulus griseus
aaagagctggtggaattgggtgaccatggggatgtgggcatcggtggacgctatgggggacttccctgcggagaagcgaatcttcggggcggtgttgctcttttcctggaccgtgtatctgtgggagaccttcctagcacagcggcagagaaggatatacaaaacaacaactcgggtaccagtagaattagaacagatcatggattcggacacatttgagaaatctcgactgtatcaactggataaaagtacattcagcttctggtcaggactctattcagtggtggaaagcactcttattcttctctttggaggaatcccttacctctggagactttctggacgggtctgtgattctgctggctttgggccagaatatgagatcattcattctttggtgttccttctgttggccacactctacagtgctctgactggcttgccatggagtatgtataatacttttgtgatagaagaaaaacacggcttcaatcaccagactttggagttttttatgaaagacacactcaaaaaatttgctgggactcaatgcatcttattacctgtgtcttcccttc

SEQ ID NO: 1449 - DNA, 458 bp, Cricetulus griseus
gcgaccccggggtcttcaccgagctcattaaaggattcggttgccgaggagtgcaagtagaagaaatatggagcttagaacctgagaattttgaaaagttaaagccagttcatgggttaatttttcttttcaagtggcaaccgggagaagaacctgcaggctctgtggttcaggactccagacttgaaacaatattttttgccaagcaggtaattaataacgcttgtgccacgcaggctattgtaagtgtgttactgaactgtacccatcgagatgtccacttaggagagacattgtcagaatttaaagaattttcccaaagttttgatgcagctatgaaggggttggcattgagcaactcagatgtgattcgacaagtgcacaacagttttgccagacagcatatgtttgaatttgatacaaagacatcagccaaagaagaagatgcttttcacttt

SEQ ID NO: 1450 - DNA, 579 bp, Cricetulus griseus
ccaaagagtatatggaaccgacagtggaattccaacgtagggcaaaggaaagccctttgaccaaacctgaagagcctgcagcttctattatgaacgcaaattccctgatttggttgtgaaggctagtggccttgcagctgggaaaggcgtgattgttgcaaagaacaaagaggaggcctgcaaagctgtacaggagatcatgcaagaaaagtcttttggagcggctggagaaacagtggttgtggaagagtttctggacggggaagaagtgtcttgtctatgtttcactgatgggaagacagtggccccaatgcccccagcacaggaccataagcgattgctggatggagaccagggccccaacacagggggaatgggagcctattgcccaacaccccaagttcctacagatttgttactaaaaattaagaacactattcttcagagaacagtagatggcatgcggcaggagggtgcgccttacacaggaattctctacgctggtataatgctgactaaagatggcccaaaagttttggagtttaattgccgttttggtgatccagaatgccaagtaat

SEQ ID NO: 1451 - DNA, 569 bp, Cricetulus griseus
  misc_feature (385)..(403): n is a, c, g, or t
ccccagtaccatcccctctttcgcagagggaggctcccctgccatcctcggagcctgacgcccaccagaaggcccagactgcgctgcagcagcaccttcaccacaagcgcagcctattcttggaacaggcccatgatgcctccttccctgctcccacagagcctcaggctcctggctggtgggccccaccaggctcacctgccccacggcctcctgacaaaccatccaaggagaagaagaagaagccccctaccccagctggaggtcctgtgggagctgagaaaaccacccctgggatcaaacccagtgtccgaaagcccattcagatcaagaagtccaggtcccgggacatgcagcctgtcttcctgcctcttcggcagattgnnnnnnnnnnnnnnnnnnnccaaccctcagaggaagtacaggcacctccacctgcccagctctctgccctgcctcctgcctcccagggtgctgcctcccagagctctgctgcccctcttcccccagaaccttctcttgcgctatttgcacctagtccctccggggacagcctgctgccccctact

SEQ ID NO: 1452 - DNA, 577 bp, Cricetulus griseus
cctaaggctgaaagatcagcttttcatcatgtcttgtttatttgaggttcatatctgcaaactctgagccttcacagatggcttcattctgaaaaataaaaggggaaattgggtcaggacaagctagtttgcacctactgtggctggaccaaccaacactgttcatctcgtgacaccagaggacatggggtgatgtgaggggggttaagcctgtagcctgagcttgggatatactgtccaaggacaactccatcctggaccagcagctggctagggccagaagatggactggaatccaagctttctgcaagacaaacttatagagtatgagttaggaatgaaagtgtcttcacccactcttggcccattcattttgataggcagagatgaaagagtttggaatttggagtcagaaaaatttagatttccacttccatatctgcctaagtgtaccactgctggcctctcctgcatagtaagaaaatgaaatggataatgcttgcttgagtttgcttcaaccaagaagcctatgtatggtttgaggtctgatggatatttctgtacaagtaataaatct

SEQ ID NO: 1453 - DNA, 406 bp, Cricetulus griseus
  misc_feature (98)..(98): n is a, c, g, or t
  misc_feature (112)..(112): n is a, c, g, or t
  misc_feature (148)..(148): n is a, c, g, or t
  misc_feature (295)..(319): n is a, c, g, or t
  misc_feature (321)..(340): n is a, c, g, or t
cgacccacgcgtgccgatcacttccttcatgtttacagagacatgggaaatgccatttttagagcctctcagccctttctaaagctggccttacgtgnaagagcaccattgnaaggatacatcagagagtgtgtgttagaaactcttnctgctttttttctgtacacaccagactttgtgtacacactgtatggtcccaaagaaagccagagagatgctgactgtggtgcctgtcagcacaccagtgtctgcttggcgctgggccccgcccccgtgctgtcccatgagatgactnnnnnnnnnnnnnnnnnnnnnnnnnannnnnnnnnnnnnnnnnnnncgcgcgccctcgcgcgatcggaaactccccccgtgtatggttcccatcgccaggttctgcggagtc

SEQ ID NO: 1454 - DNA, 267 bp, Cricetulus griseus
  misc_feature (76)..(92): n is a, c, g, or t
tggctcgagaaacctgggaagtcctactgttgtttcttctgcaaatcaatgacattcttctggctccaccaactgnnnnnnnnnnnnnnnnngataatctatcagagaagctgattggtgcactctttgaagtttggttactagcttgcacccggtgcttcccaacacctccttattggaagacagctaaggagatggtggctaactggaggcaccaccctgcagtggtggaacagtggagcaaggttatctgtgcactcacttcca

SEQ ID NO: 1455 - DNA, 444 bp, Cricetulus griseus
  misc_feature (4)..(33): n is a, c, g, or t
  misc_feature (61)..(98): n is a, c, g, or t
  misc_feature (100)..(114): n is a, c, g, or t
  misc_feature (151)..(178): n is a, c, g, or t
  misc_feature (206)..(260): n is a, c, g, or t
  misc_feature (262)..(274): n is a, c, g, or t
  misc_feature (390)..(411): n is a, c, g, or t
ccgnnnnnnnnnnnnnnnnnnnnnnnnnnnnnnatagtaagcatcaacaaaagactgtatnnnnnnnnnnnnnnnnnnnnnnnnnnnnnnnnnnnnnngnnnnnnnnnnnnnnnacaaataggtctatgaacatttcaaccacaaactagnnnnnnnnnnnnnnnnnnnnnnnnnnnnccactgccaatcaaattaggcctttctnnnnnnnnnnnnnnnnnnnnnnnnnnnnnnnnnnnnnnnnnnnnnnnnnnnnnnncnnnnnnnnnnnnntgacaaaaagtagccccaatgactattttacttcaaaggcatgaagctatcgatactaatatcctacccccctctgccctcatctcagcactagcgggagcatgaggaggcctatnnnnnnnnnnnnnnnnnnnnnngctagcttactcatcgcatcggccccataggct

SEQ ID NO: 1456 - DNA, 466 bp, Cricetulus griseus
tccaagatgtcgaagcgaggacgtggtgggtcctccggagcgaaattccggatttccctgggtctccccgttggagctgtgatcaactgtgctgacaatacaggtgccaaaaatttgtatatcatctctgtgaagggcatcaagggacgactgaacagacttcctgctgctggcgtgggcgacatggtgatggccacagttaagaaaggcaaacccgaactaaggaaaaaggtccatccagcagtggtaattcgacaacgaaagtcgtatcgaagaaaagatggggtgtttctttattttgaagacaatgcaggggtcatagtaaacaacaaaggcgagatgaaaggctctgctatcacaggtccagttgcaaaagaatgtgcagacttgtggcccaggattgcatccaatgcaggcagcattgcatgattctccagtgtatttgtaaaatatattcattaaaaag

SEQ ID NO: 1457 - DNA, 600 bp, Cricetulus griseus
  misc_feature (591)..(591): n is a, c, g, or t
tcgacaccacgcgtccgcagtaattttttaggctatagaatttaaatattgtaactaactatacttataaattatttaagagtgttttaagaataattttgactgcaaaataatgtcaatagagagtattaatatttgtaaactttgaaatttagagtcagaaaattcttttaatattttagtcctttatgtaataagtaatacctaatatattgcatggtattttagccattcataaaagctgtattgtgtatgcctctttatctagagagtgagcaggggcaaaatggagggaaggaaattaattactggtctccatgagagattgggtgtaggacccatgcagatacaaaacttccttgatgtctcataaaataaagtagtacaatatttgcatatagcttacatatatccttccccttgtttacttcctacatttctttatttcttaagattcataatgctgtataaatacctgttaagccgttgttggataataatgacagaaaacatctatacatgtttggaataattttttcatgaatgttttcaatctataccttgaatctaaggatttagaatctacagtangtaaagtgg

SEQ ID NO: 1458 - DNA, 579 bp, Cricetulus griseus
gagcagagtggctgatgccaacatggcctgtcggaagctggctgtggcccaccccatcctgctactgaggcacttgcctatgattgcagccctcctgcacggccgcacacacctgaactttcaggagttccggcagcagaaccacctggccttcttcctgcatgtgctgggcatcttggagctgctgcagccgcgtgtcttccagagcgagcaccagggggcgctgtgggactgcctgcgctcttttatccgcctgctcctgaactaccgaaagtcctcccgccacctggccccttttatcagcaagtttgtgcagttcatccacaagtacgtggcctgcagtgcaccagcagccgtgaccttcctgcagaagcacgcggagccgctccatgacctgtcctttgacaacagtgacctggagatgctgaagtctttactggcggggctcagcctgcccagccgggacgggagaactgaccaatgcctggatgaggaaggggaagatgagcgatcagccggctccctacccctggtcagtgtctccctctccactccactgactgtagctgacgaggctcc

SEQ ID NO: 1459 - DNA, 567 bp, Cricetulus griseus
gatctgtcctgcaataaactcagtactcttccgtcggatttctgtggtctcacacacctggtgaagctggacctgagcaagaacaagctgcagcagctgcccgcagactttggccgcctggtcaaccttcagcatttggatctcctcaacaacaagctggtcaccctgcctgtcagctttgctcagctcaagaatctgaagtggctggatctgaaagacaatcccctggatcctgtcctggctaaagtggcaggagattgcctggatgagaagcaatgtaagcagtgtgcaaacaaggtgttacagcacatgaaggccgtgcaggcggatcaagaacgagagcggcagcgccggctggaagtggaacgagaggcggaaaagaagcgagaggccaagcagcaagctaaggaagcaaaggaacgggagctgcggaagcgggagaaggcagaggagaaggagcgccggcgaaaggagtacgatgcccataaagcttcgaagcgagagcaggagaagaagcccaagaaggaaacaaatcaggccccaaaatctaagtctggctctcgtcct

SEQ ID NO: 1460 - DNA, 210 bp, Cricetulus griseus
cgcctgccaatgtgatgcatggactatggagtggcggggactaaggatcatggcatacgagccccatatgcatagggacaacctactgacgtcgaaaggattcttgactatagtcggtattgcaccacgatatgcctaccgctgtgcagctgcttgcgacactgatataagaaaaacaaatgggctgatgatttgaagactagatctggg

SEQ ID NO: 1461 - DNA, 569 bp, Cricetulus griseus
  misc_feature (8)..(30): n is a, c, g, or t
  misc_feature (475)..(491): n is a, c, g, or t
cgagggcnnnnnnnnnnnnnnnnnnnnnnnaagggatggcctataaaaaatttggggttaatcattaaaagggaaaggggggtaagggggatttttattaaggaaagttctcggggggggaaaggtggaaaataaattatatggggggtaaactaacctcggggaggagtaattaggatttatagggaatatagggcggtaataaggatgttagtccctcctaaaaaaagggtaaaattggatcatgaaaatagggaaatggaaattattaattttccaattaaatcgcttgacgggggaagggctaggacatttagcctccctaaaaataaaaatagggctttaaggggaaaagctgtttgcaaaccccgggctataataataggccggtgggggatcccttcttgccttgttccaccaaaacaaattactcgaaaaaatgtaccaccttgcccgatctttacgggggaggctnnnnnnnnnnnnnnnnnggctggaaccatatacacccgcaaacactatcgccctgtgactgacggagcgattggcacaaaataaccccacgtccg

SEQ ID NO: 1462 - DNA, 200 bp, Cricetulus griseus
  misc_feature (23)..(43): n is a, c, g, or t
  misc_feature (45)..(87): n is a, c, g, or t
  misc_feature (164)..(199): n is a, c, g, or t
agcggacgccaccggagtggacnnnnnnnnnnnnnnnnnnnnncnnnnnnnnnnnnnnnnnnnnnnnnnnnnnnnnnnnnnnnnnnncttcctgcgagaaactgacatcccctaaattcgataggtatgtattcaaatcctatcgaaattcctggcgctgcacnnnnnnnnnnnnnnnnnnnnnnnnnnnnnnnnnnnnt

SEQ ID NO: 1463 - DNA, 582 bp, Cricetulus griseus
  misc_feature (3)..(31): n is a, c, g, or t
  misc_feature (35)..(74): n is a, c, g, or t
  misc_feature (87)..(154): n is a, c, g, or t
  misc_feature (156)..(197): n is a, c, g, or t
  misc_feature (199)..(216): n is a, c, g, or t
  misc_feature (257)..(316): n is a, c, g, or t
  misc_feature (319)..(341): n is a, c, g, or t
  misc_feature (343)..(371): n is a, c, g, or t
  misc_feature (401)..(462): n is a, c, g, or t
cannnnnnnnnnnnnnnnnnnnnnnnnnnnntctnnnnnnnnnnnnnnnnnnnnnnnnnnnnnnnnnnnnnnnntatacattacacnnnnnnnnnnnnnnnnnnnnnnnnnnnnnnnnnnnnnnnnnnnnnnnnnnnnnnnnnnnnnnnnnnnntnnnnnnnnnnnnnnnnnnnnnnnnnnnnnnnnnnnnnnnnnnannnnnnnnnnnnnnnnnnacgaggagtttattacggttcatacactatagtagaacctnnnnnnnnnnnnnnnnnnnnnnnnnnnnnnnnnnnnnnnnnnnnnnnnnnnnnnnnnnnnctnnnnnnnnnnnnnnnnnnnnnnncnnnnnnnnnnnnnnnnnnnnnnnnnnnnncatctatcccttatataggtaccactctannnnnnnnnnnnnnnnnnnnnnnnnnnnnnnnnnnnnnnnnnnnnnnnnnnnnnnnnnnnnntccatttcatcctaccattcattatcgctgccctagcaatggtccatcttctattcctacatgaaaccgggtctaataacccatcacgcctagattctgacccagataaaactccatttc

SEQ ID NO: 1464 - DNA, 479 bp, Cricetulus griseus
  misc_feature (392)..(478): n is a, c, g, or t
tacttcaaatccaaaccagtagagactccacctgaacaaaatggcagcattgccccgcagcccaacagcagattgaaggaagctataaatacaagtaaagatcaggaaagcaagtaccaagccagccacccaaatctcagaaggctgcatgatgaagacccaacccccaaagggcctgcttctgctgtgactgctgaggtttacccaaagaactcaagtcttcgagcctatcatcaaaagatcgacaacaacctagatgagctgtccatgggattgggccgactcaaggacatagccttaggaatgcagacggaaattgaggagcaggatgacattcttgaccggctaacaaccaaagtggacaagttagatgtcaatataaaaagcacagnnnnnnnnnnnnnnnnnnnnnnnnnnnnnnnnnnnnnnnnnnnnnnnnnnnnnnnnnnnnnnnnnnnnnnnnnnnnnnnnnnnnnnng

SEQ ID NO: 1465 - DNA, 523 bp, Cricetulus griseus
cggccacaagacagagttcccattcaactgccctctcttgaagtgctgtcagagcatgaagggaacagagatcaaggtggtgttaaagataatgagagcagctcctccattatatttgctgaactcacctcagaagaagaaaaagctcttggcaaacctgacattaaaaatgagaataacaacctggtgagctacactgctgacttagtgatcaggaacagcagtgaatttgagtcgtccgttgaactccaacgaagtgggctgactgatttgtctatcagaccagttgtcaagcatcagctgccacttgggcataactcggacttggaaggaaattttacatcctcggatgagtcttttgaaggcattctgaacttgctggaacagacagaggttcggtaccacctgatgttgcacatccagatgcagctgtgtgagctctccctgtgggactggataagtgacaggaacaaccggcgccaggattacgtggatgaagccgctcgtccctacgccatggcca

SEQ ID NO: 1466 - DNA, 578 bp, Cricetulus griseus
acacttgcatgacttcctgaagctccttcacattgacaagagaagagagtacctttatcaactccaggagtttttggtgacagataacagtaggaattggcgctttcgtgctgaattggcagaacagctgattttacttctagaattgtatagtcccagagatgtttatgattacctgcgtcctattgctctgaatctgtgtgcagacaaggtctcttcagtccgttggatttcctacaagttggtcagtgaaatggtgaagaaactccacacagcaacacccccaacatttggagtagacctcatcaatgagctggtggagaatttcggcaggtgtccgatatggtctggtcggcaagcgttcgtctttgtgtgccagactgtcattgaagacgactgcctccccatggacgagtttgctgtgcacctgatgccacatttgctgaccttggcaaatgatagggttccaaatgtcagattgctgcttgcaaaaacactgcgccagactctactagagaaagactacttcctggcctctgtcaactgtcatcatgaggctcgggagcacaccatgatgg

SEQ ID NO: 1467 - DNA, 521 bp, Cricetulus griseus
  misc_feature (22)..(78): n is a, c, g, or t
  misc_feature (101)..(160): n is a, c, g, or t
  misc_feature (182)..(236): n is a, c, g, or t
  misc_feature (261)..(343): n is a, c, g, or t
  misc_feature (359)..(396): n is a, c, g, or t
  misc_feature (423)..(444): n is a, c, g, or t
acacacattcgataggtatgtnnnnnnnnnnnnnnnnnnnnnnnnnnnnnnnnnnnnnnnnnnnnnnnnnnnnnnnnnccctacttgtagtagtgtcaaannnnnnnnnnnnnnnnnnnnnnnnnnnnnnnnnnnnnnnnnnnnnnnnnnnnnnnnnnnnccatctctcatactcctacctnnnnnnnnnnnnnnnnnnnnnnnnnnnnnnnnnnnnnnnnnnnnnnnnnnnnnnnttcttaatcaatactttagctatannnnnnnnnnnnnnnnnnnnnnnnnnnnnnnnnnnnnnnnnnnnnnnnnnnnnnnnnnnnnnnnnnnnnnnnnnnnnnnnnnnattagccatctgaccnnnnnnnnnnnnnnnnnnnnnnnnnnnnnnnnnnnnnncaaaagaaacccactactacaaaaaannnnnnnnnnnnnnnnnnnnnnctctacaaactcttctaatcccaacatccctcagcaaacgagcctacactattttatattctacctgaagccccact

SEQ ID NO: 1468 - DNA, 567 bp, Cricetulus griseus
  misc_feature (384)..(384): n is a, c, g, or t
  misc_feature (440)..(440): n is a, c, g, or t
gatttcttgagtttgatcaagagttccaggccagccagggctacacagagaagccctgtctcaaacaaacgaaggaaaagaaatcctgtgataaacgatgtgcctcctcccccacccctctttcttgcccctctctcccctcacacctcttccttctctcttccctttagcaggctctaattacaaatccaagtctgtcctctctctctccttcagcatttccagtgctgggttacatttcaccagacccaacatagattccttttagcaaatgaatggcaaaacaaacaatccataaagaaagggggcaggatttgggagattgtatcctaaatttctggtctgccattaaatccctctgtgcttccatcaagaaaaacgtanttctgccaggtgggcaagatgaacctgggtaacaactatttgaaaaggagtaactngaggggtgatctaattattcttttatcaggaaaaacttgggagtcagatatggggggcgaaaccctaaatgatcagagaaagggtggagaaagcgaccagggactttctcctcttcttccttgatcc

SEQ ID NO: 1469 - DNA, 579 bp, Cricetulus griseus
cagacagctggaacgtgatgtgtgtgagctcgtccggcgggttaccggcctgcgggacgaggcggatcccaacttccaactggccttggactttgcctggtccaacttcagatttcatcggttcttggatgtcaacagtcacaaagtagaaaaaacaatagaagggatttatgaaaagttcaccattcattctgatctcagcaaagctgctagttggaagagattaactacagagtttctaaatgcatcacttcccagcgtagagaaaataaagacagatgcgcattattccatactgtcactccttctgtgtctgtctgattctccttcaaacagcagctatgtggaaacaccaagaaacaaagaagtggaaaagaaagatgattttgactggggaaaatacttgatggaaggtgaagaaattggccttggtccaaatgccgattcaccgaactggtctgaagacagtgatgatgaagatacacaacagcccttaagccgagaagactctgggatacaggtagacaggaccccactagacgaacaagaccacagcagaaaaggggggtctcaagtctg

SEQ ID NO: 1470 - DNA, 567 bp, Cricetulus griseus
ggggtggtgcacacctttaatcctggcactgggtaggcagaggcagaagaatttctgtgagtttgaggacagcaaggactacacagagaaactatgtctcaaataaaacaacacaaacaaaaatcaaacaaacaagagctctgaaaagaaatctgaattccccaagtctcatgctaacactgtacttcgaggcaggctacgtgcacactggggacaggggagtcattcatcaggtgcaattggaaccttcctgaaaacaagcaaggagtactgcagtcatcatgactgtcttctgtctgtctgctgtatgcacaagcttctctttattgcagatatgtcttggcaggaggactccgtggcaggcagcaaactgcagccctctttacacacagcctgattaccatttctatgtctgcactgcacatgctggcattataaatcacatgctcgctgtcatgcacaataaccaaacagttacctaacagctaagagtattacaaatggattgaactaatctttgaatatatgctccaataattaaattctgtatgattttctacctttaaa

SEQ ID NO: 1471 - DNA, 567 bp, Cricetulus griseus
  misc_feature (342)..(359): n is a, c, g, or t
cacccataaattctattttaatggcatctctcatctacctatggctttggccctcccatcctctaagctaccacgctcgcacacttgctgctgttgcccttggctccctcactggaagccacctgtagacttctctgctgccgccaatgggccgcaagtaccccacaatcagtcttgatctgcattgggcttctctaggtccctacccagaatagactcatttgtctggcgcctttgtaatgctacccctttgttgaattacaaaagcaatttccaccaacttttttctcccctaagcggctattccttttctggtcatttaaataaacaaatacagagaannnnnnnnnnnnnnnnnnttctgtatcatgacacccagttaaaactctggaacggttagtgctaacagtatcagcagccctcctaatcccagtgctgtatgtccagggttcagcagacctacataggaaatatttcaagaggaaacaaacaaaaaaagatatggatctgtactgagcatgttcggatttcatttatagacaccattacctaagcagtacggcatag

SEQ ID NO: 1472 - DNA, 577 bp, Cricetulus griseus
aggtaggcaggcttccagaggcttctgtgtggtcacctgtgctatatcaacccaggtttccaagcagagtttcctaatgggagcagcagctgtatcttagagactccaatgtgaaatacacctgtgtgcctgctcccagtgttccctgcagcctggcccctctctggtgtttggttaaagatataaagcagtcttttcagaggctctgaaggactgctgtttctttgagctaattacctcaccagaggtggggggtgtggactgattgctcctgagccgtgtgctgtctaggacgtggattgaactgttagctccaaaggctcccgggagaggtagccatgcccaccagagctctgcacaggcctgagctgtccatgggggagtacacagaagggaatgaggagagaagaactggcagatgcccagtagcatgcacttctggacccctttgagacggactgtctctggcagagctatgggacaaaggaatcaggaaggtcaagactttccatggctcccagcatttagctttgggagacagcactcacagcctgtgcatctgcctctaccatgttgt

SEQ ID NO: 1473 - DNA, 609 bp, Cricetulus griseus
  misc_feature (16)..(16): n is a, c, g, or t
  misc_feature (36)..(36): n is a, c, g, or t
  misc_feature (47)..(47): n is a, c, g, or t
  misc_feature (54)..(54): n is a, c, g, or t
  misc_feature (59)..(59): n is a, c, g, or t
  misc_feature (90)..(126): n is a, c, g, or t
  misc_feature (145)..(163): n is a, c, g, or t
  misc_feature (189)..(266): n is a, c, g, or t
  misc_feature (271)..(347): n is a, c, g, or t
  misc_feature (353)..(459): n is a, c, g, or t
  misc_feature (461)..(507): n is a, c, g, or t
ttttagacataactgncacagtgaagtcgccgcgtnaatacgaactncactctnagggncgaaattgaggtaccgaggcccccccttcgnnnnnnnnnnnnnnnnnnnnnnnnnnnnnnnnnnnnncattgtacgagagggtacnnnnnnnnnnnnnnnnnnncccattgtacaaaaagggctccgatnnnnnnnnnnnnnnnnnnnnnnnnnnnnnnnnnnnnnnnnnnnnnnnnnnnnnnnnnnnnnnnnnnnnnnnnnnnnnnagtannnnnnnnnnnnnnnnnnnnnnnnnnnnnnnnnnnnnnnnnnnnnnnnnnnnnnnnnnnnnnnnnnnnnnnnnnnnnaacacnnnnnnnnnnnnnnnnnnnnnnnnnnnnnnnnnnnnnnnnnnnnnnnnnnnnnnnnnnnnnnnnnnnnnnnnnnnnnnnnnnnnnnnnnnnnnnnnnnnnnnnnnnnannnnnnnnnnnnnnnnnnnnnnnnnnnnnnnnnnnnnnnnnnnnnnntttttccatctcagacggaatctatggatctacattctttatagcaacaggttttcacggtctccatgtaatcattggaacatcattccttacagtatgctt

SEQ ID NO: 1474 - DNA, 578 bp, Cricetulus griseus
  misc_feature (400)..(414): n is a, c, g, or t
  misc_feature (462)..(479): n is a, c, g, or t
acacgcacgctcacactttttatttgccataatgaaccgtccagcccctgtggaaatctcttatgagaacatgcgttttctgataactcacaaccctaccaatgctactctcaacaagttcacagaggaacttaagaagtatggagtgacaactttggttcgagtttgtgatgctacatatgataaagctccagttgaaaaagaaggaatccacgttctagattggccgtttgatgatggagctccaccccctaatcaaatagtagatgattggctaaacctgttaaaaaccaaatttcgtgaagagccaggttgctgtgttgcagtgcattgtgtggcaggattgggaagggctcctgtgctggttgcacttgcgttgattgaatgtggaatgaagtannnnnnnnnnnnnnngtttataagacaaaaaagaaggggagcattcaattccaaacagctgcnnnnnnnnnnnnnnnnnngacctaagatgcgattacgcttcagagataccaatgggcattgctgtgttcagtagaagtagagaaatgctgactggatcgtggcgctagacggaactc

SEQ ID NO: 1475 - DNA, 96 bp, Cricetulus griseus
gaagatccctgggctgagatgggattgtccagtgggtggggcagagggtatcttctcacgaaatgaactctgtatggaaattgtcccttttctgac

SEQ ID NO: 1476 - DNA, 522 bp, Cricetulus griseus
  misc_feature (273)..(296): n is a, c, g, or t
ccagcgcagcctgggccaccaagcgccggtcagcgggcgccgagaaatggaccaattttgacaagatgtagtgctgcagcgtgcgtgatcagacatgttcagtcatggcatccgaactttgtaagacgatctctgtggccaggcttgaaaagcacaagaatttgttcttaaattataggaatttgcaccatttcccattggagttattgaaagatgaagggctgcaacatctggagaggctctatatgaaaagaaactcactcacaaccttgnnnnnnnnnnnnnnnnnnnnnnnnccaaaccttgtggaactgtaccttcattcaaataacatagttgtggttccagaagccatcgggtcccttgtaaaactccagtgtttggatctcagtgacaatgccttagagattgtttgcccggaaattggtcgtctgagagcattacgtcatcttcgattagctaacaaccaactacaattcctacctccagaggttggcgatttgaaggagctgcagacactag

SEQ ID NO: 1477 - DNA, 300 bp, Cricetulus griseus
gttgtataagatcctgtcttaaaaaaagaagaaaaataggaggaaaaaaatctatatgatttttctctacagagacttggatatgcggtattctctgccttttctcttgcccagtggctgtaatcacctaaattgtattctctaatctcttgatcatgagtaaatcaatctcttgttggtagtaattggcctgcattagacctcatctactgtttcttcccactcctctgtggcagaagaacaaggccaagtaatgacctgccctgtgcttgtataatgctgccaacactgtggtgtcct

SEQ ID NO: 1478 - DNA, 579 bp, Cricetulus griseus
  misc_feature (483)..(483): n is a, c, g, or t
cccgaccacctcggtgccggatcctagagctgccgctggaagcagaggcttgtgaggggaggcggagagaaaaggggtgcgggaaatttaaaaagatgggaaaggcgcttcccattttccttagcccctttcctgttgatttctggagcaacgctcctttcttctcggacgaagagaatgaagaccctgctttatttaacagtcatcttaggggaagtgccatcgttcttccagaagggagatctggccccagatcttggattctgagaccagtgcgagatccccgctttgcgccctgtccgccctggagctggatttgtcatcagtttagaatagcttggctacgatgtgtggtgtggatggatggacgggcctcgcaagtgcaaacaggacaatccaggttacctggcaaagcaaccaccagtgcaacagctctccaagatgaagcctaggtcactcactgacatggctaaaagcatctangaagtctggatcattgtggtgcctctctccagaaaatggtgacaaaaatggaaatcaaccagcacatcaggatccttgttccttctgtggcaggac

SEQ ID NO: 1479 - DNA, 376 bp, Cricetulus griseus
cctggagtccccacagaaaccattaaggacatgatgtttcagctgctccgaggtctggacttccttcattctcaccgcgtagtgcatcgtgacctaaagccacagaacattctggtgaccagcagcggacaaatcaaactggctgactttggccttgcccgcatctatagttttcaaatggcccttacctcagtggtcgtcacactgtggtaccgagccccagaagtcttgctccagtccagctacgccacccccgtggacctttggagtgtcggctgtatattcgcagaaatgtttcgaagaaagcctctgtttcgtggaagttcagacgtggatcaactaggaaaaatcttggatgtgattggacttccgggag

SEQ ID NO: 1480 - DNA, 349 bp, Cricetulus griseus
agagtatccctttctggggaatgggctcacaaagtccattcgtacactagggataaatactattccactactgaaggccccatagactgcccaggcctcctcactgacacctgggctagattttaatcttttgattttatcttaaattataccagtactgaacaaatgtactcgtattgtatgtattgagagtgtgtaaacagttccttctatacataaattggcaggtatccttttaaataccttttcacaggctttaagaatttgtgattaaagcttggctgtggtggcacacgctttttttttctcattaaattagaaacaagcttgttttacatgtcaatcctag

SEQ ID NO: 1481 - DNA, 421 bp, Cricetulus griseus
  misc_feature (343)..(371): n is a, c, g, or t
gaaccactgctacaaggtccatgaccgaaatgctactgtagataagctggaggacttcatcaacaatatcaacagtgtcttggagtccttgtatattgagataaagaaaggaatcacggaagatgatgggagacccatttatgctctggtgaatctttctacaacttcagtttccaaaatggccacggattttgccgagaacgagctggacctgtttagaaaggctttggaactgattgttgactcagaaactggctttgcctcttctacaaacattttgaacctggttgatcaactcaaaggcaaaaagatgaggaagaaggaagcggagcaggtgctgcannnnnnnnnnnnnnnnnnnnnnnnnnnnnacaaggagggggagttcaccttgcatggccgggccatcttggagatggag

SEQ ID NO: 1482 - DNA, 498 bp, Cricetulus griseus
attgttggcaaaaatatcctgacagtagagtgtaatgatacaacattttcctggtttgagctaagttggggaagaatgatctatcctagtatgataaagtcagtgtgattcagttagttggtctgagccaatagggccacttgtgtgctcttggtgataatatgttgccattattttttttaatcctggccttgtcaagtttcacctattattttttaaatcttgcataaaagagaattacaatttgttttagaaaatttaaaaataatggtagtagtagttaatttttaactttccaagtatgtcagagtaatagagaatttatctttatgaatgggttacattgttctacagttttgacacagtggtatttaagcctgtatatgctaaatgtctctgagtccctttgaaccaaaaatgtttccttttttttagattttctttttgttggctccacttgaggttgggtgcatagttgactgcaacataccatgagca

SEQ ID NO: 1483 - DNA, 367 bp, Cricetulus griseus
agtaacccttgtggagcgtatgcagagagaacttgggaaactgaggcaacagttgcctgagaacttcgaggatgtggcaatgtatatctctcaggagtggggccatcaggatcctagtaagagagctctctcaagggaaatggtgcaagatagttatgagaacgtgggcacactagagtcttgcattcctggtcaggaggtcataagcacccaggtggaacaaggagggaagccgtgggaccctagtgtgcagagctgcaagggaggcaggagccccatagacccagttccaggggtagacaagtttgacaacccagagagaagtgttgattctgtttctcctgaaagtgcccatcctccggtactg

SEQ ID NO: 1484 - DNA, 227 bp, Cricetulus griseus
ctttgtctctcatttcattatcttactctccctctctctagcactcactatctccgtctctgtgtatctctgtctctgagtctctgtgtatctctgtgtatgtctctacaccctgggtgggagtctataattctccctgctcttcaatgtggtgatttcccttcctctctgggctgcttaacactcatttcacacagctctgctggatcaccacatccttacccatt

SEQ ID NO: 1485 - DNA, 227 bp, Cricetulus griseus; identical to SEQ ID NO: 1484

SEQ ID NO: 1486 - DNA, 103 bp, Cricetulus griseus
ctaggtgaaaagtccccgaggtgtgccagctgggtcccacagcttgcggtggtgcttctccagggactcaggtgtgtgcacagcaggggtactcggcggtccg

SEQ ID NO: 1487 - DNA, 475 bp, Cricetulus griseus
gccatccacatcatcgacttcgggctggccaaggagtacatcgaccccgagaccaagaagcacatcccgtaccgcgagcacaagagcctgacgggcacggcgcgctacatgagcatcaacacacacctgggcaaggagcagagccgcagggacgacctggaggcgctgggccacatgttcatgtacttcctgcgcggcagcctgccttggcaagggctcaaggccgacacgctgaaggagcgctaccagaagatcggtgacaccaagcgcgccacgcccattgaggcactgtgtgagagctttccggaggagatggccacctatttgcgctatgtacggcgcctggacttcttcgagaagccagactatgactacctgaggaagctcttcaccgacctcttcgaccgcagcggctatgtgttcgactacgagtacgactgggccgggaagcccctgcggcgcctgcggctccatc

SEQ ID NO: 1488 - DNA, 362 bp, Cricetulus griseus
ttcacagcttgcaagaagtaaagccttatcatatggagtatgttaggccttcgatggatatttttgtagtagtatagagtagtgcagtaactatgactgctttcttgtaacatttatggatgtgtatccacatatttgatggacataatattatgataagttcttatttttaattaaatttactattaggtgactgtttgagaacagtatatactctgtgtgaatcactcttgattgacgttttcattaaacccttgttgctaggatgccatctatgactgtcattgtaagaccatcagaaatattccttctctatgttttgggggcctgtaggagagtctggaatcctgttctactgcagt

SEQ ID NO: 1489 - DNA, 442 bp, Cricetulus griseus
gaatcgacagtgacttgttttataacagtagtaagcatttactgaacttgaatcttttctttcatcacccattagaactgcatggtgtgtgtacttattcctattcttatttacctattataaactgaggcccagacattttgcccactctctctaagatcaccagtgtaatgagttataaagttgggattgtggttggttcctatgtccagtgcctcgagcatctattatggtgtctctggtcacatttttatcactcctttgtattgttttggtcccttggtggttgtgcagttgagaagtgactgacagggttcatgttgcatgttgcagcagcgttacctctactgaggctgtctaactgcactagatgcagcagtgtcagattgctgctctgtctggctgggaagcctgtggttctaaaactcctgggcggagctaa

SEQ ID NO: 1490 - DNA, 548 bp, Cricetulus griseus
acccttgaggaaacccagggccaggtgggccctgagggaagagccacagtgtggtcagcacgaggctagtgacctgggtgcaaagatggccagagacacaggggaagcctggccgccaaagccgtccccacctgacacacaccctctcaagaccccagaggacagcggcctatagaaacccagcgagaaggttgccctggaaagtggcgaggaggggctggtccccgatggtgaaacgggcaagaagacgtacaaatgcgaacagtgtggcaagggcttcagctggcgctcgcacctggtgacacaccggcgcacacacacgggtgagaagccctacacctgcaccgactgcgggaagcgcttcggccgcagctcacacctcatccagcaccagatcatccacacaggcgaaaagccctacacttgcccttcgtgttggaagagcttcagccatcactccacgctgatccagcaccagcgtatccacactggtgagaagccctacgtgtgcgaccgctgcgccaagcgtttcacccgccgctcggacc

SEQ ID NO: 1491 - DNA, 527 bp, Cricetulus griseus
  misc_feature (14)..(14): n is a, c, g, or t
ggacatgccacagnatgaatggtttcttctcagctcccatataccactaaagggcattgaaccaggatccctgcgtgttcgagcacgatactctatggaaaaaatcatgccagaagaagagtacagtgaatttaaagagcttatactacaaaaggaacttcatgtagtctatgctttatcacatgtatgtggacaagaccgaacactactagccagcatcctactgaagatttttcttcatgaaaagcttgaatcgttgttgttatgcacactaaatgacagagagataagtatggaagatgaagccactaccctatttcgagctacaacacttgctagtaccttgatggagcagtatatgaaagccactgccacacaatttgttcaccatgctttgaaagactccattttaaagataatggaaagcaaacagtcatgtgagttaagtccatcaaagttagaaaagaatgaagatgtgaacactaatttagcacacctattgaacatactttcagagcttgtggaga

SEQ ID NO: 1492 - DNA, 560 bp, Cricetulus griseus
  misc_feature (131)..(155): n is a, c, g, or t
tatagaacttcgaaaaggagaaactgatattggcagaaagaatactagagtacgacttgtatttcgtgtgcacatcccacagcccagtggaaaagttctttctctgcagatagcatctattcctgttgagnnnnnnnnnnnnnnnnnnnnnnnnntccctcatattgagaagtacagtatcaacagttgctctgtcaatggaggccatgaaatgattgtgactggatctaattttcttccagaatccaaaataatttttcttgaaaaaggacaagatggaagacctcattgggaggctgaaggaaaaataatcagggaaaaatgtcaaggggctcacattgtccttgaagttcctccctatcataacccagcagttacagctgcagtgcaggtgcacttttatctttgcaatggcaagaggaaaaaaagccagtctcaacgttttacttacacaccagttttgatgaagcaagaacaaagagaagatactgatttgtcttcagttccatccttacctgtgcctcattctgcccagacccagaggccttcctcagttacag

SEQ ID NO: 1493 - DNA, 464 bp, Cricetulus griseus
  misc_feature (29)..(29): n is a, c, g, or t
  misc_feature (45)..(45): n is a, c, g, or t
  misc_feature (96)..(97): n is a, c, g, or t
  misc_feature (143)..(143): n is a, c, g, or t
  misc_feature (147)..(147): n is a, c, g, or t
  misc_feature (158)..(158): n is a, c, g, or t
  misc_feature (169)..(169): n is a, c, g, or t
  misc_feature (177)..(177): n is a, c, g, or t
  misc_feature (205)..(205): n is a, c, g, or t
  misc_feature (225)..(225): n is a, c, g, or t
  misc_feature (312)..(312): n is a, c, g, or t
  misc_feature (331)..(331): n is a, c, g, or t
  misc_feature (351)..(351): n is a, c, g, or t
  misc_feature (361)..(361): n is a, c, g, or t
  misc_feature (369)..(369): n is a, c, g, or t
  misc_feature (389)..(389): n is a, c, g, or t
  misc_feature (399)..(399): n is a, c, g, or t
  misc_feature (406)..(406): n is a, c, g, or t
  misc_feature (413)..(413): n is a, c, g, or t
  misc_feature (443)..(443): n is a, c, g, or t
  misc_feature (451)..(451): n is a, c, g, or t
  misc_feature (453)..(453): n is a, c, g, or t
cacttgtctcctacgggaaacagcacggngacatgcttggttacnatttgtatagcagtcgccctggcagacattctcagtgagcctaccatgcanncacccatttgtgtggggttgtatgcacagtggggaagtgggaagtntttnttactcaaganactagaagatnaaatgaanacttttgcaagacagcagattgagcccnttttccagttctcatggctnattgtgttcctgaccctgctgctgtgtggggggctgggcctagtgtttgcttttacagtacgatacaaatttcgacatagcagtttnattgagttgcctggctctnttatatatattcttaattgncatttacttnggtggacngagggaaggacagagttggnactgggcctnggccctnagtaccngactggcgagacacattggctacctggagntcctcttnanactgatgttcg

SEQ ID NO: 1494 - DNA, 580 bp, Cricetulus griseus
  misc_feature (15)..(15): n is a, c, g, or t
  misc_feature (384)..(384): n is a, c, g, or t
gagaaagatcccagnatttatcgcttttaggaataggctgaataattctctccactttgcacaagtgcgcactgaacggatgctgttagaccttctacttgaagcaaacatatcaactagcttggcagaaagtatcaaatcaatgaatctgagaccagaggaagatgatgttccatgggaagatttgagagacaacagagacttggatgttttctttagctgggatccaaaggacaggaatgtttctgaagagcataagaaactctccttggaggaggagaccatgtggttaagaattcgcaccttaacgctgaggctcatcagtggacttccgagtcttacccaccctgtggagccaaagaactcagagaagacctccgagantggtgtgtcctcccggattgacattcttcgtttgctcctccaacagctagaagtggccgtggagacggggaagcgatttattgagaaggaaattcagtatcccttccttgggcctgtccccaccaggatgggcaggttcttcagctctggttgctgtcagtgccaggtccgctcctttcatcttgtcagtgatgtg

SEQ ID NO: 1495 - DNA, 342 bp, Cricetulus griseus
  misc_feature (100)..(100): n is a, c, g, or t
  misc_feature (195)..(195): n is a, c, g, or t
  misc_feature (225)..(225): n is a, c, g, or t
  misc_feature (287)..(287): n is a, c, g, or t
  misc_feature (292)..(292): n is a, c, g, or t
  misc_feature (300)..(300): n is a, c, g, or t
  misc_feature (302)..(302): n is a, c, g, or t
  misc_feature (334)..(334): n is a, c, g, or t
  misc_feature (336)..(336): n is a, c, g, or t
accccaaatcctgacgcatgttatcgaagggtttgtgatccaggagggggcggagcctttcccggtgggacgctcgtccctgctggtggggaatctcaanaagtaagtatgcacaggggttcttgcctgagaagcttccccagcaggatcataccaccaccactgactcagagatggaggagccctatctgcaanaatccaaagaggagggcacccccctcaaantcaagtgtgagctctgtggacgggtggattttgcctacaagttcaagcgttctaagcgcttntgttncatggttngngcaaaaaggtataatgtgggatgcaccaaacnantgggac

SEQ ID NO: 1496 - DNA, 362 bp, Cricetulus griseus
  misc_feature (23)..(23): n is a, c, g, or t
  misc_feature (82)..(82): n is a, c, g, or t
  misc_feature (229)..(229): n is a, c, g, or t
  misc_feature (312)..(312): n is a, c, g, or t
  misc_feature (339)..(339): n is a, c, g, or t
  misc_feature (342)..(342): n is a, c, g, or t
  misc_feature (344)..(344): n is a, c, g, or t
cactgggagtttgccctcagggnatcaggacaagtaccgctaccggtaccccaaaggcgagtcctatgaagacttggtgcancgactagagcctgtcattatggaactggagagacaggagaatgtgctggtcatttgccaccaggctgtgatgcgctgcctgctggcctacttccttgacaaggcagctgaagagctgccctacctcaaatgtcccttgcacacagtnctgaagctcacacctgtagcttacggttgtaaagtggagtccatattcctgaatgtggcagctgtgaacacacaccgagacangcctcagaatgtaaacatatccaggcnttnantaggaagcccttgttaca

SEQ ID NO: 1497 - DNA, 579 bp, Cricetulus griseus
  misc_feature (66)..(66): n is a, c, g, or t
  misc_feature (165)..(165): n is a, c, g, or t
  misc_feature (286)..(286): n is a, c, g, or t
  misc_feature (566)..(566): n is a, c, g, or t
gcgcggtggtcgttagaggaggacagcgcaccgcatcctacctgctcgcaggccctcggcgtctancacccgccggcggcacatctcgtcatgtcaggcactgcttggctttagttcctcactcctccgcccacccgcctacccgaagccgcgcccaccgcccanagccagagggatggtggtagtcaccgggcgggagccagacagccgtcactgggacggtgccatgtccagctccgaagccgaagacgacttcctggagcccgccactcctacggccacgcangcggggcacgggctgcccctgctgccccaggagcatttcaggaagggaaccttgtgggtcccaagctaacctggacagtcctcgcttcccaccaagcctttgttgacttgcagattaatcaatcactatagattgagcaggagaggaatggagcacggtagacagtgagattcactctcagcagtagagctcctgcatagcatgtgaagtccctgaatgagaagaaaggaatgagcaccatgatgccccgatgcatttgaaagcagctattggtctctgntcacaactgtttc

SEQ ID NO: 1498 - DNA, 579 bp, Cricetulus griseus
  misc_feature (506)..(506): n is a, c, g, or t
ccacggctggtgtctggaattttgatggctctaaaccaaactctccctcatccctttgtctcccacttttctgaaagagtttacacaagcaagaaaatcacagcaccaaaaacctgtcagccatggcattggaatagaagctttactgaagcatccgttggtatcaggggttcccctgtggacccaactgagaccactcatattagaggttgtgagaggaaaaaaacctagcctagttctgtcatccacagttgtccttgtgtttgccctcccagtatggagcaactgtgtcagcagatcacattacagaaattgtgctttacagaaaccaataagtctgttgctgttaccacttcagcgaggacagtaaatgatgttgtgtctggtcagcctgtctcctcttgtcattgctgttctatagagtttcatcccgttctgcttgactgaccattaacctcatcctgtcgggacttacgtaagcatggacagcataactttctgctcangccagaccctcctttctcagcaaggaaccgtggagagtgggaacctgcattttatttcagtgtccccttcagt

SEQ ID NO: 1499 - DNA, 565 bp, Cricetulus griseus
gcccagaaagtggaagtttgtgcaggggaagtgtcctgggggctgggggttgggagcttgggagtgtccgattgaggccaggatggcaaaatgaagaagctggaagctggattgtcttgggtgcacatggtttctgtccgtctgcctggctccccacccccactttgggcttacaactgccattggaagagcttggatgtgggctgtcgttccccagattttccaaggtactcactacctgccaggaaactggaggggctcctgagggacattgaggaccatggctttccgagatactattgaagaccatacttggcctttgagtcccactctaaccctgacaattctagacctctcttccagtgtccttgtgagccatttgggttttgtctccttagtcatgagggtcacagcaagcaaggatgactgatacatgaccttcaccttgggcctccccagacttacactggggttgaggagagcaaggagacactgcctcttcaaggcccccaggaggtctcctcccagccatgttctttgtccatggacttgctctccaagcatg

SEQ ID NO: 1500 - DNA, 580 bp, Cricetulus griseus
  misc_feature (432)..(432): n is a, c, g, or t
  misc_feature (544)..(544): n is a, c, g, or t
gctctactcttttggtgtgactttttaaatgctccttaaatgacatcctcacgttaactcttttctagaagacagctttacaaggatctagaaggaccaaattcggggctccagaactctccagcgaccagcttagcagatcatacagtcttcaggagctgaaaattcctaagtctggtcttcaccgtgatttggaactttccagtctcagaaaagttgaccaagggactgcacaggactgagtccatatggaagaagaactacctggtttctatggagaaagtggcaagaaggaaaaaaaataaagcagacctcttagaaaataagattccttcatatgaggtgccagtacaggctaccctgtcatcattgaaaatgctagatgtggggaagtggccaatcttttccctttgttctgaggaagaacttcantcgattcgtcaggcttgtgtctttggcagtgctggcaatgaagttttatacaccacagtcgatgatgagatttttgtacttggcacaaactgcagtggctgtctggggatangtgatattcaaagcaccattgagcctcggagactga

SEQ ID NO: 1501 - DNA, 512 bp, Cricetulus griseus
  misc_feature (107)..(107): n is a, c, g, or t
  misc_feature (356)..(356): n is a, c, g, or t
  misc_feature (410)..(410): n is a, c, g, or t
  misc_feature (472)..(472): n is a, c, g, or t
  misc_feature (487)..(487): n is a, c, g, or t
gtgtgtgggggtggtggtggtggtgatttttactatgtaatgattgccattaaatactatacactgagttccgcaatgcagaatgattgtcagttttaggtcagggnacagtgggcgtctgagccaagtcagatctaacttaatgcaggacaatttctattgaactattaattttcaatgtttcaatcttggtaagtttagaatttctttagcaacttttgtttccacctgacagtacttaccttaattaccatacaacctgttaaagttttgtatgtatcagttgaagggtggattcaggaggacagctgttttctgctctaggacaatagcataaacaatgtagaagacattanatacatttcacaaactaaagaaccatcaaaaaataccaagtaataataaatcanggtagaaacagttgcgtattgagacctgttagatcataataattttataatttgatgtattncaagtttattaaatntctaagtgtattaatactactggtt

SEQ ID NO: 1502 - DNA, 462 bp, Cricetulus griseus
  misc_feature (414)..(414): n is a, c, g, or t
  misc_feature (419)..(419): n is a, c, g, or t
  misc_feature (430)..(430): n is a, c, g, or t
aaatttgcctgttcctatgtgcgaccgtcggtttatgaggagcgaccatttgaccaagcacgcccggcgccacctgtcagccaagaagctcccaaactggcaaatggaagtgagcaagttaaatgctctatcaccagccccggcttctgcacaatgactgacgggccacggatgaggaagagtcagaactaactttggtcagtcaggagccagcggtggtgtcacaaatgcttctgcagctctgtggtcctccagcgggcctactgcagaagccccgggctgaggggaaggccagcctgggttagatgacaagtgcttcagccacaggcaggtcacagaagggcaggtttcgtttctttccacgtaaagagatgaggaagcttttcttccttggatggttgtgaaaggtttgangtgangtcattcacanacttgcagtcatgttccacactgggtactttg

SEQ ID NO: 1503 - DNA, 578 bp, Cricetulus griseus
  misc_feature (366)..(366): n is a, c, g, or t
  misc_feature (368)..(368): n is a, c, g, or t
  misc_feature (480)..(480): n is a, c, g, or t
  misc_feature (532)..(548): n is a, c, g, or t
ggagcccattagcagattctaacaggctttgatttgaacattacaatataacctctacctggcctctcctggctccctgctgagggctttatattgctggtaactcttgcctttacttcttcacatttctctccaggtgtgaggcaaaaacttgacttccttttctccctactcctggctgttattttaatagaactaccaatgtacttatggggtcccctaggtagacctaactgtcaagtgcctcagctgccatatctaatgactgacccagcagtaaaagtcagatttggttgtcactccatcttcctaaatggcagttatggttactttgggagggagagcaacactgaacaggcagctcanancaggtaccctgacagcaggagttccagaaatggccttggctctctggtcagaaattgtcaggaaggggtgctggtttctcagctctactcaaacatgcaccccagattgtangctacacatgggggtgggaactaaaactctagttcaagccttaacccactcnnnnnnnnnnnnnnnnngatggatctctaggtcacgatagcaatggg

SEQ ID NO: 1504 - DNA, 569 bp, Cricetulus griseus
  misc_feature (49)..(70): n is a, c, g, or t
  misc_feature (126)..(126): n is a, c, g, or t
  misc_feature (554)..(554): n is a, c, g, or t
  misc_feature (566)..(566): n is a, c, g, or t
acgactacactcattagggcgatattgggtaccgggtccccccctcgannnnnnnnnnnnnnnnnnnnnngcgctgcagcgagctcgcgagtacaacgcgcgcctgttcggtctggcgcagcgcancgcccgagcgttgctggactacggcgtcaccgccgacgcgcgcgctctgctggcgggacagcgccacctgctgacggcccaggatgagaacggagacacgccactgcacctggccattatccatgggcagactggagtcattgagcagatagcccatgtcatctgtcatgcccagtaccttggggtcatcaacctcactaaccacctgcaccagacacctctgcacctagcagtaatcactgggcagacaagggtggtgagcttcctgctgcaggtgggtgcagaccccacactgctggatcgacatggagactcggctgtgcacctggctctgcgggcaggtgctgaagccctaagcctgttgcaggtgctgttgcatagtggggcccatgctgtgccccaaatattgcacatgcctgattttgcangactatatccantac

SEQ ID NO: 1505 - DNA, 487 bp, Cricetulus griseus
  misc_feature (34)..(34): n is a, c, g, or t
  misc_feature (85)..(85): n is a, c, g, or t
  misc_feature (111)..(111): n is a, c, g, or t
  misc_feature (115)..(115): n is a, c, g, or t
  misc_feature (117)..(117): n is a, c, g, or t
  misc_feature (141)..(141): n is a, c, g, or t
  misc_feature (153)..(153): n is a, c, g, or t
  misc_feature (312)..(312): n is a, c, g, or t
  misc_feature (331)..(331): n is a, c, g, or t
  misc_feature (357)..(357): n is a, c, g, or t
  misc_feature (375)..(375): n is a, c, g, or t
  misc_feature (414)..(414): n is a, c, g, or t
ggaagggtctttgcttgcagccggggacttttangccttttaaaaacatttccatcatgtctgacactcaagaagctatcagccnactcctgggatatgaacctttatganaacnangagtctgtgcctatgatagaaggnggcctaagaagngagtctgagcatctccaagtcactattggagccaccgtacctactggctttgagcaaacagctgcagatgaagtgagagagaaactgcagtcgtcatgcagaatcagcaaagaccggggcaagatatattttgatatttcagtggaaagtctggctcangttcattgtctgagatcanttgataacttgtttgtggttgttcangagtttaaagattaccanttcaaaaatacaaaggaagaagttctaaaggactttgangaattggctggaaagctcccatggtctgaccctttaaaagtctggcaaattaacaccactttctagaagaaga

SEQ ID NO: 1506 - DNA, 525 bp, Cricetulus griseus
  misc_feature (230)..(272): n is a, c, g, or t
  misc_feature (401)..(401): n is a, c, g, or t
  misc_feature (507)..(507): n is a, c, g, or t
cagcaaggcccccaatgcatccaacctgaaaattgtacggatggacagaactgcaggatgtgtgactggaggagaagaaatttatcttctctgtgacaaggttcagaaagatgacatccagattcggttttatgaggaggaagagaatggtgggttttgggaaggatttggagacttttcccccacggatgttcacagacagtttgccattgtcttcaaaactccaaagnnnnnnnnnnnnnnnnnnnnnnnnnnnnnnnnnnnnnnnnnnnagcttcggaggaaatcggatttggaaactagtgaaccgaaacccttcctctactatcctgaaatcaaagacaaagaggaagtccagaggaaacgccagaagctcatgcccaacttctcggacagtttcngcggtggcagtggagccggagcgggcggtggaggcatgttccgtagtggcggtggtggagggagtacccggaagtcctggcccagggtatggcttctcgcactacngatttcctccttacagtg

SEQ ID NO: 1507 - DNA, 569 bp, Cricetulus griseus
  misc_feature (525)..(525): n is a, c, g, or t
  misc_feature (546)..(546): n is a, c, g, or t
aagaaacagctgagtcaggctgctcagaggtctggactcccagcagtaactatttggggaacaaaaagatgagggctttatcatcccctaccaggtgaaagataaaattgcagaagccagacaacaccaaaagtagtgcaactggagttatgcaaccatccctcactccagcaaacggtgaagacttggtaggtaggacgctgtggaagttaaaggagatgtggcttatttggtagtgtggctagcatgcagaagccctggattggattcccagtatgacataaaccagcttatctatcatctcagcacttgggagatggaaagcaggaggacgagaagtttaaggtcatccttaaatacatagcaattctgaggccaacctgagttacataaaacctatctcaacaaaaagaatcacattgaagaagggtcccttgtagctccatcagattggctcatgccagcaggtggcggtgagggcataaactgagtggctttttcctgagtcactaaatcacgtgtggnaacatctgcctgcccgctcangtctgctcatggcatttggcagt

SEQ ID NO: 1508 - DNA, 412 bp, Cricetulus griseus
  misc_feature (150)..(150): n is a, c, g, or t
  misc_feature (236)..(236): n is a, c, g, or t
  misc_feature (299)..(299): n is a, c, g, or t
  misc_feature (305)..(305): n is a, c, g, or t
  misc_feature (338)..(338): n is a, c, g, or t
  misc_feature (341)..(341): n is a, c, g, or t
  misc_feature (390)..(390): n is a, c, g, or t
tggacaggtttcctgtgaacttgtttctccaaaactcaatagagcaacagaaggtattctgttttttaaccttgaactttctcagatggctgctccagcttttgaacccggcaggcagtccgatctcctggtgaagctgaatcgactctnggaaaggtgtctaagaaattcaaagtgtatagatactgaatctctctgtgttgttgctggtgaaaaggtttggcagatccgtgtanacctacatttattaaatcatgatggaaatattattgacgccgccagtattgctgcaatcgtanccttgngtcacttccgaagaccggatgtctctgtccaanganaggaagtaacactgttcactcctgaagagcgggaccctgtgccactgancattcaccacatgcccctctgt

SEQ ID NO: 1509 - DNA, 186 bp, Cricetulus griseus
  misc_feature (108)..(108): n is a, c, g, or t
accttcacaactccttagaggagatcaacagtactgtagtgggataccagagacagagtaaccttaaatttgaggggatgaacgagacactcagtaacctgacacagnagactcagcctgatggaaagtgatgtggctgcactgaacaaggcagaaaaaaagagcaaacctgacctccagcaggaa

SEQ ID NO: 1510 - DNA, 563 bp, Cricetulus griseus
  misc_feature (3)..(3): n is a, c, g, or t
tgnatcagatcctactctcctcgttcgtgcgcctcgctcgctctttccggcaaccatgtctgacaaacccgatatggctgagatcgagaaattcgataagtcgaaattgaagaagacagaaacgcaagagaaaaatcctctgccttcaaaagaaacgattgaacaggagaagcaagctggcgaatcgtaatgaggcgagcgccgccaatatgcactgtacattccacaagcattgccttcttattttacttcttttagctgtttaactttgtaagatgcaaagaggttggatcaagtttaaatgactgtgctgcccctttcacatcaaagaatcagaactactgaccaggaaggcctcccctgcctctcccacccatctgtcggtctggctggcagggagggaaaagaacttgcatgttggtgaaagaaaaagctgggtgggaggtggtgaaatacagaaaaaaattcaagatggtccaaggtgtcctgcaggatgtaaaatgcagtttgatcagagtgccattttttttgttcaaatgattttaattattggaatgcacaat

SEQ ID NO: 1511 - DNA, 545 bp, Cricetulus griseus
  misc_feature (534)..(534): n is a, c, g, or t
gttgatgctgggaaaagtactctgatgggccatatgctttatcttctgggtaatgtaaacaaaagaactatgcataagtatgaacaagaatctaaaaaggctggcaaggcttcctttgcatatgcatgggtcttggatgagactggagaagaaagggaaaggggagtaacaatggatgttggcatgacaaagtttgaaaccacaaccaaagttattacattaatggatgctccaggccataaggatttcattcctaacatgatcactggagcagcccaggcggatgtagctgttttagttgttgatgccagcagaggagagtttgaagctggatttgagactggaggacagactcgagagcatggccttttagtacgatctcttggagtgacacagcttgctgttgctgtcaataaaatggatcaggtaaattggcaacaagaaagatttcaagagattactggaaaacttgggcactttcttaagcaagcaggttttaaggagagtgatgtagcttttatccctacgagtggnctcagtggtga

SEQ ID NO: 1512 - DNA, 548 bp, Cricetulus griseus
  misc_feature (4)..(4): n is a, c, g, or t
  misc_feature (529)..(529): n is a, c, g, or t
tagnatggagtggcaccacgtgccaaaatgaaccaacagcgttcaaggaggtttagagcatcaaaggaaggaatggaagcagcagttgagaagcagcgagtcagagaagaaatacttgcaaaaggtggctttcttcctccagaagaaataaaagaaagatttgacagcaactgtattacaccaggaactgagttcatggacaatcttgctaaatgccttcgctattacatagctgatcgtttaaataatgaccctgggtggaaaaatttgacagttatattatctgatgctagtgcacctggtgaaggagaacacaaaatcatggattatattagaagacaaagagcccagcctaaccatgacccaaatactcatcattgtttatgtggagctgatgctgatctcattatgcttggtcttgctacacatgaacctaacttcaccataatcagagaagaattcaaaccaaacaaacccaaaccatgtgctctttgtaatcagtttggacatgaggttaaggattgtgaangtttgccaagagaaaagaa

SEQ ID NO: 1513 - DNA, 564 bp, Cricetulus griseus
  misc_feature (524)..(524): n is a, c, g, or t
agtgagcagttgtaagctgcctactgcaagattaggaaaggcacagatgacttgggcagtaccaaagtgtcaaactgtaaatgctttgtaattagatgactttagttaatatagaatgttttcatggaaaatattcagattgatgggactgtattcttttggtttaaatacttctactttcttgattgattgtcatcttgacctaagtaatagcttgagtagccttttaggaattacttgtaaaatagccttgtaaatagagcatctaaccatacataccctttccagcctcctagaaaggaggtatactggttcatctttcataaatgtaaatattccagcctgtggcatataggtgtatcctatggtgttctttcagcaaagtgtttattgtgcttttttatgtgtatagttaaactctgtgaacagcgtgccaaatcagtgtgcagctgtctttgtggagatgaggattatagggattagatccagggtcttgtgcaagctacagtccacacctagcatanatagcttttagtgaagtcttcaatagcagctgttttacct

SEQ ID NO: 1514 - DNA, 578 bp, Cricetulus griseus
  misc_feature (387)..(387): n is a, c, g, or t
  misc_feature (403)..(403): n is a, c, g, or t
  misc_feature (562)..(562): n is a, c, g, or t
gtcctgaacggagcctccttcccggccatggggctcctgtcggacccggtgcgccggcgcgcgctcgcccgcttcgtcttgcgcctcaacactccgctctgcgtgctgagctacgtggctggcatcacctggtttttggcgctggctttcccgcccctaacccagcgcacttacatgtctgagaacgccatgggctccaccatggtggaggagcagtttgtaggtggagaccgcgctcgaagctttgcccgggacttcgctgcacaccgtaggaagtcgggggctctgccagtggcctggctggagcggtcgatgcgatccgtagggctggaggtctacactcagagcttctcccgcaaactgccctttccggatgagacccacgancgctatatggtgtcangtaccaatgtgtatggcatcctgcgggccccacgtgctgccagcaccgagtctctggtacttactgtaccctgtggtccagactctacaaatagccaggctgtggggctgctgttggcacttgctgcccatttccgagggcagatttactgggccaaanatataatctttctggt

SEQ ID NO: 1515 - DNA, 302 bp, Cricetulus griseus
  misc_feature (159)..(159): n is a, c, g, or t
  misc_feature (190)..(190): n is a, c, g, or t
  misc_feature (213)..(213): n is a, c, g, or t
  misc_feature (227)..(227): n is a, c, g, or t
  misc_feature (250)..(250): n is a, c, g, or t
  misc_feature (279)..(279): n is a, c, g, or t
  misc_feature (300)..(300): n is a, c, g, or t
gggggggggtggggatggatgtggtcatcatcctggttttaaaaaataaaaattagaaaaggaaatcaaagtcaattgtctaagtttaaaaaaggggactgtccctgatcctcacaggtcagggacacctccaaaggcactcgaaaggccagaacacangattgacttaggcaggcgaggaggcctgganagctgggcacaggaggctagganttggggagggaaanaaagcaggccgggcccctctctnttaaggctgcagggttttggctccaggancaagcccacaggtgtggcccnta

SEQ ID NO: 1516 - DNA, 525 bp, Cricetulus griseus
  misc_feature (93)..(93): n is a, c, g, or t
  misc_feature (334)..(334): n is a, c, g, or t
agggagaggtgccctcactcgccctgtactgaccaaggagcagctggacaaccaattggatgcctacatgtcgaaaactaaaggacacctggntgctgagttggatgcctacatggcacagacagatcctgaaactaatgattgaagcctgcctgcctgcccgcctgttagactcttgttaaagtcaccacatctataaaaagaaaaaaaaataatcttgagaaaacatgagaagaaacctgattgatgctggaaggacctatcacaataggctgtggacttacctgccaccagttggcacatttagtctgttccgtctactttttgatactgngttatatgaaaccctattttcctttgatttggttgagtttgttttgttgtttatccagtcacccagacttctgtttgaacaggaatgcattggccttgtgagtgaacatttttccagcctctgcctcacctgtcatatactctgacattttaatatttcctttgttcatctttatgatcccaaaaaaggtc

SEQ ID NO: 1517 - DNA, 567 bp, Cricetulus griseus
  misc_feature (10)..(10): n is a, c, g, or t
  misc_feature (47)..(47): n is a, c, g, or t
  misc_feature (409)..(409): n is a, c, g, or t
  misc_feature (546)..(546): n is a, c, g, or t
aatccatggncagttaagcacaatatattttttagtttgaagctcantgcttgcctcatacaaaagttcaaggacccattttccatcaggggttggtatggtaccatgaacatgtctttacacacatcttggtctgtattgaataacaactctcacaattcttactgaagcaattcagtctaaatactcaagtctcatctataaattgtagataatgattactacatcatggagtacttgtgcatcctgcatgaaataagttacttgaggctgatgtattcctttaataatgtaaaaagaatattgaattcagttcaggaccattacaagattttttttgattactttcagcttgggtgaagctttaaattcttagttaaattccttttctaaagcactcatttattgnctattatttttctagttatctaggtgcattggggaattaaaatcatcatttaaaaatcatcccatggatatcacaagctcataaattgttagatgctaatgggaaagccaagaatctgctccaacttattattgtangcatgcacagatctacctttg

SEQ ID NO: 1518 - DNA, 580 bp, Cricetulus griseus
  misc_feature (554)..(554): n is a, c, g, or t
acaccaccttttccttgcatgctctgctggttgaccactacatacaaggggcattttatccacgaggaggttccagtgagattgccttccatatcatccctttgattcagcgggccgggggcgctgtcctcactagggccactgtacagagtgtgctactggactccactgggagagcctgtggtgtcagtgtgaagaagggacaagagctggtgaatatctattgccccgtggtcatctccaatgcaggaatgttcaatacctaccagcacttagtgccggagagtgcccgctgtctgccagatgtgaagaagcagctggcaatggtacggcctggcatgagcatgctctcaattttcatttgcctgaaaggcaccaaggaggacctgaagcttcagtccaccaactactatgtttattttgacacagacatggacaaagcgatgcaacactatgtctctatgcccaaggaaaaagctccagaacacattcccctttcttttcattgcctctccatcaaccaaggacccaacctggggaggaccgattcccanaccgatccacaatgactgtgctggtg

SEQ ID NO: 1519 - DNA, 220 bp, Cricetulus griseus
  misc_feature (194)..(194): n is a, c, g, or t
  misc_feature (197)..(197): n is a, c, g, or t
  misc_feature (200)..(200): n is a, c, g, or t
  misc_feature (212)..(212): n is a, c, g, or t
gttcccggtctcggttgccggacccgccttccctccctcggtttccccttgccgacctacgcctttggcttctcctctcgcgtttccgccggtccgcttacccgctggccgcctcctgacaagcgggagggttacggtgtggacccagagaagccgaggcgccaggcggctgccaccccctctccccacttgcnctngcnacttcggggcgncttctttc

SEQ ID NO: 1520 - DNA, 580 bp, Cricetulus griseus
catgcagcaactgaaccagctgggcgcgcaggtggagcactttctggctcagctctctgaatttgccaccaccaatcagatcagtcttggccccctcaaaagcatcatgaaaagcctcctcctggttccgaatggtgcactgaagaagggcctcactgccgagcaggtgcgggctgatctcctgactctaggtcttagtgaggagaaagccacttacttttctgaaaagtggaagcagaatgccccaacccttgcacagtgggccataggtcagaccctgatgattaaccagctggttgatatggagtggcgatttggagtgacatctggaagcagtgaattagagaaagtgggaagcatatttttacagttaaagttggtggttaagaaaggaaaacaaatggaaaatgtgtatatagaattaacgttgcctcagttctacagtttcctacatgagatggagcgagtcagagcaagcatggagtgcctcagctgatcctgtttcttgttcccttgttcctgcctcttccctcagggctgcttcagggaccccaccacctcaccttggaagcccgggtgc

SEQ ID NO: 1521 - DNA, 578 bp, Cricetulus griseus
  misc_feature (522)..(522): n is a, c, g, or t
  misc_feature (551)..(551): n is a, c, g, or t
tcctcatcgggtggcaaggaactgtgaggactctttcttcctgctccttcaaccagccagactctgggtgtgggctgtggcttccttgcagaacgaaccttcatcagcctcccgaactgtgtctccatacacctgcgccttctcccctgctgggaccctccctctgcagctatggtctggaggacgctgggcgcaagcaacttttccatgtgccccaatggctccatccagtggatctgggatgtgtttggtgaatgtgctcaggatggctgggatgaagccagcgtggtcctgggcttggtctccattctctgctttgccgcatccaccttcccccaatacatcaaggcctgcaagacagggaacatggaccaggctctatcgctgtggttccttctaggctggatcggtggagattcctgcaaccttattggctccttccttgcagaccagctacccctgcagacttacacggctgtgtactacgtcttggccgatctcatgatgctgaccctgtacttncattacaagttcaagaacccggtcttttncgttgtctgcccctatcaactctgtgc

SEQ ID NO: 1522 - DNA, 566 bp, Cricetulus griseus
  misc_feature (408)..(408): n is a, c, g, or t
  misc_feature (453)..(453): n is a, c, g, or t
  misc_feature (502)..(502): n is a, c, g, or t
  misc_feature (520)..(520): n is a, c, g, or t
  misc_feature (559)..(559): n is a, c, g, or t
ttgggatagttgtgtgaggctggccccgttagcctctggagccctacctcggcaaatccaggctttggctagagttcaagttgagtttccctcttgtttatgtggccatggggcagtcaggaggggctcattgtccctctgttgtggcactggctgctcagtgtctgtgaagttgtggcccgtctgtgaagttgtggcccgtctgtgctaggcagagcagggcttgggcttgctcatggccccagaggcctgctcaggggctggatatgtccctgccaagtcactgcccatcagactcctctgttcctttctagtccacatatccctttgttaccagctcccttgtactcgtgggagggagcagctaccctgatctgtgtctacagttggaggctaccgtagttggangatgctgcgtccgccgttagccctgggggtggtaccacccttganggtttccaggtctttggccagacccagatcccagttagcctcttgttgngttatgttctaaaccaangcctttgctatgaagaagtgtttcatatgaaccattttnctagggc

SEQ ID NO: 1523 - DNA, 373 bp, Cricetulus griseus
  misc_feature (35)..(35): n is a, c, g, or t
  misc_feature (37)..(37): n is a, c, g, or t
  misc_feature (106)..(106): n is a, c, g, or t
  misc_feature (224)..(224): n is a, c, g, or t
  misc_feature (288)..(288): n is a, c, g, or t
  misc_feature (291)..(291): n is a, c, g, or t
  misc_feature (295)..(295): n is a, c, g, or t
  misc_feature (305)..(305): n is a, c, g, or t
  misc_feature (330)..(330): n is a, c, g, or t
  misc_feature (343)..(343): n is a, c, g, or t
  misc_feature (363)..(363): n is a, c, g, or t
gtggaaagaaaagttctagattaccaaactccagnangagtttggctgtagcctttatttgctgatctccatgccatgatgttagaacaacttctaagaaaccagnataaggggaaggaagacatccatgtacaattctcatcctgtcctccactttccatattagcacaggggctgctgtggctcacttgaatgcaggtggaaacattctcatcccatgagancttatccagggatcctgattttatagagggacctttatgggctctggcacttgctaggaatggngtnccanaaaagctgtncttgggccaggatccacacaatgantgtttagttagtngaggaatacccatggcaaangaaacactgc

SEQ ID NO: 1524 - DNA, 567 bp, Cricetulus griseus
  misc_feature (6)..(6): n is a, c, g, or t
  misc_feature (11)..(11): n is a, c, g, or t
  misc_feature (118)..(118): n is a, c, g, or t
  misc_feature (247)..(247): n is a, c, g, or t
  misc_feature (301)..(301): n is a, c, g, or t
tacagnatagnacagagaacattaaagtaatagtttaagcttagggcttagctttaatcttatttggagtattaaacaggattctggatatcagcaatgtaatttaaaagtacaggcnaagggactggcattgtatattattggtaacacacttgtctggcatgcacaaggctctggatttagttcccagtgctgtttaaaacaacaaccacactagtaagcagtaaggagtttctctgttatatcngttgttatctgggaagcagggtggtttcactgttgaatatggactatatatagnatcagacctaggttcatttcttgaactcgtcataatacttacagcaatgtaatcaccgtctgttgagcatattgtgtacctgctaagtcattgatttttttgttatctcacttaattttctctgtaattctggaaggtaagtttagactcttcattttcctgttagagaaactgcagctaagagtaattacagagtgagctctatctctgatttctctctttatcctttctattatgtaatagtatttctttttttctctagctag

SEQ ID NO: 1525 - DNA, 440 bp, Cricetulus griseus
  misc_feature (2)..(32): n is a, c, g, or t
  misc_feature (39)..(39): n is a, c, g, or t
  misc_feature (59)..(59): n is a, c, g, or t
  misc_feature (67)..(67): n is a, c, g, or t
  misc_feature (179)..(179): n is a, c, g, or t
  misc_feature (281)..(281): n is a, c, g, or t
  misc_feature (350)..(350): n is a, c, g, or t
  misc_feature (381)..(381): n is a, c, g, or t
  misc_feature (395)..(395): n is a, c, g, or t
  misc_feature (410)..(410): n is a, c, g, or t
tnnnnnnnnnnnnnnnnnnnnnnnnnnnnnnncaggggnaggaagggaggcagtagggnaactgggnattgacatgtaaaataatcttgtttctaatttaaataaaaaatgggagggaaaaggagggagcaaacattcctctctttgctttcagatgaatcaatttgcccccttgtggnagtatgccaaagactaaattacagggccctcaatccaacaacatacccaagaagactaatgtcctgggagtttgttagacataaggttgaagtccccagggnacccttggtaaagctgcggcaagattctgtgctgtcttgaaataaaatggtcccaaaattatagatganggtggcatttgtgtttgtgtgtatgtgggantttgcaattaagantgtcctgtctcccanaactcacaagacataggcagatggatctct

SEQ ID NO: 1526 - DNA, 149 bp, Cricetulus griseus
  misc_feature (15)..(15): n is a, c, g, or t
  misc_feature (20)..(20): n is a, c, g, or t
  misc_feature (37)..(37): n is a, c, g, or t
  misc_feature (61)..(61): n is a, c, g, or t
  misc_feature (67)..(67): n is a, c, g, or t
  misc_feature (138)..(138): n is a, c, g, or t
tctcatcaggaacancagcnctgggctcctatgctgncacctcatcttcatcgatacccangcctantttgatcatgcggtatatgcggttggagtgggtttggggatcctcaagtgagaaaccagaggagagcatancagtctcaaac

SEQ ID NO: 1527 - DNA, 544 bp, Cricetulus griseus
  misc_feature (519)..(519): n is a, c, g, or t
  misc_feature (539)..(539): n is a, c, g, or t
gcgtgggtttttgacataacattttctcagcatttttcacatctagtaacttaaaacattacacttaactgtgattctggtgactgctaataattttgtgagctcaacccctttttaaaattttatttatttttatatgtgtggtagttttgcctgcatttatgttccagtgagaccaggtattggatcccctgggattagagttgcagaaactgtgatctgctatgttaatatgggtcctgggatcaaacctgagtcctctggaagaacagccagtgctcttaactgccgaggcatctttctggtttcctcaaaactctttgtaaaatgaatattgttccatgactttcagtcttttatatttgctgtgattaagggaaaactacattctagtaaaagtgtttggtatagttaaccccaaaattcttaaccaaaataataaagtttgactaaatttataggttgcatataaagttgtagtaatggagcagagtcatatttaaaatacttttgtattangctaatttgtcatattctgnccagt

SEQ ID NO: 1528 - DNA, 580 bp, Cricetulus griseus
  misc_feature (364)..(396): n is a, c, g, or t
cattgtttggtggaaatggcgagacaggttttgagcaaaattcgacttactctgtgttcagcatttctattacattgactgatgaggggtatgagcatttttttgaggttgctcatgctgtcttccagtatttaaaaatgctgcaggagctaggcccagagaaaagagtttttgaagagattcagaaaattgaggataatgaatttcattaccaagaacagacagatcccgtggagtatgtggagaacatgtgtgagaacatgcagctctacccacttcaggactttctcaccggagatcagcttctgttcgaatacaagccagaagtcattgctgaagctcttaataagctggttcctcagannnnnnnnnnnnnnnnnnnnnnnnnnnnnnnnnaaggaagatgtgatctcagggagaagtggtttgggactcagtacagtatagaagatattgaaaactcttgggctgaactgtggaagactaattttgacttaaatccagatcttcatcttccagctgaaaacaagtacatagccacggactttacattgaagcctttttgattgccctgaaactg

SEQ ID NO: 1529 - DNA, 546 bp, Cricetulus griseus
  misc_feature (246)..(278): n is a, c, g, or t
  misc_feature (329)..(349): n is a, c, g, or t
  misc_feature (405)..(405): n is a, c, g, or t
  misc_feature (427)..(427): n is a, c, g, or t
  misc_feature (494)..(494): n is a, c, g, or t
  misc_feature (510)..(510): n is a, c, g, or t
gtcaacaccaaaacccatccctattctagcagctgggttttgcttagacaagacatccttattgcttgtgtatggcaactggtttcagcctaccattgagcgagtggctttgaactccaaagatactcatatatgtttggaaagagacatttccaattgctgggctccaacagtagaaacagctataaccaaggtgagaacaccagtgatgagttcagaagctaaagttctggtgcctggggttcnnnnnnnnnnnnnnnnnnnnnnnnnnnnnnnnntctcacagcctaaggaggtggagaacaagaggaaattgggcagtaatgagnnnnnnnnnnnnnnnnnnnnnggagccatgggtctagatagaaaaggaaggaaggacgaccttttgcagacaaccanctttccagtccttctcacacanggcttagaaagcaatgattttgaaatgttaaacaaagtgcttcaaactatgaatataaacctaatanagaagaccgtgctaangatgcccttgcatgctgttatcccattgttgcaaga

SEQ ID NO: 1530 - DNA, 490 bp, Cricetulus griseus
  misc_feature (74)..(74): n is a, c, g, or t
  misc_feature (240)..(276): n is a, c, g, or t
  misc_feature (337)..(355): n is a, c, g, or t
  misc_feature (468)..(468): n is a, c, g, or t
ttctccccctaggttggggttacatgtgtcatcatgaatagcacttttttgcatggggtggcaatggtacttanaggcaagccagtttactgagtcacttcctaagcactaaattttgatttctttctttttaaaattaaaaaaacaaaaaccaagatattgtctaggcttttaaaagaattgttgacaaaagataacatcccctttagaaagtttttcattcgcctgcattggtggtgnnnnnnnnnnnnnnnnnnnnnnnnnnnnnnnnnnnnnatggatctctgggagttcgaggccagcctggtgtatagagagagttccaggacagccaggnnnnnnnnnnnnnnnnnnnccttgaaaaacaaaaacaaacaagccaaagaagctgggtgctgaggcctcaaaagataggaaggagcgaggttgagctcctcccctcctcctctcttgggctgatgctttcangttggttccttctttgaaataa

SEQ ID NO: 1531 - DNA, 379 bp, Cricetulus griseus
  misc_feature (309)..(309): n is a, c, g, or t
  misc_feature (370)..(370): n is a, c, g, or t
aagtctgatgtcgaacttttaatgttttcagtgttctctaatttttaggagttttttgtagcctttacacctggaaaaaagatttgtaaaatcaccaaaataattgtgtgctttattttttaagtagtgattataggtgttacatcccatagttactgcaagatttattgccgtatattggagcagatgtctcattaacataagagtacttaggaagtgaagtccttttgtgcattttcaacatttatcaactggcaatcagaaaatgtttactgtgaagaggaatctccaacttacatagcccttttnggtatgtttaataattcttaatggggcttgcctgtaagtatgatatgcatagcatcttagngaaatgccg

SEQ ID NO: 1532 - DNA, 517 bp, Cricetulus griseus
  misc_feature (351)..(351): n is a, c, g, or t
  misc_feature (416)..(416): n is a, c, g, or t
  misc_feature (423)..(423): n is a, c, g, or t
  misc_feature (432)..(432): n is a, c, g, or t
  misc_feature (447)..(447): n is a, c, g, or t
actgtggtttgggtaggctggatggcgggttttcctacagcttagcacgtctagtttctctgcttcactcctttggttcaagacgtgagctctcaacttccggtttctgctgtccttcctcccttccatgacagactctgtccctctgggaccacaggtcacaataaagcctcctgctgtggaatattattttaagatgtgttacattcatttatgctgtggaatatttgttcgataatgcaaaggtgtgttgcattcttttatgttgcatctgtttaactctgttaagctgtgttaccttgcccgcctaaaatacctgattggtctaataaacagctgaatggccactancgaggcagaagagagaaataggtggagttagtatgcagagacaataaacaggagcagaaatctanggaaganagtacaganagagaaaaggaaganaggagggtgccaggggccagtcacccagccacacagccagccacagagtcaggaggaaagaaagacatat

SEQ ID NO: 1533 - DNA, 527 bp, Cricetulus griseus
  misc_feature (114)..(152): n is a, c, g, or t
  misc_feature (467)..(467): n is a, c, g, or t
  misc_feature (509)..(509): n is a, c, g, or t
  misc_feature (520)..(520): n is a, c, g, or t
ctcaactccccacttcatcctccatgaaggcccatgttcattcctactctataccttggtcctactgatgctctattaccaaaggcctaaaggttaagtaggagtaacaccttnnnnnnnnnnnnnnnnnnnnnnnnnnnnnnnnnnnnnnnctcagctggctttctgggttttctcaggtaacctgcttcctcagggctgttcccacagaggcctcagggttatctcccccttagcaaagtccccactaggattgctggcttggggcctacagcagggctcctcagcctgcctgctgttgtgttacaggaaactcttggccaccgcatgtcccatggagccctgacatgtggtcagcatagcctttctccttggcttgggccttccaggtagccccatttggggtgcctgagtgcagacttctctgtgattgccctgtggttccttggttggacagtttcccccanaagaccacagggcaactgtcaagctgctcaccccttcccaangctggggctgnaaccagc

SEQ ID NO: 1534 - DNA, 489 bp, Cricetulus griseus
ggtcctgtttgggttcgcagtgcaccgcaagcccgcgaagagtggcgaccgggagacatggacccctgtggctgacttcactcaccatgcccacaccgcctccttgtcagctgtggcatcgaacagtcgctttgtagtcacaggcagcaaagatgaaacgattcacatttatgacatgaaaaagaagatcgatcatgggtctctggtgcatcacagtggcaccataacttgcctgaaattctatggcagcaggcacttaatcagtggcgcagaagatggactcatctgtgtatgggatgcgaagaaatgggaatgcctgaagtccattaaagctcacaaaggacatgtgactttcctttctattcacccgtctggcaagttggctctgtctgttggtactgataagacattaagaacatggaatcttatagaaggaaggtcagctttcataaaaaatataaaacaaaatgcccacatagtggaatggtc

SEQ ID NO: 1535 - DNA, 501 bp, Cricetulus griseus
  misc_feature (427)..(427): n is a, c, g, or t
agtgtaaaatgggctcccaaagtccattcctatgcaagggataagtactgatctactacaaggaggccccatatattactgaggcctcctcactgacacccacattcagggggtctagatcagttccatgctggtttcccagtgatcagtctgggggccaagagctcccccttgttcaggtcagctgtttctgtgggtttcaccagccaggtcttgacccctttgctcatcactccttctctgcaactggattctaattcagttcagtttaaggttgtgtaggggaagaatagaggagagcaaaataagagatacatcaaagagggagccaatataggtttagagagaaatcaggcactagggaaatgtccagagatctacaaggatgataccaactaaccatctaagcaacagtagagagactacnttaaatgccctcccctgataacgagattgatgactaacttgggtccagtttttaaaattatttgaggagatttt

SEQ ID NO: 1536 - DNA, 110 bp, Cricetulus griseus
  misc_feature (80)..(80): n is a, c, g, or t
attttgactacaaagatgaatctgggtttccaaagcccccatcttataatgtggctacaacactgcccagttatgatgangctgagagaaccaagactgaagccacgatc

SEQ ID NO: 1537 - DNA, 286 bp, Cricetulus griseus
  misc_feature (137)..(137): n is a, c, g, or t
  misc_feature (279)..(279): n is a, c, g, or t
gccccagcagcttctgctccagctcaggccaaaccagatctggaaaagcagacaaaagcttcccctaggaaaggcaccccagccacccctgcatctgccatggtctcctctatgcgagtgagcaccgcaccctctantgaggaggggtcaggagctgctcctggcactacaagggtgcaggggaagtctgtggggaagggcctccaagggaaaggtgacttgggacaagggatggccccagtgcaccctgagaggccggggcctacagttgcccatgtnaggatta

SEQ ID NO: 1538 - DNA, 475 bp, Cricetulus griseus
  misc_feature (375)..(375): n is a, c, g, or t
  misc_feature (385)..(385): n is a, c, g, or t
  misc_feature (436)..(436): n is a, c, g, or t
  misc_feature (463)..(463): n is a, c, g, or t
gaggtccgttgtgtgagcaagctgctatggtgctgagttcccgggtagagtcgaccgagccggggcggtcgcggccatgaaggcgggtgctacttctatgtgggcttcatgctgtgggctgctgaatgaagtcatgggaactggagctgtcagaggtcagcaggcaggatttccaggaagcacggggccattcagatttacaccaagttctgactttcccacctacccaccagcagctactgaagggcccaatatagtttgcaaagcgtgtggactttcattttcagtctttataaagaagcacgtctgctgtgactgcaaaaaggacttttgctccttttgctcagtttcacaagaaaacctccgcagatgttntacttgtcanctactccaagagacagccttccagcgccctcagttgatgcgactgaaagtnaaggacctacggcagtatctcctcctnataaacatacca

SEQ ID NO: 1539 - DNA, 568 bp, Cricetulus griseus
  misc_feature (6)..(6): n is a, c, g, or t
  misc_feature (13)..(13): n is a, c, g, or t
  misc_feature (46)..(80): n is a, c, g, or t
  misc_feature (346)..(346): n is a, c, g, or t
  misc_feature (406)..(406): n is a, c, g, or t
  misc_feature (505)..(505): n is a, c, g, or t
cgactncactatnagggcgatattgggtaccgggtccccccctcgnnnnnnnnnnnnnnnnnnnnnnnnnnnnnnnnnnncttttctttcattgggggaaggcgtgaggaaagtaccaaacagcagcaggacttttaaactttaaatagacaggtctgggagcctgagccctccttttctttgacttcagcctccaaggagcctcaccgctttggcgcgccggcttcgctttcattaagcgaaagagaagtgcccagacatgggtgactggagtgccttggggaagcttctggacaaggtccaagcctactccaccgctggcgggaaggtgtggctgtccgtgctnttcatttttagaatcctgctgctggggacagcggttgagtcagcatggggtgatgagcantccgcctttcgctgtaacactcagcaacctggttgtgaaaatgtctgctacgacaagtccttccccatctctcacgtgcgcttctgggtccttcagatnatattcgtgtctgtgcccacgctcctgtatttggctcacgtgttctatgtgatgagaaaggaa

SEQ ID NO: 1540 - DNA, 581 bp, Cricetulus griseus
  misc_feature (19)..(19): n is a, c, g, or t
taatgatggcttccaaagnagtattttttaaaggaacaaaataagcatgaattaacttttcaatataagctatgacgtgtaatagttggttatgaattgtagtggcaccagctagcacctctgtcatttaaggatctttttgaatgcttttagaagaatcccttattttcaagggttaaaatgagcagacaaactattctttccctggctaaagctgctgtgggaaccctcagcttaggaaggtggaaatctgttggcgctttggtttagtgtagcacgggaatggaagtagaaaagttttattcagttctttgagtgctcagaaaatgcaatcagtgtattatatatgatgattcgtagtcagaatcaatgtattatacgtgatgattcatagtcatttgtagtcatcgaccctaaggctttttactaagaaactagctgaagattcacccttgaattaggtctggggaaatggccaccatcaggaggatttactttagaacaaaaatgaaattctagtctaactcaatagtgtgtggtgagtgtgcagaccatagggcattggtgagtgcctgcaattt

SEQ ID NO: 1541 - DNA, 580 bp, Cricetulus griseus
  misc_feature (346)..(346): n is a, c, g, or t
  misc_feature (427)..(427): n is a, c, g, or t
  misc_feature (510)..(510): n is a, c, g, or t
  misc_feature (534)..(534): n is a, c, g, or t
aagctgcagggcgagttggaggatgagtggcaggaggtcatcgggaggtttgaagaggatgcttctcatgagatgcaggaacccgagtccttctcagcctggtcagaccgcctggctcgagagcacgcccagaaacggcggcggcagctggaggcagagacatcctgccgacccccaagggctgagggctccagtcacagctggcggcagcacgaggaggagcagcggcttttccgagagcgagcacgggccaaggaggaggaactgcgtgagagccgagccaggagggctcaagaggctcaaggggaccgagggacagagcctcccaggcctgggcccagggcanaacacccacgaggggcaggaaggggcagcctctggcgctttggtgatgtgccctggccatgccctggtgggggggacccanaggccatggctgcagccttggtggccagaggcccccctctggaggaacagggggctctgagaaggtacttgagagtccagcangtccgatggcaccctgaccgcttnctgcagagattccgaagccagattgagacctgggagctgggccgtg

SEQ ID NO: 1542 - DNA, 386 bp, Cricetulus griseus
  misc_feature (45)..(45): n is a, c, g, or t
  misc_feature (124)..(124): n is a, c, g, or t
  misc_feature (220)..(220): n is a, c, g, or t
  misc_feature (338)..(338): n is a, c, g, or t
  misc_feature (372)..(372): n is a, c, g, or t
tacagtggccaggttgaatagcaggtgagctgaaggaaagaaganagttctggaaggagacgagacagaatcttgggtaaagaaggctaagactggggtctccatgcaagtgaaagtaccccanggacactgagtggaaggaaggcagaatgcacagggtccatccacactgagagaagaagcccttcacctgagggtgaaatctagaagctcagcatanaaaaggcctggggacttgaggaaccagtaaagtgaaaaaccataccagcaatgtctgaaaggccattggagccaacataagccattctcacagcatgaccacaacccatggtgctganacaaacactgtctaacagaaggcactgggcactnctgtggagcgtcag

SEQ ID NO: 1543 - DNA, 336 bp, Cricetulus griseus
  misc_feature (153)..(153): n is a, c, g, or t
  misc_feature (203)..(203): n is a, c, g, or t
  misc_feature (314)..(314): n is a, c, g, or t
acaagctacaaaatctccagatggtgttaatagaagtgaagcatcccctcctcagtcgggcgacacacagtacctttgcacagaagctccagctccgagtgccttcagtggagtctctgtttcggagtcccataaaggaatctctgttctggncttctaaagagtctttagtgcgaacatcttccagagagtccctgagccancttgacctggactgtcccgctgccacctttgacccaccttctgatatggagagcgaggctgaagacgcaccaggcagctctgacagcctcaacagatagcagttgcttcancggttgcgaagaatggaacgaa

SEQ ID NO: 1544 - DNA, 568 bp, Cricetulus griseus
  misc_feature (17)..(17): n is a, c, g, or t
  misc_feature (89)..(89): n is a, c, g, or t
  misc_feature (451)..(451): n is a, c, g, or t
  misc_feature (490)..(509): n is a, c, g, or t
cagccaggattctgagnatacagaatttaaaagattcttctcttctggaaagtgataagaaaaggaaaggtaggccaaagggcaaaggnaaacaaaagaaagcacagagcatcttcaagtaagtagatggagaagtagaagctgttctgcagaagaaagctaaagcaaggagtatagagttacagatttccagtgtgaagtttgaagatgttggaggcaatgatgcaacattaaaagaagtctgcaaaatgctcatacacatgcgccacccggaagtataccaacaccttggtgtcaccccgcctcgtggagttctcttgcatggaccaccaggctgcgggaagacattacttgcacatgcaattgctggggaacttgacttgccaattctgaaagtggctgcaccagagattgtgtcaggagtttcaggggagtctgagcaaaagctcanagatttatttgaccaagctgtgtcaaacgccccctgtannnnnnnnnnnnnnnnnnnngatgctattacccccaaaagagaagttgcttcaaaagatatggaaagaagaattgtagc

SEQ ID NO: 1545 - DNA, 579 bp, Cricetulus griseus
  misc_feature (137)..(208): n is a, c, g, or t
gtgctgagtacagctatttccagggtctaagccatgcatggtgactaagagctgaggcaggacgattgccttgagtgggaggccagcctgagctacaatgtgagaccctatctcatgattgggaagggggaagcttnnnnnnnnnnnnnnnnnnnnnnnnnnnnnnnnnnnnnnnnnnnnnnnnnnnnnnnnnnnnnnnnnnnnnnnnaaggtgagaatccagaatgaccccctgtcttccagaaagtcccacatattctctatctgcaaaccacccgttgttgccatgatttcagcatattggttgtcttgtgatactgccctctttctttggaattccatgaaatcagggattatttatttttcacaatcttacttttctttcataatgaaaagatggttaaagttgagaggctttttgcaccacaaataaaaactgcatggaccggccagcaaggtggctcatcatggacaggcctctgtcatacatgtctatcgacctgagtaactgtggttagagaactgtctctccacagttgcactttgtatttcatttgcgattgcacacccttaacctat

SEQ ID NO: 1546 - DNA, 581 bp, Cricetulus griseus
ctttagtgttagcatacagctctgcagtctccagcaaaatggttaggcagattttagagctttgtcctaacctggaacatctggatcttacccagactgatatttctgattctgcatttgacagttggtcttggcttggttgctgccagaatcttcggcatcttgatctgtctggatgtgaaaaaatcacagacatggctctagagaagatttctagagctcttggagttctgacatctcatcagagtggctttttgaaaagtgcaggcaaggccaattcagctccatggataaataaagacattaccatgcaatcctccaagcagtatgcctgcttgcacaatttaactgacaaaggtgttggtgaaaaaatagacaatgatcactcttggactaaacctgtatcttctgaaagttttacttctccttacgtgtggatgctagatgctgaagatttggctgatatcgaagatgctgtagagtggagacacagaaatgtcgaaagtctctgtgtaatggaaacagcctccaactttggttgttcttcatctgggtgttacaatatggactttgtgggatta

SEQ ID NO: 1547 - DNA, 470 bp, Cricetulus griseus
  misc_feature (368)..(387): n is a, c, g, or t
aagctgaagatcacgaaagcaaggcatggaaatcactagctcttaccactaccttagctgaaagggctgatcttggctctaccaaacctcagactgctatactgacctcactgtcttcctatcctcaatatggctggagaatgaattgctaatactactgaaggccctgctcctatcttttatacccctctagtgctgggtttaaaggcatgtaatcgaaggtgcaaagatcatctttgtgtgagctgtttctctttaggactggatcaatcttgtgtagatctgggtggactcacagagatccttctacctcttaatcctgagtcctaggattaaaggtgtgtactaccacctcctaatttctggcnnnnnnnnnnnnnnnnnnnnatcaccactgcctgatctttatagcttgaggctggctttgctttctgaatccctaagcaagcctgtataaatcataagtaata

SEQ ID NO: 1548 - DNA, 580 bp, Cricetulus griseus
attaatttgacactgtagcctatatttttataaaatccagtactttgtaaagtccgtcatttgtaaccttgagtggacttcaatttctttagaaccaatttttcttgtttggttctgatttattgttgcactccatgatggcaaatttcaaaagtgtacattctgagcaatttttcttttcttcatttgtgggaaaacaccatcatgtatggggtgtcaccttcatttactgcaaatgtaccttgggactattaacataaagtatctcataagtatgaaatatatggaaagatatttaagattgaaaaatgaatagcaggcatatgagccattgcttatatattgtttgtctcttccatgctagagtccttggcacagcaaggtcagaaatcacagcgattttcttttttacttcctaacactgagctcataaggtttgtccctcaccatgaaatggacatttttagcttttcttacttaaagtatgttgccatattctgtgctgcatagcccttttaaaacctgaacaggctttcctctttctgctcagctgcaactaatgcaaactcaaaagttggta

SEQ ID NO: 1549 - DNA, 579 bp, Cricetulus griseus
actgcttctgatatggtgtccacttcccgcatcttggttgcagtagtgaaaatgtgttatgaggctaaagaatgggacttacttaatgaaaatattatgcttttgtcaaaacggcggagtcagctaaaacaagctgttgcaaaaatggttcagcagtgctgtacttacgtggaggagatcacagacctcccagtcaagctgcgattgattgatactttacggatggttacagaaggaaagatttatgttgaaattgagcgtgctcggctgactaagaccttggcaactataaaagaacaaaatggtgatgtgaaagatgctgcctccatccttcaagaattacaggtggaaacctacgggtccatggagaagaaagagcgagtggagtttattctggagcagatgagactctgcctagctgtgaaggattacattcgcacacagatcattagcaaaaaaattaacactaagttcttccaggaagaaaatacagagaaattaaagttgaagtactataacttaatgattcagctggatcagcacgaagggtcctatctgtccatttgtaagcactacaga

SEQ ID NO: 1550 - DNA, 580 bp, Cricetulus griseus
  misc_feature (572)..(572): n is a, c, g, or t
cacgtgacttcctacactgtgaaccatggccctgccattccggaaggacttaactgagtataaggacctggatgaagatgagctccttaacaatctgtcagaaacagagctgaaacagcttgaaactgtcctggatgatctcgaccccgagaatgctcttctgcctgcagggtttcggcagaagaaccagacgtcaaagtctgccacgggaccctttgatagagaacatctgctttcttatctagagaaggaagcattggaacataaagaccgggaagactatgtgcccttcactggagagaaaaaagggaaaatttttatccccaaacagaaacctgtgcagacttttgcagaagaaagcatatcccttgatccagaattagaagaagctttgacaagtgcctctgatacagaattgtgtgatcttgcagctatccttgggatgcacaatctgattacagacacacagttctaggacgtggtgagaagtagtaatggtgtcaaccaagaacatttttcaaatgtggtaaaaggtgaaacgattcttccagtgtttgatcagccaccaaatncaaccaac

SEQ ID NO: 1551 - DNA, 147 bp, Cricetulus griseus
gttcgtaccccacgaccgttcccgggaggaggaggagagggtgtatcttttgaacgaacttcttttagcctgcttcttggagaacccctgttttcttccctaaaaggagttcctcttgccccagactcttgaataatggaggagggt

SEQ ID NO: 1552 - DNA, 147 bp, Cricetulus griseus; identical to SEQ ID NO: 1551

SEQ ID NO: 1553 - DNA, 194 bp, Cricetulus griseus
ggaaaaaaacataaaggttttggagtgggtttgaacccaattttagggggttcaaacccttccttttttatttaactttaacaaaggggggtttttaaaatgtttggtttggaggagggcacccgggtatccactttaaatttgtggatgggggatcaactggcatcacttaactttttgaaggaaaaccttcc

SEQ ID NO: 1554 - DNA, 580 bp, Cricetulus griseus
  misc_feature (467)..(481): n is a, c, g, or t
tgttccagtagcacgatgtgatccacagcaaggagggacgccaataaggcttccgataagataagtcttataaaatatatagatttatgacagttaagactgagctagcagatgagaatcctagtcattggccaagcagctttgaacttaatacaagtttctgtgtattcatttgggccctaacttgggcaggcagcttgcgtaaagcatacacgtggcggtggggctctgtggcttttggcagaaagatttactgtaacaaccaatgaagatctatgctggagaggatgtggagaaaaaggaatactcctccattggtggtgggagtgcgaacttgtaagaccactttagaaatcagtatagcggttgctcagaaaaatgggaatcagtctgcctcaagatccagcaattcctctcttgggcacgtactcaatgcacattcatacaacaaggacatatatgttcannnnnnnnnnnnnnngcattgtttgtaatagccagaacctggaagcaacctatatgccccttcactgaagaatgggtagagaaaatgtggtacatttatacaatggagtactac

SEQ ID NO: 1555 - DNA, 580 bp, Cricetulus griseus; identical to SEQ ID NO: 1554
  misc_feature (467)..(481): n is a, c, g, or t

SEQ ID NO: 1556 - DNA, 319 bp, Cricetulus griseus
  misc_feature (19)..(80): n is a, c, g, or t
atgtgtggaaatgttgatnnnnnnnnnnnnnnnnnnnnnnnnnnnnnnnnnnnnnnnnnnnnnnnnnnnnnnnnnnnnnncgcgtccggagcaaccctgtctcacaatgacgaaaccaaaaacagacggacgcaacccactgagctattctacccaccgctgtaactcatattttaaagggactttctataattgagctccaaaactagatatcctatcattcccaacagtcccttcagatctgcactatacaaggtatagagaatctcgttttgtgcccgttatccatgctgaataccatggcgattctacttcacca

SEQ ID NO: 1557 - DNA, 576 bp, Cricetulus griseus
  misc_feature (225)..(240): n is a, c, g, or t
agggtctgcagagggaccagggacctggcctcacaggctggaccacacccctaaagaaagcagcatcagatggggtgggactcagtagaaatgaacatggggagagggcctcgggctgctcagaagaggctcagcctcagattctgggcgtgctgtgtgccacagctaacggctggtgaaagagaaggacggaaggcagtcagcacgcatccttgaatggaaacnnnnnnnnnnnnnnnntcaggaagaagacagcccagagctgtctcagtgtctgaggcttgggcccaaggacataaactatgacgaccaaaagccacacttgaggctgcaaaccaaaaagccaagatgctgagaggaaacctgggcccacagactcgatgaacaccaatgcttaacccttgacagtcctcagctgggaatccattgagttgatgccaccaaacatgctactcgagagggcaaccgaagctccagagaccagagagagtccactctcatcctctcaagctacatcatcacatctactccccgccccatgagccctgtcagtggccaagcaggaagctgacccaa

SEQ ID NO: 1558 - DNA, 579 bp, Cricetulus griseus
caactataagcaatgtgaagtctatggccaggtaaggtgtgcatctattttgtttgaggactgtggcccacaggatttttaatactgtcatttgggtcctgatggaaaatgaaggcttatgggtgatttctttgttattaaagccctgagagcaagggcccggagctgcttgtttgagaagctgtagccgcccccggcatgtggtcaactaagtgtgttgattttttcaaaccacaagtgagatgcttttgtgagtgtgaggcaccttgacacagacctgtgttatcaattttgtactcaaatgccaaaagatggaaaatattttcaagtcataactaaaaatggacatctttgataattttccttttatagaatcagctaaattgtcttttctttttcttttgaatattattggggatattgtgggatcttggatgtctagtggaaaggaaactacagagcacctagttcggttggaccacttcctaagtatctttgcatcccatacctggattgccggccctgggcatgagaagtctcctgcaccataagactcaaggaagctgatgttatcaacaa

SEQ ID NO: 1559 - DNA, 362 bp, Cricetulus griseus
  misc_feature (228)..(252): n is a, c, g, or t
  misc_feature (255)..(267): n is a, c, g, or t
taaattcataaacaataagctatacagagataaatgtctaaacctgtatccaaatgacacttcaaatacaaattaaaaaaaaaactggcttacatttgacactttttaaaatatatatccaagaaataaggagacataaaggcggaaaaaaaaactcttaaaaaaaagcagttatgggtctggaaagatggctcaaaggttaaaagcactgctcttccaaaggtcctnnnnnnnnnnnnnnnnnnnnnnnnnggnnnnnnnnnnnnnctgtaatgagatctggtgccttcttctggtgtggagatatacatggaagcagaatgttgtatacataataataaatataaagtcttaaaaaaaaa

SEQ ID NO: 1560 - DNA, 570 bp, Cricetulus griseus
  misc_feature (50)..(78): n is a, c, g, or t
  misc_feature (114)..(150): n is a, c, g, or t
  misc_feature (210)..(244): n is a, c, g, or t
  misc_feature (291)..(341): n is a, c, g, or t
  misc_feature (436)..(467): n is a, c, g, or t
cactatgctcagctacagcatctttcttatatgactgggtggagaaatannnnnnnnnnnnnnnnnnnnnnnnnnnnncaatgaatcaaacccacgatccatagaagcatcacnnnnnnnnnnnnnnnnnnnnnnnnnnnnnnnnnnnnngctgcttatatccagcctcctcaactataaacaaatagggctatgaacattgcaaccacnnnnnnnnnnnnnnnnnnnnnnnnnnnnnnnnnnngcactgccaaccaaattaggccttgatgcattcaacgcctgacttgnnnnnnnnnnnnnnnnnnnnnnnnnnnnnnnnnnnnnnnnnnnnnnnnnnnacacataaaggatccccaatgaccatctgacttgaaagttatcaacctattgatgttaataggcgaaggcactatgcccttatctaaatgctatnnnnnnnnnnnnnnnnnnnnnnnnnnnnnnnnctcgcggaaaattatagcttactcatgcatgtgccatataagctgaatatgctgactgctcccatgcatcccatcacttacaatgatcaatctaattatctac

SEQ ID NO: 1561 - DNA, 568 bp, Cricetulus griseus
gcagtcgcattgacgatctggagaaaaatatcgctgacctcatgacccaggctggtgtggaagaactggaaggggaaaacaagattgctactgcacagaaaagttgaaggtgctgacattcacaccgagtccagaacatctttttcccaagccaagagaaaaccaactggctttctgcaactaactactatgtgttgacaggtttatgaagcgtgtattcttatcacaacagcctacatagtccatagagtgtccctcccctgcatccccagtttctcaaacttggtatattcacatcttggtcagttgtcttaattattaaacactaaaactttggcggtttctgcataaaattgtcaaactttttagtgatttttgaagtcctttcctgctgttcttcttgcggtagttactgtttgatgacatgacagagtacttcccagttaggtgactagtgactcctccccttggcagaagccgtgatgtgagatgtgtacgtttagggttctttctttcagcacatagtgactgccgaactgacactagagtgccagaaatacttttccat

SEQ ID NO: 1562 - DNA, 455 bp, Cricetulus griseus
  misc_feature (85)..(98): n is a, c, g, or t
  misc_feature (100)..(126): n is a, c, g, or t
acagaaatgacatgagtgcttttatattgtgaatgactgaaaatttaaaatacattgagtcatagggtttgtctaaaaaagggannnnnnnnnnnnnnannnnnnnnnnnnnnnnnnnnnnnnnnngaagaaatgtgctgggactgctcttcaacattctgttctctgtgaatagtttatataaaattataatattttctacagctgtgtggactctctcacagagtccagaacggctatatattagttttatgcaaattgttttacacagacacacagttcttcttggttatcttccacagcccacagggaagggaagaatggtttctgggacgcacatttagaccatattgctctccttcacgtttatatgcgagatggtgttcttgacggcagcatacacagagcggatgttctcagtgtgtgtggcgcatgatatgtgcgagtatattttt

SEQ ID NO: 1563 - DNA, 579 bp, Cricetulus griseus
atataactgactagaatattaagaattgagtgctcacacccccacccccacccagggatgtgtacttgggcatggttaggaaattccttggatctcagatctgtgcaccttgcagccatttaaccaggactgactactgttgtcatcttgctggtgaagcccactctcctgcgctggtgttgagggacagccactcggctgtgtcatctaggtttgaatgtgtattactatcactacttaagggactttgggtacatctgtttagtgtatgtagaatgtgcagagtactttgtcagttttcctctgtttttcttttttagcaaaattagtcatcaatttagtctagttaattaagctgacagtctactgtgaggagatgacatgtctactgtgaccatagcaaaagactgttggaaaacttttatactaagagtgttttctactaagataaaaagacacacacatgcacctcacagctctctagtagggaattaatgcggatttaaaaatggcaatcatgggtcctattggttttgttctttacagagcattcactcccacagaagggtgaccaaagcc

SEQ ID NO: 1564 - DNA, 579 bp, Cricetulus griseus
  misc_feature (547)..(547): n is a, c, g, or t
tgctctactatgaagagactaagagcttcctgtggtggacaagcaacctgatggtgctgggtggctcctcagcctatacctgggtcaggggctgggagatgcagaagacccaagaggaccccagctccaaagagggtgagaagagtgctattggggtgtgagcttcttcagggacctgggactgaacccaagtggggcctacacagcactgaaggcttcccatggagctagccagtgtggccctgagcaatactgtttacatcctccttggaatatgatctaagaggagccagggtctttcctggtaatgtcagaaagctgccaaatctcctgtctgccccatcttgttttgggaaaaccctaccaggaatggcacccctacctgcctcctcctagagcctgtctacctccatatcatctctggggttgggaccagctgcagccttaaggggctggattgatgaagtgatgtcttctacacaagggagatgggttgtgatcccactaattgaagggatttgggtgaccccacacctctgggatccanggcaggtagagtagtagcttaagtgctattaa

SEQ ID NO: 1565 - DNA, 600 bp, Cricetulus griseus
  misc_feature (286)..(305): n is a, c, g, or t
gtcgacccacgcgtcccgggggggtgagggggaaagaaagagtgcggtgagagatggctggaattgggggtctctggggcacctctgcactaagggaaccttctcagaatctatgaagtgatcctaatgaggacttctggtatgggggaatatggagtctaaactgtctatctcttgttgccaggagtctaaactgtctatctcttgtcgccaggagtctaaactgtctatctcttgttgccaggagtcttccagtggtgaaactgggttgcattaaattgagttnnnnnnnnnnnnnnnnnnnngaaatccccaaacaacccacgctgttgctaagacaaaaggctgctctctgcaaaatgatagtggggccccattgctgaggacataactcactgaacacggagtagtggagctggtgcctacatggagccttcactcctgtgttctagtgtctttggtgctggaaggtacttcgtaggctaccagaagagaatcagggacaccgacccaggcacaaagcctttaccctataatctgtcctgcctgcaaagtatatagggcaatggtggcacagaacttgtgggagtagacaatcaa

SEQ ID NO: 1566 - DNA, 568 bp, Cricetulus griseus
  misc_feature (2)..(14): n is a, c, g, or t
tnnnnnnnnnnnnncctgcctccaggttcctccttaagtttctgccatgtcttctctgaataataggttactaactgtacaatgaaataaatcctttctcccaagttgcttttggtcaaagtgccccctccacaggaatagaaaccctaactaaaccaacctcagactaatactaattttttgaaatactgttattgtgaaatattgttactatgtagccccaactcaaaagaaaaaataaatttcaatacatgtatttctgtggaatatagaatgttcaaaatttgtgaaaactgaagtatttctgcctggtgagtcattttcaattttaatactctttttattatcaaattatatcttcatatcttgtcattgtctgggcctaatttattaggcaattctaaaataaccagggctcttcttataccaatttaaattatatccactgttaaattgtaagtaaagtctatgaaaataaaatcattttagattttttaagttatttatatttaaaaaatcacttcacctaccattgttaacatgtaaatacagagtgaaacatctcact

SEQ ID NO: 1567 - DNA, 250 bp, Cricetulus griseus
  misc_feature (205)..(239): n is a, c, g, or t
aaaaataaacttttatttaaattaaaaacaattttattttgtataccaatcccagttcccactccctccctcccatgccctcccaaccccccttcccacccctgtccactccccatggagggtgaggcctcccatgggggatcatcaaagtttgacacattcatcatttagagaaagccctaagccctaacctgtgtatctaggnnnnnnnnnnnnnnnnnnnnnnnnnnnnnnnnnnnagagagagaga

SEQ ID NO: 1568 - DNA, 568 bp, Cricetulus griseus
  misc_feature (62)..(208): n is a, c, g, or t
  misc_feature (231)..(288): n is a, c, g, or t
  misc_feature (303)..(436): n is a, c, g, or t
  misc_feature (491)..(508): n is a, c, g, or t
ttattttccttatttttattctattgaccttacctgtaataataactatatttaacttctannnnnnnnnnnnnnnnnnnnnnnnnnnnnnnnnnnnnnnnnnnnnnnnnnnnnnnnnnnnnnnnnnnnnnnnnnnnnnnnnnnnnnnnnnnnnnnnnnnnnnnnnnnnnnnnnnnnnnnnnnnnnnnnnnnnnnnnnnnnnnnnnnnatccgttaatctaaaatttgatnnnnnnnnnnnnnnnnnnnnnnnnnnnnnnnnnnnnnnnnnnnnnnnnnnnnnnnnnntttcctcatgatatnnnnnnnnnnnnnnnnnnnnnnnnnnnnnnnnnnnnnnnnnnnnnnnnnnnnnnnnnnnnnnnnnnnnnnnnnnnnnnnnnnnnnnnnnnnnnnnnnnnnnnnnnnnnnnnnnnnnnnnnnnnnnnnnnnnnnncctacctattggctgatgacacggccgacaagacgccaatactgcagcccttacnnnnnnnnnnnnnnnnnncattggggacttggctttcgtatacaaaacctggctctgcctaaatcacaattcctggaa

SEQ ID NO: 1569 - DNA, 567 bp, Cricetulus griseus
  misc_feature (182)..(201): n is a, c, g, or t
cctaggcagcattaagatattcttatttattgttttgggtcttcctctcaatttatggcctggaactcagagatttgcctgcctttgcttcaaaaggctgagattaaaggggttaactccatagccacctccagaagacatcccaatagctaaaaaaaaaagttctttcacaaagtttgtannnnnnnnnnnnnnnnnnnnccttagtaagggtaccagttgaagcagaagcacttcttcccttacctgttatgtatccttagaatgaattgaatcataaattggagccaaaggcataaacaaaatttggtataaaagactgttcgagttgaatattaataccagtatttatgttggagagtttttatttttctgtttaaaaaggggtaatgctgtattttaaattagaggaaaaattcagattttaagccagtggtggttgatattagatgtcctgcatatcagatatttgattatgattcataacagtagcaaaattacaattatgaagtagcaatgaaataattttatggttggggggccaggtcaccatcacataaggaactg

SEQ ID NO: 1570 - DNA, 567 bp, Cricetulus griseus; identical to SEQ ID NO: 1569
  misc_feature (182)..(201): n is a, c, g, or t

SEQ ID NO: 1571 - DNA, 569 bp, Cricetulus griseus
tttatgagtcgccctaaattccctatacaaaaatacgtctttaatgaaaacggattgatcttccagacatggaaggaacaaagaaggttcaccctgatgacactgaggaactttggattaggaaagaagagcttagagcagcgcattcaggaagaagctggacatcttgtggaggccatagcagaggagggaggacagccttttgaccctcactttaagatcaacaatgccgtttccaatatcatttgctccatcacttttggcgagcgttttgagtatcatgacagacaatttcaggagctgctgagattgctggacaaggccatgtactcaggttcctcagtgatggtccatttctataacatcttcccatggataatgaaatatcttcctggacaacaccaaacagtaatagctacctggagaaaactgaaatcatatgtttctgatgttattgacaatcaccgtaaagactgggaccctaatgagccaagagacttcattgatgctttcctcaaagaaatgacaaagtacccagacaatactaccagtttcaaagaagaaaacct

SEQ ID NO: 1572 - DNA, 554 bp, Cricetulus griseus
ggtagggttgcaagtttgagaccagcctgggctacatgaagaaatcctaagcaaaatagagaggagatactttcctcaataaagaatactgttcatttccttagggaataatgactttggttggtggtgtcctttattttctattgccctgaactttgtgggggtagataatgaatggacataaagtagcaaggaaaaatgagtaacctaagaacaaatgttttagctatgtaatcttagtggctaatcttaaaatgtttattttgtcataatttttgtccatagagttaaaatttttctataaagcggatctaagtatctcttttctgtcaagaaatggacataaattaaaataatgactataaaatagataagaatttgtagtcgtcactatttgaatagtctcactttcattttggtcaagccgtgtagaaactggattgaaaggatctattcaaaaatggctgtttaactggaagaaacagtatgttacgttcttgacaaaggagataatttgaggctatgaaataaatagtattccctaggaactatat

SEQ ID NO: 1573 - DNA, 580 bp, Cricetulus griseus
gagaggtggcttgcaaagatgtgcaggtgcatttcatgaaaaccagtgctgctagcacaaactgggcacgaagatgactgctgaagctgagatcctgacaggcgccctaggttctttagttttagaagtaacctggaagcctttagttttggaaatttcagaacccctgagctggtttgtgtatggctgttttgggaattaaaacttaaatgatggaaagctgtatgtcaaacgacagcagcttagttaggtaacccttgtttgagattgtctcaacagaaagggaaattgagatgctcttctgttgagggtgttagttctcaaggctggagtcagaagtgctggtgtctaagactggatctgtccacacgacgcggcactatgcttaggtgtcattttgcattgtaactataggaaggaggtatgcattgtaagagcaggttatgcctacttcctgggcaaatggctgtggtggaagccagcagtgctgttttggagggggatgttcatgcctgcatgatactctccattcttgatctctgtccactttcctgctaattcacatctcaagacaaatgcc

SEQ ID NO: 1574 - DNA, 174 bp, Cricetulus griseus
  misc_feature (119)..(137): n is a, c, g, or t
agtaagtccttaaaaaacaaagactgctgtcttaggcaagattgattagcacattctgaggtctggtctatttgcccaatggatgggcctggacaatcgtgaccccccaccccaaaaannnnnnnnnnnnnnnnnnnttggggtttttgcctttaaaaaacccctgtgcttggg

SEQ ID NO: 1575 - DNA, 555 bp, Cricetulus griseus
tctgacacatacatcaaagcatgtcagtttttctttttttccactgtgtgggccaggttcaaaatatgactgtattcattgttgagtgtagaaagctagccttgactcttattttaagaaattatgttagcacagtaagaaagattctcttgaaatgcatcctccccaccatcccccccacccccacccccagaaaaggtgaggacttttaccagtgggaatgttgatgtttgcagtcatctctccatggtcaaagtaactattgcatgtgagttttagtgagttacaaaaagcaacctaagtttaaaaaaaaagtagagaggactctagagaatgcagaggagaattcttccagagtctatatttatttataatgcccaccatgatccagccaaccttgctttgctataggagagccatgagatggaggtgtgattcctccaaacagaatgtgagtggcaggatgagtcctacctatctccacctgctttccctgggaaaggagagcacatggcaggttgaccagccattgccgtggatgctactcggtggtgc

SEQ ID NO: 1576 - DNA, 578 bp, Cricetulus griseus
aagagcgagatggacagagacttatgtgcgctggtcccctaagggcacctacctggccacttttcatcagcggggcattgccctctggggaggggagaagttcaagcagattcagaggtttagccaccaaggcgtgcagcttatcgacttctctccatgtgaaagataccttgtcactttcagcccactgatggacactcaggatgaccctcaggccatcattatctgggacattctcacagggcataagaagagaggattccattgtgaaagctcagcccactggcccattttcaagtggagccatgatggcaaattctttgcaagaatgactctggatactcttagcatctatgaaacaccctctatgggccttttggacaagaagagcttgaagatctctggaataaaagacttttcttggtctccgggaggtaacatcattgccttttgggtgccggaagacaaagatattccagccagggtgaccctgatgcagctccccaccagacaggagatccgggtgaggaatttattcaatgtggttgactgcaagctgcactggcagaagaatggag

SEQ ID NO: 1577 - DNA, 493 bp, Cricetulus griseus
aatataagacagtgaatgattgtcttcaatagaaaacagaaatgacttgaagaacaatacacaagcttatcctttgaccttcatattcacacatagctccccacccccatgaaggtgattggattgcaagtgcagtacttattgatgactcagtgactacatcatgtttaaatactgtgctttcccactcgagatctgtgcataatattttaaaaagtgtaataactttctccaatgacaacctctgatactccacctaacacttccacctcacatattgtgaagccctggaatcttatcaccccttttagaaaatgtatagaggcaaatgttgcttttgacccttatgcttgcaatttcaaccagacgctaataaaatttatttatttgttatgccacacttctgaaccctaaatgctagaacttgggcgccaaataatggaaaagaagcacttctttactttgttataagccttatttttccaaaagttat

SEQ ID NO: 1578 - DNA, 600 bp, Cricetulus griseus
gtcgacccacgccgggcgggactctgtccaactacaagctgagagccaaaaccctgtcaggatctagatctgcctgctcccttcacactcaactttcagctgaaaggaatcgatgtatgggcggacatacaacagcggaacctgctggagggactaataggactacctccagcgattgacgaagaactattcagagaagacacagaaggagatacctcaaaactgaaacataacggcgaggggaagacggcgcctgtagctaaaatcactaaaacagattggtcgaaccgactgggtaccatctacccctatagaccttcaactagactactggacacaactccaacctgtggtacctggacagacaggactcctggatgcctgaaaaaaacatgtgcgaccattgtactaagaccatgggatatgccacctgtgctcactggaagatacaggaaatgccgtataaactgctgggtcaccaccccaagatcgctttatccttagcggacacaactaggctgtgtgctgacctacataactctggggatatagcgcacaaactgtctttgccagcttttcctggtaacgtgcaccctcaag

SEQ ID NO: 1579 - DNA, 562 bp, Cricetulus griseus
agttcctacctgtgattgggcacaaaaagccggaagtcacaaatgtgtgtagcatttttgagacaggatgatttggccagtgaactggcccggaaagaaccaaaaggggaaatcagggggctcactgagctggaactcaccgtggatccggaacatcacagggtattaggagtccctgatggcagttaggcaggccacggggccctgaggggcaaagcgggttttcacaaaggggcgtggatgaaacatgctcaaaacccgggggatgatgacctccttgtccttgggcgggggggggtaaaaccggttgttgaacaaatagcctgtgaaaacactcacctcaccagggatattccaccagggctggcccagttcctgacctggagggggcaggaaggcccggaagtggcggccaccaaactttgcatttggtgaggctgccattgtccatttgcggaggcctgacaaaccaaggcgagatacccctaggaagccatctttgcttttggtcatggtctttgagaacaaaggctggaaatcggccttccatggtaagaatctc

SEQ ID NO: 1580 - DNA, 503 bp, Cricetulus griseus
ttcaaggttaaacttattggcagtctcaagagtatcagaattcagttaaaatctcccacaacacatgcatacccacacctagtcatacacatttgttaaaaatggagagggccacattaaacccatttaaattattctgaaatttttgcatttacttaaaaaccctcaagatcctcaaagctattttccgagaaaaagtagccaaaattctgaaggctgtatcactgtgttcctgcctccaatcaactgaataagaaattgctactttaaaaaaaatataaacaaataaaatgaaaaccaacaatacaagggcattttcttagttcacagaattatcatgggctgattgcactgtagggatttccacctatataaacagaactattatttccacctgtgaacagaactaacagacatatattttaatttgtctctctgaaaagtcagatgagacaaagaattgcaagctgcagaagcagaatgtaggaagaaaacttctgaag

SEQ ID NO: 1581 - DNA, 505 bp, Cricetulus griseus
agttgtcttatccggagctggtattctttgtccatgtggtgtattttgctggtaattaatataaagagaaagtgaacttattttaagggaggtgcagaggtgaagaactagcttaaaactaaaaagttcagtctccagaagtaagaattcaagtagtttgatctgccctgctcagggccattttctgtgaagtgcacccactttattgtctgactaaggtgggacttgggtgctgtactgattctagtgttccaacagtttggggaatacatgtgacttcaattccctccttatttgtgacgtttagcaggagagttcaggctcctgaggcccttgagatggaagaagggctaggtctcctgggagactagttgaaagccaacaagacttattttaagttgcatctttttgaaaggccctggctgggaagtcctgggcagtctagctctgccactacagtacccctctgagtagtttggcaagggtgctcattggcatgcaatgt

SEQ ID NO: 1582 - DNA, 505 bp, Cricetulus griseus
  misc_feature (133)..(153): n is a, c, g, or t
tcgaagcgtttggcccggcgcgccggcttccatggagctggaggggcagtggtggcgaagacaactggctgcggacattcaccaagcgcttcggtacaaagagctgaagttgccttcttacaaaggccagtcnnnnnnnnnnnnnnnnnnnnnatattttgctgatttgattgccatagtgagcaatcgcttcacactctgcccttctgcccgacatcttgctgtctatttgctggacctgctcatggatcgctatgacatctctattcagcagctgcatttagttgcactttcctgtctgcttctagcaagtaaatttgaagagaaagaagacagtgtgcctaagctggagcagctcaacagcctgggctgtatgactaatatgaatctcgtgctaacaaaacagaatttgctgcatatggaactgttactattagagacctttcagtggaacctctgccttcccacagctgcccatttcattgagtattatctctctgaagca

SEQ ID NO: 1583 - DNA, 505 bp, Cricetulus griseus
ttcggcagactcacgcaccaactgtgaggagccgggggtttgtgcctgggaaggccgcgtaccgggaggtgcccgactggtgggagctgtggccggcggagcccataagcccggcgcagtcccgaactcggtcgcctcttgcccctgtaggcactgtcatggcgcagttcgtgttcgagagcgacttgcactctctccttaaactggacgcgcccatccccaatgcacccgttgcgcgctggcagcgcaaagcgaaggaagccaccggcccagctccctcgcccatgcgggccgccaacagatctcacagcgccggccggaccccgggccgaactcctggcaaatctaattccaaggttcagagcacccctagcaaacctggaggtgaccgctatatcccccatcgcagtgcttctcaaatggaggtggccagcttcctcttgagcaaggagaaccagccagaagacggggagacgcccaccaagaaggagcatcagaaagcctg

SEQ ID NO: 1584 - DNA, 578 bp, Cricetulus griseus
ggtgaaggagacgtgtgtgtctagttgtctactgacgcctccctccgggtagacccagaactttctctcaagactcacctccctcagcccaggtggtgtttacttctcaactgtcacagcttcatccgtctttggattcctctaaacctgtctgtgagcggatagccactagagacagttccaagaaaacctcgccacctgaagggcgatcagcacccagaaactagaacttccagtatcctttgcgcgcggctaaggggcggggattcgggagccgcctcccgctaagagatggcagagtcctcggggtctccgcaccgcctgttgtataaacaggtgggctcgccgccctggaaagaagctttcaagcagggatgtctcgagagaatgagaaacagccggcacaggctcctggccaggtaccgccaggctggaggtggcacaccaaggaaagcctcagacagatttcttgtgcaagaagtgatggaggaagagtggaactctttgaagtctgtagagaattgtccagaaaccttgtttcaattgggactgccacgagacctaacctgtgctgcagg

SEQ ID NO: 1585 - DNA, 579 bp, Cricetulus griseus
acaagcaattaaagttacccagaaaaactgtggtatacattaaggaatcaaaagaaaccaaagtaaaagtgctcacgtactttttaaaccacattaggaagtattctccatcaatagtaagcttcccgcatacttgtaaattttacaaaagatgacagttaccttaacaccttgagtttcttgtgacatgatttccagggatctagactttcatttttttcattctacgttgcggagcactgattgcatgattatttacaaatttcttaaagaggaggcataaagtggcaaaatatttccactcttgtttttaacttcctttttctctgtccttggtgcctttcacatcatgcacctcaatcccgttcgttttcccatcccttcgtatccatcctctgcccctgaaacctccccccaaaaataaaataaaatttaagagaaaaaaaagggagaaaaaatcatcaatctcatcatggaagctgcagtggaacacagggaatcacgaactaaacccttttatacattatatctttacttgaagcgttccttgcacagaaatcaggctctaaacctcagggt

SEQ ID NO: 1586 - DNA, 566 bp, Cricetulus griseus
gcgcctctcggaagcaccggtgaccaacctcttccgagcacgcttcttggcctcccgcacagctttcatcccgcgcctttctcagcgtcgcccctcggagtcgccgccgttcctgctgccatccggagcacagtctcacactccaccagcttgccgccatgcccaagaataaaggaaaaggaggtaaaaacagacgtagaggaaagaatgagaatgaatctgaaaagcgagagctggtgttcaaagaggatgggcaagaatatgctcaggtaatcaaaatgttggggaatggacgattggaagcaatgtgtttcgatggtgtaaagagactgtgccatatcagagggaaattgaggaaaaaggtttggataaatacatcagacatcatattggtggggctccgagattaccaggataacaaagcagatgtcattttaaagtacaacgcagatgaagccagaagtctcaaggcatatggcgagcttccagagcatgctaaaatcaatgaaacagatacctttggtcctggagatgatgatgaaattcagtttgatgacattggggat

SEQ ID NO: 1587 - DNA, 578 bp, Cricetulus griseus
gacaccatgtgaaggtgccatgtgggggtcacggtgcgcctctgggatagctttgggggtgtttatattgtcaagagaaagggggccctgcttctgatattggtgctggcttccggcttgggcaaggggtagggacacaggctttgtttctggaggctgtgcttggcgctgtcatagaatttgttcctctgaccagccatgcatctagacatgttgtccaggctcctactaactgtgtgttgttaggttctcctgtgtcttggtgactcaaggttttatagcattgcacagtagaacttaagctttgaaaagggccttgtaattcctgggttgtagttggcctatttgtagcctgtcacagacttggggtaggcattgaacccaccagagcccatattctctccagagacccctggcttaagtgtccgtgtgaccagctccccagtttcctagaagcccgaggtcaccttccacaccctgtattcaggagactctgcaagccacgatagccctaatattatgtatggtgttgtgtctgtctgtcccctctgcgatcagcagggaagggcactggtgat

SEQ ID NO: 1588 - DNA, 579 bp, Cricetulus griseus
aagcaagtgtctattcacagaaatcagagaggggaaaccagcgtctcaacttctcagaaagtgaaggaagccggaagagacttcacctacttgatagtggtgctcttcggagtcagcattacaggtggcttgttctacacgattttcaaagaactgttttcttcatctagtcctaacatcatatatgggaaagccctagaaaaatgcagaatgcaccctgaggtgatcagtgtgtttggggagcctgtcaaaggctacggggaaatgtcgagacgtgggcggagacagcatgtcagttttattgaatatgaaaaaaacgggctaaagcgcatccgtgtgaaattctacattgagggctctgaaccagggaagcacggaacagtgcatgtggaagtggaagagcacccacagagtggccaatttgaatttcgatacgtatttgtggaagtggctcctactagatctattgtcgttgaagataatcgttcccaaaagagttaaaagaatcaaacctgcctgctgcttcctgtatgggataaagggattcattgcccctgtgatcttcacactctctttcag

SEQ ID NO: 1589 - DNA, 579 bp, Cricetulus griseus
  misc_feature (257)..(293): n is a, c, g, or t
ttaccgtggaagaaaaagcaaaggcagccagttattattagactgtgttctccattgtgtgtgtgttgcaactaaacccacaatgcatggtgttgagtcatagggctcataaggggtgattaggtaaccactcatgggatggtttgttgatcttcgttgtcatcctacttgctctagaatcaccgaggaggcctatcgttggccatgtctaagaggggatttccatgggagattagcggaaggaataagacccaccnnnnnnnnnnnnnnnnnnnnnnnnnnnnnnnnnnnnntgtgtactggtgctccgggggtatgtactcaacttttaagcaattagttcataaggcccagtaggccaaaaccttgcttagacaataagcggagctacacaaaggaaaatggcccccatcgaagggacccattaaatgaagagtcccctagatgataacattaatgtcttgattagaattctttctgtctgtgctgaatgtgtaatttgaaagcaaataccaaatgaccaaacaccacatgtgtctaacgatgtgcaacgttgcgataacacattccatacaatat

SEQ ID NO: 1590 - DNA, 600 bp, Cricetulus griseus
  misc_feature (499)..(499): n is a, c, g, or t
gattcccacgcccgagccaccccaggcagtaggtgggatatagatataaggagtgatcgacttgctgccccccgttgtagtccacgcgagacgcgccgcgcgggagacagagagaggtcgtgagaccaagatgaatattacgcgataatggcgcccacacgcgatatggtcgtccagtacagcgcagtctcaccagttatatgtttagtgcgagttgtgttagtttgaggcagagtattagtgatgcgcgagactattatatatcaatcaacgccaagatttagcgcaagcaggttgtttaagagtatctgattgtcccgcgttgtattggttttgttgtgaagagaaagaaaactaaaagggacacaaagtttagcgagggtgtatcgccgacacggcgctcttatctagccacgtattattgtatttaagccgctgggctcgccgggcagcagatattaaagagacaaccgcataataggagaatccacaccagcgnaggtaagagagaaggatgatcgacgtaaatatttggcggagcgacacccacccagcgagcacgagagggtgggtgggtggggaagatgagtgagagagaat

SEQ ID NO: 1591 - DNA, 565 bp, Cricetulus griseus
ggtgacgcggtgaaataagaaccgtgacacaatggatgcattgggggaacttgtgtgagacactggctttttctctgcactctgtggactatcactgtgagatttcagtaggcccatttataaagaagctgctgactcatggggtagtcagactgaaagggacctataacagagggtgagtcaagagtgaggaagcaattggaacaggtggtgatatgggcagcatgtggctggcagaaatgatgagacattgttgagttctttcactgtttaggtgataaccagtgagaatgcctatggatgtggggtatgaaagagagaaggaatgctaagtaacttcaaggcttattgggcaacaatcagaacaattggaggaacgtattgctgcagaaaggggattaggttctcattgggtgtgtcacctttctgacttcagttgagatagctgggagacaggagtaattcataggactcagttgtagacactctgtctgcatagtcctaatataaacctgtgacactagatgtgttcattgaatgcactgtttaagataaaaagcagaat

SEQ ID NO: 1592 - DNA, 578 bp, Cricetulus griseus
ttctctcaaaaggaaagctttctatatggcagggcaaggagacatggactccagttacggaaattacagctatggccaacagagatcgacacagagtcctatgtaccgaatgcccgacaacagcatttcaaacacgaatcgggggaacggctttgacagaaatgctgaaacatcatccttagcatttaagccaacaaagcagctgatgtcctctgaacagcaacggaaattcagcagccagtccagtagggctctgacccctccttcctacagtactgctaaaaattcattgggatcgagatccagtgaatcctttgggaagtacacgtcgccagtcatgagtgagcatggggacgaccataggcagctcctcgctcatccaatgcaaggtccgggactccgtgcagctacctcatccaaccactctgtggacgagcaactgaagaacactgacacgcacctcattgacctagttaccaatgagatcatcacccaaggacctcctgtggactggagtgacatatctggtcttgacctggtgaaagctgtcattaaagaggaggttttgtggccagtgt

SEQ ID NO: 1593 - DNA, 579 bp, Cricetulus griseus
cagtgcagtacttaaagctttgatcggtatctatgtgtattgatctgtttaaaactaaaaatgtaggactgcaaagacggctcagtagtcaagagcactggctgctcttccaatggacctggattcatttcccagcacccatatggcagctcaccaccatctctaacaccagtcccaggggatctgatgggctcttttagcctgcactggcaccagccacacacatgatacacagacatacataaagacaggatgtccatacaaataaaaataaacaaacaaataaaactaaactaagaaaatgttaacattttaatactgacagaaatttgtaatgatttaataaactcaatatggttataagggtaattaagcccagctttttttccgtgagtgtcaaccctcctgaaattttatatttttttcaaagtgtatgtgggggtgggaaggtagtaaggggtaccacatatcttggaactggagttaaaagcagttatgagctgccccatgtggttcctgagaagctaacctgggttctctggaaagcagctagtgcttttaactgctgagctattttct

SEQ ID NO: 1594 - DNA, 580 bp, Cricetulus griseus
  misc_feature (17)..(59): n is a, c, g, or t
  misc_feature (86)..(139): n is a, c, g, or t
  misc_feature (152)..(220): n is a, c, g, or t
  misc_feature (232)..(300): n is a, c, g, or t
  misc_feature (313)..(366): n is a, c, g, or t
  misc_feature (421)..(458): n is a, c, g, or t
aatattgtattaacttnnnnnnnnnnnnnnnnnnnnnnnnnnnnnnnnnnnnnnnnnnnaatgtctacgcttctatgtttaaaaannnnnnnnnnnnnnnnnnnnnnnnnnnnnnnnnnnnnnnnnnnnnnnnnnnnnncgataggtatgtnnnnnnnnnnnnnnnnnnnnnnnnnnnnnnnnnnnnnnnnnnnnnnnnnnnnnnnnnnnnnnnnnnnnngtagtgtcaaannnnnnnnnnnnnnnnnnnnnnnnnnnnnnnnnnnnnnnnnnnnnnnnnnnnnnnnnnnnnnnnnnnnnatactcctacctnnnnnnnnnnnnnnnnnnnnnnnnnnnnnnnnnnnnnnnnnnnnnnnnnnnnnnttcttaaccaatactttatctatagcaactttatgacacataaaccaaacacgcnnnnnnnnnnnnnnnnnnnnnnnnnnnnnnnnnnnnnnctgatcataaattatatcagttactctgacttttaccacttatactacctacctggtcgaaatgatcattaactaacgaaaccgactaccccacacaaccgtatattttctctacctaacct

SEQ ID NO: 1595 - DNA, 578 bp, Cricetulus griseus
  misc_feature (525)..(525): n is a, c, g, or t
atgcagaggtcaccaaacaggtgtccgtggccaggcaagcccaggtggatttggaaagagagaaaaaagaactagaagattcctttgcacgtgtaagtgaccaggcccagcggaagactcaagagcaacaggatgttctagaaaacctgaagcacgaactagccagcagcagacaagagctgcaggtcctccacagcagcctggaaacctctgcccagtctgaagcgaagtggctgacacagatcgctgaactggagaaggaacagggcagcctggtaactgctgcagctcaaagagaggaagagttctcagccctccgagaccagctggaaagcacgaagatcaaactggccagtgcccaggaatccatgtgccaacaggtaaaggaccagaggaaaatactcttggcagggtccaggaaggacgcggagcgtgagatacaggaggcactgagccagcttgaagagcctgctctcatcagctgtgcagggtccacaggtagtcttctagatgcccacctgctgngcccagcagcctggtgcttcctgttggggttgaatgccacaggaagcatagct

SEQ ID NO: 1596 - DNA, 579 bp, Cricetulus griseus
  misc_feature (258)..(278): n is a, c, g, or t
  misc_feature (309)..(331): n is a, c, g, or t
aatgcattttatttacttctagcttctaagttttacttttgattagcaattctttatagtagagtgtaatttaatacccctttgaaggaagatacctttgtcccatatgctgctgtcattcatgtattttagttaaatgggcagacaggttctggtggaatggcatatttttaataaatactaatgatctttctagttttctttgctctttcagtgtccacatttttttgtttggtttgttttgttttttcaagacannnnnnnnnnnnnnnnnnnnngtgtcctggaattcactctgtagaccagatnnnnnnnnnnnnnnnnnnnnnnntcctgcctttggcttgattacagtcagtcaactttcagaactggaagttgtcttcctggctggtagactactctgcttaaagaagcttttgtagttttccatgaataagaaaaataggttgaatcaactcaaggttgtagcacatgatcagttggccacaaaatggttttgatgaggcattaaacgtattataaacagccttgctattcctttgaaatgtacatttaaaaatatctaaagtatatctg

SEQ ID NO: 1597 - DNA, 580 bp, Cricetulus griseus
tttggctcagtgcttagctgtggatatctgcttctgcttccatcagctactggatgaaggctctaggatggcatttaaagtagtcatcaatctcattataggggaagggcatttaaggtagcctcaccactactggttagactcttagttgggagctatttgtgtgtcagtcttttgtgtagtttataaagcatttttgtcagatatatattataaacacaagacaatgaagagttaagagccatggaatcaaggaaatccaaattgtgtccatgatgactcaccatgataaatcttattgaagtgattgaaacactaagaaaattggaatgagatagcaaattttccatagttaaatttattcatctttttattctgtttttttcattttattgtatttaaataactatttgtgaaattatagtaaaaattatagttgagtaactacacatacttatgtacaaaatgaatctttagatatatttggttcatttggaatacccacagaattcagtgaaacagtagctcacttaaaggcattgaatattgaaaagaagttatatgtacatatctatagaaa

SEQ ID NO: 1598 - DNA, 579 bp, Cricetulus griseus
tagacattgactgaatgtggcagcagaccctattatgaccagcctctagtttcagaaaacctcagaaactctggcctgttttttcatgagtaacctgtggtcttagttaggatttccattgttgtgaagagacaccatgaccatggcaactcttatcaggacaacattttattgaggtggctcacttacagttcagaggttcaatccattatcatcatgatggagagcatggtggcgtgcaggcagatatggtgctggctacatcttgaccagaaggcagcaggaagtcaactgacagtcactctgagggaagtttgagcaaaaagagatctcaaagcccgcccccaaagtgacacacttcctccaacaaggccacacctcctaatagtgccactccctttgggggccatcttcttccaaaccaccacaactgtattgtgtactcaatcttctgaatgggagtaatagaaacgtctgttgtaatcaaaaggtatttgactacatagccaagaatgtttgtatatctagctattctcattctcaaggaggtccaacaactaaaccaatgaagagtagtga

SEQ ID NO: 1599 - DNA, 86 bp, Cricetulus griseus
agtttacccacgcgtggcggctagcatggtccactgatcggtaccatcacgtcaaaccaagtacaaccgaggaaggatacctagct

SEQ ID NO: 1600 - DNA, 234 bp, Cricetulus griseus
gggttctgaattttctttgtctttagttttggcacgacgctccaggaggccaaaggatctaaagtttctttgtgttaaaggcctacctgtcttttttgtacccggtcatggttgttaaaccagggagctgagggagggtctggcccctttatttttaaattattaaaacccttttagtttagttaacccttttaagttttaaatagggggcttattttatacaggaaggagggc

SEQ ID NO: 1601 - DNA, 210 bp, Cricetulus griseus
ctcatagaaggaaaaaaagaggtgtgtcttatgaatggccataccaacccgctggggaattcctttaaagattatgttttgaggagatggtctcactcctggagggcgctcatagactttgaatcttgctaacgtaggaaggtggcaacgttgagatgcatcattctttccatcctgaccttaatgggaactttgcttttctcctcttta

SEQ ID NO: 1602 - DNA, 601 bp, Cricetulus griseus
  misc_feature (2)..(112): n is a, c, g, or t
  misc_feature (124)..(124): n is a, c, g, or t
gnnnnnnnnnnnnnnnnnnnnnnnnnnnnnnnnnnnnnnnnnnnnnnnnnnnnnnnnnnnnnnnnnnnnnnnnnnnnnnnnnnnnnnnnnnnnnnnnnnnnnnnnnnnnnnncaggatgcctcngattatgatcaaggggggcgtgtggaggaataccgaggatgagagggtgaaagcagcggtaatgaaatatgggaaaaaccacaggtctaagattgcctcattgctgcataggaaatcggcaaagcagtgcaaagccagatggtatgaatggctggatccaagcattaaaaaaactgagtggtctagagaagaggaagaaaaactgttacacttggccaagctgatgccaacgcagaggaggaccattgctccaatcattggaagaacagcagccccatgttcggagcactatgaattcctcctggacaaaactgcccaaagggaccatgaggaggaaacaacagatgacccccgaaagcttaaaacctggagaaatagacccaattccagacacaaaaccacctcggcctgaccccattgatatggatgaagaagaacctgaaacgctttcttaagcttcgacccccccgtggttaa

SEQ ID NO: 1603 - DNA, 580 bp, Cricetulus griseus
caatcaggctatggcagtcatcaaagagaagattgaggaaaagaggggtgtgttcaatgttcagatggagcccaaagtggtcacagatacagatgagactgaacttacaaggcagatggaacggctggagagagaaaatgcagaagtggatggagatgatgatacagaagagatggaagccaaagctgaagattaaccttgtagaaaacagtccagtttaaggaatacaaagcagcccttcctggctgtaaaccctagacttgaaagttttccagtattgaaaacttcaaagctgaatatttttatttccaagtatttaagtattcaacaaaccagaatcaaaatgccctccttcctgtcagctgtttcacacagaagctttaacacctcaagcatttttaatggagtggcttgatttgaccagagacaaatcttaaagagcaatcctaaaattaggctttcagtttccatttctgatgttcatggattggcattcttatggttcaatgcctccatgagattcaccaggggcacctaagacaaacagtcccaacctttccatataaaatgtattcaagca

SEQ ID NO: 1604 - DNA, 581 bp, Cricetulus griseus
  misc_feature (283)..(324): n is a, c, g, or t
actgaaggaagtatttagtatggctggtgtggtggtccgagcagacattctggaagataaagatgggaaaagtcgtggaataggcactgtgactttcgaacagtccattgaagctgtccaagctatatctatgtttaatggccagctgctgtttgatagaccaatgcacgtcaaaatggatgagagggccttaccaaagggagattttttccctcctgaacgaccacagcaacttccccatggacttggtggtattggcatggggttaggacctggaggacannnnnnnnnnnnnnnnnnnnnnnnnnnnnnnnnnnnnnnnnnaaacctatggcctgcagttttgtttgcattgactttttcttttaaaggaatgggaatggaaggcataggatttggaataaataaaattggaggcatggaaggaccctttggtggtggtatggaaaacatggggcgatttggatctgggatgaacatgggcagaataaatgaaatcctaagtaatgcactgaagagaggagagatcattgcaaatcatggaggaggtggagctggaggcactgtcccaggatcgagag

SEQ ID NO: 1605 - DNA, 569 bp, Cricetulus griseus
  misc_feature (29)..(47): n is a, c, g, or t
  misc_feature (84)..(129): n is a, c, g, or t
  misc_feature (162)..(288): n is a, c, g, or t
  misc_feature (301)..(381): n is a, c, g, or t
  misc_feature (383)..(441): n is a, c, g, or t
  misc_feature (449)..(486): n is a, c, g, or t
  misc_feature (500)..(524): n is a, c, g, or t
acttttctctactaatcataaagacatcnnnnnnnnnnnnnnnnnnnttggtgcttgagcaggaatagtaggaactgcccttannnnnnnnnnnnnnnnnnnnnnnnnnnnnnnnnnnnnnnnnnnnnngagatgatcaaatctataacgtaattgttacannnnnnnnnnnnnnnnnnnnnnnnnnnnnnnnnnnnnnnnnnnnnnnnnnnnnnnnnnnnnnnnnnnnnnnnnnnnnnnnnnnnnnnnnnnnnnnnnnnnnnnnnnnnnnnnnnnnnnnnnnnnnnntttgattactacnnnnnnnnnnnnnnnnnnnnnnnnnnnnnnnnnnnnnnnnnnnnnnnnnnnnnnnnnnnnnnnnnnnnnnnnnnnnnnnnncnnnnnnnnnnnnnnnnnnnnnnnnnnnnnnnnnnnnnnnnnnnnnnnnnnnnnnnnnnnactggagnnnnnnnnnnnnnnnnnnnnnnnnnnnnnnnnnnnnnncatccatcactatnnnnnnnnnnnnnnnnnnnnnnnnngaacaccacttttgcgtccgatctgatctaattccaggtgggcta

SEQ ID NO: 1606 - DNA, 580 bp, Cricetulus griseus
  misc_feature (122)..(137): n is a, c, g, or t
  misc_feature (139)..(161): n is a, c, g, or t
atctcctcctttggaaaatagaaagtatatgtcttgcagtggaattcagaaacagactccggggtgaccatgtagccttcactaactagacttaaaagattttatgtggtttggcctaagcnnnnnnnnnnnnnnnngnnnnnnnnnnnnnnnnnnnnnnntatctgccaaactgagtgcacgacttcatataggcttctcctttaaaatacaaaatgaagcaaaatgaaaaactgtggaggatgcatctcatttaataagtatgcttattcctattagcaagtttgcgactgaaaagactgtcaacttgacataggagaatttcttccactctggaggaaaactgtaaagtagagtgattttgtgtttgtttagaaagcaggcatgtggtgtgtgtgtatacagtatgcttttctttaaagataaaaggatactatcttaaatcttctaggggatagaagaatctagtaaaaaaaatcagtattcatttagaccatggaagaaacaatatccttaccactttaccttttaatgaaggatattgaaacacacatgaaaggctgggaatgtgagtttatca

SEQ ID NO: 1607 - DNA, 579 bp, Cricetulus griseus
  misc_feature (305)..(345): n is a, c, g, or t
  misc_feature (365)..(380): n is a, c, g, or t
ggagacctgagctacgctttttcatgcttattctctgtttagcttttctttggctgaagtctgaagctcaggcaaagtgaccagactcttttacccctgcactccacccccccatcagttttggcatgtttgggataggtttgctttaatttctcctctgaagcgttgaggcacaactaaaacacctagtgccagctggtagtgggttctgttgtgacccctgcctgacccctccaggtttcagctctgatggaggtgtctggtcctctctaggactcagctgatctccccagggcactttgtcnnnnnnnnnnnnnnnnnnnnnnnnnnnnnnnnnnnnnnnnncatgccatgggcctggagannnnnnnnnnnnnnnntctcaagggctgattatatgcttttttgagatgtgtgtttcgtgtcccccactccctgggctctgcctgcccttcagatcctcctcctgttcacacttatacctgggtccaagacttacacccagaaacctctgaccttgtgtggtgctctcctccctgtcccctctgccacccaacatatctggggtcactgcagacg

SEQ ID NO: 1608 - DNA, 579 bp, Cricetulus griseus
  misc_feature (44)..(77): n is a, c, g, or t
  misc_feature (515)..(537): n is a, c, g, or t
aagtccagatccgcgcggaggtccaagtccaagtcgtcgtccgnnnnnnnnnnnnnnnnnnnnnnnnnnnnnnnnnngagatccagaagtcctccccccgtgtccaagagggaatccaagtcccggtcgcgctcgaagagcccccccaagtctccagaggaagaaggcgcggtgtcctcttaagaaaatgatggatcgacaagcagcttaacagaggactttgagggaaaggaccagaaactcagtccatcggtccatggaagagtccttggaacaagcaactggctattgaaaaggttattttgtaacatttgtctaactttttacttgttttaatctgcctcaggtggcaaacttcattttatgtgccattttgttgctgttattcaaatttcttgtaatttagtgaggtgagcgacttcagatttcattattggattggatatttgaggtaaaatttcatttttgtttatagtgctgactttttttgtttgaaattaaacagattggtaacnnnnnnnnnnnnnnnnnnnnnnncccgccaccgggggggaccctccacctttggttcccttttgg

SEQ ID NO: 1609 - DNA, 521 bp, Cricetulus griseus
  misc_feature (11)..(33): n is a, c, g, or t
  misc_feature (61)..(117): n is a, c, g, or t
  misc_feature (121)..(139): n is a, c, g, or t
  misc_feature (156)..(219): n is a, c, g, or t
  misc_feature (222)..(264): n is a, c, g, or t
  misc_feature (266)..(280): n is a, c, g, or t
  misc_feature (282)..(298): n is a, c, g, or t
acggccgccannnnnnnnnnnnnnnnnnnnnnngtccctttttagtgaagggttaattgcnnnnnnnnnnnnnnnnnnnnnnnnnnnnnnnnnnnnnnnnnnnnnnnnnnnnnnnnnattnnnnnnnnnnnnnnnnnnnctatacattacgcgtgnnnnnnnnnnnnnnnnnnnnnnnnnnnnnnnnnnnnnnnnnnnnnnnnnnnnnnnnnnnnnnnnatnnnnnnnnnnnnnnnnnnnnnnnnnnnnnnnnnnnnnnnnnnngnnnnnnnnnnnnnnnannnnnnnnnnnnnnnnncgttaatacactattatagaaacccgaaacgtggggtttggccctctatttcgcagtattaccaccccttttttgggcttgtacctcccagaggggaattacttttttgggggcccacgaacaattaacctttttcacctttcccttatattggcccccccttaaaaaaaaatctggggggggttctttgggaaaaaacccccctaaccccgcttttgggatt

SEQ ID NO: 1610 - DNA, 579 bp, Cricetulus griseus
  misc_feature (528)..(528): n is a, c, g, or t
agcggacatcaccgccatggaagtccagctttaggaaccttcagtgaaggttaattgcacgcttgccctaataaaggacatagctgtgtactttgtgaaaatgatatcccctcaagaggaatgggttctggtggtggacatcgcccccatgaaggccctggacatgggggacctcatggccaccggccgcatgatgtccctagtcatcgaggccatgaccaccgaggtccaccacctcatgaacaccgtggtcatgatggccatgggggaggcggccaccgagggcatgatggaggccacagtcatggaggagatatgtccaaccgccctgtctgtcgacatttcatgatgaaaggcagctgtcgctacgagaacaactgtgccttctatcacccgggggtcaatgggcccccgctgccgtaagccggccccaccccgcccgcacccctgtggactgcagccttgctcctttcactcttatggcttctgtgaggcctacttccccttttccccagctgatgaggagcncgccccctccgttcccacctggttgagttcctggggggttctgatcactgg

SEQ ID NO: 1611 - DNA, 567 bp, Cricetulus griseus
  misc_feature (385)..(403): n is a, c, g, or t
gagagagtgtgtgcatgtgaatgtctctgtgtgtgtgaatgagtgcgcgcgtctgtgaatgagtctgataggtgtgtgctggggtaaattggtgtgcccgcatgtctgtctgtctgtctatctgtctatctatggaaagagttggatagtcctggtggttgagcacctgcctgcctagcatgtttgtggctctgagttccattcctaacactgcacagtgtgggaagtgcactgtacatagtacaatagagcttttgttttggatgaactcatgttttttggaaacttcgtattaatggggttgctaattgagctaaaaatttgcaaatatttaggggggtttgttgtttgccaaatgatgggtgccttcctacttcagtctccnnnnnnnnnnnnnnnnnnnttgacttaaaaatggaatgtgttctgtgcttgcattgccagctgttaggtgtgtccagggggagatggtttattgctaaatggcattcacaataaagggggagggccttgtttttcttaaccttgttcttattggggatgattttgaaatctcaaattctaata

SEQ ID NO: 1612 - DNA, 580 bp, Cricetulus griseus
attgaaccctggaccttaggcatgctaggcaagcactcaacaattgagctacagctacagccaatggcagtagctctcacaaagctcttaaagagctctgcttttagaactgggacacttgctagagcatctgtgctgtgtggaagcccaggtgctccagacaagagcttagctgaggtccccactcctggctgcctgccaccaacagtcgtgtgtgttatgttttaaatctgaaatgtctcccatgggctcccatgcttgaacacctggtacccaacttgtgatgctctttcaggggcagtgaggcctggttggtagagcagtcactgggagcaagcctttgagggttatagcatggcctgtttctttgctttctagttggcagaaaatgaacaagcctctgccacatgctcccccggctgtcacagccataactcgtgtcctctaaagtgtgagccaaaatgaacttactccttttgtaagactgtgggacgttttaagtttgcaaaatgttttatattgtgaagttgatattcatgcataatttgggggatacacaagaaaagaattgttgcagctc

SEQ ID NO: 1613 - DNA, 566 bp, Cricetulus griseus
acctgacgctgcagtataacatctacaatgtgggctccagtgcggcgttagatgtggaattatctgacgattccttccccccagaagactttggcattgtctctggtatgctcaatgtcaagtgggaccggattgcccctgctagcaatgtctcccacaccgtggtcctgcgtcctctcaaagccggttacttcaacttcacctcagcaactattacctacttggcccaggaggatgggcctgttgtgatcggctcaacaagtgctcctggacagggaggaatcctggcccagcgggagtttgaccggagattctccccccattttctggactgggcagcctttggagttatgaccttgccttccataggcatccctctgctcctgtggtattccagcaagaggaaatacgatacccccaaacccaagaagaattgaatgcagtgtttccttggcccttttctcccacaaaaccaggtgttttccagacttcatagggtgtcaaatgtgttctcttggcccttggcctatggccatcttttcctggatcctaccctgaactcaacc

SEQ ID NO: 1614 - DNA, 581 bp, Cricetulus griseus
gtgggtaaagagtgagtagcagatagaaaccacgagacagagaacatctcaaaccaggtgctcacacatgcagcagaggtgactggagtggcccaactgagtgagcaggcaaaggtaccatctaaccaggacaggggtacaaatgtccaggagaaatcccctggggaagcttcactgaggcatcaatagagtgcctactgccaccttcccccttcacccccagtgatgctttcaagggaaagaacaaagggcaatagatagatgacatcatcaaatcaggccctcacgacatgcagcagaaaccaaccagagtagtctagtccatcagctaaggttcccaggtgagatttatttccatgaatgagagtccccggctgaaattcccggtttccactccaccacacgaattcttacattatggaataaaaatcatcatctagattgggaatcgttcaccttctaattggtctcagggccacataattttaatactcttaagggtttgctgttttcccttctttttattaccaatttagggggacagcctgtctttaggcagatgctagggagggcctctttta

SEQ ID NO: 1615 - DNA, 578 bp, Cricetulus griseus
ctgcgcggtcggctgcgtcaagatgaagctgaatatctccttcccggccaccggctgccaaaaactaattgaggtagacgacgaaagaaagcttcgtactttctatgaaaaacgcatggccacagaggtggctgctgatgctctgggtgaagagtggaagggttatgtggtccgaatcagtggcgggaatgacaaacaaggttttcccatgaagcaaggcgttttgacccatggcagagtgcgcctgctgttgagtaaggggcattcttgctacagaccaaggagaactggagagaggaagcgcaagtctgttcgaggatgcatcgtggatgccaatctgagtgttctcaacttggttattgtaaaaaaaggagagaaggacattcctggactgacagatactactgttcctcgtcgtttgggacctaaaagagctagcagaattcgaaagctttttaatctctctaaagaagatgatgtccgccaatatgttgtgagatagcctttaaacaaagagggtaagaagcccaggaccaaagcacccaagatccaacgacttgttacgccacgtgtcctac

SEQ ID NO: 1616 - DNA, 580 bp, Cricetulus griseus
cccaactctagttttttgttcagtaggtatagggtggggagtgccagaatttatatttctgacaaactttgtgaatattgatgcagtttgaaatccactacaggagcaagggctggtaagatggctcagcccataaagctgagcaaacctagcaaccttggtttgttcctcataaaccatgtaaagatgaaaggagacaaccactacccactagccgtggcacctgaacatagtacatgcaaactcatactcaaataaactgaaaaccacggcatcttgtgtgaataagtatttggccaggccaaaggcttttgagatgaaagttaataacattttatggttcactttcctttaagtaatttgtgtttgttgttatgtggggtattagagggaaaaaaaaataggagttttcactggtaagttttaagttcaacttgatatcaccttgaaaattccctagcttatataaaggaattcataaaactcatattactagcttagggtaaacgaaatactatttttactgtctacagttaacctaattcagggggaaatgcaagcctataggaaagtttatagg

SEQ ID NO: 1617 - DNA, 578 bp, Cricetulus griseus
  misc_feature (181)..(208): n is a, c, g, or t
gtcagaaagatgttatggatttaaatcaccttgtatacaaaccataattattaatcatgccacagtgctacaccaaagatcttcagcttttagctaatgtgtgctgtgtgtgcatctattagaaccatcatcttgatggtgtattctctcctaaaaatgggagaaaattggactgaccagnnnnnnnnnnnnnnnnnnnnnnnnnnnnagctaaggtcagtctccaggacccatatgatacaagaagaaaagtgacttccacaaattgttctctgacctctgtgcatacacacatatacacacaaagtaaataaacatataaaaataatttaatgtaagaaaagaccttaacgttgcctggttttcttttaagggttgaggtgatacaccagcacaatagcataagttagtgtctggagaggtttggtctgtacttacacacattaaagataaaataagctgtagagtttatctagcatgttcctttaagagtggatttttcaaatacaaggtatctactcaaacattcattaatcagtgataactcattttttctcacctcactggtattactagag

SEQ ID NO: 1618 - DNA, 578 bp, Cricetulus griseus
ctgcatcgagggaggcgcatggcgggcatggggctggcgcgggcctggaagcagatgtcctggttctactaccagtacctgctggtcacggcgctctacatgctggaaccctgggagcggaccgtgttcaattcaatgctggtttctgttgtggggatggcgctgtacaccggctatgtcttcatgcctcaacacatcatggcaatactgcattactttgagattgtacagtgacgaagatgtgaccaggatccagaggttcctggggaagatccaccttatgaagctggaatgagacctcatcagactaagatgctctacagatgttaacataaccaaccttataagttaacaaagactgaaattcatgagtagaacaggaaaatcatcctgactcatgtgttgagttctttctttttgatcataaaagaggctcttatatagtagcttttgcctattttaacattgtagtcattcgtactgagatatcagtatttctctaacctttgagactgtttcaatattctccagtgaaagcttctcttaatgaaactctgagtacatcttaattgccttct

SEQ ID NO: 1619 - DNA, 566 bp, Cricetulus griseus
atatagattattaaacagatggattcataaatttatcataaataattttaaagaaataaaaattgactgcaaatatatattaactaagtatgatattctccagagaatagcattaatgctagaaagagtaagtattattaacacatatgtttgctagttcaaaataaagtattgtaaatgaattccatttttttaggaccatgattgaagtgaaagaggctagcctatggtgttctcatcctacttctgaatccaccttatttcttctttacacatgcagcatcagcttagatagctgacagattcattttgttattccatgtgaaagagcttcaacttctacaaatggtgctggcataactggttgcagacatgtagaagactacagttagacccaagcctatcgccctgcacaaaacttaagtcaaaatggatcaaagatcccaacataaatccagctacactgaaccttttataagacaaagtgggaaatacccttgaattaattggtacaggagaccgattcctgaacattacaccagtagcacagacactgagttcatcaa

SEQ ID NO: 1620 - DNA, 580 bp, Cricetulus griseus
  misc_feature (527)..(527): n is a, c, g, or t
  misc_feature (545)..(545): n is a, c, g, or t
tgttttgccatcaagaaatgtgttctgcagggatagttacagcactggcacatggtgctctccagtgagaccctttcgttattttttggtttcttctgtaacaaatagctgcgctcagtcattacaaggggaatgaatttcttgatttttaattacaaaactctaacttgtgataatttcacaaaacccttactaaaaatagactagtgtttggaatatatgacataatgcttaacatttttattaatcttgactagtggtttataattagtctggtttataagttagttctggaataaaatttgagatactaatttacttatcacatggttctctgatagtaccataactatgattcgcttgaaaaaatttgagaaagtttttcttgaaggactaacttaatctctgttggtctgcagttggtagtttgtagtctttgcaaataggaaaatgttaggtagggatcatcctagacagtggctcttttgataaaaattagagaccttgccatttcccctgcttagagncttctcttctttctcctnctcttccttttcagcaaagcagattccctcttgtt

SEQ ID NO: 1621 - DNA, 578 bp, Cricetulus griseus
tgggactggccttgggctctgatggaaataccatctgctacttggaagaccaatctgcaccctcttacttggcgtgggggtcaagctggctctactctaagcagttagtctctcgaggaaaaccagcagatgtggagggcaggaggggaggccctgagggttgcctgcccacagtggtggcctgcacttcctcaaagtggtcattttctatgggtggatggggactctccccctcttcagagaaaaccagaagaagcaaagaagcttcaggggccactgagatagacggctcgttgtgtgaaggcgctaccacctcgcatgacaacttgagtttcattcttggaggccacatgggagagaactgactcccacaagttgtctctgactccctcaagtgtgctgtggcacgcatgtgctcaccaacccccaaataaataataaataataaatgtcacaggaggggagtttcccgtctccagattcctgctttgctctcacacctccggcttctctccgcgatggacgactgtgacatgaaagccaagtacacgctttccttcccttgttgcttttggcca

SEQ ID NO: 1622 - DNA, 578 bp, Cricetulus griseus
cttggggtcttacccacgttcttggcaccatttagctggtttccatgcagccctttcccacacctcctctatctcttttgtctttggtccttttttagagtttgggtctagaatttgttcaaacatagaactagtatattagtgctaggccatgatgaacctcaacctctctcttgcctttaccaaataccttctcctgtcatacccacccaatccgtaaaagtgggctctccaactattccatttgcacagaatccctaaccaaggcaacatctgaaagtttgtgagtcccttgttcagggattaggctctgttgtgaatgcttggccactgtttggaaccttgttctgaatggctggttattcagtgtcaagctgtcctgtcagcatggatctggtggttgatgctgcttggagcttcctgcttgaaggcccttcaatcagaggaacctctctcttcttggcactggctgtaatcaagtctctctgtgccagggctttggagttattgaatggcaaccttcggagccagtcgtacattcacttttcttccccaaacattgttcaccccctgttctt

SEQ ID NO: 1623 - DNA, 579 bp, Cricetulus griseus
tggtgggtaggtgaaagacccgagctaacatgtggttagcttgttaaattacaataaagcctcatgcagttttcagcaagctctcaaatccgcctggtgattggggtgacctcggtcatggcctgggaccctggatacctgagttttctgggggtctaatatttggcagctcgtccgtgatttgcgaccacccccttacctgagtggatttgatcttggaggtaagatgattcgagctcgcaacttatatgttcaatgttatatcattgtttgttattttctgttttgttcatttggtgccacttgaatttgctgtatttttgatctgagcctacacaggactcatgatttgtataatttggaccatagggaaaacagtcttgcccagaaacagatgtgtttctggaactcttggtttcaccctggacgaaagtccaagggttgtttgtaattttggtttggggcaccatttctttgccatgcggtttgtcctgtctgatatctgtcctgtttttgctgtttgtctgtctccatactaaccaccccatccctggattccacctcaactgtgatctgcac

SEQ ID NO: 1624 - DNA, 235 bp, Cricetulus griseus
gtcgacccacgcgctccggaactcttctgtttgatatccaaatagcttatccgaatttttaattttttttttatgagttcttgtgatgttaccaaggctggtctggaactcctaagtataagctagcctgttttactgtctcagtctctgggctagctgggattgctggctcatggttacacgtatcccactacccactttgaatatgaatttgtagagaaaggatgatactttt

SEQ ID NO: 1625 - DNA, 579 bp, Cricetulus griseus
  misc_feature (280)..(299): n is a, c, g, or t
attaaatatttccctttataagagttgctatggtcatgatgtttcatcacaacaatagaaagcctaagtgagacaatgggggacccaataacgcgagtgagcagaggaatttgtaggacctgggcatggttagagcactgatacagaggtccacctggaggaagacagaggagattgcatagcttaaaattactttaacaactggagcaaacatgtgaatttagactggagagacagctcagaggttaaaagcactggctgctcttccaaaggtccttannnnnnnnnnnnnnnnnnnncatggtgactcacaaccatccataatgatctggtgtcctcttctggcctacaggcagaccactgtataaataataaataagtcttaaaaaaacaaacaaacatggatcccccctatggagtcttcatcactcacatatcagcttattttcttattttatcaagcatgtcatttgtttcttatttgtgtgacaagaattccatatgaattgcataggctttggcataaacatacagcttttatgtaattagcagtgattccagcttcattaagttgtatga

SEQ ID NO: 1626 - DNA, 579 bp, Cricetulus griseus; identical to SEQ ID NO: 1625
  misc_feature (280)..(299): n is a, c, g, or t

SEQ ID NO: 1627 - DNA, 578 bp, Cricetulus griseus
  misc_feature (275)..(298): n is a, c, g, or t
  misc_feature (303)..(335): n is a, c, g, or t
  misc_feature (436)..(456): n is a, c, g, or t
  misc_feature (463)..(482): n is a, c, g, or t
gcaggaacttaagatgtcagcctcttcctgtatatcagtgatgggaaaataattgggggcagcgtttgtgttttccataactagagacctctgaagaggtgtttgacctgcttttgattgagaggtttgccttctatattattataaaagaatgccccaaatgattatgcatacagcagagaagatattaaccatcgtgttcttatctctactcagagcgactctaagtgaccttgaattttcttcttataaaactattggtcttaccagctgtnnnnnnnnnnnnnnnnnnnnnnnncactnnnnnnnnnnnnnnnnnnnnnnnnnnnnnnnnntgagaccagcctggtctacaagatctagttccaggtcagcctccatagccacatagaaaccctgtgtcaaaaaacaaaaacaaagcataactctttgtctnnnnnnnnnnnnnnnnnnnnntggttannnnnnnnnnnnnnnnnnnnataggaccctgttcaactaccattacccatatggcagcttacagccgtctgcaactgccaaatctgacacccttccacagacaatacatgtctgca

SEQ ID NO: 1628 - DNA, 493 bp, Cricetulus griseus
tgaacctcacttcagtgccatcatgcaggcttttggacagtcctttgttcaaccagacatccacctgttcaaacaaaatcagttctacttggagactctgaatagcaagcagaaactgtaccacaaaaagatcttccggaccaccatgctattccagtttgtgaatgtgctgctccaagtcctggttcataagtctcatgaccttctacaagaggagattggtatcgccatttacaacatggcttctgtggactttgatggcttctttgcagcctttcttccagagttcctgaccagctgtgatggtgtggatgccaatcagaaaaatgtgctggggcggaatttcaagatggatcgggacctgccctcgttcacccacaatgtgcacaggctggtaaacgacctacgttactaccgactctgttaccacagcctgccccctggcaccgtgaagctctaagagtgcctgcttgccttcctggctgctcactgc

SEQ ID NO: 1629 - DNA, 577 bp, Cricetulus griseus
tgtctaacagtattttgtaatagagatgagaagctagcagttatttaagttcacataatttgattttttaatggagtatatataatcctgctttagaaatttatgaaaatttatgttggctccctggagcttcatatctagttcccacagactgactgcctatccccaggtcttagatttcctaagcacatggtacaaacagacaccacagaatgcaagactggaatgtgatcaagtgttctttccaattcttctcctggatggccttgccagtctgccctccaattagcagtgcacacagagttccacatctgagtggggatatgagagagtgagagagccatgatggctcagactttctaggtgggtacaggagcatacgcacaagcaaccatggtgacagtggaggtgcgtcacaccggctgctagtgatggcgtgtcacgttggcctttggtgatgatgcggggctggcgctgagtcacgggaggtgggaggagccagttctggaatgtgggcagttcctactagggaggcagctcatgcatatgaataaaataagcttgttttaattaattt

SEQ ID NO: 1630 - DNA, 317 bp, Cricetulus griseus
caccctgtggaggcattgtatcctgcaggggagcactacaggtgaacctctaattcctatcttattgtattagatattcctagaaaactcactagtacctaggtgggtttattactataactgaaccctttctgggagggctataggcgctgcggtcacactcgctcctgtgtgctggaccacatgtccgaaaggcatcgcccattcaagccctgctggaacattacgacttaacactcccctcaccgtgctctgccctcaccgcctggtgcactgtaaatggccccctggcctgaccttggctaagagaaagcaaa

SEQ ID NO: 1631 - DNA, 579 bp, Cricetulus griseus
tggggagcagtccctctgcaccccagagacaggaggacacagggggccgtcggaggtggctgccgggcaagcaagggagacacccgtggaaggtggcgggccggtggccccctagcagtcaggaagaggagccagctagtgagaagatcgcccaggggcatctgggcggttgtgggagagtccggaagattacagccatgccgcacagctccgacagcagcgactccagcttcagccgctctcctccccctggcaagcaggactcatccgacgatgtaagaaaagttcagaggagggagaagaaccgcattgctgcccataagagtcgacagatgcagacacagaaagccgacaccctgcacttggagagcgaagacttggagaaacagaatgcagctctccgaaaggagatcaaacaactcacagaggagctgaagtacttcacatccgtgctgagcagccacgaacccctgtgctccgtgctggccagcggcaccccttcacctgccgaggtggtatacagtgcccacgccttccaccagcctcacaccagctcgccacgctttcagccctgaactt

SEQ ID NO: 1632 - DNA, 579 bp, Cricetulus griseus
agcgtgcgccgacccccctgagcggacagatattgttcccttttctgagggatattcgccctcttgctttttgcctcgatctagaccgatgactatgtgaaacaggatctctctcaaaggaagtcttatggccagcggggccttgctaggagcagatgagctggtaatgtacttcccataccggaacatggtctctatttgtggctacctggaacatgcaaggccagaaggatctcccaacaagcctggcataagtttctgttccccactgaagctgactacactcacgacttgtatgtcattggatgctctgatggctgctctgacagccgggagtgggagacacgtctgcaagagacactgagcccttagtatgtgttgctgctatcagcagcgcatggggtcctctacatgtccctgggatccgcacggacctaatctggttctggtaaaaggtccagtgcctaacagaaactacacgcatggtgtcccatatcaagaccaacggggctcctgggcgtctgctctaccttttgtggcacttccttcctattcatgacgcctgacttgacacctgga

SEQ ID NO: 1633 - DNA, 580 bp, Cricetulus griseus
  misc_feature (180)..(202): n is a, c, g, or t
tacaggagataaaggtccccctggacccgtaggacccccaggctctaatggtcctgtaggagaacctgggccagaaggtccagctggtaatgatggtaccccaggacgggatggtgcagttggagaacggggtgaccgtggtgacccggggcctgcaggtctgccaggctctcagggtgnnnnnnnnnnnnnnnnnnnnnnnggtgcaccaggagatgctggacaaagaggagatcctggttctcgaggccctgtaggaccacctggccgagctggaaaacgtggtttacctggaccccaaggacctcgaggtgacaagggtgacaatggagacagaggtgaccgaggtcagaaaggccacagaggcttcactggccttcagggtcttcctggccctcctggtccaaatggtgaacaaggaagtgctgggatccctggtccttttggcccaagaggtcctccaggaccagtaggtccttcaggcaaagaaggaaaccctggaccacttggacccattggacctcctggtgttcggggaagtgtaagataagctggaccatgaggacctcctggtgaacct

SEQ ID NO: 1634 - DNA, 470 bp, Cricetulus griseus
  misc_feature (285)..(285): n is a, c, g, or t
ctggagggatgactcagtggttaaaagcacttgttggtcttgcagaggacccatcttcagttctcagcacccacatggtggctcacaaccatctttaactccagttccaggagatctggcgccctcttctggcctccagaagtactacatgcacatagtacacagacatgcattcaagaaaaacacccgcacacataaatattaaatctttaaaaataaataattagcaagttaaaatttaaaaggctgggggaaatgacatcttggcacactcctgtaacccanaacttggaaggtataggcaggagagctctgtaatccagcatttgcttagtatgtgcaaggcgttgtttaaatctttggctgctctcctgaagagaagttgccctaggggacatttgtctgactcccagagtggcttcattgagcagcagcttataaaacactgtatatgcagcggcttcaagctc

SEQ ID NO: 1635 - DNA, 579 bp, Cricetulus griseus
aaatacaatttgacgacatgaggaaaactactgtatctagtagaaataatgatatctaaagtttaccaacaaaagaaccctcgcagactagcaaatacccctctgctctggacatctgaggtcaaatttgaatatggaaataatttccttgcaagcccctagaggcagatcagagaaagcatgcattaagagggaaaggagagaatggaaataaacatgactataatgcagatttatgccttattttttagcatttttaaaatgttgggtctttcaagctgtttttgctttttattagatctatataaataagttaactagcaatttagttttgtatttaagctacaattaatctttcctttggtgatatttatttctttgcctttttttaactttaaatttttaagagttttgttgagtatttagagcttcatcaccatggcaatatgtatttcccttgaagcgttgcaaacaattatactaggagtgcaccctcttaatctttactagttattgtgagattgctgtgtaagttaataaacacatttgtaaatacattgtttgcagggaaaacattgt

SEQ ID NO: 1636 - DNA, 578 bp, Cricetulus griseus
aactgctgtaccattagcagtgcggctgcggcctgtaaccttgggggcgtgaaccggctgtggttcagaacgcaaaacatggcggagaagggtgcagccaccgttgtgggtggcgactctggtgacagctactacgaagatgtgtgtgatgaccgcgtcgtcaaggcggctgtggaggtgtttgagaagctgaagggtgtaaagtgccccttcctcgacggtctgtatattacagagccaaagacaattctggaactgctgtgtaggccctcaaagtaccggttggacatactggaatggatgtgtatatgggtttgcccctccttgcaggacaagttcagttcactgaaaggaactgcagtggatgtgaagatacaggagatggtgaaactaggccatgacctgatgttgtgtacaccagatgaccaggatcttctgatgggccgtgagtgtccccagaagcatctgcagttcatggaccatttgctggatatgatgcggagcctggccactggatgctccactagttctagcctgaaggaacaccttgaggacactacagagaagaatgaggcctt

SEQ ID NO: 1637 - DNA, 312 bp, Cricetulus griseus
tttgagttttcctgcggatttagggacacggctggcagtctcagaggagataagaccctggctccagaagcaggagttcgaggagagacaggccccagggactcgcagtctaaagcggaaggttgccctgtcctttggaagcctcttttgaagacttctaggacccccttcctgatatggcttaagaccagcctttgctggctgtgcaagatgccctgaggaagtgcttccctgtggcgctggatcagcaggacttgtggcaaagcactcttcagggctgcttgtccttcctgtcctttctcagtatcctgg

SEQ ID NO: 1638 - DNA, 291 bp, Cricetulus griseus
  misc_feature (72)..(87): n is a, c, g, or t
ggtattgtggggagggtgactgtgcagtcctaggctggctgcttttgttttttttagcagccagaatctctnnnnnnnnnnnnnnnnatatcctttaattagtcttcacacttgccactatgggtcatggtctctatgaagtgtcccggacactgcctggacccactgtagttcctagaatccactgctcaggagtccctcccacctgacctgggctgcaaatgagcttctttggctgtgcactgaccttgccttcccccacagacccgatactatacaagtatattattt

SEQ ID NO: 1639 - DNA, 578 bp, Cricetulus griseus
tcccactgctagcaagtcctctgagctgcgaaggtcatgctgcccaacaccgggaagctagcgggatgcacgatttttatcacaggtgcaagccgaggcattggcaaagctattgcattgaaagcagcgaaggatggagcaaatattgtcattgctgcgaaaaccacccaaacacacccgaaactcccaggcacaatctacactgctgctgaagaaattgaagcagttggaggaaaggccttgccatgtgttgttgacgtgagagatgaacagcaaatcaacaatgcagtggaaaaagctgtggagaaatttggaggaattgatattttggtgaacaatgcaagtgctattagcttgaccaacacattggatactcctacaaagagagtggacttgatgatgaatgtgaacaccaggggcacctaccttacatccaaagcatgtattccttttttaagaaagagcaaagtagcacatattcttaatctcagcccacccctgaacctaaatcctctgtggctcaaacagcactgtgcttacaccattgccaaatatggcatgtctatccgtgtgcttgg

SEQ ID NO: 1640 - DNA, 566 bp, Cricetulus griseus
  misc_feature (484)..(500): n is a, c, g, or t
tgcccctgtttggtggcctttctggcaaaagaatagagagatggtttataaagtcaaattggtggaatggcttagccaagaactagaagtttctgtcctggaggacccgggagataggctgacatcagcagaaattctgtcatacatcaccgagatgtctctcatggaggcctcctgctggactctgctggactctcactcacagccaaggcagcttttctggagtttctctggattcttcagagccaaagatgaaaatgccccacaagctgtaaggtcaaagggcacacccaccacagtgctccagcaagggcgtgttttttaggactccccccagtgcacacaacgtttcttgtaaatgtaataggtgagggatgcatgcggccccttaccatatgactcagtcaagcttcctccgaattagagacttttggggaagttctctctattgatgatcagcactagggaacagaacagaacatcnnnnnnnnnnnnnnnnngcagctttgaccctcgctggagtggtcccctctcaacaaatttccccacagtgttttccaggtgaa

SEQ ID NO: 1641 - DNA, 578 bp, Cricetulus griseus
tccgcggcgtcggagcccaggtgctgaggcccgggtctgggatccgactaccgaatcagcccagcagaggtgcccggcaatggcagccagatatagaatgggcacagcagttcactagagctatcatgtacccctccaaggaaacagcccactggaagccttcttcttttaatgatgtggacattgtgaaggacaaagtggtctccaatttgaccctgaactttgggccccagcacccagcagcccatggagtcctgatactggtgatggagttgagtggagagatggtgcggaagtgtgaccctcacatcgggctcctgcaccggggcactgagaagctcattgagtacaagacctatctgcaggcccttccatactttgaccggttagactatgtgtccatgatgtgtaatgaacaggactattctctagccgtggagaagctgctaaacatgcagcctcctccccgggcacagaggatcctactgctgtttgcatatatcacacggattttgaaccatatcatggctgtgaccacacatgccctggacataggtgctatgactcccttcttttgg

SEQ ID NO: 1642 - DNA, 188 bp, Cricetulus griseus
cgcggtgaggagctcgcgtggagaatagtcgcagccatgccgtccaagggtccgctgcagtccgtgcaggtcttcggacgcaagaagacggccacggtcgtggtgcactgcatacgcgggaacgggctcatcatggagaacgtacgccccctgtagatgatttatcctcgctctctgtagtacaacca

SEQ ID NO: 1643 - DNA, 579 bp, Cricetulus griseus
  misc_feature (399)..(418): n is a, c, g, or t
attccttccatcagttcattcaacagcagattcacagtagactgacagtacaccctttctgctgtttcttcacgagcccctctaacatgtcacccaatctaaaacacaaggttcagcaaggcacacgacccctgcaggtcaccgtctttcagcacttgcctctgctttggaatgataggccctaacgataaatatttggagagaaatttcaggttcaaaaactaacatgaaataaggcattgggatcattttccactgaaataaaatgtgtttaaaaagaaagtctggggcactttgaaagccactttgaaagccaatgaatgaatcatctcatatattagaaaacaaaccaaaaacaagccatgtggtgatgcatgtctttaatcctagaggcagcannnnnnnnnnnnnnnnnnnnacagcctgggctacagcactatttctatgtcggccagggaaagaaacaaagaaaccctgctttgaaaaacaagcactttattgggacttgtatttcatttgaatgggggagaattttctctgaaaaaccatcccttttccagtcgaatctccatgggaaaa

SEQ ID NO: 1644 - DNA, 577 bp, Cricetulus griseus
  misc_feature (196)..(215): n is a, c, g, or t
cagaacagcaagaataaacagaggaaggggttgattagatccactgggttattaagacagaatttatcacgttccagaataagataataatctaactagcttctccaaaaagtagtattacttggtatttttaataattattgtttacttagcatgttgaaattgcaccttatatattttagttaaaaaaaatacnnnnnnnnnnnnnnnnnnnntatttagctccctgaagaatatttcttaaagctacaaattcttttaagttaaatactattacttatcagggcaaagatacgaaaacctaagtgtctatcaacagatatagtaaacaagcacagaagaacactacatgatctcacttgtatgtgcaatctacagaatccaattcaaaagcaaagtagaaatgggagttccaaagggctggaaatcggggagggggctggccaaaggctccaaggtttcagtacctaggcaattatggacctactgtacaccacagtgagaacagctacacctgatgagctgcatgcctttaaactgttaccttttcaaacacaagtgtttgtccaccaaaaat

SEQ ID NO: 1645 - DNA, 371 bp, Cricetulus griseus
  misc_feature (11)..(11): n is a, c, g, or t
aaaggcccaantggcttccgttaccgtcctccccgtgtgagacaaccccccaccctaccccaccccaccccaccccgagaccgtgtcctttgtttataaaccacacttggtttttccggccggtttgctgccccgctgaggtggacaggcgctagtgtaatggcggggagtcttccttgggtggcaagcaggatcctgtggggcctgacgcccttggcgagctttataagcttctcgcagggagtcccgctgctgacccgcgtcaggctcacccttccgtcccccatagtgttggattgctgggacgagaagagggctctgtttggagtatatgacaacttcggaattctggggaatttcgataagctccc

SEQ ID NO: 1646 - DNA, 546 bp, Cricetulus griseus
  misc_feature (96)..(123): n is a, c, g, or t
  misc_feature (157)..(184): n is a, c, g, or t
  misc_feature (232)..(276): n is a, c, g, or t
  misc_feature (485)..(538): n is a, c, g, or t
agggggtggggaatagtatgaccaagatgacaacttgaacaaacaaattatttttctaattcattgttctgatgctagaatattctgtatcactgnnnnnnnnnnnnnnnnnnnnnnnnnnnngtttggttttggttttggttttggtttttcgaannnnnnnnnnnnnnnnnnnnnnnnnnnnatgtcctggcgctcgctctggaaaccaggctggcttcgaactcacaannnnnnnnnnnnnnnnnnnnnnnnnnnnnnnnnnnnnnnnnnnnncgccaccaacgcccagcttgtatcattggattttaatgaaacagaaaacattgaaaagttctctttaaaggacacaactgggctctgcagataaaatataactcactatctttaatatgaaaaatcaatagaattaccattgaaatttcttccacaactcaaaaataaaatttatgcaatggtatttaaaaatttctgcattaaacatnnnnnnnnnnnnnnnnnnnnnnnnnnnnnnnnnnnnnnnnnnnnnnnnnnnnnnttaattgc

SEQ ID NO: 1647 - DNA, 545 bp, Cricetulus griseus
aacaacaaaagccctccaaaacctctatagaaattgatatccagtatattttagtgtaaaaaccaattcaactgtgcaagtggcgttagagcccttggtgcctttgctcccatcactccctgtgggtggcagcttgccaaaggggagagggcttctgactagatgttgattttcatgagaaatcactgtgaaagactttgctcttctatgtagtgaatgccccgtggaaagatttcaaggccatttgtacctgtgtttgaatttggggtgagtaaaccaagctcattttcttacccatctggtagttggagaactgagtggtggtgtgagagctgctctcatacagtgaagtcaaccgctgcttttgtatgctgtgtgtccttgccctgcttgcctgtgtgtctgtctgcttccaagcttctgcatgcccagaggctgcttgatggatctgtctcatccctcagactgatctcatcatggattgaagggagcactgggatgagctggacactggggccatgtctgctgccatgtcagcgtctttg

SEQ ID NO: 1648 - DNA, 579 bp, Cricetulus griseus
tgccccatcacagagtgttttgaattcctggaggaaactactgtcgtctacaacttgactcatgaagactccatcaagtataagtacttcttggaacttggccgaattgactccagcaccaagccgtgtcctcagtgcaaacacttcacaacctttaagaaaaaaggacatatccctactccttccagatcagaaagcagatacaaaatccagtgtcccgcttgccaattcatctggtgttttaagtgccatgctccttggcatgaaggtgttaactgcaaggagtacaaaaaaggagacaagttactgcgtcattgggccagtgaaattgagcatgggcagagaaatgcccagaagtgtccaaagtgcaagatccatatccagagaacggaaggatgtgaccatatgacttgttcacagtgtaacactaattttcgttatcgatgtggagagagataccgccagctccgggtttttggataccacacatcaaaccttagtatttttggatgccaatatcgttacctctcatagagacctcatttaacaagattagaccgagggtcatttcgtgcttgg

SEQ ID NO: 1649 - DNA, 161 bp, Cricetulus griseus
agtttgttcagtggttcaagaagttttttgatgcaaattatgatggaaaagatatgaccctgtggctgccagacaaggccaagaaactgcagtggctcccttctcttgtcgctccagctctgagtaaaccgaagaaacctctcaacttcggcagtgcagct

SEQ ID NO: 1650 - DNA, 579 bp, Cricetulus griseus
atcttcacctaacggagaccccccccacaaggaaacctcggtagtgcacaccgacaaggaagttctgctcgccggattgagacggactctggtctgggaaaagttctcatcgctcatgagtgactgattccctggtaagtcccccctcattccgttccataatgatgggccaaattgtctaaggaagtcaaacacttcctttcgggaaagaggagtttgagtaaaatgtaaggacttgattcagttttttgcccttttgtcaaaaaatgtccatgggtcattttagaaagcccagacattcatcccctaacttggaaaaaggtcggagaaggaccttaccagattgctcatagaaaagggacctgaagcagttccctcacagacttttatttacgggcctttagcctcattcacctaataaccttaacaatttaccctgtctttatttcattccccttaccacaaacagtatttcctaagcctatatcgctcatcttcacgagattttagagcttaaaagtcgtaaaaatcctctcgcttacaatagccactgcctgccatgatgcattattctcgagt

SEQ ID NO: 1651 - DNA, 579 bp, Cricetulus griseus
aggggcacaaattattaaatttttgatgtatgtggtatgttatgtgggtgcatgcattatggtagattcctcaatggcactccaccttatttcttgagataccatccctcactgaacctggcactcatggactcaggtacactgagtagccagtacatgaacccaccggtccctagccccagcactggcactgtagactgttctactgcacctggcgtttactcttggtcctggggatctgaactcgggtcctcatgcttgtgtgatttcctgactgaggcagctccccaaccctaattaaataaaattctattcttttcttatgaattcattttttatctttaaacaaataaaaaatataactagatccctacctgaacctaaataaacccttactgagacattcagtgtgttaaactactccctgctatagtgttacgatagctcttgtcatgaccacattctatttgacactagttacttggcctttggattccactcagctcaggattacactgtagcatcatgccaaaggtcactgacctggtccttgtgtgcagtgaggcataaacatattta

SEQ ID NO: 1652 - DNA, 580 bp, Cricetulus griseus
  misc_feature (513)..(513): n is a, c, g, or t
acagcaggctgaggatgggaagtcaaagcaagactgaagatttactccctcagacatgacagagctctgatgagataaacatcagtgtttgaaagttgggtcattgttgctgagctatgggtagaggtcagcagtgacaagaaagtgtacaaggtcagaccagaagacagagagaagtgccaggtgtgtgccagctgcccgtctccctccctgatgagcagccagggcactccacctgtaactttgtctttctcttagtgtagaaacacatgtatagttgggacctggaaatgtataatagatactgctctcatccacatggcagatgcctaaatcagcactttaaaatctttaagattatagtcaatctgatttcatgtaaaaatacagatttttctacagttcactgaaaaaatgaaagaagacaaaaaccaagtggtgttggctttcgttggaaaggctttgagtgaaacttgccatttcctttgtctaccttgccttaagggcctttgncccttaactctggttattttgggggtggggaaaaagaaaagaaacattttttcttgcctgtgtcttt

SEQ ID NO: 1653 - DNA, 214 bp, Cricetulus griseus
  misc_feature (8)..(48): n is a, c, g, or t
  misc_feature (63)..(128): n is a, c, g, or t
ttagcttnnnnnnnnnnnnnnnnnnnnnnnnnnnnnnnnnnnnnnnnnctaatgtctacgctnnnnnnnnnnnnnnnnnnnnnnnnnnnnnnnnnnnnnnnnnnnnnnnnnnnnnnnnnnnnnnnnnnttcgataggtatacattcaaatcctatcgcaattctggtgttagcagcatgctaagccgcactaggctaggccctacttgtactag

SEQ ID NO: 1654 - DNA, 579 bp, Cricetulus griseus
catccagagcctcccaaaggagaattgcagttgccgccgccgccacctccaggccactatggcgcctgggctgctcaagagcttcaggccaaactggcggaaataggagctccgatccaggggagtcgcgaggagctggttgagcggctgcagacctacacccgccagacgggcattgtgctgaatcgacctgttttaaggggagaagatggggacaaagctgctcctcctcctatgtcagcacagctgtctgggattcctatgccgccaccacctatgggactcccccctctacaacctcctcctccacctccaccacctccaccaggccttggccttggctttcctatggctcacccaccaaatttgggtcccccacctcctctccgagtcggcgagcctgtggcattatcagaagaggaacggctgaagctggcacaacagcatgcagctttgctgatgcatcaagaggaacgtgccaaacaggcaggtgcgctaatggatcatgaacggcatcaggagattgccaatatgggcactgcagtccctcggcctcctcaagatatgggccagctgggt

SEQ ID NO: 1655 - DNA, 579 bp, Cricetulus griseus
  misc_feature (76)..(94): n is a, c, g, or t
  misc_feature (274)..(293): n is a, c, g, or t
  misc_feature (486)..(486): n is a, c, g, or t
cgcggaggacctacagcttttagtgtccctttaatgagggttatattgagcgcttggagtagtcatgggcatagannnnnnnnnnnnnnnnnnnttatactctcagttgatcagaaaaccttccacttccaggctcgagatgcagatgaacgagagaagtggatccatgccttagaagaaaccattcttcgacatactctccagcttcaagtaagaagctttacatggtgtttggatattttgtgtatggctttctttttggggaaaggagggnnnnnnnnnnnnnnnnnnnntaactgatataaaacaatgaaaactcttaatttctgagttgattattcttgctttttagtgttttgtagaaaagccacaatcatttattttttctgctttctatagggcaaaatacaaattttcatcaggaatgaagtcattataaggcgatttgaatgtgaaatgatattttaaaatgtgccatatacattntaagcggctggtgccattattgagctattgttaacacccacattatttccaggcttcataattgtttagtgccaggagcccacctcattttct

SEQ ID NO: 1656 - DNA, 506 bp, Cricetulus griseus
  misc_feature (3)..(82): n is a, c, g, or t
  misc_feature (93)..(162): n is a, c, g, or t
  misc_feature (165)..(298): n is a, c, g, or t
  misc_feature (300)..(322): n is a, c, g, or t
ctnnnnnnnnnnnnnnnnnnnnnnnnnnnnnnnnnnnnnnnnnnnnnnnnnnnnnnnnnnnnnnnnnnnnnnnnnnnnnnnnaaaatttgatnnnnnnnnnnnnnnnnnnnnnnnnnnnnnnnnnnnnnnnnnnnnnnnnnnnnnnnnnnnnnnnnnnnnnnatnnnnnnnnnnnnnnnnnnnnnnnnnnnnnnnnnnnnnnnnnnnnnnnnnnnnnnnnnnnnnnnnnnnnnnnnnnnnnnnnnnnnnnnnnnnnnnnnnnnnnnnnnnnnnnnnnnnnnnnnnnnnnnnnnnnnnncnnnnnnnnnnnnnnnnnnnnnnnacgacaagacgcaaatactgcagccctacaggcaacgggatattatttcattgagtacgtgggctttgttatagtaataacaagcctgcgcctagttacaatttctgatacacaatcaaatcttatatcataaaacaaaagcctcattcctttactatgcttacttgtagcagcaaccagtaaa

SEQ ID NO: 1657 - DNA, 579 bp, Cricetulus griseus
atacaaatcctgcagttaccaccaacttaccccagtgtctcttctgtgaactgatgagaggggtacacgctaccccaaagagggttctgaagaataaaaggtacagtaccttctatatggagctcagtaagttgttctgtatactgttaatagtgtttattccttaatataataatcacttgccttttttctatcctctctaaagtttgacaaaagatgtaacctatttatttgtgtgcccttctcctccatcccaaagagaggatagtaaatggcctatggtaagttcttgcgagatatggatcttggtttaataacttgctttgttttggtatttaacaatttcttgtttgatcagaagtgtgtttttaaaagcatctggggactgataccaaacttatcttcccagagtaaatatattttataaaaatattcttagggctggagagatggttttgttgttaagagcaatcactgcttttctagagaacttaagttcagtttccagcgccaataccaagtggcttacagctgcctgtgacttcagctccaagggatctgatgcccccttccggcctt

SEQ ID NO: 1658 - DNA, 568 bp, Cricetulus griseus
  misc_feature (7)..(48): n is a, c, g, or t
  misc_feature (62)..(128): n is a, c, g, or t
  misc_feature (142)..(208): n is a, c, g, or t
  misc_feature (221)..(288): n is a, c, g, or t
  misc_feature (302)..(355): n is a, c, g, or t
  misc_feature (380)..(415): n is a, c, g, or t
  misc_feature (425)..(448): n is a, c, g, or t
tagcttnnnnnnnnnnnnnnnnnnnnnnnnnnnnnnnnnnnnnnnnnntaatgtctacgctnnnnnnnnnnnnnnnnnnnnnnnnnnnnnnnnnnnnnnnnnnnnnnnnnnnnnnnnnnnnnnnnnnntcgataggtatgtnnnnnnnnnnnnnnnnnnnnnnnnnnnnnnnnnnnnnnnnnnnnnnnnnnnnnnnnnnnnnnnnnnnagtagtgtcaaannnnnnnnnnnnnnnnnnnnnnnnnnnnnnnnnnnnnnnnnnnnnnnnnnnnnnnnnnnnnnnnnnnncatactcctacctnnnnnnnnnnnnnnnnnnnnnnnnnnnnnnnnnnnnnnnnnnnnnnnnnnnnnnttcttaatcaatactttagctatannnnnnnnnnnnnnnnnnnnnnnnnnnnnnnnnnnnctcttccatnnnnnnnnnnnnnnnnnnnnnnnntcatcatttattatattagcttttctgacttccaccccttatactactagctatccaaattcctatttttaaatattcccacttcatcaaagaacctgttcccgctgtactaatcactcc

SEQ ID NO: 1659 - DNA, 579 bp, Cricetulus griseus
gttgcatctcggtggtggaggcgacaacttctccggtccctcggccatggcggcttccgggagtggtatggcccagaaaacctgggaactggccaacaacatgcaggaagcgcagagtatcgatgaaatctacaaatacgacaagaaacaacagcaagaaatcctggcggcgaaaccctggactaaggatcaccattactttaaatactgcaaaatctcagcgctggccctactgaaaatggtgatgcatgcccgatcaggaggcaacttggaagtgatgggtttgatgcttgggaaagtggatggtgagaccatgatcatcatggacagtttcgctttgcctgtagaaggcactgagacccgagtaaatgctcaagctgctgcatatgagtacatggctgcgtacatagaaaatgccaaacagggtggacgccttgaaaacgcaattggctggtatcatagccaccctggttacagctgctggctctctggaattgatgttagtacacagatgcttaaccagcagttccaggaaccatctgtggctgtggtgattgacccaaccagaacaatatctgc

SEQ ID NO: 1660 - DNA, 545 bp, Cricetulus griseus
  misc_feature (297)..(331): n is a, c, g, or t
  misc_feature (333)..(345): n is a, c, g, or t
  misc_feature (376)..(376): n is a, c, g, or t
aacatttaggaaatcatttcttcatgggacatttattgggcgtcagctaaaaacaggtcctttgtgctgggctgtgtgttacagaaatgcacagaacggaagaattgaactggtaaaagtgtagtctgcacggggataatgaaagtcccatagtctcacttcctatagggagccttattcagtcactgaatactttttgttttgttttgtgttttgagacaaggtttctctgagtagctttggagcctgtcttggaacttgctctgtagaccaggctggtctggaactcacagaaannnnnnnnnnnnnnnnnnnnnnnnnnnnnnnnnnnannnnnnnnnnnnngggccaccaggcctgactagtcacagaatanttctgtgtacctactgtgtgccgcgtactgagaccatgtgccttcctgggcactggaagcgctccagtgatgaacgatctaagatccctgccctctggtatcatttcctgatcagttactgtgccagggctacaagctaaagtctacctccttctgccatcaatatatt

SEQ ID NO: 1661 - DNA, 578 bp, Cricetulus griseus
agtgcagaccagaccacagcatcctcatcccttcctgctgcttctcagcctcaagtgttccaagctgggacaagtaaacctttgcatagcagtggaatcaatgtaaatgcggctccattccagtccatgcaaacggtgttcaatatgaatgccccagttcctcctgtcaatgaaccagaaactttgaaacagcagaatcagtaccaggccagttataaccagagttttcccagtcagcctcaccaagtggagcaaacagagcttcaacaagatcaactgcaaactgtggttggcacttaccatggttcccaggaccagacccatcaagtgcctggaaaccaccagcaaccccctcagcagaacactgggtttccacgcagcagtcagccttattacaacagtcgtggagtgtcccgaggagggtctcgtggtgccagaggcttgatgaatggatacaggggccctgccaatggatttagaggaggatatgatggctaccgcccttcattctcaaacactccaaacagtggctatacacattctcagttcattgctccccgagactattctggctacca

SEQ ID NO: 1662 - DNA, 580 bp, Cricetulus griseus
  misc_feature (3)..(34): n is a, c, g, or t
  misc_feature (548)..(548): n is a, c, g, or t
gannnnnnnnnnnnnnnnnnnnnnnnnnnnnnnnaagctctgacagaaggatagtactttctgttccgagtggtagagaagactgtcaccaggggttgtggctttcacctgccagatcccaagacaccaggtctctacgcttccacctttcttaaccgtgccttggattgcttatctgttttatataaatagagtaaatattatagtatataattctaacaactcacattcaggccactgtaaaagcttaatttcaaactggttttcattgtttcagagagtaaatatttactatatgttactatatattacaacacaaaacttttacctagggccagcaagctgactcaatggataaaggtgcttgctaccccacctgacgacatgtgctccatccccagtccccatattggaaggagacatccaactcctgcaagttgtcctttgacctccacgtgtgcttagtgacacacacaagtgtgtactcgggcacacacgcacgcgctcgcgctctcactagtcctcattcacatatcacacacttcttntattataaattatgtctcctctcatgtggtga

SEQ ID NO: 1663 - DNA, 578 bp, Cricetulus griseus
tttttatcactgcaacaaaatatcttgtaataacaatatactgaaatggaagtttattttggatcatagtataaacagatttagccaagcttaacagctgaggtgtctctgtacatgttactgaaagcctgtggcctgggtaattcatattttcatccctctgaaagcagagaacttgggctataccaaaagagaacctcaagacctgctcccagctactcatttactgacaaggtgaggccacattcccaaatgctccataacctttgcaaacaatggcattaaatgggggccacatgttcaaacacttcagactgtggggcacatttcatattcaatccactacaacacagatctggacttcaaattaatgagcaactaaattgcctgcctctggagaagaaaaacttcaccaaaacattaacaaattattagtgttggtgctgaaagatccactcaatatgttaatatcgggtcaaagacagttccctctggaaaagatgaattaataccttgcaattttcactaagaggtcatctgcaacttcatacttaattgtttatatgaacatatttgcc

SEQ ID NO: 1664 - DNA, 579 bp, Cricetulus griseus
  misc_feature (418)..(418): n is a, c, g, or t
gtgggagtcagcaaacctatccagcctgtgaccagtttatcaaataacattgtcctggaaggcagccatgcctgctgacgatgtgtgtggctgctgtcacagaacagcaacagagctgaagaaattactgttgcggcagacgaacacaaagcctaatgcattatctgttcaaccctattcataaggtatttgccatctctttaaaaaaaatgtttttgggagtgccatacacgggatagctgagtgtgtgtgtgtgtgttatgtaggacagaggacaacttgcaggagtcattctgtcccaccatgtggtttctggggatcacatttaggttgtcagatgtggtggcaagtgcttttacctgctgagccatctctatgcagtgtccatgcaaatgtgtgcagttgtttctcaccctanttgtgcaatgaaattaggagccattttagcggcaaggtgtgaacaagcatactctaccccttctctcctgctgaatggagctaaaagctatatagacagaatgctcaaagtagctctgtaaagtaaatgctagctaacaatgataggacctgatgttcctt

SEQ ID NO: 1665 - DNA, 579 bp, Cricetulus griseus
aaaactatagaggagcaagtctgcaaataactgggagaatggagatctatgtggtagaaacaaaggttggcaacatagaagccatatgtagaaaataaaatatttcctaagcaaaatgtatcagtcaaaactaagtttgaaaggctcttacatgagcagtaacatggaatataataattaagctgtattgatataatatgaccttctaggacagtggttctcaacctttctaacatttagaccctttactaaagtttatgtggtaaccccaaccgtaaaatgatttcattgctacttcataactgtaattttgaattacagttatttaggtattgtgattcataattgctatgaattgcaatataaatatctgatatgcaagacatctgacatgtgaccctgtgaaagggtactttgacgcgcacacacgcgcgcgcgcgcgcgcacactcacacactcatctacagacacactcacacacactcaccccctccggggggtgtacacacatatctagagaaaacacatatggggggggcagaattatgtgtacatacacccctagacagcgcccccccc

SEQ ID NO: 1666 - DNA, 579 bp, Cricetulus griseus
catggttgggcttatatccaaggaaaacgaagtttaatgcacacccgtgtccttgccaaattattctttagtagccaagatacagcaccaatctaatgtctatcaatgcatgaatacatgcagtgtccgtatacatggtagaatataatgctgccttttaaaagaaggaaatcttatttatgactgcatagatgaatctagagggtatttcggtgagtgaaataagtctgctgcaggatctcaccttcgtggaatcttaaagttgaactcagagaagtagcatgaaggtatcaggggctggggaaatgtcaaagtatgcatagtttcatttaaagagagttaagtgcaaaaggtctgttcctgtagttcacataagttgttgaaagagaactgtatcactgaatgatgtgttaaccactggttaggcatactagctatctccttttttgtttacacatttagttactttgcacaatgacatgatttcctttcttttctttcagttggcagaattgttttagaattgttagcagatattgttcccaaaactgcagaaaattttcgtgcgttgggtacagg

SEQ ID NO: 1667 - DNA, 344 bp, Cricetulus griseus
  misc_feature (36)..(36): n is a, c, g, or t
tcgacccagcgtccgcaaagcctgcatacaacccanaacagccgattctacgccatctctgcgagcttcaagccattcagcaataaagggaagactctggtgatccagtacacagtgaagcacgaacagaagatggactgtggtggtggctacatcaaggtgttcccctctgacctggatcaaaagaatatgaacggaaagtctcagtactacatcatgtttggacctgatatttgtggatttgatatcaagaaagttcatgttatcttatatttcaaaaaccagtatcattcaaataagaagacaatcagatgcaaggtcgatggcttcacccacctctacac

SEQ ID NO: 1668 - DNA, 579 bp, Cricetulus griseus
  misc_feature (116)..(130): n is a, c, g, or t
gctctcccagaggttctcccatggaatctgggagtaatcccagtgacagaaacagaggcctgcagccccagaaagaagccttttctgggccggtggctggcaagcaattccgcccnnnnnnnnnnnnnnnatattcccgacactatagcccagaagatgagtcaagtccagaagcccagcccatcgctgcctacaagattgtttcacaaagcaataagcagttgctggctggctctgtgtctgtcacatctctgtcctccaggactacagagctgcccgctgctgacccttttgctttatcgcccttcccttcaaaagcaggcaaacagaaaccctaggagcagaggcccagcctgaggcctgtctctacctaccccaccagcacccatcacaccactcctggcaggccttccagggagtatccactgtgaccttgtagttccctgcctcagagcagaatcacttcaaggcaactagcaaggttgctctttatgttacacttcctttttttgtttaaactcttttctggacttgtaggtatttctggtccttcacataggccttccacctgcagtcaga

SEQ ID NO: 1669 - DNA, 578 bp, Cricetulus griseus
gttcctaatgagaaggtgggctggcttgttgagtggcaagactataaccctgtggaatacactgcagtctccgtcctggctggcccccaatgggcggatcctcagatcagtgaaagcaacttttctcccaaattcaatgaaaaggacgggcatgtggagagaaagagccagaatggactgtacgagattgaaaatggaaggcccataaatcctgcagggaggacaggactggttggccggggtcttttggggagatggggcccaaaccatgctgcagatcccattataaccaggtggaaaagggatgacagcgggaataaaatcacacaccctgtttccgggaaatgcatcttacagtttgttgcaataaaaaggaaagactgtggagagtgggcaatcccaggggggatggtggaccctggggagaagatcagcgccactctcaagagggagtttggagaggaagccctgaactccttacagaagtccagtgctgagaagagggagatcgagaagaagctgcatgcactcttcagccaagagcatcttgagatatataaagggtatgttgatgatcc

SEQ ID NO: 1670 - DNA, 580 bp, Cricetulus griseus
  misc_feature (177)..(220): n is a, c, g, or t
aattacttgtgatggcttgcagagtcataaacaaaagaagacacttgggacttcaacaactttcatcattcgcacaaaccggaaggagtttcctaggcccagtaaaagccaccaagtttattacagatgcagagtgtcatgaaagtttgttaatcagctcaacagtcaggcttcttnnnnnnnnnnnnnnnnnnnnnnnnnnnnnnnnnnnnnnnnnnnnagcagttcaagcacagagtggcacatatagaattggaaccagcactctcttgtttcttgttggtgcatggagtagagctgttgaagaatgtcttcatctgggtgttcccactccagtaatagtgtcagtaatgaccgaaggctcgagttcttgcattgaagcagtagtttcccttcaagtacccatatacaatgtgtgtgaccacatgtacagcacaagtacagtggatgtcagcttgtgtccttttctcaagtcccttcaatcctggggtggtaaaggaaagcctgatttcaaagatgctccgtctcatttattgtccactaacgggctttttgggagacatggcgatcaccccaattc

SEQ ID NO: 1671 - DNA, 578 bp, Cricetulus griseus
gcctgaggaatagcttctggatttctgagaagccctgtacaatacaagatggatcctgtagtcttgagttatatggacagtctactgcgacagtcggatgtctcactattggaccctccaagctggctcaatgaccatattattgggtttgcctttgaatactttgccaacagtcagtttcatgattactcggaccatgtctgctttatcagccctgaagtcgcccaattcattaagtgcaccagcagccctgcggagattgccatgttccttgaacccctggatcttgcccacaagagagttgtatttttagccatcaatgataattctaaccaagcagctgggggtacccactggagtttgttggtttatctccaggatgaaaatagcttctttcattatgattcccatagcagaagcaactcaatccatgcaaaacaggtagcagagaaactgaaggctttcttagggagcaaggaagacaaactggtctttgtggaagagaaagccccagctcaacaaaacagctatgactgtgggatgtacgtgatatgtaacactgaagccttgtgtcagaa

SEQ ID NO: 1672 - DNA, 567 bp, Cricetulus griseus
  misc_feature (21)..(60): n is a, c, g, or t
  misc_feature (458)..(476): n is a, c, g, or t
  misc_feature (496)..(513): n is a, c, g, or t
gagtgatgagtaaaggggtcnnnnnnnnnnnnnnnnnnnnnnnnnnnnnnnnnnnnnnnncaaggcagagctcttggtccccagactgatagctgggataccagcacgggactgatccagacctcaggaacttgggtcaatgaggaggccttggaaatcatggggccttctgtagtagatcagtacttctctgtagcataggtgtggactttgggagcccatcccacacggagggatagtccctgagccaagacacatggggggggacctaggccctatcccaaaggatatgatagactctgatgaccccctatggaaagcctcaccctccccggggagcagcaaggatatgtgataggtagagttttatttgggagggtggtacgggaggaggagagggagagggaactgggattcacatgtaaaacaatcttgtttctaattccaataaaaaactnnnnnnnnnnnnnnnnnnncggccgcccccggggggacnnnnnnnnnnnnnnnnnncttaagagggttatttgcgcccttggcgaattaatgggaataacgtgttccctg

SEQ ID NO: 1673 - DNA, 555 bp, Cricetulus griseus
  misc_feature (519)..(519): n is a, c, g, or t
  misc_feature (540)..(540): n is a, c, g, or t
aaatctgttctattttcattactactgaagttgaacctagtaatcattggccatttgtatctggcctgtgtgaatggtatgttcatattctgtgttcattatttcactagaatgtttttcattatttttaattctgtgtgtgtttctgtctgtctctttaggagtgcatgtgtatatgagtgtgggtacctgcagaggccagaggtagatgctcttggagctacagatatggacagttgtaaatggcctcacatgagtgttgaaaactgaacacaggtctactgcaagagcagcaagtgctcttagctgctaagccatctctccagacccccaaaatacttctttttaagtgggtctataagaaaccagggccttgaactttctagagccactgaactgaatacctaacctttgtaagaactcttaatatattaaggattttaactctttgtcatggtgcagatattttccctacactatcatgttttttgatactgcttctactatataaaatctcangcagctcaatgactggcttanagatacttccaccaa

SEQ ID NO: 1674 - DNA, 566 bp, Cricetulus griseus
agtcttcgagtctttcatagcctttgggatagggcctacgccctcccctgtgtatctaggctcagggagtatccctctatgcgaaatgggctcccaaagtccattcctatgctagggataagtactgatctactacaaggccccagatatttccgaggccttctcactggcacccacattcatggggtctggatcagttccatgctggtttcccagtgatcagtctgggggccattttactgcttttattcaagttaaaaggccccatcaaaagggctcagtggttaaaatcactggctactccagaggacccaggatggattcccatcattcacatggcagctcacaacattctgtaactccagttccaggggagccaatgccttcttctggcttctgcaggtaccacgcatgcataaggtgcatggatatacatgcacgcattaaaaaaaaaaagttcccatccaaaaacattttttgggggcgaccttttgttgtccaacctggcttcaaaataatgatgggcctcaagtcctgagaggctggggaattataggctaactcaa

SEQ ID NO: 1675 - DNA, 579 bp, Cricetulus griseus
  misc_feature (578)..(578): n is a, c, g, or t
aatgtgagaactccggagtggaggaccaacatgcagaagatgcagacgctggggagagcccgcccttaggtgccatcccaataacggactgcttattttgttcccatcactcaagctccctcatgaagaatgtggctcatatgactaaaatccacagcttctttattcctgatattgaatacctctcagatctgaaaggactgattaaatatttgggagagaaagttggtgttggcaagatttgcttgtggtgcaacgagaaagggaaatccttctactccacagaagctgtgcaggcacacatgactgacaaaagccactgtaagctcttcacagatggtgacgctgctttggaatttgcagacttctatgattttaggagtagctacccacattacaaggaggggcaggaccctaatgaaattgatcagttgtcctcggataagactttggaatgcgatgatgaaaccatggagctgatacttccttctggtgccagagtgggtcatcgctccttgatgagatactacaaacaacgatttggcttgccaagagctgtaacagttgctagaaaccana

SEQ ID NO: 1676 - DNA, 578 bp, Cricetulus griseus
  misc_feature (318)..(338): n is a, c, g, or t
  misc_feature (455)..(455): n is a, c, g, or t
  misc_feature (524)..(524): n is a, c, g, or t
gcggtgaaataagaaccgtgacacaatggatgcattgggggaacttgtgtgagacactggctttttctctgcactctgtggactatcactgtgagatttcagtaggcccatttataaagaagctgctgactcatggggtagtcagactgaaagggaccctataacagagggtgagtcaagagtgaaggaacaatttggaacaggtggggaatatgggcaacttgtgggtggccaaaaaatgatgaaaaatttggtgaagttcttttactcggtttaggggaatacccaacggaaaaatgccccttgggattggggggnnnnnnnnnnnnnnnnnnnnnttgttaaatacccttcaagggtttaggggggccaaattaaaaaaaattgggggaaaccttttttttcaaaagagggagaaagggttttattggggggggaccccttttccttctccngagaaaatacggggaaaaaagaaagattttttggagactcctgtgggaacccccctcggtgtgtgctcnctaataaaaaccccggccacccattaggtgggctctagagagccccgcctataa

SEQ ID NO: 1677 - DNA, 579 bp, Cricetulus griseus
  misc_feature (184)..(184): n is a, c, g, or t
  misc_feature (188)..(189): n is a, c, g, or t
  misc_feature (204)..(204): n is a, c, g, or t
  misc_feature (216)..(216): n is a, c, g, or t
ggtgaagggcagaccactgacttttgacctgtacctgctggtccttctgacttatagaggcccagcatgggtgaattcaatgagaagaaggcaacatgtggcacagtctgcctcaagtacctgctgttcacctacaactgctgcttctggctggccggcttggccgtcatggcagtgggcattntggnnacattaggtgacctncaaagaagatgnacctaccatttagttctgctgggctttcaaaccccctttttagccccaaccccacaatctttatagggggctggtgggcgttgtcctggggacccgagaccctgggcttgctggtccaccttttcaaaagggcgaacggaaaccctgggccccctcgggtcttcttttctccgcgccctccctttaatattttatccctaccccagcaggaggaaatacaaagcttgccgtgtcgttttcccctccttaccctctccacttccttcctcggttgtcagtttccctcacgcgtcttataccattgtattgtacacggtcatgttgccttttcaccacttcttgttgattaaccccttttccatt

SEQ ID NO: 1678 - DNA, 522 bp, Cricetulus griseus
gcgaaccaatcgtcctagctgggaactgtgtgaaatcgttatccgctcaaacaaaaaaatgctataatgcaagcttcggcattttattctagagctctgggtttgaatgcagttctcagtcatgcacctctgtgtagggagacatcataaccatgcctcctaagggctggctacagatgtgcttaaccacacctgtcagggtatggtcaggggatgttcaggatgacacatgggggattcttaaggggcagcagacacgtgggagctctctctagcctccctagcttgctgcctctgggcacgctctagcttgcgcttggccggtattatttgaataaagatatcttaacctacaacctctcgttacacctctgaccaggtctccagctcttgtaagctttgctttcacagatccaaaaagctggcagagccagatgctaaagccagccgcagaggtcactgcttagccgtttaaacgatcatgcagtcaaaaaagactacagatatgcagtaaaaaaggtc

SEQ ID NO: 1679 - DNA, 574 bp, Cricetulus griseus
aagcccacagggcggatctacaacattaagctacctcgaaacaaggctgactgcactgcaggaggaatacaggtgacttttgtgtcctgctggattttgtaatgcgctaaggtaactgggcatgttagcccttgcctgacatgtgtgaagccctgggtttaagccccaaaatcacaatcggccaataaaataacaacagaaaacaaagaaaaaatgacaagcagccgtgggtcctagcaccaggaatgttctcctttgttactatggctcacacctagagttatctgcaaaaacaggagtcactggccagcatggcagtcaaagtctactttgaaagactctaacgtcctcaaagttcaagggctaaatgtatcaagatatctttatttcattaatatacaattcacctgagaaaatatttacataatatacaaaaatgaacaaaatgttctaaaccatggacaataaaaagaatgaactgtaaagtaagttctaagttacaaagtaagagtgtttaagtggattatctgatgctattcagcttggtttgaaatgatattcttcctttgtgatg

SEQ ID NO: 1680 - DNA, 578 bp, Cricetulus griseus
gtgccctgacacagcgcttgctgcaggccctggtggaggaaaatattatttcccctatggaggactctcctattcctgacatgtctgggaaagaatcaggggctgatggcgcaagcacctctccccgaaatcagaacaaacccttcagtgtgccccacaccaagtccttggagagccgcatcaaggaggagctgattgcacagggcctcctggagtccgaggaccggcctgctgaggactcagaggatgaggtcctcgctgagctgcgcaaacggcaggctgagctgaaggcactcagtgcacacaaccgcaccaagaagcatgacctgctgaggttggcaaaagaggaggtgagccggcaggagctgagacagcgggtccgcatggcagacaatgaggtcatggatgcctttcgcaagatcatggctgcccggcagaagaagcgcacccctacaaagaaggaaaaggaccatgcctggaaaaccctgaaagaacgagagagcatcctgaagctcctggacgggtagcatcacctgctgctggcctcctccctggcctgtcagaagcccacttccttt

SEQ ID NO: 1681 - DNA, 578 bp, Cricetulus griseus
ccgccggataccgttcagacatggccaagtccaagaaccacaccacacacaaccagtccaggaagtggcacagaaatggcatcaagaaacctcgatcacaaagatacgaatctcttaagggggtcgaccccaagtttctgaggaacatgcgctttgccaagaaacacaacaagaaaggcctgaagaagatgcaggcaaacaatgcgaaggccatgagtgcacgcgcagaggccatcaaggaccttgtgaagcccaagttggtgaagcccaagataccgaagggccccagccgcaaactcagccgccttgctttcattgctcaccccaagcttgggaagcggattagaagctacatggccaagggtcgcaggctctgccaaccaaagcccaaggttcaaaccaagccagaggcctcggctccagccaaggccccggcttcagctcctgctcaagttcccaaaggtgcccaggcccctgtgaagaccccatagaaaaggtttcttccagtgtgaagacagatggactggtgtgacacgcctacacgctatctgcaggtgatcatgccctgtgccgttttt

SEQ ID NO: 1682 - DNA, 578 bp, Cricetulus griseus
  misc_feature (81)..(99): n is a, c, g, or t
  misc_feature (144)..(162): n is a, c, g, or t
cccaaataccttattttgccaatacctcacagtgccttccaccattctttcattaaaacatgaaatattagccaggcagtnnnnnnnnnnnnnnnnnnntctagcacttgagaggcaggaacaggcagatctctgcattcagannnnnnnnnnnnnnnnnnnccagttccaggacaaccagggatacacaaaggaaacctgtcttgaaaaaagaagacaacaaagaaatattattggcaccatgcctattctccactgtgatctggactatgcttccctctctggatcaaatgatgcaccccagaaatccttatgaccttgggatgccctaagctgggtcccaggctttgctgactttagaatcccaaagcttacttgtgaaccagtcagatttctgctccctctcttgtgtgagaagtccacacctactatgcagtgcacaaagagctccagggcaccaagaagggctctcaggagaggatgcccagttttcaggccttccgccagaatgacaactacggaaaaacttagtccaagggctcctaccatgtaggtcaccaacacaagcacacaagtga

SEQ ID NO: 1683 - DNA, 579 bp, Cricetulus griseus
  misc_feature (168)..(184): n is a, c, g, or t
  misc_feature (250)..(295): n is a, c, g, or t
  misc_feature (571)..(571): n is a, c, g, or t
gagaaagtagcagtctcagattcagagagtgtttctttgtcaggttcccccaaatccagccccacctctgccagtgcctgtggtacacaagggctcagacagccagggtccaaatatccagatattgcctcacctacgtttcgaaggttgtttggtgccaaggcaggnnnnnnnnnnnnnnnnncacctaatactgagggtgtgaaatcctcctcagtattgcccagccctagtacctcattagcgcgannnnnnnnnnnnnnnnnnnnnnnnnnnnnnnnnnnnnnnnnnnnnngtgctggtgggctgagcggcaacagcagccctctcttcaataagccctcagacctaactacagatgttataagcttaagtcactccttggcttccagcccagcatcggttcactctttcacatcgggtggtcttgtgtgggctgccaatctgagcagttcctctgccggcagcaaggacactccgagttaccagtccatgactagtctccatacgagctctgagtcaattgacctgcccctcagccatcatggctcgctgtctggactgaccacangcactcac

SEQ ID NO: 1684 - DNA, 569 bp, Cricetulus griseus
cagatggatggattactgtttatcccctttgggatattttaaaactctgctacaaagaggatcagtaatacaatgatgtgctaatatattttaagaactttcgtattttaaagagatacactctaccatatgtttatgcaagcatcacactgggagaagaggaagtcataaaatcatcccagaagactccgaaagaaactgtcaccaccagatgcccttggtcatgcccgtccagaagctgtgttcctctttacaagggcagagtgtcacagtattgatgtgcccaccaccatgctgaggtactggtcaccttggagagctggcgtgcgggcctgaagagtggcctccttacctagcaagctgcagtccccacccctgactgatgtgcggcactggcactccgtgaggagcattgtccactgtgcacctgcagcactgtgtccctggaaaggccagctcagcccgtaacgtgtgtacatgtgctagtgcactcccttctgtcggggaggggacacccactttctctttttgtatagaaagcacatcatagaatgataattgtattttat

SEQ ID NO: 1685 - DNA, 572 bp, Cricetulus griseus
aaggagggtaatgagaggaagataaaatattgcatttttgctaacatgtaaactctagctctaagtctatacatctatgtagagcatacaggcagggggaaaggtatgaaaaataggaagggttgaaagggaggaagggatgagagaactacaagctgctgaaaaaaggacaatcagtcttctccagggacaagccctgtaggggttatccaaatccaggggccacctttaaacacatgtacatatgagcaacactaaatggacctagcagggtgaattcatatatacgtatatgaatatgtaacagaataacaaaagaggccatggctttgaaagggtataaaacctggaggtgggtgggggggaaatagggtaaaaacagaattcacgtatttaactctcacaaaaactctcaaggttaatccaaatccatgattaaaatgggtagatttttggcgtggaaatcattcatcaataaacctgtttgtagcttggtggtgaaccacctggcatgcttatgctaaataacaccgagttcaattccgggtaaccaaaactaaaacaaaaaagca

SEQ ID NO: 1686 - DNA, 464 bp, Cricetulus griseus
  misc_feature (372)..(394): n is a, c, g, or t
  misc_feature (396)..(424): n is a, c, g, or t
aatatgtttaagaacctcgtgaattgatgtgtgaaatttgtgagaataacacatagattatatgtgtgtgtgtgtatacatacatacatactacatatatatgagagagagaggctgcaaaattgacagctttagaaacagttcacttctgagtttttgtgattgcatgcatattgtatcttaatttgattttggctaaattgatggttctgaaacaaaaaaaaagaagatccaaaagctaaatgtgcaagaaaactatgactaaaaaatgtaagcccaaattgccgtttattctctttcatggcttatgaatataggatggatgtctatttgcaggtttttactgttgttcattgcttcagatttattacnnnnnnnnnnnnnnnnnnnnnnnannnnnnnnnnnnnnnnnnnnnnnnnnnnnaccacactgtgtgtgtgtgcgcacggggaatatgtcattt

SEQ ID NO: 1687 - DNA, 553 bp, Cricetulus griseus
  misc_feature (15)..(33): n is a, c, g, or t
  misc_feature (36)..(92): n is a, c, g, or t
acagcttttgttatnnnnnnnnnnnnnnnnnnngcnnnnnnnnnnnnnnnnnnnnnnnnnnnnnnnnnnnnnnnnnnnnnnnnnnnnnnnnngtgatgcagttactgttgaagacacaatcggacttaaatactatggaagatgatgaccctcagacttcttacatggtttcagcgtgggctagaatgtgtaaaattcttggaaaagactttcagcagtatcttccactggttatcgagcctcttattaagactgcctcagctaaacctgatgttgctctcttagacacacaagatgtggagaacatgagtgatgatgatggctggcaatttgtaaatcttggagaccagcaaagctttggaattaaaacctcatgacttgaagcaaaagcaactgcttgtcagatgttggtttactatgctaaggagttaagagaaggatttgtggactatacagaacaagttgtgaagctgatggttcctttgttgaaattttattttcacgaccatgttcgagtggcagctgcggaagccatgccctttctcttggaatg

SEQ ID NO: 1688 - DNA, 578 bp, Cricetulus griseus
  misc_feature (67)..(109): n is a, c, g, or t
cggtgtcggtgtttcaggcaccagtcggagggttttcttttgacaattgtcgcaggaatgccatctnnnnnnnnnnnnnnnnnnnnnnnnnnnnnnnnnnnnnnnnnnnccgaaaaactggcactactattgcgggggtggtctataaggatggcatagttcttggagcagacacaagagcaactgaagggatggttgtcgctgacaaaaactgttcaaaaattcacttcatatctcctaatatttattgctgtggtgctgggacagctgcagacacagacatgacaacccagcttatttcttccaacttggagctccactctctcaccactggccgccttccaagagttgtgactgctaatcggatgttgaagcagatgcttttcaggtatcaaggttacattggtgcagccctagttttggggggagtagatgttactggacctcatctctatagcatctatcctcatggatcaactgataaattgccttatgtcaccatgggttctggctccttggcagcaatggctgtgtttgaagataagtttaggccagatatggaggaagaagaagccaag

SEQ ID NO: 1689 - DNA, 579 bp, Cricetulus griseus
  misc_feature (79)..(97): n is a, c, g, or t
  misc_feature (409)..(439): n is a, c, g, or t
  misc_feature (552)..(552): n is a, c, g, or t
gttaaatgttgtttctaaagtcacttgatttaagcccattgaccatctaatatttgaatcctagcgtttacactacttnnnnnnnnnnnnnnnnnnnataattactattttgtctttggccaccgtgtgtaacttgagaaacaggtaatataagttagctggaaagggtctggattctctatttttgtgattgagtttatcataacataattcttctatctttataccactcacacttgtgtttttaatctactgaattagaaacagaaattcagccacctattccaagatttactgagtgctgtctatggaaaagattgggaggcatttactggtgtacatgcgcttgtcagtgatttctcacgtcattggtggaatgtgtttcatgaaccattaaagatttgcccannnnnnnnnnnnnnnnnnnnnnnnnnnnnnncccgggggatccccaccttttgttccctttacagagggttaatagcgccctcggcgaaaccaggggcataattgtttcctgggggaaatatatccccccccaaaggcagctgnaccggatttttttcggacagtccctct

SEQ ID NO: 1690 - DNA, 579 bp, Cricetulus griseus; identical to SEQ ID NO: 1689
  misc_feature (79)..(97): n is a, c, g, or t
  misc_feature (409)..(439): n is a, c, g, or t
  misc_feature (552)..(552): n is a, c, g, or t

SEQ ID NO: 1691 - DNA, 579 bp, Cricetulus griseus
  misc_feature (49)..(63): n is a, c, g, or t
gcacagtggctgggggacattctgctgggaaacttggaggccctgcggnnnnnnnnnnnnnnncggtacaccgccttcaaccttccggacccctttgcgcccactcctcacttggtcctaagtcttttagatgcatggagggtcccagtgaaagtgactgcagagctcttgatgggtgtaagattaccccctaagctgaaaccgaatgaggttgccaacatccagccttcttctaaaagagccagaatcgaggacctgccacctcccactaagaagctgagtccagagctgatgccttacgtgcttttcacgggatttgagcctgttcaagttcagcagtacattaagaagctgtacaccctgggcggggaagttgccgagtccacgaagaagtgcacccatctcatcgccagcaaggtgactcggaccgtgaagttcctgacggccatctctgtggtgaggcacatcgtgactccggagtggctagaggagtgcttcaagtgccagaagttcatcgatgagcaaaactatatcctgcgagatgctgaggcagaagtgctcttctctttcaatctggaa

SEQ ID NO: 1692 - DNA, 382 bp, Cricetulus griseus
  misc_feature (110)..(140): n is a, c, g, or t
  misc_feature (142)..(220): n is a, c, g, or t
  misc_feature (237)..(298): n is a, c, g, or t
  misc_feature (351)..(380): n is a, c, g, or t
caggccgccacctgagtgacaactgcatctatcgttccctttacagaaggttatatgatcgctcggagtattcaatgtcataactgacacctgtgagactttgatatacnnnnnnnnnnnnnnnnnnnnnnnnnnnnnnnannnnnnnnnnnnnnnnnnnnnnnnnnnnnnnnnnnnnnnnnnnnnnnnnnnnnnnnnnnnnnnnnnnnnnnnnnnnnnntatatttccacttgtcnnnnnnnnnnnnnnnnnnnnnnnnnnnnnnnnnnnnnnnnnnnnnnnnnnnnnnnnnnnnnnaaaactaattactaagcaaataataggcatttcactcacctaaaagacgaacnnnnnnnnnnnnnnnnnnnnnnnnnnnnnntc

SEQ ID NO: 1693 - DNA, 473 bp, Cricetulus griseus
aattgacaatacagaccttggctatgaagtacttccaattaatactcagtatgagggaatgagagactgtataaataccattaagcaggaggaaggagtgtttggcttttataaagggtttggtgctgttattatacagtatacactgcatgcggccatcttacagattaccaaaattatttactccacacttcttcagaatagcatttgagatttaggttctatcattggctgatccaaaaatgtggtctggataatttgctctgaaattgtaagtaatgaaagtaaaatgctgggtggaaagaagtagactgggaattgagactggtggaaaagctcatgctggctatactaacttctcatttttcttaaggcataaatatatagacatatagctgtgtaaataatactggatcaaaacctttccaaaattgaaaactcaataaaggtaatactttaaatgcaaaatgtaa

SEQ ID NO: 1694 - DNA, 579 bp, Cricetulus griseus
  misc_feature (174)..(196): n is a, c, g, or t
aagttaaatccaaattcaaaagtatccattgaagttatatcttctggtatcacactttttaaagatgacaagcatcccagttaaactagctgtggtagttacccgatgaaagcatgacgttccatctgtgtaatgtggttttagtgttgcttggttgtttaattattttgggcnnnnnnnnnnnnnnnnnnnnnnnctagaataatggcaactacttttcctgtttttccctaaacattttaaaaagtgaaatatgggaagagctttaaagacattcaccaactattagttttcttcacttagctacttatgtaactgtttgatcttactaagaaaacttatgcctcaaaataacaaaaaggaattttaagggttgatgggttttaaaaatatacaaactatctgatccaatgattttaatcaaacagtttgactgggcaacctttgcagctgataatgaatatttcgctttttacaaaattgccactgatttggatttgtgcactctaatttttaatttattgatgctctattgtgcagtagcattttgtttaagataaagctcatatagtattaccc

SEQ ID NO: 1695 - DNA, 189 bp, Cricetulus griseus
  misc_feature (187)..(187): n is a, c, g, or t
aggttcaactatgtgtacattagccaactttccacacacatatgtatttaaaaacatgatcctgaatgcttgacagagtcaattgccaatagtagcagttgttaaaattttatattgattgatgtaaactaatcttgaaagatccagccatgatctgttttaaaattaattgtaagagcaaccattnat

SEQ ID NO: 1696 - DNA, 579 bp, Cricetulus griseus
aatattattctaactgtgtaaaggtatgctgtatttgctttatgctgtatttgtttaatgttgtaaggatgtgtgttaattgtgtaaagatgtttgtcgtcatttaaggcgaatataggaatataagataaaaagacaactactaacctcaaatatttcacattgatatattgatacacatttaaagttttttgttatacggaatgtatgtttatactgttgtttggggtattgtgcttatgcagctcatttaaaaatgtaatctataatttaaaaatgcaggttagtagtcattcataataatcaagcttatagtcacgttaagtatgcttttaatgtttaacagatatattttaggaagatagattctctccaaactcttcaaagttctacagaatatggcatttaactatgcaatgatatgttacatttgtttatgctgtatttgtttaatgatgtaaggaaggctgttaaattatataaagatatgttgtatttgtatcaatttgcctgcctaaggcacccaattggcctaataaagagttaaacagccaacaccttggcagataaaggataagt

SEQ ID NO: 1697 - DNA, 534 bp, Cricetulus griseus
tgtttcttaaggaccacgaagaggaaaaacatcacaagatgccctgcccgcccttgagcagcatgcctcagggcacaaaaccctggtacaaggagttcttgcagctgattggctacagcaacttccagagagtagaagaatactgcgaaaaggtgtggtgtacagacaagaagaggaaaaagcttaaaatgtctccctcgaagtggaagtacgccaacccccaggaaaagaggctccgctccaagccggagcacttccgcctgccccggcacgcactggactcctgagggcgccttctgctggctgccaagggaccgagcatgggaaccttcaaagggaagagaaacaaagagaatgtcacagcatgcaaagtccttccagcacttcacagagggaggaaggtgttttaagttattctgcatactcatcttactgtgcaaaccgctcacagtactagtacttacacgagtgtattgcttaaaaggcttcactttgtatttatcaacacatgaccgtggctgcaattttgagttt

SEQ ID NO: 1698 - DNA, 179 bp, Cricetulus griseus
tgatagggacatttgttttcattgtaatatatcaagcacaggcaaatggaatttaattgaaaatgttttaatgtgtgtgaaactttcatcattcactagaagcagaactagttcatatcaccaagcaccattgttttgtttcctaatgggagtgatcttgtataactaacgatatgaac

SEQ ID NO: 1699 - DNA, 582 bp, Cricetulus griseus
  misc_feature (282)..(329): n is a, c, g, or t
caaatcagggagcattattcgtaagatggttttagacaggcaacacctgggagtgacaaagtcaaggtgtatcgtgtggggtgttgccttcttgtctgacggcactgtcataagtgtggactctgttggaaaggtgcagttatgggactgagctactgggacacttgttaagagccatctcatcgcaaatgctgacgtacagtctattgctgtcgctgatcaagaagacagttttgtggtgggtacagccgaaggcacagtattccattttcagctggtctnnnnnnnnnnnnnnnnnnnnnnnnnnnnnnnnnnnnnnnnnnnnnnnntccagcatcacactcacgatgtacgcactgtggcccacagcccaacagctctgatatcaggaggcactgacactcaccttgttattcgtcctctcatggagaaagtagaggtgaagaattatgatgctgccctccgaaaaatcacttttccccatcgacgtctcatttcctgttcgaaaagaaggcagcttctcctcttccagtttgctcatcacttggaactctggagactaggatctacacttgcaacatg

SEQ ID NO: 1700 - DNA, 387 bp, Cricetulus griseus
  misc_feature (247)..(265): n is a, c, g, or t
aataaatgacacaaagactgacttattaggaaagcaaggctgatagcttgggctcatttcttactagctcttatgacttaacccatttctatctttactctctgcctgtggcttttaccctatcccattttgtgtatcctactcattcaatgtctatctggcttccccaccttcttcccagttttctgcccccaaaatcctgcctgggtgttggccttttagctttttattaaattaatccaagtcnnnnnnnnnnnnnnnnnnntccgttaaaggctaggctcacaaccaaaaatataaattagtcgaagtgacgcttcatcacagtgttcaaaaagattattccacaacacattctgagtacttcacgcaccttccgtaataacc

SEQ ID NO: 1701 - DNA, 146 bp, Cricetulus griseus
  misc_feature (122)..(142): n is a, c, g, or t
agcctgaagaattaaaatgccaacaccaaaccttacattaacagctctggtccatactactcccatgcatttctaatatattatttgttttataaccacttctaaaattcctgcttcctccnnnnnnnnnnnnnnnnnnnnnctgt

SEQ ID NO: 1702 - DNA, 558 bp, Cricetulus griseus
  misc_feature (470)..(470): n is a, c, g, or t
acgttgtctgcgtcctaacaaccctggacagaacccagcatgtctcaggccaccaagagaaaacacgtggtgcaggaggtgctgggagagcacatggtgccctcagaccaacagcagatagtgaaggtcctgaggactcccggcaacaatctgcatgaggtagagacggcacaagggcagcgcttcctggtgagcatgccctccaaataccgaaagaacatctggatcaaaagaggggacttcctcattgttgaccctattgaagagggagagaaagtgaaggctgagatatcttttgtgctctgcaagaaccatgtccgttctctgcagaaggagggccactggcctgaggccttctctgaggtagctgagaaacaaaacagtatgaacagacagagtcagccagaactgcctgctgaaccacagctgtcaggagatgagtcaggttctgaagatgattctgacctctntgtcaacaccaatcacagacaatatcatgagagtgaggaggagagtgaataatatgaagaggacgaggacgaagaggcagcctgagcc

SEQ ID NO: 1703 - DNA, 580 bp, Cricetulus griseus
atattccattccttttttgggatctgatatggtctgttggtgaaaagggacctcaacgttaccttacactgaaaatttacaggagtccccagttcaatatgctgcatacctaacggggggaggcatcacctctgttattaaactgatgtttgcagggcttttctttttattctttgtgaagtttaacattgggagacaccttctcataaaattcccatggctcttttcctttggttatttttcaaaacaagggccaacacaaaaacagatggatggctcatcatttacgatgacattctttggtcaaagatacaaccatggtttttgtcctgagaagaacaaaccaaatatcacaatctgtacccaactgaaaggaccagaggctggctacgtgactactccaatagccatggttcaggctgccatgactcttctgaatgatacctctgatctccctaaagggggcggagtgtttacacctggagctgctttctccataacaaagttgattgacagactcaaccaacatggcattgaatttagtgtcattagcagctcggaagtctaaacattcgaagat

SEQ ID NO: 1704 - DNA, 579 bp, Cricetulus griseus
  misc_feature (458)..(458): n is a, c, g, or t
  misc_feature (536)..(536): n is a, c, g, or t
gcttcccatagcatgatgaatcaccacgggtcagggggtttggaagtttctactttgcacactgtagtttgattgattggttctgtcccctgctaaatgcttaatatgcagcttgctctccacatcttggtttatttctctataaaatggaaataagatggtatccaccttgctagatcattgtgagaattaacagtgacaacccacagagtacttgttgtggtgcctaggatatagttgcacatgatgcatattttcaattcctaaaaatattttttgctagtcatttaggacttccctgctttcttactatgtgtctgacttggcaggattatagtctgtaatggttagttttatctacctgactgggctatgggatacccatgtatctggtcaggtatcatttttgaatgtgtctggatttgtttctttattttccattttcatgaaatgagttnttttgttaacttgaattggtggattgaagaaagatgacctccctatcagaggtgagtctgtgttgtttcatacatcangacatgttgaattcagataagagagatgctcactgactggcta

SEQ ID NO: 1705 - DNA, 579 bp, Cricetulus griseus
agtgagtctcttcaggttggaaaggaaaattctgtggatcccgcttcccagcccatcaaataactgaacttctgaatgctggctgcagatggcccgacaaggagaggagtgactgtctctccctaagatgtgtccattcaagtgtcctgctgcagacttgattcagtgttgatcagagggatgagctagcaattcggaattgctgttcattatccacaaacaatttgggttttattagtaaaatagaggcgtctcaccattcctttgtcagaaattccgtttagtttgactctgggacctgaatttatataaactgttttcagttatttttggttttcatatctctgaaaccctaaacatttttattataaaccagtgatcgtattttatataggattataaaattgacccctaagaattttaagagatcaaactttcaacaattcatggccggtgttaaccccgacacgcattcgtcccttttatacttatctgaacccacagaacacacacgggaaaacccctccgcgcggcctcattattcacctcggggcggtgggattcccctctggagcctag

SEQ ID NO: 1706 - DNA, 578 bp, Cricetulus griseus
attgcgcttgagctggtgtatgagattgaaggctgtgaagtgatttgggccataaaggataaagccattgggaatactttctttgacgcaggcgcagcagaatttttgacttccaagctcatgtctgaaaaatcagaggctaaaattgcacctaaaagaaccatctacacaattgagggagcaagaaaggaaaacagaagcaaagctaaagctgataatgtgggcagtgcccttggacctgactggcatggaggcttggatctgaaaggtccacaagagttctcacacagtattcacatcgaaaccagatgtgaagtaaagaaaatctaccttcaagaggagtttaagattacaaagaaaaagcccttggcttttccaaagcatcaggataagtcagttacacttgataaagaaatgtggcctgtgtatgtggaactaaccaatgggaaaatatatggctgtgatttccttgtcagcgctacaggagtcacaccaaacgttcaaccttttctccatggaaacaattttgatctaagagaggatggcggcctgaaagtggatgaccagatgcgcacgtc

SEQ ID NO: 1707 - DNA, 567 bp, Cricetulus griseus
acagtcttaaggaaaatattcaggtctatcatatggtttgacagattttttaaaagttatttttggtaaggtcttcttttagaaaaaaatctcaagggttttttgtaccactataatctctaatactcagaattgcggtgtatttacttaatttcttattatgtgccttattatgtgcttaagatataatagattagagttttatctaaatatctagaaagataaattgtgggcttgaagagcattctgttattttttccttgtcttggattttaagggttccctccccttttttcatttcaattttaagtggttttcaataagtaatagtttttattcacatttttggtgctttggtgtacagatgggatagagaagggtgagtggtttgggaataacttggtgtgcacctgtaagcctctgttgtgactgctggttgcctccatcctttatgtaaagtagaagctgcagaactgtcttagttcgcatctgtctgacatttaccagctgtcacgatttgtctcaggattacttggttctttctcagcactcaagtgagaacttgat

SEQ ID NO: 1708 - DNA, 579 bp, Cricetulus griseus
aatttccatgttaagagtgaaattaatgagtcatgtggaactctgggttttgaggccttttattttgattatttcctaaaacttaattaaatgtttatatgcacatgcatatttagcagcctcaagtattgcttaatttaaaaattagttcaaaggaatatttgtcagcctacttgtacccctgtggaaaaatacccagcattttgaagagtcatcttcctctatcaaaccaaggggtgaaactctaacatctctcctgccccatttcagctcgaagcagtagaagctaacaattaagttgacttaaaaaaaggaaaccccaaactaggatctgttataaaataacagatttttattcagaattttaaggcagaaattccagttttgatatactgtactctctgagcaattagctctaaaatgtttgaagctttgtattttaatgcaatttgtatttttaaaaaccacattcttatgttcaaataactcattgatttcttaaaaacttaccaacccttatgaaaaaaatcccatcatgtgttttttttaattataattacatttttgcagcagttaaat

SEQ ID NO: 1709 - DNA, 580 bp, Cricetulus griseus
ggctcgagacgaagtagacagcctgatgtgtgaaaaaagaatttttgagactgtgaatagcgtcaggcacccctttctggtgaacctttttgcgtgtttccaaacaaaagagcatgtgtgctttgtgatggagtatgcggcaggtggggacctgatgatgcacattcacaccgacgtcttctctgaacctagagctgtattttatgcagcatgtgtagttcttgggttacaatatttacatgagcacaaaattgtttatagagatttgaagctggataatttgttgctagatacagaaggctttgtgaaaattgctgactttggtctttgcaaagaaggaatggggtatggagataggacaagcacattttgtggtactcctgaatttcttgccccagaagtattgacagaaacatcatacacaaaggctgtagattggtggggccttggcgtacttatatatgaaatgctggttggagagtctcccttccctggtgatgatgaagaataagtttttgacagtattgtaaatgacgaagtaaggtatccaaggttcttatctacagaagccatttccata

SEQ ID NO: 1710 - DNA, 471 bp, Cricetulus griseus
  misc_feature (19)..(60): n is a, c, g, or t
  misc_feature (74)..(140): n is a, c, g, or t
  misc_feature (154)..(220): n is a, c, g, or t
  misc_feature (233)..(278): n is a, c, g, or t
  misc_feature (280)..(300): n is a, c, g, or t
  misc_feature (314)..(341): n is a, c, g, or t
  misc_feature (392)..(420): n is a, c, g, or t
  misc_feature (422)..(435): n is a, c, g, or t
ttaatattgtattagcttnnnnnnnnnnnnnnnnnnnnnnnnnnnnnnnnnnnnnnnnnntaatgtctacgctnnnnnnnnnnnnnnnnnnnnnnnnnnnnnnnnnnnnnnnnnnnnnnnnnnnnnnnnnnnnnnnnnnntcgataggggtgtnnnnnnnnnnnnnnnnnnnnnnnnnnnnnnnnnnnnnnnnnnnnnnnnnnnnnnnnnnnnnnnnnnnagtagtgtcaaannnnnnnnnnnnnnnnnnnnnnnnnnnnnnnnnnnnnnnnnnnnnngnnnnnnnnnnnnnnnnnnnnncatactcctacctnnnnnnnnnnnnnnnnnnnnnnnnnnnngatgaattaatgtgacaccacacagcgtcttaatcaatactttagctatannnnnnnnnnnnnnnnnnnnnnnnnnnnngnnnnnnnnnnnnnntacattccatattgatccactatctccatcatcaat

SEQ ID NO: 1711 - DNA, 582 bp, Cricetulus griseus
aaatactccagaaactgtcaatctcattatagaagtttttgttgaagttgcacataaacagatatgctatcttggagagtccaaagctatgcatttatatgaagcctgccttactttgttgcaagtatattctaagaataatctaggggggggaaggatagatgttacagcggaagaagagcagtaccaggacctgcttctcattatggagcttctcactaaccttctctccaaggagttcatagacttcagtgacacagatgaagtatttagaggacatgagccaggacaagcagcaggcagatctgtgtcagcagctgatgtcgttttatatggagtaaacctaattctgcccttaatgtcacaagatcttttgaagtttccaaccctttgtaatcaatactacaaattgatcacatttatttgtgagatttttcctgaaaaaataccccagcttcctgaagatctgtttaagagtctgatgtattccctagaactaggaatgacatcaatgagttcagaagtatgccagctctgcctcgaggccttgacaccattagccgaacagtgtgctaaagcaca

SEQ ID NO: 1712 - DNA, 524 bp, Cricetulus griseus
cacgccgagtctcttcggcaggctcgccggggacatgacggggtacacaccggatgagaagctgcggctgcagcagctgcgggtgctgagaaggcaatggctgaaggaccaggaactgagcccccgggagcccgtgttgccaccgggcaagacgtggcccctggagacattctggaataactttctgcgggacggggccctgtggaagaaagtgatctttaagacataccgggccagtctcttcactgtttctcatgtaattatacctctgtggtttattcactattacgtcaaatatcacgtagctaaaaaaccatatgccatcgttgacacgaagcccaaaatattcccaggtgatacaattctggagactggagaagtaattccgccaatgaaagattttcctgatcaacatcattaaagagcacttaaaacttaaaagacttgtgtaacagcaaaagtctcttcatatagttcgtatttactgaatctgtttcctggaaaagtaactaataaagcttatt

SEQ ID NO: 1713 - DNA, 579 bp, Cricetulus griseus
tgggtttctgtagaacattccatcagggctccgtttggtcctcttattttcttagaagttccaagatacagaatttgtctgacaatgtttatctcaggaagaaatgtcttgctcttcttaattttagattattggtaactatgtgcagctgttgcatgtttggcaggcatgtgtctgaagtcccagatacataaaatccccttacaaatgaccaaggacaggagaaaattcagtatcattagtcattagggaaatgcaaatcaaaattatagtgaagttctactttattctcatggggatgattgtaattcttaaaaaccaatttaataaaagtaggtgaagatctgaagaaattgcaattcttggacattgctggtggggacaagatggtatcactgctatggaaaatagttggctaatttctcaaaaagttagatgtagaattattgtaggaccagcagttccagaaaatttgagaataggtgtactctaatacttgtatgtaaatattcatggcagcacctactcacagtggccaaaagatgacaacagtctgaatgtccattggacagcaggtaa

SEQ ID NO: 1714 - DNA, 381 bp, Cricetulus griseus
accgagttggtgacaaagaagaagccaaaggctgaaggctatgctgagggtgacctcactctttatcaccgaacctcagtcactgacttcttgcgagctgccaatcctgttgactttttttccaaggccgcgaaatttcaatagatgatgaagagttagcacagcatccagctacaactgaggatataagagcatgctgtcaggacatcaaagttctggggcgcaaagaactaaggtctctactgaattggagaacaaaacttcggcggtatgtggccaaaaagctgaaagagcaagcaaaggcactggacatcatcctcagctcataagaagaacgtgatgaggatgagtcaatagctgagacatagcatgatgattcat

SEQ ID NO: 1715 - DNA, 531 bp, Cricetulus griseus
  misc_feature (512)..(512): n is a, c, g, or t
ggagccgctgggcatagaggtcgaccagttcctggaagacgtgcggctgcaggagcgcgccaccggtggcttgttggccgaggcccccaatgaaaagctcttcttcgtggacactggatccaagaaaaaagaaccaaacaagaggacctgggtccagaagaagtctcagcgtctccagaaaccccttcgggttgaccttgcccttgagaatccttctaaggtccctgctcccaaagacatcctcgcacaccaggtccccaatgccaagaagctcaggcgaaaggagcagctatgggagaaactggcgaagcagggtgagctgcccagggaggtgcgcaaggcacaggcccggctcctcagccctcctgcaccaaaggccaaacgcgggctacaggacatcattgagcggcccttctatgacctctggaacccaaacaaccctctggacaagccgttggccggtcaggatgcattttttctggagcataccaagaagaaaggagtgaggcggncaccacgcctccatgtcaa

SEQ ID NO: 1716 - DNA, 578 bp, Cricetulus griseus
  misc_feature (84)..(110): n is a, c, g, or t
accctaccctgcagggaaatctaggcccaggcctacctaggagtcctgtatcacctgcgggccctacctcaccactgacacccnnnnnnnnnnnnnnnnnnnnnnnnnnngtggatggcagtgaaggcagtacaagctcaggtccaccttggctttcttcaagaccctgctcgttttcctccaggcgccgactgtctctctcacaagagcaccttgtagacgcaagtgcttgcctgccttcagccagcagcacccccacatccacacctgaactaggccgacaccatggcctgctccggtgccgctcacagccttgtgtattggatgggaggagggtccggcgcaagcggagacgggaggaggatgccaggtggacacgcccatccttggactttctgaaaatgacacggactttaaaaaactcaaagagcctttgctccctggactatgaagatgatgaggacgacacccaagcgaagactgttgtgtcctccccatgttactcgaaggaccttgtgagcattatcacaccaagctctagcccaaggattcccaaggctgcccctaccgttccagtg

SEQ ID NO: 1717 - DNA, 496 bp, Cricetulus griseus
  misc_feature (105)..(119): n is a, c, g, or t
ggaaagatcgcgggcgagcgaggcccgggcccagcctgaggtagggttctctactagggccaatgtctacggagaaggcctcctcccttcccagtcctctatggnnnnnnnnnnnnnnnccggcctggtctgggggcgaaggggggggggatggggtggagctgccctaaactcccccatgtggccctcattttggagtgcggaggattaatttgttccgggtgggaggtagagaggcgaatggccccatgggctcttgatgtggcgcggaggggggtgagtctcccatcctccgcgcgtgggcttctgtcctctgttcgtttccagcctctttgtcagctcctcttattatcctgccttttttcttaccgaccctgattgtggagtatatttttgctgctgtctttatcttcctgttggctatactggaggtttgggtacccaatacattatattatttgggaagctggacatggaggcccccatgggttgtatt

SEQ ID NO: 1718 - DNA, 542 bp, Cricetulus griseus
aatacaagacggtagctcattgcagtctcagggcagtctgaggtttggtggagaacattgctgtctgcagtcactctgaggacaggatcaccccccttcatttttagccttggtagaggtaagaactctctagtggcttggcttggctgctttgcttttctgatcttccacttgaggcccaacaatatctgtctctgggtttttattattcatgctgcacaccctacatagtgggttccagggcagccagagctgcatagtagagagatcatgtctcaaaccaaacaaaacaacccttacttttgtcttgcactggaaagcatgggtggagggtgagttacctggttgaagaactgtgtcatggtgcataggcactgcttccgcctctgctctagttcattttgcttgttgctccataaacacattaccttcttctggtagttatcaattctgttcagcatggtatagagattctgggtctcataccctttcccagtattttggatcatttttaatcgtgtggttatgtggtgccttgaaaa

SEQ ID NO: 1719 - DNA, 473 bp, Cricetulus griseus
acgcaatcagttgcctcaaccatatgtttttccagtctttaaggacaaaagtggcccacagtttaccagtgctctaaaaaatagtcacaaagcacttaaagcattgctaaggtcattggtggatcttcacgatgatttgctttgccagtacccaaacactacatacctattaaatgggatgaaacccaaaactgagagtgaggagatttctagtgaagatgatgagccactagcatagaagaagaagcaaagaaaagccccaccaaagaggaagctacatatggagaactatcccatcttcatggcaaagcgctttgctgattttactgtctacaggaaccgtacactgcacaagtggcatgataaaaccaagcttacttctggaaaactgggcaaaggtttcagtgcctttgaacgctctatattaactcagattgatcacattctgatggacaaagaaagattgcttcaaa

SEQ ID NO: 1720 - DNA, 524 bp, Cricetulus griseus
  misc_feature (96)..(127): n is a, c, g, or t
actcatcctcgctttgcagtgcctgtgtctttccaaattcagtgagggcttcttgagccttttgcattttggactttcagaattttggtttggggnnnnnnnnnnnnnnnnnnnnnnnnnnnnnnnnagcttttctttactgtaacgtgaaagacaaacaaaaatgtccatgctccagaagtgtcttgaaggtacatctttctacatggcattgcctctgaatgtgagcattcattactttctgattagaatcctgctctcttcaccatccatatttagtttccatttaaaaaccaggtatctacacatctttatgttaatgtatacttttctatgaagtcagcatgtgatctaaacagaggtgctaagaaacgaacagaattctcctaaggaaatcagtccatcttgataaggtgcagtaagtcgggataccaaggtacattataagtagtagcaagcctagaagctggtccatccaagcacttcacacatgctcacccgttagggtatcaatgagggtacca

SEQ ID NO: 1721 - DNA, 503 bp, Cricetulus griseus
  misc_feature (44)..(68): n is a, c, g, or t
gaacagggagtagaagagcatgagacattgctgctgcggagaannnnnnnnnnnnnnnnnnnnnnnnnggattcccgggaccctgtacagctgaaccttctctatgtgcaggcacgagatgacatcctgaatggctcccaccctgtctcctttgacaaggcctgtgaatttgcaggcttccaatgccagatccagtttggacctcacaatgagcagaagcacaaggctggcttccttgacctgaaggacttcctgcccaaggagtatgtgaagcagaagggagagcgtaagatctttcaggcgcacaaaaattgtgggcagatgagtgaaattgaggccaaggtgcgctatgtgaagctggcccgttccctcaagacttacggcgtctccttcttcctagtcaaggaaaagatgaaagggaagaataaactagtgcccacgctgctgggcatcactaatgagtgtgtgatgcgtgtggatgagaagactaaagaggtgatccc

SEQ ID NO: 1722 - DNA, 580 bp, Cricetulus griseus
tgccctcagcacatccagctgcccccttctcaggacacttgatcttcggtgggcagtaggaattaaagaccctcaaattcgggacttgctgactccacccacagataaaccaggtcaggacaatcgaagcaagctccggaacatgacggacttccggctggcaggccttgacatcacagatgccactctccgactcatcattcgccacatgccccttttgtctcgacttgacctcagtcactgcagccaccttacagatcagtcctccaacctactcactgctgtcgggtcttccactcgatactccctcacagagctcaatatggcaggttgcaataaattgacagaccagaccctgttcttcctaaggcgaattgctaatgtcaccttgattgaccttcgaggatgcaaacagatcactagaaaagcctgtgagcacttcatctcagacttgtgcatcaacagcctctactgcctgtctgatgagaaactgatacagaagattagctaagacatgctcagactggactgaacaggaaaatcttcccctgccttcccaccaaggagagtctctccctgc

SEQ ID NO: 1723 - DNA, 561 bp, Cricetulus griseus
atgttgagcatgttcagcagtgtggcttcactggctcctactttgtctccagtttttatcagctgcacatcacttagaatttcaatggtgcccctggagattttagtggtgatgcccaaagcctggaagaaagaggtcttctcgggccccagaccagtgttctgggctggcacagtgacctcacatggggcgatggcaccagcacgggcagcagccggcaccttattggccagcagcatgtccctaatttcagtgaggtcctccttggtgaacacaaagcccacattcccccggatgtggggcagcagcttctccagagctgggttgttctccaggtgcccccggatggccttgcgcatcatggtgtttttgcccatcagcaccacagccttccctcgaagggacatgcggatctgctgcatctgctttgagcccacattggctgctcccacaataaagcattttgggtaatcatccaaaagttggatgatcttaaggaagtacttggacttgcaggtcgccctgtcttcctgggcatcaccgcggtgcgtcagggattcg

SEQ ID NO: 1724 - DNA, 410 bp, Cricetulus griseus
aatctaccctcttcaatatctgcagacattaaggattataaactttatgatgtggaaactaagtgtgggttgcttcaagtgtctgaaggattgtcatttttgcatagcagtgtgaaaatggttcatggaaatgttactcctgaaaatataagggtgaataaaagtggagcctggaaaataatgggctttgatttttgagtgtcgtcaagcaatccttctgaacaagagcctaagtttctttgtgaagagtgggacccaaacttaccttcattgtgtgttccaaatcctgaatacttggctcctgaatacatcctctccgtgagcggtgagacagccagtgatatgtactctttaggcactgttatatatgctgtgtttaataaagggaaacctatatttgaagtcaacaa

SEQ ID NO: 1725 - DNA, 490 bp, Cricetulus griseus
  misc_feature (18)..(18): n is a, c, g, or t
  misc_feature (351)..(371): n is a, c, g, or t
atggaaaagagtgcaaantaatggctctcatttgaagactgtggcgttgtctagagccacactgcctagtccgtgtcccctgcagacagcaatgcccagtctgttggacctttaactcatcctcctgggcagagagattgctggctttatggtcccagctgactagggaacagctcatttggggacacactggggcacacaagctcctaagtggtactctgacaaatgctacttggctttagaaaagtgggtttttctatctgactttataatgtcactgaagtgggaaatataatttcttaatttctttttgcaaatacagggtttttctgtttggttgggtttctgtgnnnnnnnnnnnnnnnnnnnnnagacagagtttctctgtgtaacagttctgggtgtcctgggactcactctatagaccaagctggcctcggactcacagaaatctgcctgcctgtctcccaagggttgggattaaaggtgt

SEQ ID NO: 1726 - DNA, 112 bp, Cricetulus griseus
  misc_feature (40)..(59): n is a, c, g, or t
gcgttcgggtgacttttctctactaatcataaagacatcnnnnnnnnnnnnnnnnnnnncggtgcttgagccggaatagcttgaactgcccttatcattctaattccggcac

SEQ ID NO: 1727 - DNA, 137 bp, Cricetulus griseus
tattccacgtggattggaggctcaatccttgcttccctggacacctttaagaagatgtgggtctccaagaaggaatacgaagaagatggtgcccggtccatccacaggaaaaccttctaaagctgagaccgcacctt

SEQ ID NO: 1728 - DNA, 318 bp, Cricetulus griseus
agcctattcttcatgaccatataaatttaactttctgaaatctcatttcttctaagtaccttgtatttagcatgacaaagatgggtctgtgatagtatatgtgattgtatctgtatatattcttagaggcagatgtactgagcgagggggggccaccatgtaaacctttgctgagagtcagaaaggagtccatgactggctcagatatacattgtcatgagtagactgtctgtcatgggtcttcaagatggtgggtctgtttcaactgatgacacagaactgataaaagagattggctcatggcaactcctttcactt

SEQ ID NO: 1729 - DNA, 579 bp, Cricetulus griseus
  misc_feature (255)..(370): n is a, c, g, or t
  misc_feature (519)..(558): n is a, c, g, or t
cggcggggaccgaggcacatgaggacccggcgtggaccgcggagatgttgggcgtggcggccggaatgaccaacagcaacatggccaatgccttggccagcgctacatgtgagcgctgcaaggggggctttgcacctgcggagaggatgggtgaacagtaatggtgagctgtaccatgagcagtgcttcgtgtgtgctcagtgcttccagcagttcccagaaggactcttctatgagtttgagggaaggaagtannnnnnnnnnnnnnnnnnnnnnnnnnnnnnnnnnnnnnnnnnnnnnnnnnnnnnnnnnnnnnnnnnnnnnnnnnnnnnnnnnnnnnnnnnnnnnnnnnnnnnnnnnnnnnnnnnnngtgacctctgccaggaagtgctggcagacatagggtttgtcaagaatgccggcagacacctgtgtcgtccttgtcataatcgtgaaaaggccagaggccttggaaaatacatctgccagaaatgccatgccatcattgatgaacaaccnnnnnnnnnnnnnnnnnnnnnnnnnnnnnnnnnnnnnnnnaactgtgccaactgcggggaa

SEQ ID NO: 1730 - DNA, 267 bp, Cricetulus griseus
  misc_feature (211)..(225): n is a, c, g, or t
cccaggagacccaagttcatgcactggcgggcctgaaatgagagaagaccagcgtaggaaagaaaggcattatgctgaacacccttgtcagccaccaactggaatccccacactgggtgataaggagacgaatactgatgaagccggtgatggcaatatggcacttccccccaaagaccgtagcatcctgagctctctacagcatcccttnnnnnnnnnnnnnnngatagtgcgctcacaaaccttctccccatgcgagcggagccc

SEQ ID NO: 1731 - DNA, 566 bp, Cricetulus griseus
  misc_feature (17)..(45): n is a, c, g, or t
  misc_feature (47)..(66): n is a, c, g, or t
  misc_feature (68)..(82): n is a, c, g, or t
  misc_feature (111)..(170): n is a, c, g, or t
tggtggctcacgcctgnnnnnnnnnnnnnnnnnnnnnnnnnnnnnannnnnnnnnnnnnnnnnnnnannnnnnnnnnnnnnntaatgagatccaggacagcctccaaagcnnnnnnnnnnnnnnnnnnnnnnnnnnnnnnnnnnnnnnnnnnnnnnnnnnnnnnnnnnnncttacagccatagctgatgaccctaatgggggagtagaggaaattatggaagtttggggctggggtcaccatgaggactacagtgaggagtgtcaccaaggctgagtttttcctgatgaaatgagatggaggggtcaggaatgctggctactttctgatacccatgtatttcctcgggggcaggctagctctgaggagccctgctggcctgtcctctgactctctgtggtaccatcaacagctttaaggagtatactagtcacatgtgtggccttttgaagctctgaacctctttgggagctacagacttgaagctcttacaggcatctgggagcccagctgagcccttcctaccagatagtcccatgccccactccagatccaagttcctcagca

SEQ ID NO: 1732 - DNA, 534 bp, Cricetulus griseus
gccaaccatggtgaatttgggcctgtcccgagtggatgacgcagtggccgccaagcacccgggactcgaggaatatgccgtgtgccagtcgaacgccttcatgaagggcgttttcacctttgtcacagaaggtggcgccaagtcatcttgcctgcactgcaggtgcagtaggcaccaaaaccacctccttgcagccttatcaaatcaagggttccttggctcttggtaggcactggtgcgactttcggtctgcagctgttcattaagcggaaatttccataccctgtccagtggaactttctggtgtctgccgttgtagggtctgtggccagctacaaggtgacaagaatggagtctcagaaatgcagagatctctggctcttcctggagacagggaaactccccaaagacatgagcacagaccatcaagactagaagagctctggctgctggggtgtggaggatctgtctcggagaaatcctggagcacagactgtgaccccatctaactacaggctggtccttgctacctta

SEQ ID NO: 1733 - DNA, 554 bp, Cricetulus griseus
ctccttggtggaaggctgtagggtgtccctgaacctggcccggagcttccgaacggccagaccgcggctcgctgcagtcgcgtcagatacctcctgtgtccgcacgggatcgagccggcttcagagcaccgggccttccgaacccggtgggttcaagccacctccgaaacctgtcttggaggaccggcgccgagccgcggacgaaagtacaaggttcctgagtcccgaattcattcctccaaggggaagaacaaaccctctgaaatttcagctagaaagaaaagatatgctagccaggaggaaggtgcttcacattccagagttctatgttggaagcatactgcgtgtcacctcagctgaccggtatgccagtggaaaaaccatccagatcctggggatttgcatccagcggtcaagaaaagggcttggagctactttcacccttaggaacattattgaaggacaaggtgtggagatttgctttgaactgtataatcctcgaatccacgagatccaagtggtgaagttggagaagcggttggacgacagcctgc

SEQ ID NO: 1734 - DNA, 580 bp, Cricetulus griseus
tgatagtggagcagttgtccaaaacagacatctgaaaggaggtcaggagaacaggctgctgccaccgctttgtagagttgattgcattgtgtgctgcagccagtcagaaggggtgtacactgcaccatgaaggaaggcagcactggtaacaaggcaggtcctgctgcgccgctggccagcatttgaggagtaaagatggaatcagatttaactgggtaaattcccctgtcactctgggattctgtgaatcaggttgtaaattttactttaaatactaacatcagttgatactaacattctttataaagatataaaagtatattttaaaagcttttatgtatcatagctgtagctttttaatgtgggaaaatgtccaaataaaccgtccgatcactatatataatagatgctttcaaacaggcttctttttttaagggataccattctaaataacccaataatccggccttgttaatagctctccgatgcggggtactttcaaagtgctttcagcgcttgacagtatacctatccgtcaaggatcccccgctggttatatctccgacgccgtgtgctacct

SEQ ID NO: 1735 - DNA, 578 bp, Cricetulus griseus
atcggcgtttccactttaccagcgttcttgcaaactttgaccgccggcgccggaaatactacgcatgcgccatccctttgcatggtgagcctcctgattctagctgccgcagcggcaactgtggtgatcttgctgctagtcgtgagactatgggcggtcattcggccccttcacgtcgtttcccgagagtctctcacacccttgatagtagctggatccggtgaacataccactgagattctgaggctggttggaagcttgtccggggcttactcacctaggcactatgtcatcgctgactctgatgaaatgagtgccaagaaaattgaatcttttgaacatgctcgaaccaagagagactctcctcctgagcactgccttcaccgaattccaagaagccgggaagtgcggcagtcctggctctcctcggtgttcaccaccttgcactccatgtggttttcctttcccctggtttaccatctgaagccagatttggtgctgtgtaatggaccaggaacatgtgttcccatctgtgtgtctgccctgctccttgggatacttggaataaagaaagtgat

SEQ ID NO: 1736 - DNA, 458 bp, Cricetulus griseus
  misc_feature (207)..(236): n is a, c, g, or t
tcttccagtagatccttgatgctgttccatgcacattttccttccactccaaaattgttctctgaggagcaagtgtcttactccaagacttgcctgctgtggtctagtgacatactcagtagagccagtggcggagtccaatcctttccagatcagccatgtcaaagactgctagcaaagccaggcacagtggcgcacacctttagnnnnnnnnnnnnnnnnnnnnnnnnnnnnnngtctctctgatttccaagccagcctgcctggtctatagagtgagatcctgtctcaaataataagcaaaaggactgctagtcatcaatacatacaactgttgggcaacgaaaggtctctccagcagcaaagtgatagaaaaagaaattggttcaacttcatctccattggtgacggaacaacaaatggaagcttgactttgccaagacttgaattccttcggg

SEQ ID NO: 1737 - DNA, 579 bp, Cricetulus griseus
  misc_feature (75)..(103): n is a, c, g, or t
tataaagaacttacttcagcagctcattagagctacgtatggtgacactataaacagaaaaatagttgaccacgnnnnnnnnnnnnnnnnnnnnnnnnnnnnngctgactcagtgaagcgtttcagagatgcattttggcccaatggcattttagcagagactgttccatgcagagataaatctattcgaatgagaacaagaattgcaggaaaaacaaaattatttgcaattatgccagatgaactgaagcacattattggagctgagacaacacggaaaggtattcttcgtgtttttgaaatgtttcagcacaaccagttaaataggagaatggtgtatgtcttcttagaaagctttttagagaccttatttccacagtataaattccgtgaacttttcaacaaacttcattcaaagtcaaagcagatgcagaaatataaacagaaacttcaaagtactcaagcgccttctttacagaaaaggtgacactccaacctgtaaagccggtgttcatttgtccaggactaacaatgtggacacaccttccgcagtgtcatcataagctgttgcgtctgtac

SEQ ID NO: 1738 - DNA, 579 bp, Cricetulus griseus
  misc_feature (442)..(477): n is a, c, g, or t
  misc_feature (484)..(519): n is a, c, g, or t
aagtaggtttttaagatataatttgcatattatataacacaccaattataagtgatgtggttgtttttatatttagagaaacagacggttgtcaccatagtcaaagtgtagtatttatttccttttctcgggaagttctcttttacccatttgtatttaatctttgtgttagtcttacccctaggcaacaactgacctgatagtttattttattttgagactggatctcactatttagtcttggctgacctggagctcaccatgtagaccaaactgggtttgaatttatagagatctgtctgtctctggtatgctaggattgaagacatgtatttgaacatttcacatacatacacgtaattgctgtagtgttttgattctagcttctttcatttgagttacatgattttgtagtttaatcattattccctttttgctattnnnnnnnnnnnnnnnnnnnnnnnnnnnnnnnnnnnnaaaaggnnnnnnnnnnnnnnnnnnnnnnnnnnnnnnnnnnnnatttttttcttgtcctaagagaaccggccaggggcccacaaaaaaaataaatttttggga

SEQ ID NO: 1739 - DNA, 579 bp, Cricetulus griseus
tctataataaactagtgaatgtattctcctagtctcgtatctcatcttgcgccccttcttcatttctaatttaagcaaaagagtaaccctccccccaaaaaaagagaaagaaatcctatataatggttcaggaaagcttattgactaaatgggttgtaacgtcttggaaatccacaatactaaactttgaaacaatattatagcttacttttggagtctgtcacattagtaaggagacaggattatgatgttgcgtttttaatctttagggaaactagtaggatttctgggccaaggaatgtagctgagtttgtagagtgctagcctaacatacatgaagatctgagttctggctcagcatttagaacatagggacagaagttaaaggtcagcatagactacataagatgctatctcaaataaaatagagtttattatctaaggttgacaagattgtgaagatcagaagagatagcttgcagggatcaatcagttctgtgtgagttttggatcaactttccattatgtaattcttagatcaaccatgttggttgcccataatttctttattcaataaat

SEQ ID NO: 1740 - DNA, 569 bp, Cricetulus griseus
cgcgagcaaggtctcgcgggtgttgctcttcggccttcattctgtctgtagaaccctgatttctcatccccgttcccaatgttcccggaactcaataaccttctcggcaccaccccagacgggacggagcaggggaaactgactctactctgtgatgccaagacagatggcagctttcttgtgcatcacttcctctccttctacctcaaagctaattgtaaagtctgctttgtggcacttgtccagtccttcagccattataatattgtggcacagaagctgggtgtcagcctgacggcagcacgggagcaagggcagctcgtgttcctggagggtctcaagtcctcagtggacatcttcttccatgctcaggaggagcctcaccccctgcagttcctcatggaggccagtgcagggaacctacagtcgctgtatcagtttgttcgggactccctgaagcccgtggacagtggggaaaccccgtggaagttcccagtgctgttggtggacaacctcagtgtgctgctgagcctgggcctggaggcagttgctgtgctggacttcatgca

SEQ ID NO: 1741 - DNA, 580 bp, Cricetulus griseus
  misc_feature (521)..(541): n is a, c, g, or t
cgccgggatcctgctctccatctacgcctaccacgtggagcgggagaaggagagggacccggagcaccgggccctctgcgacctggggccctgggtgaagtgctccgccgccctggcctccagatggggtcgaggatttggtcttttgggttccatttttggaaaagatggtgtattaaaccagccaaacagtgtctttggacttatattttatatactacagttattacttggcatgacggccagtgcagttgcagctcttgtcctcatgacctcctccatcgtgtctgttttggggtctttgtacctggcctacattctgtactttgtgctgaaggagttttgcatcatctgcgtcaccacatatgtgctgaacttcattctcctcatcatcaattacaaacgactagtttacttgaatgaggcctggaagcgacagctgcagcctaaggaagactgacggctggcggattcccacccaactgtctcaaacacttctttcattaagtttattgtgcaannnnnnnnnnnnnnnnnnnnntacacaacagacacttttccctgagaatctataactgat

SEQ ID NO: 1742 - DNA, 581 bp, Cricetulus griseus
  misc_feature (396)..(425): n is a, c, g, or t
gggtaaagatcggtgtgactgggtccttagcaggaaagcaagagataatggagcctggcaccaaagtagtgtcaatgactgaaaacagaaaggaaatgaaatggataagggataccttggagataaacttgaaatttccagtcacaagcgttcctttcttctcattccaacatgatgtcccgaatgtttgtttttaatgtgtatggatgtttttaatgtgtcctgcatgtatatctgtgtgtgcctagtgccagtggaggccataagagggcattggatcctctgggactgaagttgtaggcagctgtaagcctccatgtgacctaaaacgtaactcatcatcatctggaggaacagccagggctctgttgtttttatttgttttttgtctttcannnnnnnnnnnnnnnnnnnnnnnnnnnnnngtcctataactcgttctgtagactatgctgacctcaaactcacagagatctgcatgcctctgcctcccaaaatgctggaattaaatgcatgtgccaccactgcccaacctgcagccagggctcttcacagtgagtcatctctccagtccccagttt

SEQ ID NO: 1743 - DNA, 581 bp, Cricetulus griseus; identical to SEQ ID NO: 1742
  misc_feature (396)..(425): n is a, c, g, or t

SEQ ID NO: 1744 - DNA, 528 bp, Cricetulus griseus
  misc_feature (477)..(493): n is a, c, g, or t
atgtatacaacattctgcttccttgtatatctgcacaccagaagaggggaccagatctcataacagatggttgtgagccaccatgtggtagctgggaactgaactcaggacctctggaagagcagccagtgctcttaacctctgagccatctctccagccccacacaagttcacttctaaatactcctatcaggaagctcacaatcatctgtaattcccccaattccagaagggatccaaaacctctagcctccaagggtacctatactcacatacacagacccatacacagaagtataattaagcatttataaaaataaatcttaaataaaaaagtccatgtgtgatagagcacatgtgtaattcaacactcaggaggtaaagtatagagccaaaagttcaaggccaccctgatctacatgaggagttcagatgcaagtatgctctttctacacagcaaattccaaattagtcacnnnnnnnnnnnnnnnnnatcttatcaaaaaaaaagaaaaaggaaaaaagatg

SEQ ID NO: 1745 - DNA, 540 bp, Cricetulus griseus
agagacaataacttttcttaccaaggctcaacgctctggcctctgcaagggccatcttctcattgtcactgtgactgtgacctcaccagacatacacacagctgctccctcagttgtccccgggggtgagggccccaccatgctgctatgacccttttcctgtctctcctctcctccctgtcctacaagccctccctgcatttgtccatgggttcatgaacctgctcctaaagctcctggattattgtgtgggagaagctttggccattgtctatggccagtgacagcaaggagagatggctataggggtctgctaaaggcttttgttaatcaaagaagccagatctggtgaaccaccagctcatccctatctccaggacttctgtctgaccacacaagtcagttctgatgctgggtgtgcctccacctcttcctcactcctgcctgtgtggccaggtgctgacccaccttgaggactgactcccagggaacactagatgctcatccagggctggtagcttatttttttgttttttgggt

SEQ ID NO: 1746 - DNA, 578 bp, Cricetulus griseus
  misc_feature (552)..(567): n is a, c, g, or t
gcgccccgcggtgcagatcccctccccctcccgttttcctcctccctccctccctcagccttgctctgggacgctggggagggggctgagcccgggtgcagagaactcatctgggtttccgagaatggtaaatacggctggccgtctctggaaaggccactgatctgcctcatgtaaagtatgctcagttcctttccagtggttttgctggaaaccatgtctcactatacagatgaacccagatttaccatagaacagatagatctactccaacgtcttcggcgtactgggatgaccaaacatgaaattctccatgcattagaaactttggaccgtcttgatcaagaacatagtgataagtttggaaggaggtccagctacgggggaagctcatatgggaacagtaccaacaatgttccagcatcttcctctacagccacagcttccacgcagacccagcactccggaatgtccccatcacccagcaacagttatgatacctccccacagccttgcactaccaatcaaaatgggagggagaacaacgatcgnnnnnnnnnnnnnnnngggaagatgtc

SEQ ID NO: 1747 - DNA, 576 bp, Cricetulus griseus
  misc_feature (280)..(299): n is a, c, g, or t
ttgaatccttgcagtagccgggtccaggttagttggccactgaccccaatctctgggttgtgccattcaaaggtgaagtaaggttggctcagggttgaaaaatgtgaggttgaaaaaagcatcctttaagttcaggacagcataccaagtgtgctctggtggcagggtatatgggtttgggactgtgggatgaatgtccattatctatttgtcaacttctctcaagtcctggaccagttgattatcaatggcatgaggctttttgacaggtggattgggnnnnnnnnnnnnnnnnnnnnttcaggtcgactgaataggcctcagtaccccaaggttcaacagacaccttatgtgggatgtaatacctgccttatcttcccggggcatggggtacaggtggacattaataggtcctgttccatgttttacgttcactaatattttttaagtcctatacctccagtttcagtcctggcttgagggaactgagaaccatatctatacgtcagcctctggctcgacctcgggttggggtagcctgtatttatctgtgaggtaatgagtcatgaacacctg

SEQ ID NO: 1748 - DNA, 580 bp, Cricetulus griseus
gggttctggaagcaaaggagctggcactacagcccaaagatgacatcgtagatagagcaaaaatggaagatactttgaagaggaggtttttctacgatcaagcttttgctatttatggaagtgtcagtggtctctacgacttcgggccagtaagatgtgctttgaagaacaatatcatccagacctggaggcagcactttatccaagaggagcagatccatggagatcgactgcaccatgctcacccctgagccagttctaaagacctctggccatgtagacaaattcgctgacttcatggtaaaagatgtgaagaacggggagtgtttccgcgctgaccacctgctgaaagctcatttacagaaattgatgtcagataagaagtgttctgctgagaagaaatcagatatggaaagtgtcttggcccagctcgataactatggacaacaagaacttggggatctttttgtgaactataatgtaaagtctcccactactggcaatgacctgtctcctccggtaccttttaatttaatgtgcaagaccttcattgagccacgaggaaatatgcctggatatc

SEQ ID NO: 1749 - DNA, 578 bp, Cricetulus griseus
ggagaacaggctggctggctggctggctggctctatccaatatcactattgctattgtatggaagttttgtaaatatttacccagaactaccagcacctgacagacactctcctggaaacaaacataccagacagtatcttacagaaagcaagctaagaaccataaagcatgcacacaaaggcctctagagaaacaaactgaatgcccaaatttaggttattacactaaaatgcacttaaagaacccttcagataattatctttatataaaatttatgtttattatctcagagttcacaatagtttaaaaagcagaaagaaaatttgatagcacataatgagaaacattacaaaaaaataccaaatataaccaaagataagcaggggctggagatgcacattacatgacttatggcaggggtggacaacacttgaacaaactgaagagtgtgcaaaacaggacctttcctgtctcaatacatctttcaaggcagtgggcagtggtagcgcacgccttttattccagcacgcatgaagcagatgcaggccgatctctgtgaattccatgccaatctggt

SEQ ID NO: 1750 - DNA, 575 bp, Cricetulus griseus
  misc_feature (2)..(16): n is a, c, g, or t
  misc_feature (77)..(102): n is a, c, g, or t
  misc_feature (426)..(440): n is a, c, g, or t
cnnnnnnnnnnnnnnntgaagccagcctggtctacatagctacttagctagtttcaggacagccagggctacacaannnnnnnnnnnnnnnnnnnnnnnnnnctctttaacagcacagtgcattcacagccacagtgtggggtgactttcaccacactttatacccagaccacttcattgtccccagaaaaagttacatattctctaaaaagtcatttctcatttttcagccccctcaaggcaccaacctgctggcctactgcctcgatcaactgtgcctgatctgggtgcctctatcaacaataatgtgtggccttttgtatctgattcctttcacttggaacagcattaatgaaacttttccatactgtaggaggaatcagtacctctttagtttttatgactgaacataaaacattccactgnnnnnnnnnnnnnnnccatagaaaaaacgctaatgatgatgaggcaggaggatcatgagttcagaccaacctgagatattttaacaaatgcatagacatattctactacaggaatatatccacatttttctccttaacaactgatgaaat

SEQ ID NO: 1751 - DNA, 579 bp, Cricetulus griseus
  misc_feature (450)..(476): n is a, c, g, or t
aattaagctggccctcaggttcaggctcagttcttgcagttggttaaaactgaacacatctgaatgactacttcttctctgaagagaagtgccctgtgcacttgcaaagtcaacagtatgccctgccatgacgtgtgatcttaacttccaatgttcatgtgtgctgaagtgtgaggaacattgagatatcattttctgaggagtgaaaagacataaaaaaaaaatgaatcctatagacagagatggggttaggggagggagaaaagtggtgaagagcacacactgctcttttgagatctgagtctagaaagaagcaggcttcagagaaaggttctaggcccatgcagagagccagtcaacatggctgcagtgcaggagagatactggtcttgtggtctgggaacctggaacctggaacctagaacctagaaacctggaacctggatcatnnnnnnnnnnnnnnnnnnnnnnnnnnncaagcaaagctgtgaacagaacctgttccagttaggtttacctcttgatttaaatcgtgtgtctgaggatctgcgattgagagagtgtatgaagtttctggta

SEQ ID NO: 1752 - DNA, 579 bp, Cricetulus griseus
acattgcacatgggaattcctccatcattgcagaccggattgcactcaagcttgttggccctgagggcttcgtagtgactgaagcgggattcggagcagacataggaatggaaaagttcttcaacatcaagtgccgatattctgggctccagccacacgtggtggttctcgttgccactgtcagagctcttaaaatgcatggcggcggccccacggtcactgctggactgccccttcccgaggcttacaccaaagagaacctggacctggttgaaaagggcttcagtaacttgaggaaacaaatagaaaatgctaggatgtttggagtgcccgtggtcgtggccatgaatgcattcaagacagatacagacgctgagctggacctcatcgcccgcctctccagagaacacggggcttttgatgctgtcaaatgcacccactgggcagaaagggggcggagagccttatccctggctcatgccgtccagagagcatcacatgcccccagcaacttccggctcctctatgacctcaagctctccattgaggataaaatcaggatcatcgcacagaagatct

SEQ ID NO: 1753 - DNA, 569 bp, Cricetulus griseus
tggacaggcttgagaaggagctaaaaaaacgaaatcctgaagttcggcacgtagatctggagatcctatagatatgatgaatgagtcacttgggacatagagacaacttcctccccactgaaggggagtcagtgccgtccagtgcttctcaagctagatgggatatttcatgtgctgagcaattgaagaggccacaggactaaaactcctttcttctaatcatgtcttcatgcttttgtagggacattggctgcttagatcacccacagtttctcaatttagccagtctgtattgaaccgtgaaatcatgtttcctttcttaacatggtaaaataagtgttccctgtggacttgtaacttaggttaccactgaagactttagtccatcgaagtcttctgatcttgaatattctggctaaaccttgtagtgtgtttagttaaacagtcactgtgttttgagttctgtctttcctggccagttgggaaagtatttctgtatatattgtgggttcgacctgaacactgagaggcactctcctgacttcattatccacagatgttcattccag

SEQ ID NO: 1754 - DNA, 579 bp, Cricetulus griseus
aaaccacgctgtcaaaaagtagccagttacaaacaaaatgagtatccccgcactgctgctgctgcgtcctttccagcatggaatcaacagccttcgggtgccttccccacggcttcactgcatccttcactcagggcggcaccctgcatcccaagccccaagtgctccactgtggaagccctctggacaccattgtactaagtggatgctgctgtctggtggcctgaggagagcattctgtatccaggccaccttgaaggaccacaaagagggactttctgataaagaacaaagatttgtggataaactttatatgggtttagtcagcgggcaaagagcttgcttagcagaggccataactctggtggaatccactcactctcggaagaaagagctggctcaggtacttcttcagagagtcctagtctaccaccgagagcaggagcggctcaaccaaggaaagccccttacatttcgagattgtctgggccccctggtgcagggaaatcaacctttatagaatatctttgaaaaatgctgactgatagagggcacagattatctgtgctagctgtggac

SEQ ID NO: 1755 - DNA, 570 bp, Cricetulus griseus
aaaaaaaacagggttaaaacaggcctataatcccagcatttgggaggctgacaaaaaaaggttataggtcccaggctggtctgggtacatagcaaattcttgtctccaaaaccaaaaataaacataaaagaacatcttcaaaaaaattatctttgctgtaacatataactgttgtagccattacaagtatacttttgagtattactatagtaacataaaatgatcattatgttcaaaaaaattaaaactcttaagtagaatacaaaactataaataggagtccaatgaggcaaaacatatataacaaagcaggtccatttctgtggatgtgttgcaaacatccaaatgggaaatcgtcaacaattaaacgtgatttaaattaaattaccacctttggagaaggttatgattatcttatttcacagttgtaaaaactcaagttccaattttaaaaaacaggtttacaggcaagtcttgaactgaaaacacaaatgtactaaacagtctattttgttgttgttgctgtttgtttctaaaacagtaaggtgcaatgtagggctcactaacata

SEQ ID NO: 1756 - DNA, 578 bp, Cricetulus griseus
tcaagcagctggtggctcggcctgatgttgtagagatgcacgacgtgactgcacaggaccctaagctcttggttcacctcaaggccacccggaactccgtccctgtgccacgccactggtgttttaagcgcaagtacttgcaaggcaaacggggtatcgagaagcccccctttgagctgccagacttcatcaaacgcacaggcattcaggagatgcgagaggccctgcaggagaaggaagaacaaaagaccatgaagtcaaaaatgagagagaaggttcggcccaagatggggaagattgatattgattaccagaaactacatgatgcctttttcaagtggcagaccaaaccaaagctgaccatccatggagacctatattatgagggcaaggagttcgagacaaggctgaaggagaagaagcctggagatctatctgatgaactaaggatctccttagggatgccagtaggacccaatgcccacaaagtccctcccccatggctgattgccatgcagcgatatgggccacccccatcctacccaaatctgaaaatccctgggctgaattctcctatt

SEQ ID NO: 1757 - DNA, 579 bp, Cricetulus griseus
caaccgggaagagcaagaggagcttatggactttgaaagagatgaagagcgctcggccaatggtggctctgaatcagatggggaagagaacattggctggagcaccgtcaacctggatgaagagaagcagcaacaggatttctctgcttcctctaccaccatcctggatgaggagcccatcgtgaacagagggctggctgctgccctgctcctgtgtcagaacaaagggctgctggagaccacagtgcaaaaggtggcccgggtgaaggctcccaataagtcactgccctcagctgtgtactgcatcgaggataagatggccatcgatgataagtacagccggcgggaggagtacagaggcttcacccaggacttcaaggagaaggatggttacaagcccgatgttaagattgagtatgtggacgagacaggcaggaaactgactcccaaggaggccttccggcagctgtcccaccgcttccacgggaagggttcaggcaagatgaagactgagcggcggatgaagaagctggatgaggaggcgctcctgaaaaagatgagctccagtgatacgcccct

SEQ ID NO: 1758 - DNA, 579 bp, Cricetulus griseus
agatgtctgacatggaggatgatttcatgtgcgatgatgaggaggactacgacctggagtactccgaagatagtaactctgagcccaacgtggatttggaaaatcagtactataattccaaagcattgaaagaagatgacccaaaagcagcactaagcagtttccaaaaggttttggaactcgaaggtgagaagggagaatgggggttcaaagcactgaaacagatgatcaagattaacttcaaattgacaaactttccagaaatgatgaacagatataagcaactcttgacctatattcggagtgcagtaaccaggaactattctgaaaagtccattaattctatccttgattatatctccacttctaaacagaattctgattttttatgtcagatggatttactgcaggaattttatgaaacaacactggaagctttgaaagatgctaagaatgatagactgtggtttaagacaaacacaaagcttggaaaattatatttagagcgagaagatatggaaagcttcaaaaaattttgcgccagttacatcagtcttgtcagactgatgatggagaaga

SEQ ID NO: 1759 - DNA, 523 bp, Cricetulus griseus
  misc_feature (22)..(78): n is a, c, g, or t
  misc_feature (101)..(160): n is a, c, g, or t
  misc_feature (182)..(236): n is a, c, g, or t
  misc_feature (261)..(403): n is a, c, g, or t
  misc_feature (428)..(446): n is a, c, g, or t
acacacattcgataggtatgtnnnnnnnnnnnnnnnnnnnnnnnnnnnnnnnnnnnnnnnnnnnnnnnnnnnnnnnnnccctacttgtagtagtgtcaaannnnnnnnnnnnnnnnnnnnnnnnnnnnnnnnnnnnnnnnnnnnnnnnnnnnnnnnnnnnccatctctcatactcctacctnnnnnnnnnnnnnnnnnnnnnnnnnnnnnnnnnnnnnnnnnnnnnnnnnnnnnnnttcttaatcaatactttagctatannnnnnnnnnnnnnnnnnnnnnnnnnnnnnnnnnnnnnnnnnnnnnnnnnnnnnnnnnnnnnnnnnnnnnnnnnnnnnnnnnnnnnnnnnnnnnnnnnnnnnnnnnnnnnnnnnnnnnnnnnnnnnnnnnnnnnnnnnnnnnngaaaccgactacaacaaaaaactgnnnnnnnnnnnnnnnnnnnttctacaaactcttctaatcccaacattttcagcaaacgagcttatactattttatattttatttgaagccacactt

SEQ ID NO: 1760 - DNA, 393 bp, Cricetulus griseus
  misc_feature (6)..(38): n is a, c, g, or t
  misc_feature (92)..(127): n is a, c, g, or t
tggtannnnnnnnnnnnnnnnnnnnnnnnnnnnnnnnncctttctcattctaaccactgcaatatataaggagaaacacagtacttacttannnnnnnnnnnnnnnnnnnnnnnnnnnnnnnnnnnnaattttatccagtaattttatgatgactattggttaaacttttaagacctttttgttgacaatatgttacataactaggaaaattatgcaaaattaatctgaacaaattaaggcttgataatttttaaattttctgtttgcaacatatggttgcaatcattcccagaaagtgctttttcctggcacctactatgcacttggccatctctagatgaagctgaataattccttcctagcctgcagctggcagaaattcatggaagtag

SEQ ID NO: 1761 - DNA, 579 bp, Cricetulus griseus
  misc_feature (7)..(34): n is a, c, g, or t
  misc_feature (545)..(569): n is a, c, g, or t
gagatgnnnnnnnnnnnnnnnnnnnnnnnnnnnngcacctgaactcttgccatctgactgtcaccagtttggggaggaaaagaggcctctcctaagaatgtccccagctctggaaatcatgctcccctcacttgtaataatcagctaaggaatcctgaaccaagtgaggaacaaaggctcatgaggccgggactcccttcactgtctttctcaaaattgggttgttaagaacaaaaccaggcaggaccagtggcgcccgtgctcagaagggtcctcccggcagcttgacactgactggttctccgtctccgtgttgatttggggagaaatcaattttgtcttgggattttgtatgttataggaatccttagagaatgtgattccttctgatggggagacagggcaaattattttaatgttttgtattttcacctttataaagatgaaatcctcaggggtgaagaactggttgcataattttctgaatttcaggcactttgtgctgtatgaagacccggatatttaagccttttgggtagtaaggnnnnnnnnnnnnnnnnnnnnnnnnngccgcgacag

SEQ ID NO: 1762 - DNA, 567 bp, Cricetulus griseus
taatgtacacgtgacatttgtagcattctttaatccattttctgaaatgtatttgacattcaattacagtcagccttttgttttgtagaacattggtactattggcacagtctaaagccattaataattttatccatctgataattttacagtaagtaggcctcagttttgatagtcatcaaagaaacattgtccaccgtgacatttagattaagggcatttttaatagttgtatggctttttactgttagactaatggaaatcactaaagaaactgtagcatttcaaattatgcataagtatatagccattttgcagtttctttatgatgaaatacttaaactcattgttcttggtagatatgcttttgtttttctcataaaattataccagaaaatttcttctttttaagattttttagttagcagggatcaaaagcattttgtggaaacaaaccagctagtaacagtgcagcaacacttttaatttagctacaaattctccttttccaacttatgaaatccaaactgaattgtacattcaatacagagaaagggtggtcatctc

SEQ ID NO: 1763 - DNA, 119 bp, Cricetulus griseus
cattagcaggacattacggaatgccaaacagtccagacactgctgtactcttgttcagctgtgaacaagggaacactgtggctcagagaactcagactcattgaggagttaggaatgca

SEQ ID NO: 1764 - DNA, 580 bp, Cricetulus griseus
  misc_feature (276)..(297): n is a, c, g, or t
gaatttcatctgaatgagagtggtgacccgtcatcaaagtccacagagatcaaatggaaatctggaaaggatttgacaaaacgctcaagtcaaacacagaataaggccagcaggaagaggcagcacgaagagccagagagcttctttacctggtttactgaccattctgatgcaggtgcagatgagttaggagaggtcatcaaagacgatatttggccaaaccccttgcagtactatttggttcctgatatggatgatgaagaaggagaggcagannnnnnnnnnnnnnnnnnnnnngaggaggaaggcttggaagatattgacgaagaaggggatgaagatgaaggtgaagaagatgaagatgatgacgagggggaggaaggagaggaggatgaaggcgaggatgactagcacagaagactgatggattccaaccctcttttttattttcttttattttcaattttctccagtccctgggagcaagttgcagtcatttccctcccctccccaatccctcttgtgctcagtcgccctgtttttgaggtctcttctcaacaccatggctctcaacttattt

SEQ ID NO: 1765 - DNA, 460 bp, Cricetulus griseus
ctcccatctaatcacgtcattgaccgctggcttggagagcccatcaaagcagccatcctccccaccagcattttcctaaccaacaagaagggatttcctgttctttctaagatgcagcataagctgatcttccgactcctcaagttggaagtgcagtttatcatcacgggcaccaaccaccactcagagaaagagttctgctcctacctccagtacttggaatacttaagccaaaattgtcctccacccaatgcttatgaactctttgccaaaggctatgaagactacctgcagtccccacttcagccactgatggacaatctggaatctcagacatacgaagtatttgaaaaggaccccatcaaatactctcaatatcagcaggctatctacaaatgtttgctcgaccgagtgccagaagaggaaaaggagaccaatgtccaagtactgatggtgttgg

SEQ ID NO: 1766 - DNA, 491 bp, Cricetulus griseus
atttgtagcaaaatcagcaacattattaagcagttcaagctgagctgtagcaagctggctgcctctttccagagtatggaagtgaggaactctaactttgctgctttcattgacatattcacatccaacacttacgtcatggtcgtgatgtctgatccatccattccttctgcagctactctgatcaacatccgcaatgccaggaaacactttgaaaagctggagagagtggatggaccaaaacagtgtcttctcatgcgctaaacattgccgaatattgtttcacacaaaaaattgaaacactgtttctttattgttggactcctatgtgtagactctaaaatactgggatgcttaccacttctgtatttcttctctactccccagtcttaccgattaactctgaatgctatttattcaaatagccagtgaggagttacaagatcgggtgtccatgaaggtggggtaacgtatacgtaggtgataatacg

SEQ ID NO: 1767 - DNA, 579 bp, Cricetulus griseus
cacaaatacataagcacagtaacatccaccagtaggcttgtgcccaaaccaaaatacggcatcctcctcttacaaatctgttagtaaagagcatacaaaccttagtaagtatttttaatacaaagaactaaaagaattgcactgtaccttttgtttgactctaatcaaatgaagcttagcattgtcatggtggacagaatatgttgttggttccctagagatgtcctcaccataatccccagaacctgtgaatgaactgccttgtatggtcagatgctcttatcagtataattaaatttcagatgttaagatggggaggttgtcctggatgtctaggtggggccagtgtcatctcagtgaacccatacaagtgaaaggaggaggcagaggctagaggaaggctctattagacactcctctctggtggctatgatcctataccttatagaagaaacagaatggaggaaaagttgactttggcttctgattcaaggggatgccattcatcatagcagggaaagtggctctttattgctcatagtgtgatcaaatatcccacaacacagatggatttgtgta

SEQ ID NO: 1768 - DNA, 579 bp, Cricetulus griseus
  misc_feature (475)..(508): n is a, c, g, or t
  misc_feature (547)..(569): n is a, c, g, or t
cattgaccttcactttgctgtccctctactgtccttgccacagccccgacgctgctgatagcacgtctttcgatgtccagttaggagatatcatcctgacagcgacagacgggcattgctggtccctgtgctcacttcacccacacaccttccagccaacagtgggctcagagaaggttctcttgcggctatcaccagtgggaaatctactcagttccaataggaaagtgaggggagagcagagaacaagctctctcaactccatgcgttaaggaaactctaacctcaaataaacaacctagtacctggtgaagatggagccacatgttggggaaagaagcatgggtgtggtgtggacagaatacagatagaaggtgtttcaactaaaatggtcagggactggactctggggaaagtgggagctgaagggaccagctgggagaaggcaatctgtgggaaggtgacggcatgtgcnnnnnnnnnnnnnnnnnnnnnnnnnnnnnnnnnncccaaactaaaagcaggcaaggtcaggcgttggtggggnnnnnnnnnnnnnnnnnnnnnnntgatgcagag

SEQ ID NO: 1769 - DNA, 579 bp, Cricetulus griseus
  misc_feature (85)..(114): n is a, c, g, or t
gcaccttccaccagtgtgtgcgactcagcaagtttgactctgaacgaagcatcagcttcatcccacctgatggagagtttgaacnnnnnnnnnnnnnnnnnnnnnnnnnnnnnntccttcctttccgggtgatcccattagttcgggaagtgggacgcaccaaactggaggtcaaggtggtcatcaagtccaacttcaagccctcacttctggcccagaagattgaggtgaggatcccaaccccactgaacacaagcggggtgcaggtgatctgcatgaaggggaaggccaagtacaaggccagcgagaacgccattgtatggaagatcaagcgcatggcaggcatgaaggaatcacagatcagcgcagagattgaacttctgcccactaatgacaagaagaagtgggctcgaccccccatctccatgaactttgaggtgccattcgcgccttctggcctcaaggtgcgctacttgaaggtatttgaaccgaagctgaactacagtgaccatgatgtcatcaaatgggtgcgatacattggccgaagtggcattaatgaaacccgctgctagctgccta

SEQ ID NO: 1770 - DNA, 580 bp, Cricetulus griseus
gaaggcagtgggagggagaaccccttccaaaccggcctctgtgaagaaagcagccgccgcccagagcagcagctcctccgaaagttccagtgacgaggatgagaagcccaagggcaagggcactgctaaaccacaggccagcaaggccaatggcactccagcttctcagaatggaaaggcaggcaaggaaagtgaggaggacgaggaggaagaagagacgaaaatggcagtttccaagccaggaaagaaacagaagcggaatgagacagcagaggaagcagggacgcctcaagctaagaaagttaagctccagactcccaacacatttccaaaaaggaagaaagcagaaaaaagggcatcttccccattccgaagggtcagggaggaggagattgaggtggatgcacgcgtagcagacaattcctttgatgccaagcgaggtgcagctggagactggggtgagagagccaatcaggttctgaagttcaccaaaggcaagtccttccgccatgaaaaaacgaagaagaagcgaggcagctaccggggaggctccatctctgtccaggtcaattctgtcaag

SEQ ID NO: 1771 - DNA, 579 bp, Cricetulus griseus
ttatcagaatgaatgacacaaggctttaccatgaggctgacaagacctacatgttgcgagaatatacatcacgagagagcaaaattgctaatttaatgcacgttccaccttccctcttcacggaacctaatgaaatctctcaatatttaccaatcaaggaggcagtttgtgagaagctagtatttccagaaagagttgattctagccctgcggactcacaaagcacaccctcggaatagaatgtggtacagcctactctccgtgtagagcctgcctggacatcttggctgtttgtagggatatttttattatgagaattaatttccttgcttatgctcagattttctgtggccttaaaggaaaataaaagagtgttacaggcaggttccacttaactcccatttatattgtctgtcttaaagttcctactggagttgtatgctctggagcaaaatttggattcctaaatgatcccaaattgtgacctcagcagcagtgatgtgtatgtgtctcaagaggggggacatgatctgcatccatcatgaagcatagtcttctactgtgaagaggctaaattgt

SEQ ID NO: 1772 - DNA, 578 bp, Cricetulus griseus
atagccattgtcatcgtgcttctcatcatgtgcgtgtacaccaagtccatgttcatcacgctcatggccatgtttgccgtcatcagctccctgatcgtctcctacttcctctacagagtcgagtttaactttgagtttttcccctttatgaacctcactgcactcatcatcttggtcgggattggtgcagacgatgcctttgtcctgtgtgacgtctggaactacaccaaattcgacaaaccgcgtgcagacacatcagaagcggagagcatcaccttgcagcacgccgccctctccatgtttgtcacaagcttcaccactgccgccgccttctacgccaactacgtcagcaacatcacagccatcatatgcttcggggtttacgcagggacggctatattggtgaattacgtcttgatggtcacctggcttcccgctgtcattgttctgcatgaacggtacctcctcaatatattcagctgcttcagaaagccccagccacaagcctatgacaagagctgctgggcggtggcctgccagaagtgccgcaaggctctctttgccatctcagaagcgtc

SEQ ID NO: 1773 - DNA, 580 bp, Cricetulus griseus
  misc_feature (75)..(113): n is a, c, g, or t
  misc_feature (216)..(231): n is a, c, g, or t
  misc_feature (548)..(548): n is a, c, g, or t
ggaactcccaggatgattatgatgaggagaggaaaacaaacctttctgcagttgttgcagcacaaagcaattggnnnnnnnnnnnnnnnnnnnnnnnnnnnnnnnnnnnnnnnacacatgagctctgctacaatgctgcctgtgcgttaatagggcaaggccagctgaaccaggccatgaaaatcctacaaaaggctgaagatctttgtcgccgtnnnnnnnnnnnnnnnnctgatgggactgaggaagacccacaggcagaactggccatcattcatggtcagatggcgtacatcctgcagcttcagggtcgtacggaggaagctctgcagctttacaatcagataataaaactcaagccaacagatgtggcactgcttgctgtaatcgcaaataacatcattaccattaataaggaccaaaatgtctttgactctaagaagaaagtgaaattaaccaatgcagaaggagtagaattcaagctttcaaagagacaactgcaagccatagagtttaacaaagctttgctggctatgtatacaaaccangcagaacaatgccgaaaaatatctgccagctt

SEQ ID NO: 1774 - DNA, 435 bp, Cricetulus griseus
aaacatttgttggtgtaaggcatgacaacaggcatgatgcaaaatgcttatgttgcgtgttagaaatgagccatgggtgagcatttctagaaacactttggattcattctacatttgacttttatttttttggctgttgttacattgagaaattttttatgatgtcaattttgtatcccacatttaattacaactctgtgggtcacaatttacgaaattgtatccttagatggcaagatctattttatctttgtgtatttaagacatcaagtaaagcttgtattatttatataaatgaaattgtcacagtcattttatatcctttcctttaagtaacagtacataatccggagaatcaaagctacttgatagcctataaagattcacaactcatcatttcatcagctaagtaagtttttgtaaactctctcatta

SEQ ID NO: 1775 - DNA, 582 bp, Cricetulus griseus
  misc_feature (263)..(280): n is a, c, g, or t
agaaaagagaaagcttggacatagggaatctttccatttcccctgttgcttgcaacagctgtaaaggtcccaaatactgggatctggggtgctgttaggcagccatttggattggctatctcagggatttgattgtaaaagtgagtaagtttagtgctcttcaagttgggtgccaggttttctaggaggcatcccaagggggaatgagaggggatggatgtccccgttcccatggatgccctttaacactgggtcatgggggnnnnnnnnnnnnnnnnnntgagctcaaggtcaagctgttgtcagcttcttacaaagtcatcaatcccaccatgagctaatgacctctgtagggagcagagtaaatgtatgttgttgatatgggcacacccatgctgaagacttcaagggctcagctcaatgggtttctccactagcccatgctcggggagtggcaaagctttctctggggggtctaagtatgcctgtttttgaaaaaatgatcagtgtgtgcagactggcaactgcagctctcctcccggatatttacaactgagagtgctttcctaccgaagcctccca

SEQ ID NO: 1776 - DNA, 567 bp, Cricetulus griseus
cccaaaattttggagtttaattgccgttttggtgatccagaatgccaagtaatcctcccacttcttaaaagtgacctttatgaagtgattcagtccaccctagatggcctgctgagtacatctctgcctgtttggctagaaaaccactctgccgtaactgttgtcatggcaagtaaagggtaccctggagcctacgccaagggtgtagagataacagggtttcctgaggcccaggctttagggctgcaggtatttcatgcaggcactgctcttaaagatggcaaagtggtgaccagtgggggcagagtcctcacagtaacagccgtcggggaaaatcttgtgtcagcccttgaagaagccaagaaaggactcgctgctataaagtttgagggagcagtgtataggaaggatattggcttccgtgctgtggccttcctccagcagccaaggggcctgacttacaaggaatctggggtagacattgcagctggaaatatgctggttaagaaaattcaacctttggcaaaagccacctccagaccaggttgcaatgttgaccttggagct

SEQ ID NO: 1777 - DNA, 579 bp, Cricetulus griseus
ttttggagacattaagatggtactgaagattgcttttgttcctccccaaccccctatttgtatgcacgaaaagaggaatgacaaattgaacattttcagtgtagtacctcagcatgtgtgcaggcagggagtctgtcgtaaagtccaacctgggatgagatgtggccgttcaatttcattccctaaatcagattaatagaagctgtcctaccaaagaatctatcaaaacagttgtctctctcgtttgcagaggtgtgagaaatgaagaggaggcatcagagcttttgactagtcacattttcacaaccagcatgttgagtgagcctgacaaatctcaagtacttctgccagacttttctataatgttcagagtccccacagcacccatttccacagtgcaaggtgacatagactagtacttgctacaaatccacctctttagaagcatgtaagaatctatagcagtggttttcaacctgtgtgtattgaccccttcgggggtcaagggacccttttcatgggtgtgcatattatatttacattataattcagaacagtagcataattacagttatttaa

SEQ ID NO: 1778 - DNA, 479 bp, Cricetulus griseus
agtaaaggtgacaaactgtaggaagacacatttgatggcattgcagtcatccgccactctgctttccatataggagcccagcaactcagacctgagctgagggaacaacaaggcactgatgagagctccaggactatagccacgcttctttaatagcatcatgattggagccaggttgaattttttaaaaaagagagttgggcagtacttctcccccaaaacatttctcctgtcggcaatctttttatcactatcaatttcaacactaatcattttctaattttgacatgatcaaatttcagtactaaaaaaaaaaaagaattccaaaatctctatgtgatgccatcaggtctttggaaaacatggcttctcttccttgagaacaaacaaaggaattgcaacagacacaatatagccttgctctgagtttcagtccggggacttgtgaccatgaaagatagcttgatatgaaaactaag

SEQ ID NO: 1779 - DNA, 579 bp, Cricetulus griseus
  misc_feature (387)..(404): n is a, c, g, or t
  misc_feature (412)..(412): n is a, c, g, or t
  misc_feature (569)..(569): n is a, c, g, or t
tctatactttaattttaagaacttagagtaatagttcacaacttttaatttgtcttatgttttccattgctgttgtttattgtcatatcctattatttgccttcacctctgtcttaattagcttttcctttgctttgataaaacaccaggactaaaagcaacttggaaaggaaagggtttatttcacgttacagcttataattgatcactgagggaagtcaggacagaaacctggagatagaaactagagcagaagccatggaggaacattgtttactggtggcttggttagtctgctttcttacagcacccaaacccaccagcccaggagtggtactaccacagtgagctgggctcttctacatcagttgtcaatcaagaaaatgnnnnnnnnnnnnnnnnnnttgctcanaatggtttcttcccagatgatgactgagaagctaatttaaaaaaaaatggtgccaagtaccacaagagtaacagaactgtgctgttttctggaattttgttttttacttttttgttgttgtagtagtagttgttgtttgtttggggttttttttggntagttttttg

SEQ ID NO: 1780 - DNA, 558 bp, Cricetulus griseus
  misc_feature (534)..(534): n is a, c, g, or t
gacccgaccctcagctggcggtcaccatgggcttcacagggttcgggaagaaagcccgaacatttgacttggaggccatgtttgagcaaactcgaaggacagctgtggaaagaagtcggaaaacactagaagcaagagaaaaagaggaagaaatgaacagagagaaagaattaagaaaacaaattgaagatgttgaaccaacaccatcaagctccagtgcaatcagagagcagtcaaaatcatcatccagggacacaagcagcagtgacagtgaagacagttctgattcatctgatgatgagttaattggccctcctttaccccctaaaacggtaggagaaccagttaacactgtggatgaagatatccttggccctttacctgcacccctcggtgaaggagacgaagatgatgatgatgacatagaggatgaaggagaagaagaaaaccccgtccaaagaattcctgactctcatgagataacactgaagcatggcactaaaacagtttctgctttgggtttggatccctcangtgcccgtttggtcactggaggat

SEQ ID NO: 1781 - DNA, 578 bp, Cricetulus griseus
agttgccggccgtaactcctcaactcggcagctggctgcctagacatgtcctgacaaacttcgattctcctcgagaccttctcttttctctccagacctcgtgcgcccgctctctctccacctcttttggtgctcaaactttccccgggtcggaagccactggaaatgcgaccacctaagtcccgacagcactggaggctcgcactctggttggggatatgttgaagatccaagggaggcaaagttggtatttcgagcccggctcctaacagaaatccaaacggcgtgggatttacccaactgccggggactgtaaggaagagcatcgaggaccgggctgctgtggtggccaggagttaaacaatggggagacaattggccttgcttctgcttctgctcctctttctccagcattttggagatagtgatggaagccaaagacttgaacccaccctatctctacagtttacacacttccagtacaatgtcactgtgcatgaaaactctgcagcaaaaacctatgttggccaccctagaaagatgggcatctacatcttagactcctcatgggaaataag

SEQ ID NO: 1782 - DNA, 297 bp, Cricetulus griseus
  misc_feature (2)..(65): n is a, c, g, or t
annnnnnnnnnnnnnnnnnnnnnnnnnnnnnnnnnnnnnnnnnnnnnnnnnnnnnnnnnnnnnnnttaagacataaatattttcattaataatatataagctgaagtagctagaggtaaaaatgtactgatgtctgaaaccttgagattttccagtaagttgacagactgatggatgtacagatgtttagatatttaaagtaacaataaagagatatagaggaaggtcagttgctcaatctgtggtgatatttatgtgtgagttctctgtaaaaagttaactttggtatttataact

SEQ ID NO: 1783 - DNA, 110 bp, Cricetulus griseus
ggtggtctggtgtggtctcctatttacttgtgatttagtctgttacagttagctacattccaagtaagaagaaaggacagtagagccttacatctctcaagggcttgtgg

SEQ ID NO: 1784 - DNA, 579 bp, Cricetulus griseus
tctttaagcgcgtttggctggcccgccggcgctcggaagtagaggcgcttccgtcgttgttcttgaagctgtggtgactgtgggatcagaatctttgagtgtgagaaattttacagttagccaaaatggctgaaaatggagataatgaaaaaatggctgctctggaagccaaaatctgtcatcaaattgagtattactttggagacttcaatttgccacgagacaaatttttaaaggaacagatcaaattggatgaaggctgggtgcctttggacataatgataaaattcaacaggctaaaccggctgacaacagactttaatgtgattgttcaagcactgagcaaatctaaggcaaaactcatggaagtgagtgcagataaaactaaaatcagaagatctccaagcagaccccttccagaagtgacggatgagtataagaatgatgtaaaaaacagatctgtttatattaaaggcttccccactgatgcaactcttgatgacataaaagaatggctagatgataaaggtcaaatactgaatattcagatgagacgaacattgcacaaaacatttaagg

SEQ ID NO: 1785 - DNA, 601 bp, Cricetulus griseus
  misc_feature (22)..(96): n is a, c, g, or t
catcgtgtggaaatgttgatcnnnnnnnnnnnnnnnnnnnnnnnnnnnnnnnnnnnnnnnnnnnnnnnnnnnnnnnnnnnnnnnnnnnnnnnnnnntcagtagcatagctgtgcctggcacatcaaacccccaacagcgccagctgcccagagcacagtctcagcactcatctcctggggaaatagcagcatctcctcaaggcttagacaacccagccctgctccgagacatgctgctggccaacccgcatgagctgtccttgctgaaggagcgtaacccacccttggcagaagctctgctcagtggagatctcgagagattctctcgggtcctggtagagcagcaacaggaccgagctcgaagagaacaagaaagaattcgtctattttctgctgacccctttgatctggaagctcaggcaaagatagaagaagatataaggcagcagaacatcgaggagaacatgacgatagctatggaggaggccccggagagcttcggccaggtcgccatgctctacatcaactgcagagtgaacgggcaccctgtgaaagccttcgttgactcaggtgcccagatgactattatgagccaggcttg

SEQ ID NO: 1786 - DNA, 579 bp, Cricetulus griseus
  misc_feature (496)..(496): n is a, c, g, or t
aagcaagcatgcataggtcagagaggagccagaagtctgttccctccaccatgtgtgtcctgggaatccaactctggtcaacaggcttggcagccatcaatttttcccgggctgtcttaaccagcacacagtaaaaaagtctctaaaggtcatgaacatagagtgctgacctaggacttatcattcagtcaacagactcccacatggaaaaaaagtgacaaagaattatatgggctgctctatgtctggttactgccagttttcacagtgattttagaatgtttaagctggcctctaggaggagaaaagagatttttcataaacacttttacaacatttcaagattaaagcacaaagcaaaacccccaggcattcaatggcaatagtgttgtcctggaatatctcacagaccagctccagcaggcaacctttggtacagctccttcacctcctcgtgtttcgctttgcctttgtccacactctgtctgcgcatctncgccattttaacacaccactcctcaaatttcaaattgtctcgatctaccagctcttgaagaaaggctgggacttgaaccattg

SEQ ID NO: 1787 - DNA, 577 bp, Cricetulus griseus
  misc_feature (228)..(283): n is a, c, g, or t
tagagttaggagtctccagggaaaagggaagaggatattcggacactgtaagacttagctaagcacatgataatctaagccaaaggggagtgttgaggttgtaacatccagcagggctaggtgcaataccacagtagatgggagtcttcagagagattccttcctgaagctcttgtgctaactccctgcctggattcacacacagcaggataatcttataatcatagnnnnnnnnnnnnnnnnnnnnnnnnnnnnnnnnnnnnnnnnnnnnnnnnnnnnnnnnccctttacaggaaagtcttaagtccttaactaggactacagcacagcacttctactgctttctgtactgttccaggggtaggttaccatttaataaaaatccactctctcctaatggggactgaaggacttacaaacacactcttaagaccaatacaacagtgaatacactagctgctccattttcattccactgctttgaaatcttggaaccatgggtgtcgatacccacagaaaaggtgggtgggacctcactgtgatgtcccaaaagaagccacgctgtcctaggtgctcc

SEQ ID NO: 1788 - DNA, 579 bp, Cricetulus griseus
  misc_feature (441)..(458): n is a, c, g, or t
gaaaaattaaagatgcatttgagcgaaacccagaacttcagaacctgctgctagatgacttctttaagtcagcagttgacaactgccaggactcctggcggcgggtggtcagcactggggtgcaagcaggcattcccatgccctgcttcactactgccctctccttctatgatgggtacagacacgaggtgctaccagccaacctcatccaggctcagcgggattactttggggctcatacctatgaactcttagccaaaccaggagagtttatccataccaactggacaggccacggtggcagcgtgtcatcctcttcatacaacgcctagtaggactgtgtcgtcaccctccctcccaccaacaggacagtccctgtggtatgcagcactcctctttgtcctagttcctgctcagatcttttagccaagtgtcggcttnnnnnnnnnnnnnnnnnnctgaagtcttgtcccatagttctgaaccaccatgtgccccgcctcaaccttttgcactgcccaggaacttatctcgtgcagcactgcgtgactgctccctgactgagctgtgccatgtggg

SEQ ID NO: 1789 - DNA, 504 bp, Cricetulus griseus
  misc_feature (24)..(60): n is a, c, g, or t
  misc_feature (70)..(140): n is a, c, g, or t
  misc_feature (158)..(301): n is a, c, g, or t
  misc_feature (303)..(338): n is a, c, g, or t
  misc_feature (343)..(373): n is a, c, g, or t
  misc_feature (438)..(457): n is a, c, g, or t
tcctcattagagtgacatcgtctnnnnnnnnnnnnnnnnnnnnnnnnnnnnnnnnnnnnngatgcccatnnnnnnnnnnnnnnnnnnnnnnnnnnnnnnnnnnnnnnnnnnnnnnnnnnnnnnnnnnnnnnnnnnnnnnntgctttattgtgggagcnnnnnnnnnnnnnnnnnnnnnnnnnnnnnnnnnnnnnnnnnnnnnnnnnnnnnnnnnnnnnnnnnnnnnnnnnnnnnnnnnnnnnnnnnnnnnnnnnnnnnnnnnnnnnnnnnnnnnnnnnnnnnnnnnnnnnnnnnnnnnnnncnnnnnnnnnnnnnnnnnnnnnnnnnnnnnnnnnnnnagaannnnnnnnnnnnnnnnnnnnnnnnnnnnnnngccataaagtgccggctgctgccctgctggtgccttgcccctgtgagggcactgggccagcccannnnnnnnnnnnnnnnnnnnaagaaccctttcttcaggtttggggcttacccttaaattccaggggc

SEQ ID NO: 1790 - DNA, 306 bp, Cricetulus griseus
ggccttcaacatggcggctgtggtactggcggaggctacggtgacggtctggcccggggtggatagagttggaagagggggtgttcgttctccctaggggcagcgggagctaggcggggactgagcccgggaggccgggcggagccagcacctttcagctttctggacggcagcggcattcaggttctaaatggcttctaagaagttgggttcagattttcatgggactttcagttaccttgatgatgtcccattcaaaataggagacaaattcaaaacaccagctaaagttggactacctattgg

SEQ ID NO: 1791 - DNA, 502 bp, Cricetulus griseus
aatccacgctacaggatttaactatcagaacgaggatgagaaagtcaccttgtcctttcctagtactctccagacaggtaattatcctttccaatactttgtattttgtttagtaagccactctttggaagtggtcactgtcagtatcttgttatggtttgatggccttggagatttaaaaccaagtaaaagtgtacaggaactttaaagatagattttgttggcgagctgaatgacaaaatgaaaggtttctatagaagtaaatacaccacccctgctggagaggtgcgctatgctgctgtcacacagtttgaggctactgatgcccggagggcttttccttgctgggatgagcctgctatcaaagcaacttttgatatctcgctggttgttcctaaagacagagttgctctatcaaacatgaatgtaattgaccggaaaccatatcctgatgatgaaaatttagtagaagtgaagtttgcccgaacacctgcgatgtcta

SEQ ID NO: 1792 - DNA, 507 bp, Cricetulus griseus
taccctagccatgaagagccgcttcagcaccggtgaccttcgcgctgggcttgcagagctgaatgcgagcttgctaggaatgagagtaaataacgtttatgatgtggataacaagacataccttatccggcttcaaaaacccgattttaaagctaccttggtacttgaatctggtgttcgaattcacacaacagaatttgagtgggctaagaacatgatgccatctagttttgccatgaagtgtcgaaaacatttgaagagtcggagattagtcagtgcaaaacagcttggtgtggatagaattgtggatttccagtttggaagtgatgaaactgcttatcatttaatcattgagctctatgatagggggaacatcgtccttacagattatgagtacctaattttaaatatcctaaagttccgaactgacgaacctgatgatgttaagtttgctgttcgtgaacgctatcctgtcgatcatgccatcaccgctaaaccttcgctgac

SEQ ID NO: 1793 - DNA, 580 bp, Cricetulus griseus
  misc_feature (126)..(140): n is a, c, g, or t
tcgggcagcctatcaatttaaaggcacacataccactcaacaggatgtggccattctgtcagtaggtagtttttccctgccagagataggagggaagagctggtggctcctggagatgctcttgtnnnnnnnnnnnnnnnaagcctgaaaatcaataaccactgtgattgtatcccagccctgatcctcattgtcagctctggaagctcagctctgacctggattctggggcaatgcagagtcctcattattgaaatgacatccctttggatttcccaaacttactgttgtttaccaaacctatttcatgtttacattgtatttttcctgctagcattgataggcagttattcaattccatttcctagaatttagccactgccttgtcagtaacaccaatcctgatttgagattaatgagaaaatattaaaatacatgtgtatttttccttttagaaaatacttttccagatagctagctttctgaaatgctcatttcctgcttaaatgttagtatatctcctagtttaaaatgcagatcacccctactcaccatgtggtgactatagctaaccttctag

SEQ ID NO: 1794 - DNA, 469 bp, Cricetulus griseus
gtatagtaactccaaaatcaggcaagaagatgaaaattttaacagacttttacaaaatggagatattttaaacaattcaccagaagaaaaattcaaagttaatgataaaaaggattttaagttgcctgagtatgatttgagtattgaagagcgattagttctgattgaaaaagatgactcaaaagctgaatctgatgaatctcaccagttagaccatatcaacatgaatcttaataaacttgtgacaaataatacgttccagccagaaataatggaaagatcaaagacacaggatatagtgcttggaaaaggctttttaaattttcattctaaaagtgaagctcagcatacagaaaatggaaataagtatccgaatttggaatccataaacaagataaatggtctttctgaggaatttccacagtcttctggtaggattgaaccacagaactccacttcttctgctgat

SEQ ID NO: 1795 - DNA, 411 bp, Cricetulus griseus
ttatccgctcatagtccgctgtatttccattaccctactttccatcctttcgtgattcccgttatgttttcatgtcttcctgtctccccccccattctttccttccccttaattccaccatatatattttttttcctgcaattatccccagcgcttctttcttttttttacatctatcttccttttgttcctttttcccgccgcagtgatatatacaatcactttccccatcccctcttaccccacccacccctgtcttccttttctttaccctccccctccatatttttttcctccttcccactacctttttcctcctttcctcgttcttcgtcttatcctctatattccattttttactcttttattcccctgggtttgttcacactctttttttctccccccccattc

SEQ ID NO: 1796 - DNA, 572 bp, Cricetulus griseus
  misc_feature (563)..(563): n is a, c, g, or t
ctcatatgctgctgcttgacaacccacacaaagaacccctccggttgcggtataagctgactttcaaccagggtgggcagccattcagcgaagtaggagaagtgaaagactttccagacctctctgtcttgaggactgcctaactcctcaaccgagactcttcagttacacttaggccagcgttcctttcactgtctggtcgggactcattgtgatgtgttgcagagtgccaagagttctcttctgatgtcagaccttgattgccaatctctgtagatcatgtgtgtgtgtgcgtgtgtgttattggggtgctgggggaggagggagagctgggcttgggatttgggtagtgtgggggatgctgacaatttctgagatcatctctgctgcactcatttctgcttctgcatgttggttgacactgttgtccctgcctcgggttggagttttatataagccaaagttttttccatgtattgttatcttttcattcatccactctgtgccttgtcagcctttgaaagtcttagttgctcccaggctgctattctcagggaccttanaaagggacc

SEQ ID NO: 1797 - DNA, 556 bp, Cricetulus griseus
atctggaatgacagttccagagataaagtgtctacaactgtgagagagatgatgctagagcactttaaaaaccaacgggataaccctgatgtgaactggaagttgcctgaagattttgctgtggtatttggagaagcagagggtgaactcgctgttggaggagttttcttgagaatcttcattgcacagccagcttgggtgctgagaaaacccagagaatttcttatagcactgttagaaaaattaactgaactcctggagaagaacaatccacatggagagactctggaaaccctgacgatggccacggtttgtctcttcagtgcacagcctcagttggcagatcaagtcccaccattgggccatcttcccaaagttctccaggcgatgaatcacagaaacaatgccatccctaagagtgctattcgggttatccatgccctgtctgacaatgagctgtgtgttcgagccatggcatctttggagaccattggtccactgatgaatgggatgaaaaagcgagcagatactgttggtctggcctgtgaagcactta

SEQ ID NO: 1798 - DNA, 459 bp, Cricetulus griseus
aagttaacatgataaaaagcgttttttcaaatttgggggaatggggaaaccttgaggttggtttaagaaaaaccccaaaactttaaacggtttttcctaccctgaaaggaaaacgggggtttttaaaaaattggatttcccaaaacacctggttttcctaaaaagggggtttttcctcccccctaaaccaaaaggggggggtggttacccaaacccaatcccattttttgttttaaccctttttttaaccctttttttaataaaaaaacccaaattttctttttttgtcaaaaacccatgagggggccctggggccccaccaaaagtaaagttttggggaggccccctttttgcttgtccacaggggtccctgaagtctaaaaaataaatcctttgttaaagccctttcaaccctttgggttttggcaggggccatctttgttgtggggaggggggggc

SEQ ID NO: 1799 - DNA, 580 bp, Cricetulus griseus
  misc_feature (61)..(79): n is a, c, g, or t
  misc_feature (156)..(175): n is a, c, g, or t
  misc_feature (521)..(540): n is a, c, g, or t
aggggaggaaaatgaggacgagggggaggagcaggaggagaacgaggaggtgcaggatgannnnnnnnnnnnnnnnnnncaaaaggtctttcaagataagatggaggaagatgtagaggaaagtgacttggaaggggaagaagaggaagtggatgnnnnnnnnnnnnnnnnnnnngaagatgacgatgatgaagatgacgatgacgatgaagacagaatggagtggggtcctttctctttcatgaagggagcctatgtttttgagaatactaggattgcttcccggaaaagagaggctttgcatggttcatcgtggcaagtaagccctgaagatgtgcgatggggtacattccctataggccgaataccaggtcagactgacgacccagcagaacttgtgttggataattatgacaccatgtatcttttggaccaacctgtactagagcatcgactagaacccccaaagtccaggaattgcactctgaacctaagttgttgtggaggcagtaacaactctnnnnnnnnnnnnnnnnnnnncggtgggcacttggaaagccttctctggagtcagggacaa

SEQ ID NO: 1800 - DNA, 533 bp, Cricetulus griseus
  misc_feature (28)..(80): n is a, c, g, or t
catgagtgcaaatgtagttgtcccctcnnnnnnnnnnnnnnnnnnnnnnnnnnnnnnnnnnnnnnnnnnnnnnnnnnnnncacgcgtgcggtaaaagagtgtggtggttggtaatggaggagtgttgaagaataagacattaggagaaaaaatcgactccacttgatgtaataataaggatgaataatggtcctgttttaggacatgaagaggatgttgggagaaggacaaccttcaggcttttttatccagagtctgttttttcagaccccgctcacaatgatcacaactccacagcggttttcattgtctttaagccccaggacttattgtggctcttgaatataatgaaaggaaacaagataaacactaatggcttttggaagatgccagccttatacttgatctatatacgataccaaatcagaatattagatccgtacattatcacataagcagcttataatctgcttcaaatttccaaagtgtttcccaaaaatcagatacccatacaccctacgacaggacttatt

SEQ ID NO: 1801 - DNA, 461 bp, Cricetulus griseus
tgggcagatgaaggcactgattgcctcctcctcctcctttcttttttgagacaggatctcatgtatcttgccgggcttgaactaacaatgcagcccaggatgacaatgaactttactaagtgtgtgtagtgtgagtgtagctatatgcacagtgccacaagtacatgactggaggtcaaatgacaacattggctataggttcgtcctcaacttcttcctgttaaaagcaaagtcttctgccatgcgccactgtgtgtgccaagtctgctggcctgcaagctgctggggagactcctgactctggctctcatcttgccataagcacactgggattatggatgcacactgctccatctctttattatatgcgttctggggatctgaactctggccatgtaccccgtccaaccatcacattgtgatcctttcgtcttgacctcttacatgctgggatgcacagc

SEQ ID NO: 1802 - DNA, 578 bp, Cricetulus griseus
aggcggctggtgaggcaggagacgcagcttgaggagatcgcagataagtttttttcttaaaaagattgagattaaaaattagaactctaaacttagactgttaaatagagtagcttgtcgagataaggcttagagttaaattcttaacttctagtgtaaaaagattttaaaagaaaatatgaaggcttatttaaggactttaaaacaaggaaaaatagttgtacgatatgatggcgctgaggtgaagcttttacgaagtaatttaaaagattgtaaagggagagacagcatagtctttaaaagcatttagaatatccagcttgtaaactacattgaaacgagaattacttaaatagaatcaaatgccttttaaaaacagtaaaatagtttgaaaatgagacttagcttaaaaagattgaaaataggttgagtttggaggcggttataaaagatctccgcttgatggcgcagtaaagattgcgtcatttgaagcatttatgtttcaaggcatttgaagtggaaccggaagattaattgttattggcagtttagtattggagaacattagaagttggaag

SEQ ID NO: 1803 - DNA, 508 bp, Cricetulus griseus
cagagttcacagcccccaactgccaatcagattaataacttgaatgtggaagataacagcagtggggatcaaaggcgggcctcactagcttcaaggaactggaggtctgctccagttccggtgaccactcagaacccacctggcgcaccccccaatgtgctgtggcagaccccactggcttggcagaacccatcaggctggcaaaaccagacagccaggcaggcccaaccagcacgtcagaatcccccatctaggcagacagcaacagcttggcagaacccagttgcatggcagaatccagtgatctggcctaacccattgatctggcagaatccagtgatctggccaaaccccattgtctggcctggtccacttgtgtggccaaacccaatggcctggcacaacgcacctggatggcataccccacctagttggcaggctccacccacccggcagggccctcaagattggcaaggccctccacattggcatataccccctgattggt

SEQ ID NO: 1804 - DNA, 600 bp, Cricetulus griseus
  misc_feature (23)..(80): n is a, c, g, or t
atgtagtgaaatgttatgcgctnnnnnnnnnnnnnnnnnnnnnnnnnnnnnnnnnnnnnnnnnnnnnnnnnnnnnnnnnncgcgtccggtggttttaacagactcattgggaaacatgggcgacacatgcagccagctgagcttttgttttcaacggttgcaaaggccccagcagaataactgtccaagcagacaggaaggctgtgaggctgagttgagaagcagcaagaggccccaaggcaaggctgccaggcgggcacaccaccacagctctggttcctgccaccagccaaccataggcagggggaggctgtttcctgtgttactctagttgctcattttccctctaagagactggcgtgtctgacagcagccgttactgctcctctgcctctcccatcaaacaggaaaacttgacaatgtagcgctctttctgtaagagtttcccatagtaccacggttcttaaacgtccctcacttgagctccccctggaaagatcaaatggagccacctccagagtcacaaacgcttttgaccagtgcatccagggttcttgagtttcagctttatttcatgtgcaaaacttacagaacttccaa

SEQ ID NO: 1805 - DNA, 321 bp, Cricetulus griseus
  misc_feature (297)..(297): n is a, c, g, or t
atttttaacactttttttaataaaccttttttgggggggggggccccttcccaaatttaaaaatttttgagggcgggaaaaatactcaaaaggttaaaaccccggtttcccaaaaccccaaggtcaatttccaacccctttttggttcccaggggattgggtttccccccaaccttccttttgggcaaaaccccatggcccataaaaacccccctccccttgggccaaatttctaaacatttttgccaaaggccttaaaaaaaatccaacttactttcctttttggaaccctttaantttttttcttccaaacgtaaaaaa

SEQ ID NO: 1806 - DNA, 578 bp, Cricetulus griseus
  misc_feature (5)..(48): n is a, c, g, or t
gggtnnnnnnnnnnnnnnnnnnnnnnnnnnnnnnnnnnnnnnnnnnnngaaccaactttttagttcggacttcatggatgagaatgccctcagcagcctctagtgtggttaaaagtgtacaaaagatgctgacatttttaaagatagaattttctaattcttttagtaaattgtgatagtatgaactgtgttgacttttgaaatttcttccttgtgatggaaatagtttttatttccatggaaagatgaccacatttgacagtttctgcattttttaatcagagtacagaattttatctatgactgctacgtatgtaagtatcaaactggaaatctgctgtactgtatactgatatttaatagactaataaatagctgtcttcagcattggaacaaatttctatacacatatacactgagggaataccatgacaatcaactttaagatcagaaggaagacttaagagtcattgagcatttagaaaatgacaatggaggaaaagttatttaagcatctacagacaagtttttgtcctaacatgggctaccttgggaccggagcacaacaacttgctaaa

SEQ ID NO: 1807 - DNA, 580 bp, Cricetulus griseus
  misc_feature (66)..(87): n is a, c, g, or t
gagcagatatctggatggcttgggccacacaattggattttggttccacttggacaatattctcannnnnnnnnnnnnnnnnnnnnntcagaagagagcaggcctgagggatgtggggactgtagttactgtgtggcccattgattggctgtgatcagtagaatggtcacctgttacacagataggcaagatggcagtcacctcccctgtctaagtggattcataatatcatatgtaagtcagggggagggatatgaatatgccatttagttttctccagtgaagtggccgaagctctagattagccaaggaagatggaaaacaaaatgccaggctccactctgcagaccaaagtgctgtctctgtagcatatgataccacttcccagatgctcacacatctgcaagaagtgcctcccaagtctggatggagagtggttctccattcctctgtcctagagaaggagacagtatgatttaaacatgccgtcaatggtgagggtcttagagggagaaaaggaggaatcattaacacaccattacgataaataagtgtaacctatgtttcagcaaacagtaat

SEQ ID NO: 1808 - DNA, 258 bp, Cricetulus griseus
ctttttaagtgctagctaattcacattaaaaacataagacaaatgtgttgtttaatggcattagcagctaatggattcttgaaattatcactatttttcacgggcgttggaggctcgcgcctttcatattcctgcacttgggatgcagatgcactctgatctctgtaattcgatgccagtctggactatacatactagtccaagacagtctccaaagcaatacaaagaaatattgcctctacaaaccaaaactatata

SEQ ID NO: 1809 - DNA, 507 bp, Cricetulus griseus
ctacctgttgtgatatctgcttactctgtgcctcattgccaggggaccaagtagattctctgaatgttttccttttctcctttctggtgatctcttcagcccacccaccagcccaaaccatccccattcctaagcgtcagcttccaatacttagaaatacattttacctgtaaccccagtgggccaagcaatctggatcccagaagaattttctaccaggaacacaggcatcacactctcctaagagcaagaatgaggaacaaaaaccaagaaacaaaacactcacctaacaaacaaaagaccagatatcaacacctataatcacaatcttcttaaaaccagacacctagacaaactgcataaaaacaataaataacaatatctgccatgacagcgtgcttccacaagagcccagctaccctaccacaatagacctgaatattgccaattagttgaagtgcacaacaaagaccataagataacctttattaacatgatagaggtccc

SEQ ID NO: 1810 - DNA, 579 bp, Cricetulus griseus
tcactgggcaagtcgaagatttggaatataatcttcacttactgtcaagtgaagtattaaccaaatagcaacaataccaacgcttgcctactgaatatgaaacgctgagggatttgctcaagtccatatgttctttggggacaaatgaggataatcagagaagttctttggcttttgaacatcatccgacagtgagtgactcctttggaaatctaatgggggaacaaggaagcctgtattcacaaaggagtgactgctttgtagatggggaccaaacttcagaaaatctatctgtcttacaaaatacagtcacttcacttgaaagttccctggagtctcaaaaccagatgaactcggatcttccaaatcagtgtgaagagttgctgcaaatcacagaagaaatagaacataacctcattactagcacaacagattcatcagaattttgtggatgaaacaaaccaacgcattggtaaattgcaggaagattctgcagtgcatcaaaatattgttgctgagactttagcaaccctcgagagtaatgaaaaagagtcgcaacttttgatagaaaaattatat

SEQ ID NO: 1811 - DNA, 506 bp, Cricetulus griseus
cagtggctgctgagcacagtagaaacccttacccctcaggtccatttgcctaccttgtccagagcctgcgaaggtaatgctgccccagctgagctcccgccagcctcactgcctctccagttaggacatcatatgattctttctcccaccctttcttttgtatagccctgacacttgcctccctggtcctgtatgctgatggcccagttaccactctgcagtgggaatgccggcacactgccatgctatcttgttcactgactggctctgtttctccttccttactcttctcccctcttctctcgaggacagtttactacgggagggccctgtggagcgccctggtgcccgtctgtgcctctctgatgggcctctgaggacagcagttaaccgtcgctatggaaaaaagctggggctagagaagactgcacatgtcctcattgcaggtgaccgattgcagcttgagccagcatgggcaggagtatgaggcttggacctagagccaa

SEQ ID NO: 1812 - DNA, 579 bp, Cricetulus griseus
ggaggagggcgctcccggccaccgcgctgcagacgccattatcctctgtttccccgctgcacggacgtcgccgaccgtcgtgctcgtctcgcgcccgggtgcggcctgcagattggtgtatccatttaattcaagaaaatggagaccgaacagccagaagaaaccttccccaacaccgaaaccaatggtgaatttggaaaacgccctgcagaagacatggaggaggagcaagcctttaaaagatctagaaatacagatgagatggttgaactgcgcattttgcttcagagcaagaatgctggggctgtgattggaaaaggaggcaagaatattaaggctctccgtacagactacaatgccagtgtttcagtcccagacagcagtggccccgagcgcatactgagtatcagtgctgatattgaaacgattggagagattctgatgaaaatcatccctaccttggaagagggcctgcagttgccatcacccactgcaaccagccagctcccgctcgaatctgatgctgtggaatgcttaaataccaacactataaaggaagcgactttgactgcgagttga

SEQ ID NO: 1813 - DNA, 580 bp, Cricetulus griseus
tcccaggagactgtagtttatgtcaacttgataaaagctaatcagcgtacagttatgtttgaattatttttgctgtatttcaattatttcttcatttgatattttcaagatagttgcatgaagcccaggttgtcctcaaagtgcctgtgtagctgaatgtgaccttgaatttctggtcttcctcctcagtgcttggattgctaccccacccagtttactctgtgctgggactggaatgaagggccttgggagtgttgtgcagccatctaccaactgagtctctatgaacattttgaaaggcttcaaatctgtattttcacttaaaaatcattttgaaaattggaaaggatagaggtcgtaactgtgagtgtaatttgtttgtaacatgcatgaggcttctaaagatatactggatttcttaactaattagttctgagtctactctaggggatagaaccatcccaccctggattgaaatgagaaagagacattttgtgactgctttaagccttgattatagagacttcagtaacttctgtgcccatagcccccttttactcttctgtgaacctcaagatgg

SEQ ID NO: 1814 - DNA, 569 bp, Cricetulus griseus
  misc_feature (23)..(51): n is a, c, g, or t
  misc_feature (55)..(77): n is a, c, g, or t
cccgcttcaaacgactcactatnnnnnnnnnnnnnnnnnnnnnnnnnnnnntcgnnnnnnnnnnnnnnnnnnnnnnnattgaagaaaactgaaagcaagtttgagaatggttttaatagatgcacacatctatgttataccacggcaaggggtgtgtttgcctgagagatcctccactggcaccttccactgagtctacgtgaataaatcaaatagatttttgtgtgggacaagatgttgtcctgagtgtgggaaagcattgaagttacatcagcatatcacaaaaagtgggtgagcaggtgaacaaagatggagggggccggagcaagacaagatgtctctgagattgtggaatctgtccctgattgctgatgtggcacacagtcctccttggctccccattttatgtcactgcttgccccaattctggcaccatgcctggtatatacaagatgggaatatgtgttctaatgggatagggaaaaggattttaggtaataagatagtagggcttatggcaaaatcatgtatttagactgaaaaaaaggaaattataagcaaaggctgta

SEQ ID NO: 1815 - DNA, 578 bp, Cricetulus griseus
  misc_feature (71)..(85): n is a, c, g, or t
  misc_feature (533)..(533): n is a, c, g, or t
aggcccagacccaaattggggctaagggctcaagctctcaggactctgccatggaggaagaagaacaaggnnnnnnnnnnnnnnntccagctttaccttcggaagaaaacggcaccagctagactccattttgaggccacttgcagcagactatgagaggcttccttttcaaccatgttggggttcttagaactcaagatatggctggaccaaccaataggaaactgccccagcttctcccaacagggggcaggacccccactaccagcccagggcccaggagctgcctctcgcctcttagcagagagtggaagtttcccacccagtttggaggattgcccgttcccaccctgctgaggagaccattcctcacccggctgacaagctgctgacgtggtctctccaaatctcagctgagcctgagtccctgtcggagggttggggctgcacttatttattgggggagacagctcactctcctgtctcatcccagatgggaggaggggagcctggggtcagtgtaggacccaggngttttgaacccctagctgctccagggtgggggaggttggtggacc

SEQ ID NO: 1816 - DNA, 580 bp, Cricetulus griseus
taattgaatacataccatatttatctttctgggtctgggttaccttactcaagatgttttttgtagttccattcatttgcctgcaaatttcatggtgtcactttttaaacagcagaataatataccacattgtgtacatttacaggcttataattaatttagatactactagtatatgaagtgacatgacaagtgatatgtacagatagaagttatgctaggaaggttttaaactattttttttttttgagtaacattgtatatcacttttatgtttataggttaatgcttttggaaaaaaaacatgcagattctgaagctctggctgaaattcttcttgaaacttgtaaataaattacttattctttaggggagtgagtaactaaaacttgaatagttttttgtggctgcggtttattttgtttttggggctggggctggaaatcaagcacgtctttatgcatgcttttgggcaggcactctaccactcagctacatcttgaccccttttttcttttgagtcatggcctctatgctgtctaaactgggctggaatttatggcctcacccaccaaggagc

SEQ ID NO: 1817 - DNA, 566 bp, Cricetulus griseus
  misc_feature (334)..(354): n is a, c, g, or t
ttttaatgtctgcagagaccacgctcccattggcagccattcctagtttactttcttgtatccctaatgagaaaagatgggagctggaaaggtgttgcctccctccaccttgtttcagatttacttacaagttaaagcacttatttcaagaagaagtttatatgtgaattcaattcctacgattgcatactatttctgatactcaaactattcagaacttttgaaacaagggcaaaaatttagtagtttttttcctcctttactggattagtgtgtcacatttcctcttaaatttggaaaaacaattacaagaggtgtgtataatgtgtcaaannnnnnnnnnnnnnnnnnnnntgtgatatagtttcctctcttaaatattgtcattttcttctagcgtagtttatgattgaattcatacttaaaatatttttcctacatactattatcctgcagagacagttttataaaacaaaagccatgcttgctggataaccatgccagggtattttataaaataagtgcagcccagattccatgaggaaactgctctgtttctatgcgcc

SEQ ID NO: 1818 - DNA, 367 bp, Cricetulus griseus
  misc_feature (10)..(24): n is a, c, g, or t
gcccctgtannnnnnnnnnnnnnngtggtatttcttggggccagagtggcattatttttacaaggtacatgtgtcatatgtttgtttgcttgatgaaattctgaaaaacagtctaccaattgcagaaaatattacttttctatgtttttattcactggctcagaaagcttctcaaagggtctgtggtcatagtagcatgactgtatccattctgttgacagagatgaagttattcttgtatttgactggtagcaaaaactgggtcataaaaaaaggaaaagatcaattttgtctcactgtttcagtatgtttaaataataatttccatgtttgcataatgaggcccatttctgatagcttggagagc

SEQ ID NO: 1819 - DNA, 269 bp, Cricetulus griseus
  misc_feature (2)..(21): n is a, c, g, or t
tnnnnnnnnnnnnnnnnnnnntaccagatgaagaggtttcactgggagcaggaccagatcgcacacatgaataactacattgccaggtttggccatggcattgccaatctggcctttataaaatcacatcaaagataaaacgctctacacaatgattccaacacaaataaattaaaggattgggtgaaaaaatggtgtttttttctttattttcccaaacccctaacccaaaaatttttataattcttccaaaactaaaccaagccttt

SEQ ID NO: 1820 - DNA, 580 bp, Cricetulus griseus
  misc_feature (459)..(459): n is a, c, g, or t
  misc_feature (576)..(576): n is a, c, g, or t
ctatgtgctggtgaagaagtggagcgaagccctcgtgctgtacgacaggggtctgaaatatgccgacgaggtcagtgctgatggcggagccttcaagaacagcctgaaggacctgcctgatgtgcaagagctcatcactcaagtgaggtcagagaagtgctcgctgcaggccgcagccatcctggatgcaaatgactcccatcaagcagagccctcctctcaagtcaaagacaataagcctctggttgaacggtttgagaccttttgcttggacccttccctcgtcaccaagcaagccagcctcgtgcactttccaccaggcttccagcccatcccttgcaagcctttgttttttgacctggccctcaaccatgtggccttcccaccccttgaggacaagttggagcagaagaccaagagtggcctcacaggatacatcaagggcatctttggattcangagctaaccatgctcttcctcaggggcagggagggcctgacttactctgtattgtgagacagacagcaagttcccaagcattaaatctaagtctgcaatggcaagggcagagctcancacc

SEQ ID NO: 1821 - DNA, 329 bp, Cricetulus griseus
gatttcacgtgttttagctgaggcatcgaagtagcgggtgctttctcgtgggaagtcatgtattcatactgcaaagtaaactccgtagctgatttggtaataacgtttactgttacaggcgatttcactttgaccccggtggcttttagtccacattccacgcagctaaatgcaggaccttccatattcttcctcccttggccctctttctttttggttcctcttcctctctttgcctatttttttttttttatgggggttggttttttcctgggcccagcatccttttacactgtatttttgtaaggggggctccctttttttatgga

SEQ ID NO: 1822 - DNA, 383 bp, Cricetulus griseus
caagtcaacaaatatgaaaacgaagactcctccagtaagaacacattttcctctaggacctaatcctttccttgaaaagcctcagccatttataagtccacagtcatgtgacgcccaaggacaaagatatacagcggaagaaatagaagtgctcaggacaacatcaaaaataaatggtatagaatatgttcctttcatgagtgttgatctgagggaacgttttgcttatccaatgcctttttgtgatagatggggcaagcttccattatcacctaaacaaaaaactacattttctaaatgggtacgaccagaagatctcaccaacaatcctacaatgatatatactgtgtccagttctagcataaagcagacaatagtatcag

SEQ ID NO: 1823 - DNA, 578 bp, Cricetulus griseus
agacaggcactgaaaaactaaggagtggtatggcccagcagattgcatatgaaatacacctggaacagcagagtgagggagaattgcagaagagaagcttccctgaccctgttacggattgtaagcccccacctcctgcccagggaattccagacagcccgccttttcctttctcactttggatttttatccttagaggcattgaaggaacctgcaaatagtcgtctacctcctcacctcattgcactcgattctaccatacctgggttttttgatgacattgggtatctggatctcttgccatgtcgtccttttgacacagtttttattttctatatgaaaccaggtcagaaaacaaaccaagagattttaaagaatgtggagtcttccagaaatgttcagccacatttcctagaatttttgctttcccttggctggtcagtagatgtgggcagacaccctggttggacgggacacgtgtccaccagttggtcaattaatagttgtgatgatggtgaagggtctgaacaagatgaagtaaactcctctgaagatgctggggctagcattttccatgg

SEQ ID NO: 1824 - DNA, 580 bp, Cricetulus griseus
  misc_feature (64)..(79): n is a, c, g, or t
cagactgaaagtgctctacagccagaaagccacgcctgggtccagccggaagacttgcagatannnnnnnnnnnnnnnngacaggatacttgatgcccctgaaatccgaaatgactactacttgaaccttgttgattggagctctggaaatgtactggctgtggcactggacaacagtgtgtacttatggaatgctggttctggtgacatcctgcagctgttgcaaatggagcagcctggggactacatatcctctgtggcctggatcaaagagggcaactacctggctgtgggcaccagtaacgctgaagtgcagctctgggatgtgcagcagcagaaacggcttcggaacatggccagtcactcggctcgagtaagctctctaagttggaacagctatattctgtccagtgggtcacgttctggccacattcaccaccatgatgttcgggtagcagaacaccatgtagccacactgagtggccatagccaggaagtatgtgggttgcgctgggccccatatggacggcatctggcaagcggtggcaatgataacgtggtcaatgtgtggcccagtggt

SEQ ID NO: 1825 - DNA, 511 bp, Cricetulus griseus
taaataacccaaaacaaagtagccaaattcctgtcttcatcagaattcttgatataaatgatcacgctccggaatttgccatgtactatgaaacatttgtttgtgaaaatgcaaaatctgggcagctaattcaaacaattagtgtcatggacaaagatgaccctcccagaggacacaagttcttctttgagccagtgccagaatttcctctcaacccaaatttcaccattgtggacaataaagataatacagcaggaatcataactcgaaaagatgggtacagccgcaccaaaatgaacacctacctactggcaggtttaatctttgacaatgattaccctattcaaagcagcactggcacgctcacgatccgtgtgtgtgcatgtgataaccaagggaacatgcagtcctgcaatgcataggccctgatgctcgctgcaggcctgagcacaggagctctcatcgcaattttactttgtgtgatcatcctgctcactctaatcgtgttgtt

SEQ ID NO: 1826 - DNA, 568 bp, Cricetulus griseus
  misc_feature (17)..(48): n is a, c, g, or t
  misc_feature (53)..(67): n is a, c, g, or t
  misc_feature (69)..(85): n is a, c, g, or t
  misc_feature (310)..(339): n is a, c, g, or t
  misc_feature (495)..(540): n is a, c, g, or t
gtcgtagaattcacttnnnnnnnnnnnnnnnnnnnnnnnnnnnnnnnntccannnnnnnnnnnnnnnannnnnnnnnnnnnnnnnttactcactgtatatctgcaaggccagaatgtgaaggcaagccacggaaaagatgctgctgttgagaccaagattgctgagtccttgagattcagagtgggctgtccgctgacttcaaccttggagagcacccctgacaatcctgaggcttcaccgggagctagagccagctaacatttccttgtttaaagactgcctttgatttttcccttgattccatgtatnnnnnnnnnnnnnnnnnnnnnnnnnnnnnngaatcaatgttggcaatacctagttctacttctcaaactggagcatcctcctctatatatttatatgtatgtgttctgtagtcctcctcatgtacctattgtgtattttttttcctaatatttaagcacatgccttttgtgttacacaatatatgnnnnnnnnnnnnnnnnnnnnnnnnnnnnnnnnnnnnnnnnnnnnnnctataatctgtggcaaatagagaaataa

SEQ ID NO: 1827 - DNA, 581 bp, Cricetulus griseus
  misc_feature (363)..(363): n is a, c, g, or t
cctttcaaaacgcagcctttcatcagcaaacttcttggtatgggtgacattgaaggactgatagataaagtcaacgagttgaagttggatgataatgaggcacttatagagaagctgaagcatggtcagtttacattgcgagacatgtatgaacagtttcagaatatcatgaaaatgggcccattcagtcagatcttggggatgattccaggttttggaacagattttatgagcaaaggaaatgaacaggagtcaatggcaagactaaagaaactgatgacaattatggatagtatgaatgatcaagaactggacagtacggatggtgccaaggtttttagtaagcaaccaggcagaatccanagagtggctcgagggtcaggtgtctcaacgagagatgtccaagaacttctgacgcagtataccaagtttgcacagatgggaaaaaagatgggcggtgtcaaaggacttttcaaaggtggtgatatgtctaagaatgtgagtcagtcacagatggcaaagttgaatcaacagatggccaaaatgatggatccacgagttcttcatcacatgggtggcat

SEQ ID NO: 1828 - DNA, 305 bp, Cricetulus griseus
ttctttttatgtagttgagtaaagtgatatttcctttgagaacttgtgataacccttataatcttgagcaaccactgtatgtgctgtggggctcttacagtctgaagtgtttaaccgaaggttttactgcttcttgcttattttagtttcctttcaacaaagctatgggttaaagatgatgtacttggtcatagatgctttttctgattcactaagtgcagcaataacaaatacatgttggttttttcaagaatgttcaatctcaaataatttcacatattctgtgactgaatgctctagccatt

SEQ ID NO: 1829 - DNA, 545 bp, Cricetulus griseus
gtcgacccacgcgggcgatgtttacgcgatgctccgtagaatcccggcgttaatacgtcctcgccccttctcgggccttcctttgtcctctggaaactgggatgtctcggtggctgtgtgtgtgccacccacggctcggtccggaaccggcaggacagaaaataatatccaaagacattttggcactggcagctgcatctatagcaagaaagatagccagtctgttccagccaatgaaatttcccagaagacagcagagactcaaggcgacagagaggagactcaaaaaaaaaacttgttagatattcttaaggacatgaaagttgaactgagcacagtaaatgtgcaaacaacaaagcctcgtggcaaaagaccttctgctggtctgcaggctgcatttagcaggcatagaagagctccagaagaccctccaaaaaataaaaatgagttcctgagttctgagttggtagcagccgcctctgctgttgcagattctctaccgtgggacaagcagacaaccaagtcggagctgctcaggcagcttc

SEQ ID NO: 1830 - DNA, 567 bp, Cricetulus griseus
accacagggtttgtgccatgtcggcgatcctccaccagccaaatatcgcttagaaacttgccgtcatccatccagtcccgcctctccatggggaaccagatggaagccaccagccagagcggcatggcctgtgtgcggcacagccttccctcctccagcagctccagccaaagcatcccggcctgcaagcaccacaccctcgtgggctttctcggggcagagggcagccagagcggtgtcactgaggcccagccaggcagcaccttaagtcctgccaacagttcacatgcccgtaagggggaggtggtttacagagtccagattgtggatctcagtcagattctggaagggattaacctgtcaaaaaggaaagagctccagtggcctgatgaaggaattcggttaaaagctgggagaaacagctggaaagactggagtcctcaggagggcatggaaggccatgtgattcaccgatgggtgccttgcagcagagacccaggtacaaggtgccacatcgacaaggcagtgctcctggtccaaattgatgataaatatgtgactgtaatt

SEQ ID NO: 1831 - DNA, 579 bp, Cricetulus griseus
  misc_feature (379)..(393): n is a, c, g, or t
cagtgacggtgtgaactgtgatgagttcgccgagttccaggaattactcaaggtgatgaggacaattgatgacagaatagtacatgaattaaacactacggttccaaccgcttcctttgcagggaagattgatgccagccaaacctgtgaacaactttatgagtctttgatggcagctcacgccagtagggacaaagttataaagaactgtatagcccaaacctcagcagtagtaaaaagtctccgagaagagagagaaaagaacctggatgacttaacattattaaagcaacttagaaaagaacagacaaagttgaaatggatgcagtcagaactaaatgttgaagaagtggtaaatgacaggagctggaaggtgttnnnnnnnnnnnnnnnaattcatttcaagcctccaaagaatgagtagagagaatattttatagacctggtcatctcatcaactaagcatgacagatgtcaacagggcaggctcccaaggatggtctcccagccagcagtccaaggcctcaagtctaattctaacatttataaaataatcaattgctattttattaccgattc

SEQ ID NO: 1832 - DNA, 600 bp, Cricetulus griseus
  misc_feature (22)..(22): n is a, c, g, or t
  misc_feature (493)..(514): n is a, c, g, or t
  misc_feature (532)..(532): n is a, c, g, or t
gtcgacccacgcgctccggggnaaaggcagtttctgtatggtagtgggaacagcttgctgttaattatggtaatgctgtaggtatcaagtatgtatgactgttaaaggggaaatagaaagcaacattttagagcactacccagtacaatccagagatcaagtggaggtaatggtggcctaaaagggcacttaagagatatggctgctgctcagagctgtgtacatgctactttcttttttttagaaaactcttttattattattattacgactatcattattattactttatgtgtatgagtgttttgcttgcatgtatgtctgtgcaccacgtgtgtgcctaatgcccttggaggtcaaaaagggcattggattccccagaattggaattacggaaagttgtttgtcaccatgtgggtacagacagcagtcttagctgctgagccatctctccagccccacataagatttccaacaggctgttttttgttcnnnnnnnnnnnnnnnnnnnnnntctttctacagagctcangctatcatggaactcactatgtagaccaggctggtctcaaactcaaagatccacctgtctctgcctcc

SEQ ID NO: 1833 - DNA, 600 bp, Cricetulus griseus; identical to SEQ ID NO: 1832
  misc_feature (22)..(22): n is a, c, g, or t
  misc_feature (493)..(514): n is a, c, g, or t
  misc_feature (532)..(532): n is a, c, g, or t

SEQ ID NO: 1834 - DNA, 361 bp, Cricetulus griseus
  misc_feature (310)..(328): n is a, c, g, or t
  misc_feature (330)..(357): n is a, c, g, or t
ggtgtctggccaaccaaatccgggagtggaggaggttgggaacatggctcagttaataaagctatggaaaaataaggatctgagtctggatcccagcacccatgacagtgctgagcaagtgtggaaccgatctgtaaccccattcttccagactgtggagggtctctgagataaactgggtagctaaactaaacaaaccggttcagatgagataccacatctctctatgaatgggatggagtaactgaggcagatatgtgatgtcaccctgtggcctctacctatgaatctacacacacactcataacannnnnnnnnnnnnnnnnnntnnnnnnnnnnnnnnnnnnnnnnnnnnnncaca

SEQ ID NO: 1835 - DNA, 481 bp, Cricetulus griseus
  misc_feature (55)..(84): n is a, c, g, or t
  misc_feature (437)..(437): n is a, c, g, or t
ctccgattcttgatcaaatgtctaaatatatttttaatatttggggcatgagttnnnnnnnnnnnnnnnnnnnnnnnnnnnnnngaaatgttacctggtagaacataatttgctaaaataaccagatttcagattgacctgttgcgaggtcccctttccccctcccctttccataacagttttgctatcaagcaaatgggttcctttttgagatattttaacacaagagaggaaggggaaagcaaacgaagctgtgctacctaaccctctttttgtttgtatttgtgttaagatattgtgaggttgtgtaaaatagcactagcttccctcttaagaaatagtttctgcttatcatttatcccttccctgtggcacttgatattttaattgtcttaaactttttgatgtgtatcctctggccccttacatactgccanaggagaaagagtttgtttgagattcattccacttgcagtgtctc

SEQ ID NO: 1836 - DNA, 261 bp, Cricetulus griseus
gtctttaaccctagagcacaaatggactttgggagcccattccctatggagggatactattgcagcccagatacagcaaggagggccgaggccctcccccaaatgatatgacagactttgaagttccctggtggagggcctcactatccctggggaaaagttggaggatgggttaggggtgttggtggggagcatgggaggatgggagggtgagggaatatggagatggatatgtaaataggagtaatggtttacgaacaa

SEQ ID NO: 1837 - DNA, 579 bp, Cricetulus griseus
caacatcacgtaatagcctggctggggaggcaaaactggaacctaccataaagaagatccactaaaaaggctttgagtggcgtgcaattaaactcagatatcaacgtgctctacgagtacctattaatatttgttcatctacatgtggaaaacgggacaaaggaaatgacaggcagaagttgtgaccaaggtcatcgggggaaatgagctaaaaggtgcctactcacagacagcattatgaaattaaaggaattccaacagaagaaagtagctactgcacataaccttcccagtaccaaagccatctatttcagaagcttggaggagaaattgacccaaaataaactcatcttgaaggaagagttgaaaacattgcttcacttgtgtcagtctcgggaagatgtggaactggcaaaaagtgtcatttacaggtgccactcagagaacagaaacttcactgtgggggaatataagtttggaccagttttcatgaggctatgctacgagttgcatcttgaggactctgcagtggagctcatcaaagacaagcacttacgaggtgtcttcctagactcaaca

SEQ ID NO: 1838 - DNA, 580 bp, Cricetulus griseus
  misc_feature (372)..(372): n is a, c, g, or t
  misc_feature (466)..(518): n is a, c, g, or t
catatcactggtccctctccactcctcgcccaacagtcctactcttttattcccttttctttcttctgagagatgtgaccagttcgaattatgtcccggaacataaagccagtgccagcaccagccggtctgcttcctctacagacgccaggtgactcccaatttacaagtagaatggccatagcctgtacctccctggcagctggctggttctggtggcactgagatgaacccactctctcgtcatggggaaggggacactgggacagcaggctgccactgagcacacacattcctcccatttttcagaagtgaatgtttcatgtttaggtgccgaatgtgaatttgggtggggagagcaggagcccttcncatagatgggtttacagaggttgtgggaactgagatctgatccctcgaaactgatcttgtgtcacttccaaagaatcatgggcttttttgaatnnnnnnnnnnnnnnnnnnnnnnnnnnnnnnnnnnnnnnnnnnnnnnnnnnnnncggggggggcgcccctttttgcccctttaaagggggggttattggcccccgggggaaaacag

SEQ ID NO: 1839 - DNA, 600 bp, Cricetulus griseus
  misc_feature (532)..(532): n is a, c, g, or t
gtcgacccacgcgggcgtgctgcctaatggctacgtctatggctacaattctctgctttctatccgtcaagatgataaagttgtttgcccaagaaccaaagaagtcttccacttctctcaagctgagaaagtatatatcatgtaggccctgcgttgccatgtgcacgcgtccggccagaggctgtggtgggtgggagccataccctcctaccctgaccccagaccccagaccccagcctgtcttggcatttgtttcttgcgaccaaagatcagtgagcaacggcaaatactcttagaaaaagaggaagtgagatttaataagtctgtgcttgacaacagcgtttgattggtaggattttgtaacataagtcgactgatgcctctgcaaattcttgcacctctcaaaggaaacttctctacagtgtgacctgaacagcaaggaaatccagagcatctcagaagtaggaattggttcatcagttatttccctgtgtttctccatttccttccttttgctagtgatgggactcangggagcttgaggagcaggctggtcctttgccaactcctgttggccacagcctgggctaattgttgcca

SEQ ID NO: 1840 - DNA, 484 bp, Cricetulus griseus
cctatcggagcctgccacccgccgcacctcctactacttccaaccgtcaccggagacagatcgaccggggtgtcactcacctcaatatttcagggctaaagatgccgagagggattgccattgattgggtggccggaaacgtgtactggaccgactctggccgagacgtgatcgaggtggcgcaaatgaagggagagaaccgcaagacactcatctcgggcatgattgatgagccccacgccatcgtggtggacccgctgaggggtaccatgtactggtcagactggggcaaccaccccaagattgaaacagcagcgatggatgggacccttcgagagactctcgtgcaggacaacatccagtggcccacaggcctggctgtggattatcacaatgaacggctatactgggcagatgccaagctttcagttatcggcagcatccggctcgatggcactgatccccgtctggctgctgacggcaa

SEQ ID NO: 1841 - DNA, 579 bp, Cricetulus griseus
  misc_feature (267)..(290): n is a, c, g, or t
tgccaaccccatgacctcacagtgtggcttttgtgccccagatgcctcctgggtgaggtgggggtgggaggaggaccacacagggccattgtctctgagtgggactgcctgcccctgctcatttagagctgccccagaaggtcagggctgtgtcctcaatagccctattccaggctcctcggttcccagagaaaggtcaggtgtgaccttgcagcagattccatcttgtgtgtaccgcagacctgctgcctgtgcctaaatgtaaannnnnnnnnnnnnnnnnnnnnnnncctaagaaaccaagggggcagccctggctgagatatcctttcctctgctgggagtttggagagtacaggacttcctttcaagccccccatctggaaggggggggcagacgcggtaatgagtaaccaacctggaatgctcaatgataagaggcccaggtgggacccttatctgcagttcctggaacaccctggccccaggtgcctggaaccaatatctgccccataatcccacggggcatcttggcaggtgctcaggtcaccaggaggaaggcaggtttacatgtatagc

SEQ ID NO: 1842 - DNA, 579 bp, Cricetulus griseus
  misc_feature (170)..(193): n is a, c, g, or t
tatttggaacattatctggacagtattgaaaacctcccatttgaattacagagaaactttcagctcatgagggacctagaccaaaggacagaggacctgaaggctgaaattgacaagttggccactgaatatatgagtagcgcccgcagcctgagctccgaggaaaaatnnnnnnnnnnnnnnnnnnnnnnnnaggcctatggcaagtgcaaggaatttggtgacgacaaggtgcagcttgccatgcagacctatgagatggtggacaaacatattcggcggctggatacagacctggcccgttttgaggctgatctgaaggagaaacagatcgagtcaagtgactatgacagctcttctagcaaaggcaaaaagagccggactcaaaaggagaaaaaagctgcccgtgcccgttccaaagggaaaaactcagatgaagaagcccccaaggctgcccagaagaagctaaaacttgtgcgcacaagtcctgagtatgggatgccctcattgacctttggcagtgtccacccctctgatgtgttggatatgcctgtggatcccaacgaacccacatattgc

SEQ ID NO: 1843 - DNA, 578 bp, Cricetulus griseus
  misc_feature (264)..(293): n is a, c, g, or t
ctctggccactggtgtgctcactggtgaggcaggagctttaccctctacccacgtggtggtggcagggatggcgaaatgtagagagtcctgttcaagtccatctgctgttggccctcccctaacgaccagaaagatggaagcagcaggagtgcctgcgacaggccagttcatgcgtattcagaatgtaggccaaaagaaagctgaagagagtccaacagagattatcatccaggccattccccagtacgctattccttgtcacnnnnnnnnnnnnnnnnnnnnnnnnnnnnnngggcttcttgaactgaacaacttcaccagtcagcagctggatgatgatgatacagcaatggagcaggatgtagacagcagcacggaggatggaactgagcccagcccctctcagagctctgctgaacgggcctagtgttcagacaccggagtgcactttaaagcctgcttggttaccaagcgtccagggaaacttataacttggggtccaaaaaaaagcactttgttcatatttaggcgtggggacctagaacacagtgtttcaatgaaatgttgctgccggagc

SEQ ID NO: 1844 - DNA, 580 bp, Cricetulus griseus
  misc_feature (95)..(118): n is a, c, g, or t
  misc_feature (526)..(526): n is a, c, g, or t
  misc_feature (575)..(575): n is a, c, g, or t
atggctaccttggagggtgagaagcccctacctgtagagatggagaagaacagcaccccctctgagccagactctggccagggacctcctccatnnnnnnnnnnnnnnnnnnnnnnnnccaccaaggaagaggctgaagcccaggggcgtcagagatcatgagagcctgtagccaccaatgtttcaagaggagcccctgccccgttcctgctgctgtctgggtgctactggggaaactggccatggcctgcaaactgggaatccttttcccacccaacccactctcctccttcactcactttctcctttttaagcccacccttggagattggcttggccctcacttccaggtccctgtaccctgtgacctaagtcagggccatgtgccctggtatgaaatggggccattatatctccttagacttgtctcctaagactttgtgttggggtctggactgctgtttccacctctcaacacctctggccttctgcaggcattctaaacctttgggccgggttggggcangagtgcggtgatgaaatataaacttgagtgggtttctgagtggcatctnctgag

SEQ ID NO: 1845 - DNA, 494 bp, Cricetulus griseus
  misc_feature (134)..(150): n is a, c, g, or t
  misc_feature (380)..(442): n is a, c, g, or t
atttcaaatccttttctgaacaaaatgtaatagaataatatttgataaattacttgaattgcttttaaaaggaaagtgtgtattgcagagtttaattgctagcatgacaatttttcagaaaattaggtagactnnnnnnnnnnnnnnnnnctgaagatattttgaaggtgtatatgtgtatttgtatcgttttttatgcattgccatcttaaagctcagcgatcactgaaaagttacttacagttctttgtcgactccccacctatgatgcccaaagaaagataacaaatgtgtctgatgaagtgtccagtgaggacgaccctgagacgggatactcattgcgctgtcatggggacagaacttctgaaagcagtcttcgnnnnnnnnnnnnnnnnnnnnnnnnnnnnnnnnnnnnnnnnnnnnnnnnnnnnnnnnnnnnnnntaaatgcacatatactgttttattgcttcactaactgagtggtaccatcgaa

SEQ ID NO: 1846 - DNA, 580 bp, Cricetulus griseus
ttaacacactagaccataccactgagatcagtgtgtcccgccttgagaccgtcatctcctccatctactatcagttgaacaagcgccttccttctactcaccaaatcagcgtggaacagtccatcagtctcctcctcaactgtatgattgccgcgtatgacagtgagggccgaggcaagttgaccgtattttcagttaaagctatgttagcaaccatgtgtggtggaaaaatgctggacaaattgagatatattttctcccagatgtcagattccagtggcttgatgatgtttggcaagcttgaccagtttctgaaggaagccctgaagctcccgacagcagtctttgaagggccatcctttggttacacggaacacgcagtccgcacctgttttcctcaacagaagaagataatgctgaatatgtttttagacaccatgatggccgatcctcctccccagtgccttgtctggctacctctcatgcacaggcttgcccatgtggagaacgtcttccatcctgtggagtgctcctactggcactgtgagagcatgatgggccttccatacccatgccagca

SEQ ID NO: 1847 - DNA, 581 bp, Cricetulus griseus
  misc_feature (210)..(270): n is a, c, g, or t
tgaaagggaaccagtgtccataaccctagctgttctgttagggattggtacagggaccgaggcccttgtccaaggaccacaacagtacagtgagctcaaaaatgcaatgatggcagatttaaaggaattagaaaagtcaataaccaggctggaggaatcactggcctccctggcagaagtggccctccaaaaccagagaaggctagaccnnnnnnnnnnnnnnnnnnnnnnnnnnnnnnnnnnnnnnnnnnnnnnnnnnnnnnnnnnnnnaaaccactcaggagtaattagggactccatggcaaaactcagagagagagattagctaaaagacagagggaggccgaggctcaacaaggatgattcaaaggatggttcaataggaccccatggttgactaccctaatttccaccctggtaggacccctcttcatactcctcttactcctgacatttgggccttgtctcctcactaggctcctacagtttatacgtgaaagggtatccatcactcaagccctcgtgctaactcagcagtaccacactgtgccaagtgctgaagtctacccaaatctgtaagt

SEQ ID NO: 1848 - DNA, 579 bp, Cricetulus griseus
  misc_feature (367)..(367): n is a, c, g, or t
gggcaaaagtgggcaccaggggctggtccaaggccagaacccataaaacactgggcaccgccaacagggcttcatgtcactggcccttagagctggagtgtacaggcccaataagaaatacaaaaataaactctgtggtccaggtgtcctgtctgtggcagactgttgttggtgcagagcggtcacttttctatcaagctctgtgctgtttaatccagccacagcacgggcagtaagagcctgcatgggtgtgtagacatccacaggctgaaaccaaagggctaggcaggtatagccttgggcagcgccaggatggtggcagtgccaggatatagccagcatctggggaggctctggagctccttangtaggcaggtccaggcactggttgaggctggatgaagctgagacttttcctcatcacatacagatcactggaaccctgtcttcctccatggtgctggtctcctctgccttgccctcactgcctgcacctacactctcttcatcagcctcttctgctcccagttccaagtccaatgcattgcctgcctctgagggtgtgtaggtggaaccact

SEQ ID NO: 1849 - DNA, 581 bp, Cricetulus griseus
gaaagccatcccaaaagtgaaggtagctacatgaaaggtgagccagaagtggaggctgcttttgcattcacattccttttgtgtagattcctttacagattcgtcccttactcctaaaataacaaacagcacagctgatttctctaccttctgcagaatggcagtcttcccccagcactgaacagtctcaggtgcctggacaagctgcaatggtcacttaattggtgtcaggtttttgaagcaggaaagcatggatcaaggtagaggtctcctaagtccccagggctaacggtcattacacctaagtgactgcaaataagacactagagaagcaaatgcttcctacagaattcttccctcacccaactttctgattaacagaaattactttttttgccttctcagaatttagaaactaaagcagcctcctccaggcgaccataagggaaaagcagacatgtgccttgctcttcagtatctaccacccaaaggctttgccccacccacctgcttccctgcgggctacaaaacagcccactgagttaagtgtgcctgtgctcacccaagatgaaccttgagaa

SEQ ID NO: 1850 - DNA, 229 bp, Cricetulus griseus
tgttagccaagtaccaacatatggaaagccagctgagctggtgaagatgtttggtattgacaaggatgccattgtgcaagctgtgaatggccttgtcaccaaaggctatgggggagccctataatggctgctgggtgggggaactccacattgcctagacaagttctggcaaggtgctcaaagatgtactgagaggagacataaatatatgttttgagaaaaattaaaa

SEQ ID NO: 1851 - DNA, 580 bp, Cricetulus griseus
  misc_feature (338)..(362): n is a, c, g, or t
aaaactggaaaaggcaagaaagaaaaggaatcaattcactctgagactcaaggtgaagcagagccttgtaggcagacttttcaccgtcatgccaaaatgtaatccatgtgtggtgtttgaagtgactacaatttgtagtgatttgttacagagaaatgaggaacttgtactagccaaactggtttcagatgtataaaatgagttgtagttcaggtcatcgtccatagtagtgagccaggctgggtaactaaggagcagggtcatttttaaaaaacaaaagagtttgcagctaacatacatctgttttccagagcagcatgggaataatttaatcacannnnnnnnnnnnnnnnnnnnnnnnnttatgcgccagaaactgggaaaaagtcattggtgcaaaatggatttggaggaaagaatcagacagactcaagttcaaattccagctctgccaggtgttaagtgggtagctggtgggaactgcttatctcatttgcaaaacccagatcatatctcccattcgtgggtgttgtgaaatctaaatatagtatattgatctgttacaatttgtttatcaaga

SEQ ID NO: 1852 - DNA, 443 bp, Cricetulus griseus
gaggtgtgttaaagagtcgcttggggagaaagcttggcttttttggagtgtgtgtgggggagactttggggggggggaacttttctcctcctcccttctctccccacccagaggcaactgctttcttcagttacacggactgagggggtaccccccccccattcagctctatatggagagcctggaggaaaaccccctttacccattatgccagcgggaaggtcaaaggcaaagaaaaagttaataatgcctgctaatggtgctaacaattcaggatgaatcttgtcaaaagttttttctggaagtgtgggtctttgattgtgtttcccgaaagcaagaccaatcatttccgtttattcactggctaaacccctacttgattggggacaaggacagaaaccatcccttacgatctgatatattatccaaacaatttattgttt

SEQ ID NO: 1853 - DNA, 502 bp, Cricetulus griseus
agctgagcctgtgatatcctcggtcgctcaggatggcctcaggcaaagcacgctgtacccggaagctccgaagttggataatacagcaattggaaagtgggcacttcccaggggtgtgctgggatgacacagccaacactatgtgccgggttccctggaagcatgcaggcaagcaagacttccgaaaggaccaggatgctgccatattcaaggcttgggcactgtttaaaaaaaagcataaggatgaggacataggaccccctgctgtctggaagactcgcctgcgctgtgccctcaacaagagtcctgaatttgaagaggttcctgagagaggccgtatggatgttgctgaaccctacaaagtctatcggatactgccaccacgaaccctccctggccaaccaagaagccagaaatcgccatccaagcgacccaatagtgctgtgtcaccagagagggaagagaataaggagaagggaaggtccagcgggcttgtaaaccc

SEQ ID NO: 1854 - DNA, 581 bp, Cricetulus griseus
atttgtgaatgaagttagaagatgtgaagaaatggatcgaaagcttcgatttgttgagaaagagataagaaaagcaaacatcccaattatggacactggtgaaaacccagaggtgcccttcccccgggacatgatcgacttagaggccaatttcgagaagattgaaaatgagctgaaggaaatcaatacaaaccaggaagctctgaagagaaacttcctggaactgactgaattaaagtttatacttcgcaaaactcagcagttttttgatgagatggcggatccagacctgttggaagaatcgtcatcactcttggagccaaatgagatgggaagaggcacgcctttaagactcggcttcgtggctggtgtgattaaccgggagcggatccctacctttgagcgaatgctttggcgagtgtgccgagggaatgtgttcctgagacaggctgaaatcgagaacccgctggaggatcctgtgactggtgactacgtgcacaagtctgtattcatcatttttttccaaggtgatcagctgaaaacagggtcaagaaaatctgtgaaggggtccgagcctccct

SEQ ID NO: 1855 - DNA, 579 bp, Cricetulus griseus
  misc_feature (533)..(533): n is a, c, g, or t
cacagttctgttttctacctccattagtgtcaccactttgggtacctcacataaatggtccttttgtgactggcttttttccctcagcagcatgtcttcaagattcaaaatttcctcccatttaaagttgaataatattgtaattatggaaaatcctgtatcttccttatctatataccattatgaatgtttgagtttttcccatgtgatattttgaatgaatataccagtagctgtttaggtccttcatcagatttttggatatatacatagatttaaattatctacttcagctaacttttaacaattatgattttgtgtatagagaagaatataagacattaatgaaagaaaacattttctgtttaatggttttgtttgtataagacacaccacttacctagacttatttaggctttctattttcagtgtgagaaaaaaaatcaggtgctgtatatatgacttcactgttcagaagtaatcattaacatttttttgccattcttttggcaagtgactgcaatctgtctcanagaaatatggaaaatctggttcaagacttattattagccaggagtg

SEQ ID NO: 1856 - DNA, 116 bp, Cricetulus griseus
  misc_feature (41)..(41): n is a, c, g, or t
tcgacccagcgtgcggggctattgccaagaaagcttttganaagacagcaaagggctaatccatagaatccgaaagtgtgatgtgctgtgatgcttatgctgactgaaaacatcta

SEQ ID NO: 1857 - DNA, 579 bp, Cricetulus griseus
  misc_feature (310)..(351): n is a, c, g, or t
  misc_feature (486)..(486): n is a, c, g, or t
  misc_feature (492)..(537): n is a, c, g, or t
  misc_feature (544)..(544): n is a, c, g, or t
tcctgcatggagaaaaaggaaaaggaggaagtaaacctaagtacaagcatttctcctttctctgcttttggttaaccatgaagtgaagcatactttctacacatcttcctgctactatgctaaggttaagcatatggggccaaagaacagcagattaaattgactgaaaccatgagccaaaatgaatgcttcctccaaaaaattgtttcagttagatattttgtcatagtagagcaaagcaaactgtatacgcaacgaatagcagagttgagatttaaatatatctctgaagcctttgtgcagtggtacnnnnnnnnnnnnnnnnnnnnnnnnnnnnnnnnnnnnnnnnnntagagggtaggaggaatctgttataactaggggtgctttcagtattctttcaacagttgacacaccccattttatttccttctttaaaagttctaaagatcattgagtagtagtaatgcatgctttttatcccancactannnnnnnnnnnnnnnnnnnnnnnnnnnnnnnnnnnnnnnnnnnnnncccacanagcaaattctagaacagccagagctaaacagtgaa

SEQ ID NO: 1858 - DNA, 511 bp, Cricetulus griseus
  misc_feature (205)..(219): n is a, c, g, or t
aggcgcaaggactcatcccaggatgaccacggccatagcatagttcttaaaggggcatgtcatgatgtgtgcccagggagaaaaacaaaaaacaagaggaaagcgtagatgcccgaggacctgtggggaaggtgaggcgctgggaccagggcctggaaaagcctcgccttgactactcagagttcttcacggaggatgtgggccnnnnnnnnnnnnnnnccatctggcaaattgagaactttgtgcctgtgctggtggaggaagccttccatggcaaattctacgaagctgactgctacattgtactcaagaccttcctggatgacagtggctccctgaactgggagatctactactggattggtggggaagccacgcttgacaagaaagcctgttctgccatccatgcagtcaatctgcgcaactacctgggtgccgagtgccgtactttgcgagaggagatgggcgatcagagcgaggagttcctgcaggtgtttgacaatgacatttt

SEQ ID NO: 1859 - DNA, 481 bp, Cricetulus griseus
  misc_feature (410)..(440): n is a, c, g, or t
gtgcaaagattacctcattgaagccatgaagtaccatttgctgccaacagagcagcgcatgttaatgaagagcgtgcgaacccggctgaggacacctatgaaccttcccaaattgatggtggtagtcgggggccaagcaccgaaggcggtgcggagtgtggaatgctacgacttcaaagaggaacgatggcgccaagtagcagagctgccttccaagaggtgcagagcagggatggtctatatggctgggcttgtctttgctgttgggggttttaatggttccctaagagtccgaactgtggattcctatgacccggtgaaagaccagtggaccagcgttgcaaacatgcgagaccgaagaatcacgctgggggcagccgttctaaatggattgttatatgcagtggggnnnnnnnnnnnnnnnnnnnnnnnnnnnnnnntggaagcgtacaacataaaggctaatgagtgggttcatgtt

SEQ ID NO: 1860 - DNA, 579 bp, Cricetulus griseus
  misc_feature (485)..(485): n is a, c, g, or t
tctagagcgggcggggaaaggggcagctggttcctttagggattaggtcctgtgaggctggcctcagaagtgagtccgtctcctctcgctcttcgctgagtctttcaggcccttggactgaggaaacgtctacaccgtgatgggaggcggggacctgaacctaaagaagagctggcacccgcagacccttcgaaatgtggagaaagtgtggaaggcagagcagaaacatgaggctgagcggaaaaagattgaggagctgcagcgagagctccgagaggagagagctcgggaagagatgcagcgctatgctgaggatgtcggggctgtcaagaaaaaagaagaaaagttggattggatgtaccagggtcctggtgggatggtgaaccgggatgagtacctgctggggcgccccattgacaagtatgtttttgagaagatggaggaaaaggaagcaggctgttcttctgagacaggactcctcccangctctatctttgccccatcaggtgccaattcccttcttgacatggccagcaaaatccgggaagaccctctcttcattatcaggaagaaagagga

SEQ ID NO: 1861 - DNA, 522 bp, Cricetulus griseus
gtcgacccacgcgtgggggggcgcgtgggctgaatttgaaactcaaagttccaaattccaggaaggcgcagagatgcttgtgaaccctgaggaaaagaatccactgagtatccccttaggagttcatcccctgggactcctttactcagggtttggggagcggcccacaggagcactgcctctaggggcaccatttgatatgcctacaggggccctgctggccacaccccagtttgagatgctccagaaccccctgaatctgacagggacccttcgtggtccatgccgtaagggtggccgggccaagggtgggcaagggccccggcctaacatctgcggcatctgcgggaagagctttgggcgaggctctaccctgatccagcaccagcgcatccataccggggagaagccttacaaatgtgaggtgtgcagcaaggcgttttcccagagctctgacctcatcaaacaccagcgtacccataccggcgagcgggcctacaagtgtcccaagtgtggcaaggc

SEQ ID NO: 1862 - DNA, 555 bp, Cricetulus griseus
aactgtgtaaaagttcaagtctgtactgttgcagtttgagaattgtagatacaacatcgtacatacgtcacttagtaatagccttcgtgaaatcagtttgtttactattggagttaccacgctttaaataaagaagagaccatggaagtaccatcataaaaacactttaacctaagtttctgttatagcagagtttcttgttttttaaaacacacatacacacacaaaatcatctgaaaagcatttgtatagtaaattgtataatgaagctttgacagccagattgtgctagcaggagtagctattatgcagtaataatatatatgatgggctctactactctgtgtcaggtggggaattagtgaagtgaatgtggactttactgaaatgcaggtacactataatctttgccagtaatgaaactcttctggccatatgatgttaactgagatgtcattttgaatataatacatctaaatataacatatatggagacgctaagctgacagtggtattttagcacatttgaaaactgagaagggatttttaggtgaa

SEQ ID NO: 1863 - DNA, 581 bp, Cricetulus griseus
catggagtctgtgtccactcagatgagacaaagaatgaactttaataggaagcttgttaatctttcagcaaatgtggatgctgcaagcaacagtctctcttttctaaaatgtgtcttgaagctacttattttcaaccaaataagaacatgattgaagaaccaccaaggagacttttactctgtctgcaccatgggaggcctcagatcacagggtggggagggaggggaaggttggatacatgatcaagttgggggtgggtcaaaaatctatgtactctgtcccatggaagtgtactctgccccatggaagtgtgctgtgcagcaccttgtaaatcccccaaacccacttaacaccttagggcttgccgatgccctcccaatagctgttgttcgccgccctctagtggtgaggttgtagaatactggtccactagtgggatttctagggttcaaaagtgatttcacttccaggtcatcatcagaaactggaacacagtgtcatgctactgtggcttgttttgtttgtgtcattttatcttattcaagaaaaagaccaaggaataacattgctgtcattccta

SEQ ID NO: 1864 - DNA, 579 bp, Cricetulus griseus
ttgctgggagcaagtcgcctggtccgtctgtaaggggacccaagcgggtcgcccaatttgtaggacaggggcttgctgggagcaagtcgcctggtccgtctgtaaggggacccaagcgggtcgcccaatctgtaaggacagggacttggtgggagcaagttgcctgctccatctgtaaggggacccaagcgggtcgcccaatctgtaaggacagggacttggtgggagcaaattgcctgctccatctgtaaggggatccaagcaggtcgcccaatctgtaaaagaggtacttgttggaatcaagtcatctaaaattccaaataggaccctagtctgtgttactgtactgtctgtccatgtttcacatttgtgttatatgtttcttaagcatctctttctgtccctgctctccctacgcacatggcatgcatgggtcaggggtcttttcttgattctctgagcacgtggcgccacctcaactatgatcggcagatgcacccggaggacagactgccactctgaggacacccaggacccatgaggtacagactcgggccaaggacacttggacccgcctca

SEQ ID NO: 1865 - DNA, 568 bp, Cricetulus griseus
gaggccagagagctgctacagctagcagatgccttggggcccagcatctgcatgctcaaaactcatgtcgatattctgaatgatttcactctggatgtaatggaggagttggcagctctggcgaaacgccatgaggggttaatatttgaagacaggaaattcgctgatataggaaacacagtgaaaaagcagtatgaaggtggcatctttaaaatagcttcctgggcagatctagtaaatgcccatgtggtaccaggctcaagagttgtgaaaggtttgcaggaagtgggcttgcctttacatcgagcatgcctgctcattgcagaaatgagctctgctggttccttggccactggaaactataccaaagcagcagttgggatggctgaggagcactgtggatttgtggttggctttatttccggctcccgagtaagcatgaaacccgagtttcttcatttgaccccaggagttcagttagaaacaggaggggatcaccttggccaacagtacaatagtcctcaagaagtgattggcaagcggggttctgatgtcatcattgtaggcc

SEQ ID NO: 1866 - DNA, 604 bp, Cricetulus griseus
  misc_feature (45)..(79): n is a, c, g, or t
  misc_feature (89)..(161): n is a, c, g, or t
  misc_feature (178)..(426): n is a, c, g, or t
  misc_feature (432)..(484): n is a, c, g, or t
  misc_feature (511)..(534): n is a, c, g, or t
ggccacccacgcgggcgggcgtcctcattagagtgacatggtgtnnnnnnnnnnnnnnnnnnnnnnnnnnnnnnnnnnnggatgcccannnnnnnnnnnnnnnnnnnnnnnnnnnnnnnnnnnnnnnnnnnnnnnnnnnnnnnnnnnnnnnnnnnnnnnnngctgtagtgtgggagcnnnnnnnnnnnnnnnnnnnnnnnnnnnnnnnnnnnnnnnnnnnnnnnnnnnnnnnnnnnnnnnnnnnnnnnnnnnnnnnnnnnnnnnnnnnnnnnnnnnnnnnnnnnnnnnnnnnnnnnnnnnnnnnnnnnnnnnnnnnnnnnnnnnnnnnnnnnnnnnnnnnnnnnnnnnnnnnnnnnnnnnnnnnnnnnnnnnnnnnnnnnnnnnnnnnnnnnnnnnnnnnnnnnnnnnnnnnnnnnnnnnnnnnnntgccannnnnnnnnnnnnnnnnnnnnnnnnnnnnnnnnnnnnnnnnnnnnnnnnnnnnaagacctctttcttccaggctttgggnnnnnnnnnnnnnnnnnnnnnnnncaccatcgaaattctaagcgatgtgcagctgataaaaactggagacatagcaggagccagcgaaccccac

SEQ ID NO: 1867 - DNA, 525 bp, Cricetulus griseus
  misc_feature (49)..(49): n is a, c, g, or t
  misc_feature (89)..(89): n is a, c, g, or t
tcgaggggtcgactccacggcggtcgcgcccactggcgtccgcgcgttntcctactttttaacattagataaggtgtaacatgtaatantgctaacagaaaagcaattaatttaaaatatagatgaggccatcattcaaagttgtgatagatccaatcagtaaatattcaagcaagtttagaattaagacattaataactttgtttctcttggaaggtttaaaattagaggaatatagtgaataactcagtatttaatggtatataatattaaaactctggtgcatttgtattgctccaagatgaatatacaagtacttgtaataagacattattacagtcgtttttaagataattcatgtctttcttagatgcctttgagtaatggacagatgggccagcctctcaggcctcaggcaaattatagtcaaatacatcatccccctcaggcatctgtggcaaggcatccctctagagaacaactcattgattatttgatgctgaaagtggcccaccagcctccata

SEQ ID NO: 1868 - DNA, 578 bp, Cricetulus griseus
  misc_feature (491)..(509): n is a, c, g, or t
ttggtgttgcacctgtagcccttaagtgtttctaggaaagcttgtaaaccttggttttgtttttctaacctcatccacccatcgtctggtctcttagtgtaaaagtatcctgctctgcgcatccttaaactctgtgcagtctaaaaccggtgtatttgctatatcgagatagggcaggaactactgtgtccctgatgcagacccttgggacatactgcatttcaagcctcttcaaggatcggtcatgtaagcctgaccggaagtttcctacagtgagcgtcacgcctagtactgagtacccagcacctaagagttgctgagtatatggggggtttcggtcatgatcagatactttgaacctcgcttacctagctcgagcagagtcggcccttttttgttctattttccgcaacgggttttgcttccttttttactgaactggtcccatagaccaagctgtccttgaactcagagatccgcttgcctctgtnnnnnnnnnnnnnnnnnnngaggtgtgtgctttaaatgtttttgttttgttctgttgcttgtttttttcttaaagcgggcctttctaa

SEQ ID NO: 1869 - DNA, 578 bp, Cricetulus griseus
gcgcccggggcgcgcggccgagcggcgagagatgctgggcatgtacgtaccactacaggttcaccctgacatacttccgggtccaggacaggatggggctctacactgtccgacgtgtgcgcaagggtagaaaaattaggaccttgtgctggatagaagataatgcctgaagacttggatgaaaatctggactaccgactgatgtgggaggtccgtgtgaccaaaggagaatttctgtatattttagatgctaccaaccccagacactccaactggtttcgatttgttcatgaagcaccatctaaagaccggaaaaacctggctgccattcaagaacgatagaatattttctactgcactctatgatattcaaactgataccgatcttctgattggctacctggacagtgatgtggaaacacgggacgaggatgagcaacaccctctcaccatgaacaaagaatgcaaatgtgaccactctagaggacaatcatcagctgcatgcgaatgtactgcatattaatttggcgatctgaatgaagagacattgataacgaaggtaagttgcattactagga

SEQ ID NO: 1870 - DNA, 580 bp, Cricetulus griseus
cttccctaagctgtgtccctgacactgaggtcctgacgctgtggagactctaggcgctgccggccggccgtggcttccctcctgggcctgagctacagcagaccctacagcagaacgttctttttacacttcaaaatgggatcctgtaagaaggttactctctcagtgctcagccgggagcagccagagggggttggagctcgggtccgcagaagcattggcagacctgagttgaaaaatttggatccgtttttgctgtttgatgagactaaaggaggaaggccgggagggtttcctgatcacccacaccgaggttttgaaacggtatcttaccttctggaagggggcagcatggcccatgaagacttctgtgggcatgttggtaaaatgaacccaggagacctacagtggatgactgcaggccggggcattctgcatgctgagatgccctgctcagaggagccagcccatggcttacagctgtgggtgaatttgagaagctcagaaaagatggtggaacctcagtaccaggagctgaaaaatgacgagatcccaaaacctaccaaggatggtgcgacag

SEQ ID NO: 1871 - DNA, 579 bp, Cricetulus griseus
  misc_feature (458)..(473): n is a, c, g, or t
gcactacagtggaaagttgggttggattaggtaggagggagtaataggatgctgggcatgtagaaaataaggagaggtgggcctaattatgatagtataaaaagttctgcattatatttattaggcacccaaatgtgtgatacagatgtgcaattggaagtgactttttggtggttttgaataagtagaagaaagtgggcagagctttcctactcctggtttcttgatggtggtgtgaagggtttttgtggggtttgtgttttttgttttggagacagtggataagagcagagagaaagtatgacctttatagacattcatgatttttcatttacatattaaagtgaatgcttcctgtctagctgcataagccacaaacagtatataatgcatttctctgaggtcaggcctggatatccatttcaggctcatcagtattttcttgtcttctgtgggcnnnnnnnnnnnnnnnnctaaaagctttacaggtcaccagtagccaggaggtgttcaagcacaatgtgctattgaaagctgattggttggtacagacttagcatgccttttaggaaattaaag

SEQ ID NO: 1872 - DNA, 507 bp, Cricetulus griseus
gaacaaaaaaacaaagtaaagatgtaaaaagaaaccagtgcacatatattctatttccatggctttatacctcactaaacctctattaccatataaatacaatatgaacagaagataatctcacaagttgcaaaatgcatagtttggtggtgttttgtttatttttgaaatctcatttctaaattccaattgggatggaattttcaaaagcattgatattaatatagatgagcatctttaaaatgttgtagctgtattagagtaatttaagaaagataaatagaaggtttaatgaaggagctaaatttaaaatatgagtatgctaccatgagagatgtttgccttgaagaaaatgctgtaaacacagggagaccacacgtcatttattatcagttgtctgatctcaaggcagtcactttcagcttccatataccatctatcaaatagaaataatacttaacagaattactgtgaagattatgttggataatgcataagaacccatat

SEQ ID NO: 1873 - DNA, 196 bp, Cricetulus griseus
atgttccaacatcttcctctacatccacatctaccacgcaaacccacaactacacacagtactcatgaccgaccaacagatataatacctgccctacatgcttgcactaccacttaaactggcaaggaaaacggggggggaaagaccaaatcctatggcaaaacctgtgcatctatgtgcccttttaactccctgg

SEQ ID NO: 1874 - DNA, 510 bp, Cricetulus griseus
  misc_feature (160)..(178): n is a, c, g, or t
ctggttggaatagtcagaagtactttgttgacaggccaaggacatttatttttatactgtaggccctttacaggatgattgatatagtacatgatacaaaaggaaaaccttttacagataaaagttcaaataaaatagcccatattggttttctagaagnnnnnnnnnnnnnnnnnnntcctaccattctgagggtttgaaaatttgatcttttctcttttctgggctatttattgacctgatggttcagtttattacagcctgtgcagttgatctctcttgtatccaagttggtatcaaagcctaaacctgaatattctggttgccagttgtgaccaagtactcgataaaaaacttgtcttgaagcacagggctgggaacaaaaacctggggtttggttcttaagaagctgaagctaccagggtaaaaatggtgagtaagtgtgaggacagctcagttaccccaccccaccccccacgggttatccccagcccaagggtgagaccctaa

SEQ ID NO: 1875 - DNA, 601 bp, Cricetulus griseus
  misc_feature (36)..(36): n is a, c, g, or t
  misc_feature (43)..(43): n is a, c, g, or t
  misc_feature (48)..(49): n is a, c, g, or t
  misc_feature (58)..(58): n is a, c, g, or t
  misc_feature (81)..(101): n is a, c, g, or t
  misc_feature (586)..(586): n is a, c, g, or t
agtacgggccagtgaatcgcgccgtaatacgaactncactatnagggnncgaattggngtaccgggccccccccttcgagnnnnnnnnnnnnnnnnnnnnntggtccaagaactctggtgtggtcctgagaaagagcaaggtggaaaaatctgcctttgaattttctgagactgaatctatgcttaaaattgcagaaaatactgggagggccctatgtgtgggggcagtacgatctattggttctgcccccatgcttcccttacggcggaatggagaacccttgtcttacatttgtgactcctactctactggcaggtgacaagtcactctccaatgttattgcacatgaaatatcccatatctggacaggaaacctattgactaacaaaacctgggatcacttttggttaaatgaaggacatactgtctatttatagcgtcacatttgtggacgattgtttggggagaagttcaaacatttccatgctttgggaggatggggagagctacagaatacgacaaaaacttttggggagtctcatccctttaccaaactggtggtggatctgaaggatgtagacccanatgtagcctattcct

SEQ ID NO: 1876 - DNA, 581 bp, Cricetulus griseus
cagaatggagaattcatgactcacaaacttaaacaaactgagaatgctttcagccccagccgcccaggatgccgggccggtggggacaaggaagctgaaggtgcccctcaagtggaagctggcaagaggctggaggaactgcgccggcgccgcggggagactgagagcgaagagttcgaaaaactcaaacaaaagcaacaggaggcagccttggagctggaagagctgaagaaaaagagggaagagagaaggaaggtcctggaggaagaggagcagaggaggaagcaggaggaggccgatcgaaaagctagagaagaggaagagaagaaaaggctaaaggaagagattgaaaagagaagggcagaagctgctgagaagcgtcagaagatgccagaagacggcttgtctgaggacaagaagccgttcaagtgtttcactcctaaaggctcatctctcaagatagaggaacgagccgaatttctgaataagtctgtgcagaaaagtggcgtcaaatctactcatcaagcagcggtagtctccaagattgacagcaggctggagcagtataccaatgccattga

SEQ ID NO: 1877 - DNA, 314 bp, Cricetulus griseus
  misc_feature (182)..(182): n is a, c, g, or t
cccaggcagagaatctgccctggctggctatggggaggggtagaggtaggttttggggcagaggggagaaaagagccctggaaacctttccctttaacctgacatatttatatatttacagcaataaaggagaagggggagggatgggggatgactggggtcacattggttcttccatggangggaacgagaggccacttagcacccccattcaagtcacattttactggcttttaacctttaaagcctccaaccgaaaaagttggagggtgaaataagggaatgttggaattaaagggccggaaccccaagtc

SEQ ID NO: 1878 - DNA, 196 bp, Cricetulus griseus
  misc_feature (30)..(54): n is a, c, g, or t
atacgccagtgacgccgtatacacacttannnnnnnnnnnnnnnnnnnnnnnnncgagtctcccaccgtccggtcataacgcagtgttgtgaaaaccaccgctaattcatccactgggaagaaaacatatactcgtgcttggcactaatcagcaatcaccaccggcactgatcacaagtggggatcgacgacaaca

SEQ ID NO: 1879 - DNA, 127 bp, Cricetulus griseus
  misc_feature (25)..(57): n is a, c, g, or t
actgtgtgggactgcgtacccgtcnnnnnnnnnnnnnnnnnnnnnnnnnnnnnnnnnagccccccctctaggtcgacccacgcgtgcggtgtgcgatgacagccctgagctccaagttgatctctga

SEQ ID NO: 1880 - DNA, 579 bp, Cricetulus griseus
gttaatggttgttgtgtgtatatttctacatctgtctaaatataattaaaaccatgagattacattaatgaaatcaatcccaatctagttctgcatacttgcaaagctttccctggtccacatgtgtaagtgaaaagacaatcttatgcataatgtacagacactcatcagtgtctgtgtcagtgtccagacagcatgcatataaagtttactttggtatgcgtatctgcttgactcatcctatgtgtaacagactcttaaccttagaaagcctgtagctcctgtccagaagtgcaaccttttgggtcattatccaaaccaccaccaagtagatgtcagttcttcccacaacgaatgtgggaatgaatgtattctattccagtccaatcaaaatcccatcaggaactcaacaaatcttgtagaattcaatagggaaagatctatgaaaaaaaatatgccagtttgaggaaggaaaaattagagaagccaataacagtgttttagtggaaacatagcacaaaggtccttgttcctacagatctccagagaaaccaggaatgttaagcacacaggattgtc

SEQ ID NO: 1881 - DNA, 575 bp, Cricetulus griseus
  misc_feature (2)..(67): n is a, c, g, or t
annnnnnnnnnnnnnnnnnnnnnnnnnnnnnnnnnnnnnnnnnnnnnnnnnnnnnnnnnnnnnnnnnttaagacaattttataaatactctgcagcttttttttctttttagctcttaaacatataatttaataacttcgtaaaaggaacttctcttttaaataaagggctatataaccacacaaataggtcatgtaaacagtgacaccggacccatcgcaggacacactgacacgcctcccacccacacttagaaccggcgatttggtcttatccagtgcactgtgccaggctccagcaccatggtttctgccccagtgcccaggctggtggcctacccatccagagccttcaagacataaccacttttcagggcagagcccatctcttccttcgggatcaagctgagaggcccactggaatctgaagagaaagctcccaagtcccactgcagactggcagcctgtagggcctgcagaccaccagagagaaagggcagacctaagcccagtgcactcttgtccattcctgcagtgcccactctggactcctagcctgcatggccttggtacaaa

SEQ ID NO: 1882 - DNA, 563 bp, Cricetulus griseus
  misc_feature (11)..(24): n is a, c, g, or t
  misc_feature (26)..(63): n is a, c, g, or t
  misc_feature (77)..(90): n is a, c, g, or t
  misc_feature (92)..(108): n is a, c, g, or t
  misc_feature (126)..(148): n is a, c, g, or t
  misc_feature (207)..(229): n is a, c, g, or t
  misc_feature (240)..(253): n is a, c, g, or t
  misc_feature (255)..(289): n is a, c, g, or t
  misc_feature (399)..(431): n is a, c, g, or t
  misc_feature (448)..(467): n is a, c, g, or t
tctttctgatnnnnnnnnnnnnnnannnnnnnnnnnnnnnnnnnnnnnnnnnnnnnnnnnnnncatgcagatcttcnnnnnnnnnnnnnntnnnnnnnnnnnnnnnnnagaggtggagcccagtgnnnnnnnnnnnnnnnnnnnnnnncaagatccaggataaagagggcatcccccccgaccagcagcgactcatctttgccggcnnnnnnnnnnnnnnnnnnnnnnntctttctgatnnnnnnnnnnnnnnannnnnnnnnnnnnnnnnnnnnnnnnnnnnnnnnnngtggctattaattcttcagtctgcattcccagtgggcaatggatggcattaatctgcactatagccatttgccccaatttaagtttagaaaatccaagtttcagtaatannnnnnnnnnnnnnnnnnnnnnnnnnnnnnnnnttgttgcatggtaagcnnnnnnnnnnnnnnnnnnnncgccccccccgcgggggacccccacctttggtccccttaagggagggtaattggccccctgggggaaaccagggcataagcggttccctgggagaa

SEQ ID NO: 1883 - DNA, 579 bp, Cricetulus griseus
gaaccacagtaactggctattcttgcttccgtgcagggatcagcaccgaaggcaacagcacagggcattctgggaacaatctgggttacaaagtggccttattcgcaggaatcatatcaggatgcatcatcttcatcgtcatcgtcatcatcatcaccttggtggttctgttgctcaagtaccgcaggaggcaccgcaaacactctccacagcacaggacaagcaaggtggcaacaactctggctgcgaacccagtgatgttctcatacccctaaggactgcagacagtgtctcccgcccacactatgagaaggtcagcggggactatgggcacccagtgtacatcgcgcaggagatgcccccacagaatcctgccaacatttactacaaagtctgaggcctgggaccttcgcctcccaagggaactctcaccttgttgtgggcgcagggactgcctgagcctggctctgggggcggaatgcctcctggaagaacctggagctggacagttttgtaggctgcaacttttcagccttggggaaactacagaccctccccagaagctggaagactgctaag

SEQ ID NO: 1884 - DNA, 567 bp, Cricetulus griseus
tccaaagaatttcaattgctttgttgaacttttactaatgatcttgtttttattttctctcttgtttttggtttttcaccattgatattgtatttagaaggtttcaggtgggtgaaacctcctattccatgcgtgaggtgcctcgctgaagggagctcgaggcctggatctagggcagacacacaacctcctcctcttccagcaaggaacgcaccgaaaagtcacatgatgagaaatatggtaacgggtttgtaactgccacagcaaaacaatttgcctccatgcctgaatcttctgtcttgtggcttcagaaacagcttaaaataataattttatttacgagcaagttatgtaaaagaatgttttatactatagccacaattctatcaaaaataagtaaaagttaattaagattaaaattattagataatttactagtaaaagcttctaactcttcttgttgttcattttttttcctttttcttctttgtttggattgcagcattctgctcttctgatgatgcgctgtgaccctgcagtagcgcaaaagctgcgcagcgttaatgc

SEQ ID NO: 1885 - DNA, 599 bp, Cricetulus griseus
  misc_feature (26)..(71): n is a, c, g, or t
atgtgctggaaatgttgtcccgctcnnnnnnnnnnnnnnnnnnnnnnnnnnnnnnnnnnnnnnnnnnnnnnagtcgacccagcgtgcgccccgcgtccggcagctgaggcgcctacaagaagagaagctttgcaaaatctgcatggatagaaatttgctgtagtttttgttccttgtggacatctggtcacttgtaaacagtgtgctgaagcagttgacaaatgtcccatgggctgcgcaatcattaccttcaaacaaaaaatttttatgtcttaattgagagcaacagtaggcatgttatactcttcttactctaattgaatgtgtgatgtgagcaaactttaagtaatcagcattgcattccattagcatctgctgccaagtggaaacaaatgttaacagcactggtactgtctaaactttggatttctggaactttcaggttattagctatatcgtctatccagctttttactcaattaaagccttagacaaagaagcatttaatattataacttttcaccttgtgtatttgtagtacactgacttgatttctatgcgcaagtgaattaatcactaccatttttcattccttttgg

SEQ ID NO: 1886 - DNA, 356 bp, Cricetulus griseus
  misc_feature (2)..(46): n is a, c, g, or t
annnnnnnnnnnnnnnnnnnnnnnnnnnnnnnnnnnnnnnnnnnnnaaagcagtgggctgagacagggcagagctgcccactgctgctggcacctgtcaatctcaatgaatgctactctgctttcctacattctggatgtcaggaacaggtcttgaaggaacttcagaactgcacagaggacatgtcactgcgagacggcctttaaaagtacaaaatctaaagctctaaatgtacggatcaatttctcaattctggacatacacaatgaactactaaaactaatatactctgacgacaatattgacagatatgaaaccatgaccacaggtattaaaaaccatcagaatacaaactg

SEQ ID NO: 1887 - DNA, 314 bp, Cricetulus griseus
aaaatgtgcttgatattgatagcatcatgacgaattgtatattttcaaaattagctgatgtgttttataaaatgttgagaccaaagtagtatagaagagtatgacatattttaatttaattgtaagatgattagaagtatttgtaaaactctatatattaaagctggtgattatagaacagtaatattattgttgtgctcgtatccctacatcacagggcaagtacaccctggggtcttgtctcagcctatctactatggctacagttgctcctcagtacgcattatcgttccgttacaattacagcctcctgg

SEQ ID NO: 1888 - DNA, 581 bp, Cricetulus griseus
  misc_feature (580)..(580): n is a, c, g, or t
gaattccaaaatatgactatactaattgcagttataagccaaaaagacttaaaagacatgaaacagactcttggagataacattaccgtgcaaatgtattctccatcctggcctaactttgactatactatggtggttatttttgtaattgctgtgttcactgtggcattaggaggatactggagtggactcattgaattggaaaacatgaagtcagtgacagatgctgacgagaaagagacgaggagaaagaaggacgagtatttgactttcagccctcttacagttgtcgcatttgtggtcatctgctgtgtaatgatcgtcttactctatttcttctacaagtggcttgtttatgttatgatagcaattttctgcatagcgtcagcagtgagtctgtacaactgtcttgctgcattggttgataggatgccatgtggacagtgcacgatttcctgtttcggcaaaaatattaaagtgatcctgattttcctctctggactgtgcatctctgtcgctgttgtgtgggctgtgtttagaaatgaagatagatgggcttggattttacaagatatcttang

SEQ ID NO: 1889 - DNA, 581 bp, Cricetulus griseus
ataaatacaaattgtaccaaccactctaagtcacacatctctgtgatgatttcaagccttcagatttattaaattgtaactactttaggcttcctagaagctgagagagccttgaccctttctgaaaaagtgagaaagcaagacacggacaggcagcagtgtgaggctgctatagaagcttctcccttgcctgctgtgtgcctttctgtctgtccatcacagtgacaaaggacgtaaatagtgtaagacatagtgagacctggtctcacaggtttcagtctatgatcagttgaatctgctgctttaagcttcaggcaaagcagcaacatcacagtggaagatcatgacaaaactaaaggctgttcatgtcgtggcaaccagagagaggcagaggagctggggattcatctgcataagtatgccctaggtcacctaccatgacttgtttaactatgaactcacctatcagttctccgactagtgaagggaatgcccatataactagtcacctatcacaactgccacgtgggaatcattcttgtaacacatgagtgtttggagctcctgtccaaactctaaca

SEQ ID NO: 1890 - DNA, 575 bp, Cricetulus griseus
  misc_feature (2)..(78): n is a, c, g, or t
annnnnnnnnnnnnnnnnnnnnnnnnnnnnnnnnnnnnnnnnnnnnnnnnnnnnnnnnnnnnnnnnnnnnnnnnnnnntctttggtgctcagaaccagggaatgcaacacaaagaccatcgagtgctgctcatatttacgaaagcaaacactacttgatagaatcttagcacaatttcctcatctgcttaatttcttccaacaaaacaggggagctaattcaaaatttccttttccctctcaagcacttttgaaatttccagagacctctctgatcagggggtgtttttagagccttttgatgtgtgtttaatctacatggcctgcttttagtgactacagtgacactgagcctctgtggggaggagtgcactttaattctttaatcctcaccttgcgtggccttatgagatactgggtcaggaaacccatttcattcttatctgccaaagagatactcagaagcacatcaaacatcagcacttcatctacacaaaaggatgagactttggtgtcactgaatatactcctttaacagtgactgctatgccatttggaaatgttttttaacctcag

SEQ ID NO: 1891 - DNA, 579 bp, Cricetulus griseus
actttgctatgagattgcatctccttgtattattggaagctatattcataaaagttcaccagaattgaagcttcttaaagtgcattgctgagttgtgatctcaggggataaactactgagatttggagttattaataactaactcatgatgcatattagctagtttcttctgtggttcacttgagtacctactgccttttactctattaatcatattgtgtcacccaaatttgtaacaaattgtgtattagttgctggctatgcccctgttctctagaaatgtatccatcaatcacatgagctatcatatcaccccatttcttcctccatacatttgattcagttacaggatttcctacttggaaacatctactactgtcccaaatgaagctggtagctctgaaccacaaacaccaactgctgatggtatagacaaagaccgtagaagctgattaatatctgtgatgatgcagtcaagagtgacttttgcattaaaaatggagacaatgccacatacaaccttcagatgataaaaaagtgtgttctgtcttaaatgtctctaagaagttttgggggctt

SEQ ID NO: 1892 - DNA, 513 bp, Cricetulus griseus
tcaacaaaaactgctggagaatcaagaagggcttcgtgcccaacatgcaggttgaaggagtattttatgtgaatgatgctctggaaaaattaatgtttgaggaattaaggaatgcctgtcgaggtggtggtgttggtggcttcctgccaggcatgaagcagattggcaatgtggcagccctgcccgggattgttcatcggtctattgggcttcctgatgtccactcgggctatggatttgccataaggaacatggctgcctttgatatgaatgaccctgaagcagtggtatccccaggtggtgtcggatttgacattaactgtggtgtccgcttgctaagaaccaatttagatgagagcgatgtgcagcctgtgaaggaacaacttgcccaggctatgtttgaccacattcctgttggggtgggatccaaaggtgtcatcccaatgaatgccaaagacttggaggaggcattggagatgggtgtggactggtctctgagagaaaggtatgcct

SEQ ID NO: 1893 - DNA, 556 bp, Cricetulus griseus
  misc_feature (2)..(62): n is a, c, g, or t
annnnnnnnnnnnnnnnnnnnnnnnnnnnnnnnnnnnnnnnnnnnnnnnnnnnnnnnnnnnnatgtccagtcattgttagatgcagcaaatcagtaccagattgaacctgtgaagaaaatgtgtgttgattttttgaaggaacaggtggacgcatcaaattgtcttggtataagtgtgcttgcagagtgtctggactgtcctgaactgaaagcaacagcagatgactttattcaccagcattttaccgaagtttacaaaactgatgaatttctacaacttgatgtcaaacgagtaacccagcttcttatccaggacactctgactgtgagagcagaggaccaggtttatgacgctgcagtgaggtggttaaaatacgatgagcctaatcgccagccatttatggttgatatccttgctaaagtcagatttgctcttatatcgaagaatttcctaagtaaaacagtacaagctgaaccacttattcaagacaatccggaatgccttaaaatggtgataagcggaatgagggaccatctactggctgctgaagatcga

SEQ ID NO: 1894 - DNA, 600 bp, Cricetulus griseus
  misc_feature (21)..(93): n is a, c, g, or t
catgtagtgcaaatgttatcnnnnnnnnnnnnnnnnnnnnnnnnnnnnnnnnnnnnnnnnnnnnnnnnnnnnnnnnnnnnnnnnnnnnnnnnnataatgagtccatccttgggactgaaggaatcctcagtaatccagaaggagctgatagcaattaatgctaacagcacctgaatcacaagctaggagtagcattgttcctgtcaccctatctctagggaggaagaaacagaagatgcggggggcggccggtctgtattctatacaaatgggtgagctcccgattcggtgagcgaccatctcaaaaaacaagatagagaacacttgaggaaggaaccgttatcaccttctgtccttcacacagcgcacgcgcatgcacttaggtttaaatttgtttttacagttgtttgttgtgtgtggggggggtagatatggaggtcagaggacaacttggtcgagtcagttctcttctaccacgtggattgtgaccacaaactcatgttgtcaggctggggaccggagaggaggttactaaagatgggtggctgggtgtgaagagatcaaatttagaatgactggtccccggacttcttagagtgg

SEQ ID NO: 1895 - DNA, 504 bp, Cricetulus griseus
  misc_feature (15)..(34): n is a, c, g, or t
cttttttgccttttnnnnnnnnnnnnnnnnnnnnatgggacgactgcgggtcattgcacataatatgcgggcgcaggcgctgtctggcttagcttccccactgggagtgggtggaaatgaccagactatttagtaattggggtccgggggccattcccttctttctcctgagggaagggtggtgttggcatgctggaagataggggctgtgtggagtgaatgctgacaaagggtaaaggaggacttgggagacagagaaagtagtggaaagtctcatttctggaaggagaaaaggaaatcccctaaaagcaaagcagtcagaaaaatcagggggactgttaagggctttgctcagcattccaagcagtgaatgtaagtgactcccttgagcctaagtaaaattactagtacagaaacacagacatggtggggccattgaagggctttttttaactgtttcttgaactctgccattcctgaagtggggggaagaagctcttggat

SEQ ID NO: 1896 - DNA, 507 bp, Cricetulus griseus
cgcctgcccactgagtgctgttactaggagtgatgacttccttttcacctgcaggataccttgggaaagccagctgccaaggatgttcatctaatagatcactgcaaatacaagtaagacttccagttacttatgtctggattgctgtgcgaatactttggagacctccatctgaagtatcatgttaattagggtggcttgcactgaggcctgcagtgcactgacctgagtcctgtgaggactatggggaagaatgagacatggttccttaatcaattaccattaattaaagaggcaggatcacctctctgcacagcacttctcccaatggttagattacatatttggcacagtaataaatgttataatcaggagcttcatatacacgtttgccattggagcatgtgcctcgctcaccataataaaagcttctaatcatccccattattggtacaaacagaccacgctacttatggaaattccccttctactgaattgacctaaaat

SEQ ID NO: 1897 - DNA, 392 bp, Cricetulus griseus
  misc_feature (148)..(241): n is a, c, g, or t
gctggtgagagctacacccacatccagtacttattggagcaggagagcttcgaccatgtccctgcccttgtgcgataccacgtgggcagccgcaaggccgtgtctgaacagagtggggccatcatctactgccctgtgaaccgcaccnnnnnnnnnnnnnnnnnnnnnnnnnnnnnnnnnnnnnnnnnnnnnnnnnnnnnnnnnnnnnnnnnnnnnnnnnnnnnnnnnnnnnnnnnnnnnnacatgaagagacgaagcattaccatgaccgatgggcttaccactgacaaggtcacccggagcgatggctgccccaacagcacctcacttgcgcatcctcgggactccatcataaactgtgccctcagcatggaccagattccagatctaca

SEQ ID NO: 1898 - DNA, 468 bp, Cricetulus griseus
  misc_feature (42)..(80): n is a, c, g, or t
  misc_feature (240)..(281): n is a, c, g, or t
ccagggagaaacgtgtgaaactcgtattacgtataactatannnnnnnnnnnnnnnnnnnnnnnnnnnnnnnnnnnnnnncgcgggcgccaagttctccttcactcagaaagcagctttttgtcacagttgtgaagacatctaatgccacaaccacaacagtcacaactacagcaagcaacaacagcactgcacccacaaatgccacatatcctatgcctactgccaaagaacactaccnnnnnnnnnnnnnnnnnnnnnnnnnnnnnnnnnnnnnnnnnngaggggtttctagaaatagccctttggattgtggagcagcatccccaaataaaggggcatcttcttccgaacaggaagcaagtagtccgtcagtagtagaaacctccaataggcccccacacagcagcagttcttctgggaactcatcaggtcattccacgcattagcagcctccgggatctgtttc

SEQ ID NO: 1899 - DNA, 567 bp, Cricetulus griseus
  misc_feature (415)..(432): n is a, c, g, or t
  misc_feature (534)..(534): n is a, c, g, or t
cgaacaggccagactggcaaggcctccagtgaagctgatccagctgctgacttgattgacatgggtcctgacccagcagccaccagcaacatctcatcccaactggcaagaatgaaccttggctccagcagtgtgagagctggcctgcagtcgctggagacctcaggtcacctggaagatgactttgacatgtttgctctgactcggggcagctcactggctgaccaacggaaaggggtcaaatatgaagccccccaaaccacagatggcctggctggggccctggatgcccggcagcagaacaccagagcgatccctgccacccaggcccgcatcatggaggacattgagcagtggctgtccacagacgtggggaacagtgctgaggagccctctggtgtcaccagtgaagaannnnnnnnnnnnnnnnnngaacgggccaaagctgctgatcgcctgcccaacctggccagcccttcagctgagggacccccgagaccttctcttggcacagctcctcggaagaagacccangagaaagatgatgatatgctgtttgccttatga

SEQ ID NO: 1900 - DNA, 568 bp, Cricetulus griseus
tgtcgggctgcggctctccctcgagtcccagcgtccctttctgtatagcccacctctggtaccatggctgtgttcgtcgctctcctgtccttgctggtgacgggtgttttagggaatgaatttagcatattaagaacaccagggtctgttgttttccgaaatggaaattggcctataccaggagatcgaatcccagacgtggctgcattgtccatgggcttctctgtgaaagaagacctatcgtggccagggcttgccgtgggtaacctattccaccggccacgggctaccattatggtgatggtgaagggagtggacaaactggatctccccgtgggcagtgtcatctcctaccctttggagaatgcggttccttttagtcttgacagtgttgcaaattccattcactccttattttctgaagaaactcctgtagttttgcagttggctcccagtgaggaaagagtgtatatggtgggaaaagcaaactccgttttcgaagacctttcagtcactttacggcaactacgtaaccgcctgtttcaagaaaactctgttctcagctctc

SEQ ID NO: 1901 - DNA, 599 bp, Cricetulus griseus
  misc_feature (13)..(80): n is a, c, g, or t
atcgtgtggaaannnnnnnnnnnnnnnnnnnnnnnnnnnnnnnnnnnnnnnnnnnnnnnnnnnnnnnnnnnnnnnnnnnncgcgtgcgctcagggtgaggccatgggctccgtgcccgagttttactccaagaggaggcactacgatgcacagccctccaactcgctggaccaatatggattacgattgggcatgtggtactggaaagatgaaaccaaaactctggaatttagaagtgggacgcctgcagtagagctcaaggataaaggcaagaaagggaaggcggttcacttcgctgaaatggacggtccggcttctgaaaggttgacagataaaaggtttccctcaagggacgaaaagtcactgaaagtcttggagaaacgatatcagctgggcaatatcacgctggatgatgtcaagtttgttgctttgcttttcctccaagacactgaaatgcagcgggtctgttctttcacaacatttatgagagagaaaatatcagatactcaaaaagactggaaattctttgagtccttttatactttctgtacatgcatcgcttggattgtcttccgacgtcagtacctgacagagatcga

SEQ ID NO: 1902 - DNA, 581 bp, Cricetulus griseus
ccgagtaccaggtgattggtggtgctggactggatgtggacttcaccttggagagccctcagggcgtgctgttggtcagtgagtctcgaaaggctgatggggtgcacacggtggagcctactgaggccggggactacaggctttgctttgacaactccttcagcaccatctcagagaaactagtgttctttgagctcatctttgacagtttccaagacgaggaggaggtagaaggttgggctgaagctgtggagccagaagagatgcttgatgtcaaaatggaagacatcaaggaatccatagagactatgaggacccggctggaacggagcatccagatgctgactctgctacgagcctttgaggcacgtgatcggaaccttcaagaagacaacctggagcgggtcaacttctggtcagctgccaatgtggctgtgttgctgttggtagccgtcctgcaggtctgcacactcaagcgcttcttacatgacaagcgccctgtacccacgtagccccagccacagaggatgaatgaagcaacggagggcgaccggcatgtgtgacttgctggagacctccca

SEQ ID NO: 1903 - DNA, 579 bp, Cricetulus griseus
aattaccatgctcggcattaccatctcactccgtttacagttatcaacattatgtacagcttcaacaaaactcagggaccaagagccctatggaaaggaatgggaagcacatttattgtccagggagtcacacttggagcagaaggcataattagtgaatttacacctttaccaagggaagttttacacaaatggaatcctaaactaataggtgaacaccttcttctgaaatgcctaacatatgtggtggccatgcctttttactcagcaagtctgattgaaacagtacagagtgagataatccgagataataccggtatcctggagtgtattaaagaagggattggaagggtgataggcctgggcgtgcctcacagcaagcgccttcttccgttgctctcactcatcttcccgacagtgctgcatggagctcttcattacatcatcagctccatcattcagaagattgtcctcctaattctgaagagaaagacctgtaatagccacctcgctgagagtaccagccccatgcagagtatgctggatgcttactttccagaacttattgctaactttgct

SEQ ID NO: 1904 - DNA, 460 bp, Cricetulus griseus
  misc_feature (126)..(126): n is a, c, g, or t
caatgtattggcatctgggaagtaactactcattttagttggagatcagtatcccattagagcctttttttcagtgaggtggggtgggactgggactctccattagtatgaacatgtgtaattcancatggggcaagtgttgtctgggggggagatgaaggttgtcaggttgcataggttgatagtttgaattttgacttcaagttgtctgattctgattgccttgcttgtgaccttgcaagttggttgttcttagacagaaagtcaagcatacaaattgtttggcatagggcctgcccctcaaatgtcgttgtttgtgacattattgatcccttatactgtgatttattttccttatttgtttaaacaattgaggtatagtgattgtacatatggttagagtatggtgtagactggtttctaaggcaagaattgttgcatattgattgaattggtgcca

SEQ ID NO: 1905 - DNA, 582 bp, Cricetulus griseus
actcagagtatctatccatggagtaaatgggaatgatgagcccaagggtgtccactcagtgccaggtgtctcagaggccaaagtgctggtcattttgtagctctaggagacaggactgtgagacctaccaggaaaaaggacttggggaccctgctgacaggtgacagatcctagagtgtggtccagggctctagagaggggattaggatggggatgttgcagcctttggagctagtgttggatacaagtgactcagagtgacgccagggtgtctgcatcttggtgtctgagtgaatgaagacctgagctcaatgccgagtggttttgggtgaggtcttccccttgctgagcttctgctgtgtgtctgtgtgacagagccatggtgaaaactggtcaggaatattgggatggaatgagagcagagccagcactgggcaagctgctaagcactgagtatcgtcatacacatcctgacatggctggtagagctagcagggcttgcagcagctgggtagctgggcattggtctgtggtgatgggctcaagagcccagggatttaagtgggaagtgtgctactccag

SEQ ID NO: 1906 - DNA, 583 bp, Cricetulus griseus
  misc_feature (526)..(551): n is a, c, g, or t
tctttttgggggttcaatgttgttttgggtttttgttttcttcacagtcttgaacattttacagtagaactcatctaaaaatggatttgggtaggggaaacatgcacaaaatcttttcataattaaaaggagccttactttctttatgcgccacatggacagaatttatgtaaacgtgaatttattttattttaagatgtgtgtttcccctcactgtctgcagctcccaatgttgtcatttttaaatgttatatatacatctcaagggtcaacctggcccttttcctccagacccgacctttcatttcccactcattccaacaggaggcacttaggggagactgggatggggacatggagagcaacccaagctccttaaacttaatgttattgttattattactactaataaagtgaggcaggaaatgcttctccttgtaaaactccctcccctccctatacaaacacacagagtgtttctaggtagacttcattgaaatacctgtttttcttgaatcaagtggannnnnnnnnnnnnnnnnnnnnnnnnntattcccactcagcactcagagacacaaaata

SEQ ID NO: 1907 - DNA, 580 bp, Cricetulus griseus
agtagaggaggagtttctggacatggcagtgctgaaggactacatagcatatgcacatagtaccatcacgccccgactgagtgaggaggccagccaggctctcattgaggcctatgtgaacatgaggaagattggtagtagccggggaatggtttctgcttacccccgacagttagagtcattaattcgattagcagaagcccatgctaaagtaagattttcagacaaagttgaagcaattgatgtggaagaggcaaaacgccttcaccgggaggctctaaagcagtctgctactgaccctcgcactggcattgtggatatatctattcttactacagggatgagtgccacttctcgtaaaagaaaagaagaattagcagaagcattgaggaaacttattttatctaaaggtaaaacaccagctttaaagtaccaacaactatttgaggatattcggggacagtctgacacagcaattaccaaagatatgtttgaagaagccctgcgtgcattggcagatgatgacttcttaacggtgactgggaaaactgtacgcttgctctgagccatcagttgctgc

SEQ ID NO: 1908 - DNA, 582 bp, Cricetulus griseus
  misc_feature (231)..(253): n is a, c, g, or t
  misc_feature (301)..(368): n is a, c, g, or t
  misc_feature (370)..(383): n is a, c, g, or t
  misc_feature (392)..(415): n is a, c, g, or t
  misc_feature (500)..(519): n is a, c, g, or t
gattaaagagacatcgatcttgtaacaccctagcgatggcatatcacctgcacggcacgcgtacgatgatcgcccagggaaagacagggtcgacctggtgactccaactacttgcttaagatgatccaacttttggatgatgacccaaaatgctttattgggggagcagacgatgtgggctcaaagcatatgcaccaaatccacgtgtcccttccagggaaggctgtggcnnnnnnnnnnnnnnnnnnnnnnntgcgcaaggacctccgggggcacctgggaaacaacccacctctggagnnnnnnnnnnnnnnnnnnnnnnnnnnnnnnnnnnnnnnnnnnnnnnnnnnnnnnnnnnnnnnnnnnnntnnnnnnnnnnnnnngccaataannnnnnnnnnnnnnnnnnnnnnnntgccattaccccatgtgaagacactgtgccagcccataacactggactggggcccaagaagacctctttcttccacgctttgggnnnnnnnnnnnnnnnnnnnncgggcaccattggaaagctaaaggatgtgcagctgataaaaactggagactaagtacgagcca

SEQ ID NO: 1909 - DNA, 581 bp, Cricetulus griseus
ctgcggctgcagcctctgcgtccgagccggaggttgagccccaggcggggcctgaggccgagggaggggaggatgaggcgaaggcagccagtgcggacaggaatgtgcagtcccgcgctgtggcctccgacgcggccaagaccaaagggcgggggtgggacctgcagcgggaaggcgtgagcgagagtgacggggatgaggaggacgccatggcttcctccgctgagagctcccccggggaggacgagtgggagtacgacgaggaggaggagaaaaaccagctggaaatcgagcggctggaggagcagctgtccatcaacggctatgactacaactgccatgtggagctgatcatgctgctgcggctggaaggggagctcaacaaagtgaggatggcccgacagaagatgagcgagctcttccccttgactgaagagctctggctggagtggctgcatgatgagatcagcatggccatggacggcctggaccgagaacacgtgtatgaactcttcgagagagccgtgaaggactacatctgtccaaacatttggctagagtatggccagtactctgttggt

SEQ ID NO: 1910 - DNA, 581 bp, Cricetulus griseus
  misc_feature (155)..(174): n is a, c, g, or t
  misc_feature (436)..(459): n is a, c, g, or t
  misc_feature (557)..(557): n is a, c, g, or t
ttaatttactatttccctaaatgaactgtaatgtcatgtataatacactttctgtatttttcactgtgcttagtgtccaacaaagtgctgactcacataaaaaaaaaaaaacagcagcaacaacccacatacccccagacaaaacctccaggggnnnnnnnnnnnnnnnnnnnnacaacagtcaaaacaatcaccttttgtctccctcctgtttgatgaaaagtctataaatggaatttatcacagcttctccaaatttattttaatatatggggaaaaaaaaagttctataaaataagttccaaaaaaaaatatagggactggggatatggatctttttttaaaatgaaaacttcagtttgatacacagcctaaaaaacagggtgtagggcatggcttaaattatagtgccaagggagtagagacagtcaaaatnnnnnnnnnnnnnnnnnnnnnnnntttgcctaacaattaaatcatgccctctgtgagagactctgtttgactcattctggcaaaacaaggtgaacactgtctgaggaaaacatttaaattanacttcattgacctctgccctccac

SEQ ID NO: 1911 - DNA, 347 bp, Cricetulus griseus
gccaccgagggggagggccaccttttgtgccctttattaagggttaaaagcgcccttggcgggactagggaaataggtggatcccgagcgaaatgattttcctaaaatgtgactttaggccaaacatattcacaaaagggcagtttcactaaaatctgccagggggggggggtttcttggtaactagtctgctagctgctattgtacttagctttttaaaaatgggctgaatttcaaaatacaaaacttgctggggtgttaatgcatgtgcaggctccaaaattgttgtgctccgccctgtattcaatagtccacacagcaaaagtggccaggtacactgtgctcag

SEQ ID NO: 1912 - DNA, 347 bp, Cricetulus griseus; identical to SEQ ID NO: 1911

SEQ ID NO: 1913 - DNA, 566 bp, Cricetulus griseus
ggttaaataaaggtgttccccatacacccgacagagtattaagtcttaattttatagtgacaatgctactagtatggtccttgataaatagttttaaaacagggaggttgcactttatcctaacagtcgagtggggtttggtaaatactgatttcaatttttaagcgtggaattttaattaatggagtttagtggtttcactcttagcattcatttatgcacaaaggctctgggtttgttagtaggtaataaaaattgattctgaaaacttctcagtttgtggaaggggtgttttgtggaaatggaaatctattcaactacttttaaataacattttaagagggtaatattaggaagcaattacgctatacattattacatggaaagtcaatattgctgatgtcaaccttagttttgggttttttgttttgctttgtttttggttttttaagaaatgtgtagaaaaatatgtacccaaaaagtgatttctctgaaggtcaatttatatttcctgactggcacttttttaatatttatacaagaagttacatttactgtttgctttg

SEQ ID NO: 1914 - DNA, 581 bp, Cricetulus griseus
  misc_feature (284)..(320): n is a, c, g, or t
gtaggatcaaattatatgaactctttccaggcttctcttccaaacttgagtattaaggagccttcatatagttcaagggtgagtctggagccagtgtgcggagtgctagcatgaaccggtttcagagatgtaataaaagtgtgcatgggatttcatgtgttgtaaaagctgaacaaattatgtagacatgtattttattaagaatgtgtgcaacttcttatgattataaaccttaaaaaatgctcagctggtgggtagtgatggcgcacggctttattcccaannnnnnnnnnnnnnnnnnnnnnnnnnnnnnnnnnnnntgagaccagcctggtctacaagagctggttccaggacagcctccaaagccacagggaaaccctgtctctaaaataatgtgtctgttactaggtattactactattaatattttgggatacttccttttgctctcactcttatgtgcattagtaaatgtgtctatttatatattggactttttttttcattttttgtttctttgaagatccacttttaaaataaaagtagatagtatgtacctatagagagaaaaacttaca

SEQ ID NO: 1915 - DNA, 600 bp, Cricetulus griseus
  misc_feature (7)..(7): n is a, c, g, or t
  misc_feature (10)..(10): n is a, c, g, or t
  misc_feature (14)..(14): n is a, c, g, or t
  misc_feature (32)..(32): n is a, c, g, or t
  misc_feature (43)..(43): n is a, c, g, or t
  misc_feature (56)..(56): n is a, c, g, or t
  misc_feature (70)..(71): n is a, c, g, or t
  misc_feature (78)..(79): n is a, c, g, or t
  misc_feature (125)..(125): n is a, c, g, or t
  misc_feature (156)..(170): n is a, c, g, or t
tacgtgntcncagntgttagatcgcgccgtcnaatacgaactncacttattagggncgaaatatgggtgnnaccgggnncccccccttcgaggggtcgacccacggcgtgggcgggcaggaatgnagcaatcgctcattgtattcctcgatgaatnnnnnnnnnnnnnnngtctcgggtgcccactgactacagatctcagccccacgagtgttcgataccattttcattatgaagcgtatcagtctggtcaaagcagaattcatttcaaactgggaggcgggggtcattttcttgcgctggtgacacacgagttccattctggctacagtcttcagaggacatggaaaaatgctcaaaagacctggcacactgacacacctatctgctggaaatgagccatctcttacaaagcatggacgtcctacaccggacatactcagcgacatccatcaatgccatccagggtggagcttttgaaagtccgaatgaggaaaatcgactacacatgaggtggcggttcatatctattgccaaacattctaaaggaaccctgcaggtccctaaaccttttgctgacccagagagactacactcttct

SEQ ID NO: 1916 - DNA, 150 bp, Cricetulus griseus
  misc_feature (2)..(16): n is a, c, g, or t
  misc_feature (112)..(127): n is a, c, g, or t
gnnnnnnnnnnnnnnntcccctctagtcgacccacgcgtggggcgccgcgtccgatggcccataagttttggagtttaattgccgttttggtgatccagaatgccaagtgannnnnnnnnnnnnnnnaagtgacctttatgaagagattg

SEQ ID NO: 1917 - DNA, 580 bp, Cricetulus griseus
atgaggtgagaggatatacgaaactgccaccataagacaccgaagaggccagacaccatgcatggtgccctcgccaagtaagatcatctttagttatctcatcattctgttatattcaaaacatgaaatatcccaaaataccaagagtggatgtaaagaagaaaggggagtggggatggaaagtgacatacaaaggcaggcccatcagagtaacagctgatttctttcttcttttagtttttaaaatttgtgtattccaataattaaaatcatttgacaaaaggatggtgctctgactaaactgcattttaccaactgcaggaaccttggacgtcttaagttttactgtagatttcagctcaccccaccatcattttccttcagcatgcacattctttccctttcctggccgccagactggctggcgggagatgcaggcctggcctctgttgttgacagttctgacacttaatgtgaaaggggcagcgcaggcatttaagcctggtcgaacctctgtatcctacagagttgtagtggtctgaaataaaagggctcccataggcttatatttgagtgtgtg

SEQ ID NO: 1918 - DNA, 582 bp, Cricetulus griseus
cacagatgactaagttggggcatggcctcctctctggccagtactcgaagcctcctgtgaaatccgagctcattgagcaggtgatgaaggaggagcacaagcctcagcagaatgggatctctccatgcatgttcaaggcctttgtcagcgagagccacccagaattctcctctaatagacaacaagatgcccaggagtttttcttgcacttggtcaatctggtagagaggaaccgaattggctcagaaaacccaagtgatgtcttccggtttttggtggaagagcgcattcagtgctgtcagacccgaaaggtccgctacacagagagggtggactatctgatgcagttacctgtggccatggaggcagcaaccaacaaagatgagctgatcgcctatgaattgatgagaagggaagcagaagcaaatcgaagaccccttccagagcttgtgcgtgccaagatcccattcagtgcctgccttcaggcctttgctgaaccagacaatgtggatgacttctggagcagtgccctgcaggcaaagtctgcaggagtaaaaacatctcgctttgcctcattccctg

SEQ ID NO: 1919 - DNA, 493 bp, Cricetulus griseus
cagtaagaagaaagtaattgtaagcaacaaaaagaggtttcagggagagtatggctccaatccagaggagagaccacctaacctgaagaggcccgaggattatgaagctgtgttcgtgggcaacattggtggggacttcaagattggggtggcaatacttcagaggagcattcgtctctacgcccccttttactcctccgacatcctcatcgcctcccccctgggcttgagaaccatcattggtggagaaggagagaagaagagagattttgacttcctgtcttctattgagcttctcatcatcgaccaggctgacatttacctgatgcagaactgggaacatgtcttgcatttggtgaaccacatgaacctgctgactttggagtcccatggggtggacttttctcgagttcgcatggagagccttattaactggtgcaggttctaccgccagaccctgctcttttgcgccctgcaggatgcccagatcaac

SEQ ID NO: 1920 - DNA, 566 bp, Cricetulus griseus
  misc_feature (38)..(101): n is a, c, g, or t
cctgtgtcaacctccgggacagccctcccaacctcatnnnnnnnnnnnnnnnnnnnnnnnnnnnnnnnnnnnnnnnnnnnnnnnnnnnnnnnnnnnnnnnntcactgcctgcccatcagctgggggtggccgcagtccagatggatgactggaagattgtcagtgggggagaggaagggctggtgtctgtgtgggattaccgcatgagccagaagctgtgggaggtgcactccaggcaccctgtgcgtcacatctccttcaatagtcacagcctcatcaccgccaatgtgccctacgagaaagtggtgcggaactccgacctggacaactttgcctatcacaggagacatcgtggcctgatccatgcctatgagtttgcagtggaccagctggcctttcagagctctcttcctgtctgccgcttaccctgtgacaccatggctgggtacagctatgacctagcacctcctctcccctatgacagtgtttaaggcgtcacctcatggagaagtgggaagagccagggtacaaatgccccacctgcaggagagacttgatcccacaat

SEQ ID NO: 1921 - DNA, 513 bp, Cricetulus griseus
  misc_feature (13)..(31): n is a, c, g, or t
  misc_feature (41)..(103): n is a, c, g, or t
tcccccctctcgnnnnnnnnnnnnnnnnnnntccgagaagnnnnnnnnnnnnnnnnnnnnnnnnnnnnnnnnnnnnnnnnnnnnnnnnnnnnnnnnnnnnnnncagcaccatgcccgcactcttggagcgccccaagctttccaacgctatggccagggctctgcacaggcacatgatgatggagcgggagcgcttacggcaggaggaggaagaggtggacaagatgatggaacaaaagatgaaagaagagcacgagagaagaaagaaaaaggagatggaagagaggatgtcactagaagagaccaaggaacaaattctgaaactacaggagaaactttcagctctacaggaggagaagcaccagcttttcttgcagctcaaaaaagttctgcatgaagaagagaaacggagacgaaaggaacagagtgacctaaccactctgacatcagctgcctaccagcagagcctgactgttcacacgggaactcacctcctcagcatgcagggggagt

SEQ ID NO: 1922 - DNA, 580 bp, Cricetulus griseus
gctcatttcactgcaggtgaaggagaaaggtgctgactacctggtgacagaggtggagaacggtggctccttgggcagcaagaagggggtgaacctccccggagctgctgtggatctccctgctgtgtcagaaaaggacattcaggacctgaagtttggagtggagcagggtgtagacatggtgtttgcctctttcatccgcaaggcagaagatgtgcatgaggttaggaaggtcctgggagagaagggccagaacatcaagatcatcagcaaaatcgagaaccatgaaggcgtccgcaggtttgatgagattttggaggccagtgatgggatcatggtggctcgtggtgacctgggcattgagattcctgcagagaaggtcttcttggctcagaagatgatgattggacgatgcaaccgagctgggaagcctgtcatctgtgctactcagatgctggagagcatgatcaagatacctcgccccacccgtgctgagagcagtgatgtggccaatgcagtcctagatggagctgactgcatcatgctgtcaggagaaacagccaagggggactaccctctg

SEQ ID NO: 1923 - DNA, 378 bp, Cricetulus griseus
cccagcagcctcaagagccagctagggttgcgtgagtttctttctctctgttccacgaacccaccaagccacagccggtcagctgtgctatttatctgactccctgtgtttccagactcatctgtccgttctcaggccaggaggggggagatgagcaacccgtatggctgccagatgtttccatctttttaggcttagagaaagagaggatctcagccaggcctaaccgatgctggctccaaggcgtgttccagggaccttcctattacataaatcccagctggagagacaactctggagctagcagtggggagtaggaatagggggtggggtgggaggggtgtctcatggatgggaggggcagcccaccttcccatt

SEQ ID NO: 1924 - DNA, 581 bp, Cricetulus griseus
aagttctggcagtcatgggcccaccatagcagcagttcatagcagtcatcatcacccaacagctgtccagcctcatggaggtcaggtggtccagagccatgcccatccagccccaccagttgcaccagtgcagggacagcagcagggggggaggctaaaggtggaggatgccctgtcctatcttgaccaggtgaagctgcagtttggtagtcaacctcaggtctacaatgatttccttgatatcatgaaggaatttaaatctcagagcattgatactccaggcgtgattagccgtgtgtcccagttatttaaaggccaccctgacctgatcatgggctttaataccttcttgcctcctggctacaaaattgaggtgcagactaatgacatggtgaacgtgacaactcctggccaggttcatcagatccccacccatggcatccagccccagcctcagccaccacctccacatccttctcagccttcagcccaatcagctccagctcctgctcagccagctcctcagcccacacctgccaaagtcagcaagccttcccaactacaagcacatactccagcca

SEQ ID NO: 1925 - DNA, 580 bp, Cricetulus griseus
  misc_feature (156)..(182): n is a, c, g, or t
  misc_feature (252)..(272): n is a, c, g, or t
  misc_feature (303)..(321): n is a, c, g, or t
  misc_feature (412)..(429): n is a, c, g, or t
  misc_feature (542)..(542): n is a, c, g, or t
  misc_feature (559)..(559): n is a, c, g, or t
ttccaatttgaagaatgttctagtttaaaagaatgcatctatttaatctttcccttgatgacttagggaggaagttgaaaagttgtggctttgaaataaaagcatcttatctgggtgtggtggtatgtatcttttttgtttgttttttttcgagtnnnnnnnnnnnnnnnnnnnnnnnnnnngtcccggaacttgctctgtagactaggctggcctagaactcacagagatatgcttacctctgcctccccnnnnnnnnnnnnnnnnnnnnnggccaccagtgcccagagggtggcatgtatnnnnnnnnnnnnnnnnnnncaggcagatatttttgagtttgaggacagctagaactatacagagagaccctgtctcaaaacaaaacaaaaaccacacacacaaaaaaacnnnnnnnnnnnnnnnnnnaaagtacggaaaaaacccaaacaatttatactgcagttcaatggtagagaagctgcttaccattcacatggccctagattccattcctgccctgcgagtataaataaggcccnaaaagataaaagaaaanataaaaaaaagggcgcgcccc

SEQ ID NO: 1926 - DNA, 579 bp, Cricetulus griseus
  misc_feature (334)..(334): n is a, c, g, or t
tgtgcaggcctggcagtggcttatgggtcccaggtaggatgcagcaggtcctcagaaccctggaagcccctcctctccctgcacctctcttggcagataggctacctttgctgctcagtccagaggggggaagcaaccattgtcaacggggtttgaggttacccttcgtctagaagaacagccagatagccttcttgatcccagtctcaaattctagcagacttcctcagctcagatgggagcccaccagtggacacttgggtgtctagaggtaagggaagggcctgttggcaacatgtctgctgtctgtcctttcagcctgtaagactgtgtntccacagaagaatgttcataaatgagtccttgctgtcccaacaagggacaggaaccaagaaaatgcacgcacatgcatactaccccagacttggaagaacaggtctaccaacctgcggtgtctttcggcctgaatgtatatgtccttaaccctccccccctgtgcctgctcactcctatgaaggctgggcggaagccctcgccccacgcccgggcccgtcgcgccaccgcgctccaaccctttgg

SEQ ID NO: 1927 - DNA, 175 bp, Cricetulus griseus
gtcgacccacgcgggcgataaaatttaattatttttaccccattctcccctctcttctccacatttccttctgaaatccttctgcccagcaagtctccctccttttatatcttctttttgtgtatgacccaactgaattaatgagagttgtttgcatgagtgggggggaggttgt

SEQ ID NO: 1928 - DNA, 581 bp, Cricetulus griseus
  misc_feature (302)..(324): n is a, c, g, or t
  misc_feature (411)..(433): n is a, c, g, or t
cctggccatcttggaactcacaaatgtcatctgtctgcctctacctcccaacaggactaaaaaggtgtgtgccatcacacacagcctatacttttgatacctttgtcttagagggtgcggactcatttctgctccgttgtctgagttaatcacccacagtgggaaaagaagagggaaataaaccttacctgcccataaaagaagtgccagagaatttgtagccatgtttaaaaaagctgccttctggggctggaaagatggctcagaggttaagagcactgactgctcttccagaggtcctnnnnnnnnnnnnnnnnnnnnnnnaccatctgttatgagatctggtggcctcttctggtgtgcagatatacatggaagcagaatgttgtatacataaaaaataaataaaannnnnnnnnnnnnnnnnnnnnnngggcccccaccgggggggagctccaccttttgttccttttataagaggtaatgcccccctcggcgaaatcatgggaatacctgcttccttggagaaatgtatccgccccagaatccgcgcccctttgttcccgttctgggtcacacgt

SEQ ID NO: 1929 - DNA, 149 bp, Cricetulus griseus
  misc_feature (4)..(31): n is a, c, g, or t
  misc_feature (42)..(64): n is a, c, g, or t
cgannnnnnnnnnnnnnnnnnnnnnnnnnnntccccctcgtnnnnnnnnnnnnnnnnnnnnnnngcgtgcgttttcaacacaggattttgtagccggatatctgtctgggcacctattacaaggcccatgccttttgggtgtggattca

SEQ ID NO: 1930 - DNA, 288 bp, Cricetulus griseus
  misc_feature (254)..(254): n is a, c, g, or t
gggagaatctgaaactcactgggtggggtggaggtgggtaccacttctttagagaagctggcattgaacccagggcctcatgtgtgcctgcttactggtactcccgccaacttactggtagacccaacccctgaaatatttcatcgagggggggacagttacataaaattagtttgctccttgctgttacatatagttttatttggttttctttcacttgagccagggtgttcaaatgttgcccaaggtaattntgagcctggctgcagtgatcctcttgtttaagcc

SEQ ID NO: 1931 - DNA, 580 bp, Cricetulus griseus
  misc_feature (509)..(540): n is a, c, g, or t
agggtccctacccagcttatccttctccactgacaccaacagcttgcttctgagcccactgtcccttgagtgggtttgttttcaatgcaagagctttgctagggacctgttccatggtcctgtatcctccaatctcccctccacatgatggggtcattagttactcaccagaagtctgacttcccaagaaagcttgaagaactgttgttggcttctaagttcagtcctactctgatgtcctgggcgtgctgctgctctgaatgctcggcctgacctgtttacatggtactggattgatggaagagcagatgccaccctccagagccacccagaatgaaagccagtgagcctattaaccgtgccatcttgcaaactgttttcaagatcaccattgctttatattgtagtaaccaatatgcgcaatatgttgaatgtatatgaatatactttgctatttctgttctttgaaaatgtaagaagtattttttctttctcatttctgttaaacnnnnnnnnnnnnnnnnnnnnnnnnnnnnnnnngcggggggagctcccaccttttgttccctttattgagagt

SEQ ID NO: 1932 - DNA, 582 bp, Cricetulus griseus
  misc_feature (539)..(558): n is a, c, g, or t
tttatttccccatttaaatgtgcccgtggttttatcagcctggtaacttaagagtccagatgtctaggataaaatggctgtcattctataaactgttcaccattctttaaggcttatatttacctcaggaaacttattctagtatggggggaccaattgaaatctcaagtgataaatacttctttacacctacacactggtacctaattctgtcttagttcagtgagccataggtcaggcagctagatggttagtgagccataagtcgggcggctagatggctgaaagctcattggagtaaaacaaggagtgcctgccagcactgaatcagggacaagtggctattccaaccagagtggcatctgtcatcagtaagatgaagggattgcctttggcagtgacagtgtcctattccaagtctggaatggcatttttctcacactgcagcccatgaagctaagtccctcagcatttttagagaacttttgaaaatgaatttagttgcataatcaagctgagcaatttccactgtgggcttnnnnnnnnnnnnnnnnnnnnccctgctcatcctggtgctgaaca

SEQ ID NO: 1933 - DNA, 581 bp, Cricetulus griseus
tgttgtggcctgtctgaagaaaaagctgttgagaaatttggggaagaaaatattgaagtttaccacagtttcttttggccattggaatggacggttccatcccgagacaacaacaaatgttatgcaaaaataatctgtaatcttgaagacgatgaacgtgtcgtgggctttcatgtactgggtccaaacgctggagaagtgacacagggcttcgcagctgcactcaagtgtggactgaccaaacagcagctggacagcactattggtatccaccctgtctgtgcagagatattcacaacgttgtcggtgacgaagcgttctgggggagacatcctgcagtctggctgctgaagttaagccctggtgtggatgctgccgccaagactacaggccactgccttgcttccttgcccacatctaggtgaagttcaagctcttgggctcttggcgcctgtccaaagtgctgtcctaaagccaccagatggcaggtagtaggctgcagcatcacactgaggtcaccttgacagactcagacagacattcggcagtgtgtcagggagatacattcatgaagtcaccag

SEQ ID NO: 1934 - DNA, 580 bp, Cricetulus griseus
ttaatgtgtcaggtcttgatacatgatttttgcttcagtaatgtttcttttacaattgtgttgttcttggatatggggcataaatattaagaatagaaatgtcattttgatggattttttcctttgatgagtataaagtgtcatcccatatctattttgattaattttggtttgaagtctattgtgtttagtattagcatggctacaccaggtttgaagtaacattattatgtggtaatgttacttttttttcttgctcaatctatttggtctgtaaatttcgtttaccttagaggtatgttcttctttagtgtagaaagtttttcttctatgattttgttaaaaagtatattctgggctgttgaacttagatttttttttacttcttttttgactattgctttggtgtttgtacttttcatagtgtaccagatttcctgatgttttatgccaatcatcttttagaattaatatttttttaacccatgtatctatttatttctaccatatgttcaatttgtagcattcaagaaagccaagaaaaataaacattcgaagtaaatgaataaaagcatttaag

SEQ ID NO: 1935 - DNA, 579 bp, Cricetulus griseus
  misc_feature (184)..(201): n is a, c, g, or t
aaggaggatggctcatgggctccgatgagatcaaaaaaggaagtgcaggaagttactgcctcctacaatggagttgacggatgcttgagctccacattggagcatcaggtaacttcacacaaccagtcctcaaataaaaacaagaaagtcgaggtgattgacctaaccatagacagttcatcannnnnnnnnnnnnnnnnnccctctgccaagaggacctgtccttccctgtctcctacatcaccactaaataataaaggtattttaagtcttcctcatcaagcatcgcctgtgtcccgcacccccagccttcctgctgtagatacaagctacatcaacacttccctcatccaggactacaggcaccctttccatatgacacctatgccttatgacttacaaggattagatttctttcctttcttatcaggagacaatcagcattacaacacctccctgcttgctgctgcagcggcggcagtctcagatgaccaggacctcctgcactcctcccgctttttcccgtatacctcctcgcagatgtttctcgatcagctaagtgctggaggaagcacttct

SEQ ID NO: 1936 - DNA, 566 bp, Cricetulus griseus
ggaaggcaaccgggagcggcggggctgggtagtcggacctgggagcccgaggcctgaaggatgctaaccaaattcgagaccaagagcgcgcgggtcaaaggccttagttttcatcccaaaagaccctggatgctggcgagtttacacaatggggtcatccagttatgggactatcgcatgtgcactctcattgacaagtttgatgaacatgatggtccagtgcgaggcattgacttccataagcagcagccactgtttgtctctggaggagatgactataagattaaggtttggaattataaacttcggcgctgcctcttcacgttgcttgggcacttagattatattcgtaccacattttttcatcatgaatacccttggattctgagtgcctcagatgaccagaccattcgagtgtggaactggcagtctagaacctgtgtctgtgtgttaacaggacacaaccattatgtaatgtgtgctcagttccacccctctgaagacctggtggtatcagctagcctggaccagactgtccgagtttgggatatttctggtgagctgcc

SEQ ID NO: 1937 - DNA, 223 bp, Cricetulus griseus
atgatagactctgatgacaccctatggaagacctcaccctccagggggagcagaaagggtttgtgataggtagggttttagttgggagagtggtaggggaggacgggagggagaaggcaactgggattgttgtgggggacaatcttgtttctaattcaaataaaaaaaatctgcaacaaaaaaaagaaaaactcactaacccaattagaaaaatcgggatggg

SEQ ID NO: 1938 - DNA, 205 bp, Cricetulus griseus
  misc_feature (3)..(49): n is a, c, g, or t
aannnnnnnnnnnnnnnnnnnnnnnnnnnnnnnnnnnnnnnnnnnnnnncacccacgcgggggggactgatgagtttgctaaaggaagaaaagtggcagatctctatgaacttgtacagtatgctggaaacattattccaaggctttatctgttgatcacagttggagttgtatatgtcaagtcatttcctcaatccaggaaaga

SEQ ID NO: 1939 - DNA, 572 bp, Cricetulus griseus
aatcaggttatcaggcttgctttttgttgagctttcttgatggtcctgagatttcgtgtcttggtttgaatgctcaactaccacctattccacttggttgtctgtgtgttcgtgggtgaaactgtgctcatttagggggggtgtggctgtgctgaaccagagtctcaggcttgccgggcaagtgctgtaccactgagctgctcacctctccctttgtgtccctttttgttttaactatacatgtgttttggtgggtggtggggctatgtgtgacgattgcaggtgtgaaggtcagaggacagctttggagagtaggttctctcctgtcatgggttcccaggattgaactcaagtcgtaagcttttatggcaagtgtttttacccactgagccatctctcctgcttgtatcttgaccaagtcttcaagtctctctgaggatgaccttccctattttatatttgaggtattgcattcatagtacctacctagaaggaacaatagcttttggtattatgtgacatctctgcaattcacaaatctttcaagtcagacaaaatacaaggcttttggg

SEQ ID NO: 1940 - DNA, 581 bp, Cricetulus griseus
agcactggagtatgacaaggatgtcgtgttttcaggacacagcagggaagtcatacatatgagctgactagggctgtgacagcatgcataagtcccacacaaatacaagccagagaaaatccctgtgtggcagggaagtcccataaagccccattgctagcagtggagctattggcaatctgtagctgctaggagagggagaataggttttatttacgtgtgtggtccctaagaggtcaaattgggcagaacaaattgtataataaactttataaatatgtatgtatacaaacatattcatacaaaggtttacctggagttactgtaggggacaccataaccacacctgctaggggctggttacagggatgccggaccatgccttcgaggtcaaggtgaccagggaaggtttaagagtgaggggtgcacacatggaccttctcccttcttccttttcatcttcggcttgctgtagttactcctgccttgccggctggctaggtcactctgtaagtaaggcttctccctaataaatacccttatatttttacctgactccatattgggagattttacattta

SEQ ID NO: 1941 - DNA, 202 bp, Cricetulus griseus
ttgggagactattgataactgtctctatttccttaggggttatgggtgtatttaagttgtttatctgttcttgatttaattttagtatgtggtacttatctaaaaaattgtccatctccttaaagttttccaattttttagaggacaggtttttgaaatatgacctgatgattttctggatttcttcagtgtctattgttat

SEQ ID NO: 1942 - DNA, 581 bp, Cricetulus griseus
  misc_feature (450)..(450): n is a, c, g, or t
  misc_feature (545)..(545): n is a, c, g, or t
gatgacatgtggttgatgatgaggaaagcttataaatatgcctttgataaatacaaagagcagtacaactggttcttccttgcacgccccagtacttttgctgtgattgaaaatctaaaatattttttgttaaaaaaggatccatcgcaggctttctatctaggacacactgtaaaatctggagaccttgaatatgtgagtgtggatggagggattgtcttaagcatagagtcaatgaaaagactcaacagccttctcagtgttccggaaaagtgtcctgaacaaggtgggatgatttggaagatatctgaagataagcagctagcagtctgcctgaaatatgctggagtatttgcggaaaatgcggaagacgctgatagaaaagatgtatttaataccaaatctgttgggcttttcattaaagaggccatgtctaaccacccgaaccangtagtagaaggatgctgttccaatatggctgtcacttttaatggactaactcctaatcagatgcatgtgatgatgtatggggtgtaccggcttanggcctttggacatgttttcaacgatgcgttggtttt

SEQ ID NO: 1943 - DNA, 582 bp, Cricetulus griseus
catgcccttcccgactggcgtgtgcacgtgtctcgctcgctatcctcgcggtgctcctggagcgctccaggcttgacctcgaaggtgcccgtttctgagcggtggcgtcgcttcccgctccctggcgtgctgcctcctgcgtgctggggctggcctcggtggcgtgtgttgtcgttcccggctctttgtcgacgggggtccgtgccgctctggttttacgaggtgtcgtttgtggggggtcgagaaagtggtttcaggcgggtaagagttctcttgcggcgtttccccgggacgtccgcatgtgtgtgtggcatctcttcccgctttgggtgagcgcccgccacgtacttgggccttctcccgtaggctcgtgcgtcggttggtgtcgagcgttcgcggccggccttttttgtgcttaagtgtatcttaagcccgttaatttggctcaccgccgttcgcccggaggtgggtttgagaggcctggcttgtccgggggtgcctttttcttggccccggtacccctgtccgcgagtgctcaatgtgaaccctggtaaagagaaaaaaagcctttaccgatacccg

SEQ ID NO: 1944 - DNA, 569 bp, Cricetulus griseus
  misc_feature (543)..(543): n is a, c, g, or t
aatttatatctttgcaagatacagttgacaatactcattcttaaaggaaagactaggaaaataacgaaaagcttacctaaagcaagattgaagtacatcagggcaaacactaaataaaccctatacctcctgtccgggtgtgggactcatggggatacagggtgggatccaaaggcttaaacagtctacccctacaatcttgttggttgtagcgcaaaaggcatttttggcctggttcagttcactacccatgcttttcctggcaggcatttcatgttcctggcatttttaaatcccaaagctctccaaatgtatttgttgctatacacactgagctttatggattacctcttcaggggccacttaaagagattatgcattgacctcctaggctttcttctgaaaccccagtggcagtctctaggactccatgtttttagacataatggtccaattataaatgaactcaatttaatgattatgtggccatacattaatattcttaaattcacatgatttattgtaaggctggtaagagactanttatttttataaattacaatactaat

SEQ ID NO: 1945 - DNA, 568 bp, Cricetulus griseus
  misc_feature (567)..(567): n is a, c, g, or t
tttttacctttggttgtactactataatgaactttagttgtaccttttaatgaaccgtggaagagttggtttcctttttaaggctgttgcacacttctagtgtacattctcaagcctccccatctcctcttgccccaaaagacagctgaccaccagtgccaaggtatgttgcagacttgacaactcacttgacagctgtggttgtcatcaagtcgtgagaggaaaacatagacagaggtaggctatgttccccattctcttgggagcaatgctagcttttcaatttctatttttaaaaatttagattatatttacttattttatgtggtatggtgggatggcacacaggtacaattaagagaataaattttggaagttggttctcaatttctaccgtgtctgacctgggctcagcctcaggccatgcagctttacccactgagccgtctccccagcccctttccattgttgttataagttgaatctgttttgtagctagcagcagtcctcctgcttcagcctctctaatagtgggaatgaactgccatgcccagcttgtttgggttnt

SEQ ID NO: 1946 - DNA, 600 bp, Cricetulus griseus
gtcgacccacgcgggcgacttcacacaggccacggaaatgattgaagaatgagtgaagagcaactagtatgagaaagaactgggcatgtaaaaggaggccaggtcagggggacaagtagggagagagaggaagttcccatacaggttcacttgttcttaccacgggggggatatttttataagctcactctgaatgttgtattgaaactagacagcggggggttggtgaggtggaccagtgtttcagagcactggatgccctttccacagatgtgagtttgatttccagcacccatttggtggctcacaaccacctgtaattcaagtttcaggaaatatgatgctttcttctggcttccgaagacaccaggaatgcagttggtacacagacacacatgcaggcaaaacacctatccacataaaattggaaataataaatataggcttcaggttaaaaggatgaacaaggaaacacatatttgacccaagacagatatgatggaggactggaccaggaggtggagagggttggagatgatagattagttttaatgtatattataatgcatattcccaatatttgggacaatataattgatc

SEQ ID NO: 1947 - DNA, 582 bp, Cricetulus griseus
  misc_feature (298)..(326): n is a, c, g, or t
  misc_feature (532)..(553): n is a, c, g, or t
ctctaccagctttacaaggactgccccaaagtacagagaaacatcatgaggatcattggaaacatggccttgaacgagcatcttcaccctgctatagtccgctcaggctgggtttctataatggcagaggctttgaaatcctaccacgtgatggaggcttcccatgctgccagaaccctggcgaatctagaccgagaaactgtgtgtgagaaataccaagatggggtgtatgtactccatccccagtgtcggacaagtcagcccattaaagccgatgtcctttttatccatggccttnnnnnnnnnnnnnnnnnnnnnnnnnnnnngcacgacagtaagcgggctctgacggaaaatgtcgtggtggatgagaacaggtacactacgtgctggcccaagacatggctagcaaaagactgtcctgcgcttcgcatcatatctgtggagtatgacaccagcctcagtgactggcgagcaaggtgccccatggaaagaaagtccattgcattcagaagcaacgaacttcttagcnnnnnnnnnnnnnnnnnnnnnngggataggccagtgatttggatatcacat

SEQ ID NO: 1948 - DNA, 578 bp, Cricetulus griseus
  misc_feature (518)..(518): n is a, c, g, or t
cttgtccatgttcctggccaaccacaacaaaatcacacaatctctgcagcagcagcttgaggtcatttctggctatgaagaactcctggcagacattgtgaatctgtgtgtggattactatgagaacagaatgtacttgacacccagtagaaaaacacatgctactcaaagtcatgggatttggtctgtatctgatggatgggagtgtcagtaacatctacaaactcgatgccaagaaaagaatcaatttatccaaaatagacaaatacttcaagcagctgcaggtggttccactttttggagatatgcaaatagaactggcaagatacatcaagaccagcgctcactacgaggagaataagtcccggtggacctgcacatcctcaagcagcagcccccagtacaatatctgtgagcagatgatccagatccgtgaagaccacatgcgtttcatctcagagctggctcgatacagcaatagtgaggtggtcacagggtctggccggcaggaggcccanaagacagatgcagagtaccggaagctcttcgacctggctctgcagggcctgcagcttctg

SEQ ID NO: 1949 - DNA, 245 bp, Cricetulus griseus
  misc_feature (70)..(94): n is a, c, g, or t
tcactgcagagcatcagtgcaggggccaaattcttccagggttaactattttgagcatcttgcttattcnnnnnnnnnnnnnnnnnnnnnnnnngcaagacaaacaaaaactggtctgagcagaaaccattaggctggaaccattttttgaaaggtcaccccgtgagggtacagcagggacaggctggacgaaaggcggtgcctctggctgagggtggagttggagtcactcaaaaagtactctg

SEQ ID NO: 1950 - DNA, 510 bp, Cricetulus griseus
  misc_feature (18)..(34): n is a, c, g, or t
  misc_feature (320)..(346): n is a, c, g, or t
ataaatttgcagaaggcnnnnnnnnnnnnnnnnntggacatgaagatccgattacaaagaccagtcgtgttttacgaatagaagccaaaagcaaggatggaaaattagtgccaatgacaatttttcacaaaatggattctgaggacttggagaagaagcccctcttggtgcatgtgtatggagcttatgggatggatttgaaaatgaatttccggcctgagaggcgagtcttggtagatgatggatggatcttaacatattgccatgttaagggtggtggcgagttgggcctccagtggcatgctgatggctgcctaacnnnnnnnnnnnnnnnnnnnnnnnnnnnaaaggcttgcattaagacgcttgatagccaaggcttgtgccagccgagcctaaccacactgagcgctttcaatgctggaggggtgcttgtgggagccctgtgcaacttcaaaccatagctccttcgaactgagactctggaggcacctttgttgcatgtcctca

SEQ ID NO: 1951 - DNA, 579 bp, Cricetulus griseus
cccatgctttgtctgtctggaaagccttcagctagtctttcagctttcctgaacttcaggtactcttgctattagcagcgtcagtgactactcacagttaacactgactgtttctctgtagttttctgctattacagccaagcacacatattccagaagttctgagacagtttgcacatagaatagccaagagaagtacattatcttctatttcttaagactgctgcatctgttttgggttttgtttcttcttagttaagacctgcctaaaaaccttcatttctagggaatttcagttaacaagggctttacaacaggctgacacttgtaaaaagaacagtttgtcagtgttgggcctaaaggggaccaagtcaaaaagacagcaacaaatagcagagctgaaaccgttttcacaattcctcagtcagcgctcaagtgccaaatggcatcttagtgttaatttctatactcagtatattcagacttagcaagtttgaattattattaaaaaataaaaagatatctcaaaaggcaaaaaaaaaaagacaagacaatctggcacccaacaccctttcagag

SEQ ID NO: 1952 - DNA, 579 bp, Cricetulus griseus
ggtggtggcgggcgtggtgctggcccagtacatattcaccttgaagagaaagacgggccgcaagaccaagatcatcgagatgatgccagaatttcagaaaagctcagttcaaatcaagaaccctacaagagtagaagaaattatgtgggatctcattaaaggaggagctgctaaacttcagataataactgactttgatatgacactaagtaggttttcctacaatgggaaaagatgcccaacatgtcataatatcattgacaactgcaaacttgtcacagacgaatgtcgacgaaagttactgcagctaaaggagcattattacgctattgaagttgaccctttcctcactgtggaagagaagttccctcacatggtagagtggtatactaagtcccatggtttgcttgttgaacaaggcataccaaaagccaaacttaaagagattgtggcagactctgatgtgatgctcaaggaaggatatgagaatttctttggaaaacttcaaaagcatggtatccctgtgttcatagtttacgctggtatcggtgatgtgcttgaagaaattatacgtcaagc

SEQ ID NO: 1953 - DNA, 581 bp, Cricetulus griseus
  misc_feature (457)..(482): n is a, c, g, or t
ataaaattagtgatccttctgatggctgggtttatgggtgtgtgtcaccccacccagtaaggatttgtttattgaagttccacagttgctttgtagtcatttgggtaagcagctgtctagagatgcgcagtgaaagtgaaccctatggtgccactgtgccttgcttcaaggtttttctcatttctcatcttgaagattgtttccagttctaatttctagccaagccagctgctcggccttaactctgctcagtgccctgttaactaacattttataacagattggtttttatatgtttaaactgtccagcatttggattttacctcttgatagctccatttgttcctggtgctgctttaaagtgtccagtggagtaggtacgcagttggcctggttgtggacctgtttgtcttctcccaagaaaagctactttggtatagatgtttacttgggtttnnnnnnnnnnnnnnnnnnnnnnnnnngaaagctctgtgaaacccataagaacctgaaaggatttggaaagggcagcccttaagtctttgaccataaagcacatgtgtgcatgctgtgtaaagact

SEQ ID NO: 1954 - DNA, 567 bp, Cricetulus griseus
ggagcgcttggaagcccttgatgccaattctcggaagcaggaagcagagtggaaagaaaaggcaataaaggagctggaagaatggtatgcgagacaggatgaacagctacagaaaacaaaagcaaacaacagggcagcagaagaagcctttgtaaacgacatcgatgagtcatccccaggcactgaatgggagcgggtggcccgcctgtgtgactttaaccctaagtccagcaaacaggccaaagatgtctctcgcatgcgctcagtcctcatctccctgaagcaggcccccctggtgcattgaagagctaccctgtggaaacactacgtctgcaatatcttaatcctactcagtgaagctgttcacgtaattggattaattatgttgagttcttttggaccaaaccttttgtctttagagttgatcattgtttgtgattgcatgtttccttcaactgtgttctccctggcattcagagaagataggggaggaggaggggagggatgctcccaacagtagcctcaacccgtgcttttgtgcattattctgagaataaatttctgttt

SEQ ID NO: 1955 - DNA, 579 bp, Cricetulus griseus
  misc_feature (465)..(483): n is a, c, g, or t
cttctgccaaatgacctcccttatgaccatcatggaagactactttgcataccgtggcttcaaatacctcaggctcgatggaaccacaaaagcagaggaccggggcatgctgctaaaaacctttaatgagcctggctctgaatacttgatttttctgctcagtacccgtgctggggggctgggcctcaacctgcagtcagctgacactgtgatcatctttgacagtgactggaatccccatcaggacctgcaagcacaggatcgtgcccatcgaattgggcagcagaatgaggtgcgggtgctccgcctgtgcaccgttaacagtgtggaggagaagatcctggccgccgctaaatacaaactcaatgtggaccagaaagttatccaggctggcatgtttgaccagaagtcatccagccatgagcggcgagcctttctgcaggccatcctggagcatgaggagcnnnnnnnnnnnnnnnnnnnggtccccgatgatgagactgtcaaccagatgattgcccggcatgaagaagagtttgacctctttatgcgcatggacttggaccgccggcgtgaaga

SEQ ID NO: 1956 - DNA, 567 bp, Cricetulus griseus
  misc_feature (338)..(357): n is a, c, g, or t
  misc_feature (516)..(516): n is a, c, g, or t
aaggaaaatggcagacggtttttcgcttaatgatgccttagctggttctggaaacccaaaccctcaaggatggcctggtgcataccaacctggggcagggggctacccaggggcttcctatcctggggcctaccctgggcaggctcctccaggggcttatcctgggcaggctcctcctagtgcctacccaggcccaactgcccctggagcttaccctggctcaactgcccctggagcttaccctggcccaactgcacccggagcttaccctggatctgcacctggagccttcccagggcaacctggagcacctggggcctaccccagtgctcctgggnnnnnnnnnnnnnnnnnnnnctatggcgcccccactggagcattgacagtgccctataagctgcccttggctggaggagtcatgcctcgaatgctgattacaatcatgggcacagtgaagcccaatgcaaacaggattattctaaatttcatgagagggaatgacattgccttccactntaaccctcgcttcaatgaaaacaacaggaaagtcattgtgtgcaacaccaa

SEQ ID NO: 1957 - DNA, 476 bp, Cricetulus griseus
actgcgccctgaaaccattgtcctctctgccctctctgggttaaagaagaagctgagtgatttacagactcagttaagccatgagatccagagtgatgtgcttactataaactaaccatagctcacccgctgcagaagactgggtgcaaggtctacggtcttgggagcccttctggtttctaggctctggactacagctgctcaagctgcctggaacgtcaccggagagattgccaggggttcactggtgttagacagagcagtttttcactaggcatttagcattctggaacctaccttgttgatcaccatggtattccttagaacactagttaccccttccatcccgtttcctagctcacttttaaggagccttattgcttcctatgtgagaaccacttgacctagacatctggtcactccagctttttaaatctctacccaaggaaggagtttacagcttggaacttaagctt

SEQ ID NO: 1958 - DNA, 580 bp, Cricetulus griseus
tgacaagctcctgcggtacgaccatcaacagagactgactgccaaagaggccatggagcacccgtacttctaccctgtggtgaaggagcagtcccagccttgtgcagagaacaccgtgctttccagtggcctcagcgcagcacgatgaagcctggggaatcgacggtctgttgcggttcctcatacttttccataagcagaacaagaaccaaatcaaacgtcttaacgcgtgcgtagcgagatcacgtcctgagagcagacacaaaatggtggcaggcttggcgagcacgaactataccacctgaagggcagcccaccaccgtaaatcagacctcacttccgaatgtaaaaggttcacatgcctttggcttcctgttgacttcctcccgacccagaaagcatgggaaatgtgaagggtatgcaaaaatggttgttggttactgttgctccctgtgcccttgacctgtcccatggctgcctgttgctccagcaaatcccaaggactagctgaccacagactccacagatgggatgggggcagtgtatggcatgatgggcacttacatattattattttaaa

SEQ ID NO: 1959 - DNA, 580 bp, Cricetulus griseus
gactgtcgcacaggcgacaggcccaaaaatgacaataaaaaagaggactacttctagccaatggcaatttccgcctgttgtgattatcttaaagaatatggagagcttcagcacaaaagtactccaagacttcataattatcagcagtcagcatcggcatgaatttccactgatcctcatttttggaatcgccacatctcctgttattatccatcgactgcttccacatgcagtgtcatctcttctgtgtatagaacttttccagtctttgtcatgcaaagagcacctggcagtaattcttgatcagctgcttcttacagctcaatttccttttaaaataagtaagaaagcattacaggttctgaccaacatcttcttataccatgatttctcaattcaaaacttcatcaaaggacttaagctttctctattagaacatttttatttgcaacccctaaatgttctgtgctgtgatctcccaaaagccaagaaaagaataaaatttttgtcagttaatcaatgtgaaaacatccggccgcttccatcatttatgaagtacctggaaaagcaagcttcaaga

SEQ ID NO: 1960 - DNA, 128 bp, Cricetulus griseus
aggctcctgttgggcctctgggccaggtgaagctgacagtgaggtaccacagtgatgaacaaaacctggttagcatcatccacagctgccgggcccttccccaaaatggccgtgaactgccagatccc

SEQ ID NO: 1961 - DNA, 432 bp, Cricetulus griseus
  misc_feature (373)..(400): n is a, c, g, or t
gtccacccacgcggcggtttctagaaggcgcaagatgctcataatgcatggactggggagagaagaggaacacggttgcctccatcgctgcgggcattctatttttcacaggatgggggatcatcatatatgcagctgtcatttatcccagcatggaagaattcagccgctcataccatgcttgtggcgtcatagcgaccatagccttcctcatgattaacgcagtgtcgaatggacaagtgcgaggtgacagctacagagaacgctgtctgggccacacaaaaaagcccatagtatatcctggaattgctgtatttttccagaatgccttcatcttttttggagggctggtgtttaagtttggtcgcacggnnnnnnnnnnnnnnnnnnnnnnnnnnnnatacagcacaggcgccctgtatgggatttttt

SEQ ID NO: 1962 - DNA, 579 bp, Cricetulus griseus
attggacgtagctgctctttcctctacccaggaggcactggcacacctgcctcctgcaactgccttggtgtaaccatggcactggctcacctcttggtcaccacagggcccctcccctccccagacaggtgtctgggagacagctgtccctaaggttagtgatctgtgagtaggcagagttgccagggcttctctgaccagtccccctcacattcacacacctcagcagctccatgaccttctctttttcgcctggctggtcaccagcttccagctgcagctacaagtggcctggagcttgctgggtgctcccatcccctgctcagacccctccaggctctcctgagaccaagagctaagcccagcccagcagagcccaagctcatcctgcccaggcccacagggagccaccagccaggctctcagaaaagcactggaagcctgggcttcaagccctgatgtcttggatcccatctgggttttgtccccagggccttaactgtttgaccacagctctggagggaagtgacttggagaggggacagccagattatccctccctgcccccgccccgcctcc

SEQ ID NO: 1963 - DNA, 134 bp, Cricetulus griseus
gtgtcttgctctttaaactgccctttgacaatcacgtgctaattattgtattttaccaaaaccagcacatacatagtattgctgcatgtccagtccttcaagacagaagtgcttattcttctgctgagtcccgt

SEQ ID NO: 1964 - DNA, 579 bp, Cricetulus griseus
cttctcttgagtacagtagcttgacctgtctgctttgatctgcaccttgacagcaagcttccctgttgtgggacatcggggtacctgcaggcaagtgagacctggtcttaatgtgcaaaccctatacctgctctgcaagagcgttggtttcatgggctgcagcagtgggcatagcaagtcgctcatccagtggacttgattggctagtagctaggaagcgggcctttagagagacccaccattgaatggggtttttttttaaacctttggttgtagacaatgaaaaggtagatagccctcttcatgtctatttccctttcaaatagttgcatccaaaagaaagctgttctgtcccatgctctcctactttgctcctctgttaaaataaaaacaggggttgacttatgtcccgctcctgaatacatgtaaaatttgcacaaaactatcttctatgaaaatgatttgtaatctgtagacattacttgggagatgtcttgagatgtaaaatcccatcctttgggttgagggttctttgtttttctccaaataaacccagtctttaaagttgaaaaaaaaaaa

SEQ ID NO: 1965 - DNA, 234 bp, Cricetulus griseus
  misc_feature (154)..(226): n is a, c, g, or t
gtggactctgcctgggctggtctttaccaagttacagtgaatctagtagacattttacctgtctccaaatctatcttgggtacagcccctggatattttatctgggtttggagagttttaaagggtgtgcgcgcacgtgtgtgtgtgggggggnnnnnnnnnnnnnnnnnnnnnnnnnnnnnnnnnnnnnnnnnnnnnnnnnnnnnnnnnnnnnnnnnnnnnnnnngggggaat

SEQ ID NO: 1966 - DNA, 579 bp, Cricetulus griseus
  misc_feature (19)..(38): n is a, c, g, or t
cagagccagttgtcactcnnnnnnnnnnnnnnnnnnnncaacccagtgcttctcaaagtgaagaaaaagctcctgagctgcccaaaccaaagaagaacagatgttttatgtgtagaaagaaagttggccttacagggtttgactgccgatgtggaaatttgttttgtggacttcaccgttactctgacaagcacaactgtccatatgattacaaagcagaagctgcagcaaaaatcagaaaagagaatccagttgttgtggctgaaaagatccagagaatataaaattactacatgtgaagagactgaaactttgtttttattttaatatatcgtaggaaaacattaaagagcagatgcatggccattttcctttgatgttctccagagttttgctttatatttgtctgtcgtataattgatattttaggatgtttgggtgtttgttacaggcagaattggatagatacagccctacaaatgtatatgccctccccctcataaaattggacaaaaatctgcgcaacaaattgaaataacacagataataggaacaaaatttagttccacgtgccaaatt

SEQ ID NO: 1967 - DNA, 580 bp, Cricetulus griseus
ctgtgatttcatcactgtccacactcccctcctgccctccaccacaggcttgctgaatgacagcacttttgcccagtgcaagaagggcgtgcgagtagtgaactgtgctcgagggggaattgtggatgaaggtgccctgctccgtgccctgcagtctggacagtgtgctggtgctgcactggatgtgtttacagaagagccaccacgggaccgggccttagtggaccatgagaatgtcatcagctgtccccatctgggtgccagcaccaaggaggcccagagccgctgtggggaggagattgcagtccagtttgtggacatggtgaagggaaagtctctaacaggggtcgtaaatgcgcaggctcttaccagtgccttctctccacacaccaagccttggattggtctggcagaagcgttgggcactctgatgcatgcctgggctggctcgcctaaagggaccatccaggtggtgacacaaggaacatctctgaaaaacgctgggacctgcctgagccctgcagtcattgttggacttttgagggaagcgtcaaagcaagcggatgtgaacttggtgaac

SEQ ID NO: 1968 - DNA, 385 bp, Cricetulus griseus
ggcttatttctctccaactttaaggttatttgtgagctttaacatcgcctggctggagacagacatctgattagcttgaaaaactacagcagtagactgattcaatcaagatatttgtgtattgttgtgttctatgtccactttctgtgctattcctatatccctgtatctctgaaacactggaagagctagtaaattgtaaatgaaataccatgtttcccttgaatttcatttctcagtgtggcaactgtgaaaagtgctgtgaattttctgttttgatacagtggtgatggaaatttaacccctatgaatctgctgttgatgttgtatgatagaaaattggcctccctgaagcttgattgtataaatctgcacccaagagaaa

SEQ ID NO: 1969 - DNA, 580 bp, Cricetulus griseus
tcaaaactaccttatttcataattgatggtacattctgaattttctcagtaactctggctggaaacagaggtcttgacttgtcttctgaaatgactagcagaagccaacacatgaacccttaactatagcattttaatgaatccatctaaggcaccttatgctgcatggccagctgttccatgtttaaatgccatcaatgatgacctaactgaaataagtcatcttcacatatcaacactcagggtgttgttaagacttagaaagtaaaaggaaagaataactgtgcatcaagatttgctgttctggttgttaatctgatctctgatttgccacacacattaggaaaatagaaaggaaaactattttcttggcaaaagtgactttcattctattcagcaatattgaaaattcaagtaaggaagacttggtggtggtacatgtcaaaaaaccaaagagagtaaaagaaacttccttatgactcatatttttgagttttaacttatctgtgtgtaacttttctttggtgagaagataagttattttcccgtttaatcctttgtgtcttcttattcctcttag

SEQ ID NO: 1970 - DNA, 557 bp, Cricetulus griseus
  misc_feature (494)..(494): n is a, c, g, or t
  misc_feature (516)..(516): n is a, c, g, or t
cagaaggtacatggtaggaaagggccagaagctgactctgagtggaggagaggcccgccagagaaggagtggagacgaggagagactcgggatgatgagagacctcacaggagagatgaagaccggctgagacgcttgggggatgatgaagagagagaatcttctcttagaccagatgatgatcgaatccccaggcgtggcctggatgatgacagagggcctaggcgtggtcccgatgaagatagattttctcgtagaggaacagatgatgaccgtccatcctggcgtaatgcagatgacgacaggcctcccaggcgaattggtgatgatgataggggaagctggcgtcacacagatgatgacagaccacccagacggggactggatgatgacagaccactgagacggggactggatgatgacagaccactgagacggcgactggatgatgacagaggaagctggcgcacagcagatgatgacagaggacctanacgtgggatggatgatgagcgngggccgagaagaggaggtgctgatgatgaacggtcatcctg

SEQ ID NO: 1971 - DNA, 578 bp, Cricetulus griseus
ctgtcctggaaaagtggcatctcaggactcatggaacaatgtctggatggcaccggcacagtgcctggcattcagttgttaatttatgcaacacattcacaaagagtttacattgtgcctgggggttgttcagggctctaggattcagtgctgaaaagacaagggcctggcccttcaaggagctgagatgctcagcaatgagtgaaggatgacacagctgtgcacaagtgacaagatgtctagccacacatactcagtgtccacagtacagcaaatcagacatggagcttgacaaggatgttagacagtgtgcagggaaggtctccctgaggacggaggcagggaaaatagtatatgagttaatatttttaagaaatataaaattatgcagcccacagcaagataaaattctgtttggtaaccaaccgaaaagcagcaggaaacaaacttataaagagaataaaaaccaatgatagacactgattcagaaaagatacaagactcgtggataaaagcattcactggcatttattgttatgaaggaatttcttactttcaagatcccagatgaaaagcta

SEQ ID NO: 1972 - DNA, 146 bp, Cricetulus griseus
cgaagatggcggcgacaccggccctgctttcctgaggcggctgcgatggaacctcctccagctccggggccggtacggctctttgactcgcaccggctcccgaacgacggcttcctgctgctcgtgctgctgctctacacttcggt

SEQ ID NO: 1973 - DNA, 417 bp, Cricetulus griseus
ggtgaaatcacaagtgcaggaagtgaagactgaagggaagggaagaaatacggtgtggtggttccagtgagaaggctccttcccgatacactcacatttgtgaacacttgatttccaaggggtggtgctgtttggggaggttttgggatcttgagcagatggaatcttgcttgaagaaagaaggcttaaatgatttgtagctttctcctacttcctgttttcctttcctgtttcctgtatggatgaaatgtaatcagcagcttcctggtcctgccaccatgcttttcctcactgttattcctcccccactgtggtagactctatccctctaaatctgtgaactgaaacgcactctttcttctccaagctgcttctgtgagagtcttttatcaaaattaactaagacatgttcatgaa

SEQ ID NO: 1974 - DNA, 234 bp, Cricetulus griseus
tcgagagctgcttgatgtgggtgctagaagagcagtaaatgttcttaggtactaagccatttttccagccccttaatttttatttttgattaaaagaaagtctaaagacccaagctggccttgaactcaatcctcctgcttctgcgtctgtgtgcgtgcgtgcgtgcgtgcgtgcgtgcgtgcgtgcgtgcgtgcgtgcgtgcgtgcgtgcgtgcgtgcgtgcgtgcgtgcgtg

SEQ ID NO: 1975 - DNA, 508 bp, Cricetulus griseus
  misc_feature (128)..(144): n is a, c, g, or t
  misc_feature (494)..(494): n is a, c, g, or t
tagtgccacagccaagactcaacataatggcatgaacaacatcattcgactgttcctgaagaagggactagtcaatgacctggccagagttcctcacagcctagacttgtcgagtcctaatatggccnnnnnnnnnnnnnnnnntctaaaacctttggaaacactttcccggattgtaaaccagcccagtagcctttttggcagcaagagtgcttctagcaagagcaagtctgagcaggatgcccaaggagcctctcaagattcaaatagccatcagcaagatccaggcgagcctggggaagcagaagtacaggaggaggatcatgatgtctctcagacagaggttgcagatggggatatcatggatggggaggctgaaaccgactcagtggtgattgctgggcaacctgaggtgctcagttcacaagagatgcaggtagggaggcagatcattccagcaatcttcagttgcaacgctgaaccaaaacccccangtggtgtgggtggg

SEQ ID NO: 1976 - DNA, 357 bp, Cricetulus griseus
  misc_feature (200)..(248): n is a, c, g, or t
taagtcctgtatgttgactcgtgagaaatcaccagggatcctgactgctgcctgtgagagtgctgggatcagctagtgctttgataggcagtaatgatgcttcgcttcaagtggggcagccttgcgggtaaggctctgactaaaggattcttttgggggtaaaagaaggaagatagaggactcaaattttagtgtgtgannnnnnnnnnnnnnnnnnnnnnnnnnnnnnnnnnnnnnnnnnnnnnnnnaaacacagaccctctggaacatactatgtcctttgccttccgagtattgagattaaaggcgtgggccacagtgcctggcccccaaacctttgctttttgaatcttacct

SEQ ID NO: 1977 - DNA, 417 bp, Cricetulus griseus
  misc_feature (333)..(352): n is a, c, g, or t
ccatcagtgatttacacacaccccgaggttgcttgggttggcaaatcagaagagcaattgaaagaagagggtattgagtacaaagttggtaaattcccatttgctgcaaacagcagagctaaaacaaatgctgacacagatgggggggtgaagattcttggacaaaaatcaacagatagagtactgggggcacatattctgggaccaggtgctggagaaatggtgaatgaagctgccctggctctggagtacggagcttcctgtgaagacatagctagagtctgccatgcacatccgaccttgtcagaggcctttatagaagcaaacctggcnnnnnnnnnnnnnnnnnnnntcaactcttaatgagaagattgttttgctcacatgcggaagcttttgtcaaacaggataatctcc

SEQ ID NO: 1978 - DNA, 255 bp, Cricetulus griseus
aaggcctaccgcccacatgtccactctgctgatccatcatcccgactatgcttggctgcaagagctggggctccatgaggacaacgcgggcgtgtgtaatggaaactggcgcggcgggggacaggtaattacgrgcgatggtcctgctaacaatgagccaatggcacggatcccaccggccagtatggaagactgtgaacaaactgttaaggaaccccaggaagctgaccaaatgtgaccacagattcctgcccc

SEQ ID NO: 1979 - DNA, 361 bp, Cricetulus griseus
  misc_feature (245)..(294): n is a, c, g, or t
gcattgtactcttcctctttttggagatagagatatatatatatagagagaaatgctataaggaagtttatttcttaggttcactgaacaatatttcttttacagtgtaatatgggggtggggatatgcaaaagaaatgtgtatttttgctagttgcctatcttctgagataataagcacaatcctgaaatggatccaataattcagttagatgttatagattagtatttaagtttgcagtaagnnnnnnnnnnnnnnnnnnnnnnnnnnnnnnnnnnnnnnnnnnnnnnnnnntaaaaaaaagctcatgatacacaatgtgggtattcacccatgtcaaaaaatctgttcactggtccac

SEQ ID NO: 1980 - DNA, 581 bp, Cricetulus griseus
  misc_feature (70)..(107): n is a, c, g, or t
cagttggccctacctccttgcccacaagtactctggcaatgttcagtcttctcccagggtctgagagagnnnnnnnnnnnnnnnnnnnnnnnnnnnnnnnnnnnnnnaccactagggattagtttgccttacatttactttactgtgtggctttccctccctcacctcaacccaaccagtgtttgaatttcactctctggaaaggaactgatgaaatgctatagttttctttctctacccctattctgcaaattcatccagcatattctcatgggctcctttgggactctgaggcagggagaaagatgcctgtcctcttgcccaaagggagcaatgagtcagtactctgggcaggattaccaaggacagacaagacctgcaggggctggtgttgaagagcaagagctgagaattcctggaagcagggactggggaaagactgcctaagctgaatgcttggaagttcgaattgacagttgggatatagaaacaccagtagatttcaggttggagaaccccggctcaaggctgacagaagagagactggtggagtttgaattgaagaatggagctcaacatag

SEQ ID NO: 1981 - DNA, 380 bp, Cricetulus griseus
tgtttctagtctggaagacttcttcaaggatcagttaaatgaaggaatcctcctccatctcttacttgcccgtctctttgccctagcactgacaaaagcagggtggcctcccaagcttcttctgaagctggcaaggctcgctggtgggcagcatgaaatgctaatggggcacaattacaaagcacgtgggtgtttccttggtttccctctcagaggagtgtgagtgcccccatggttggaggagggaggcaccaaacgaaacagggccctgtggatggaagcaccccattgccttcagacacaatgctgtaacaggaggcaagaggactctctcaggactccattcctcgggcaatcggtgatgctgaccccaataacca

SEQ ID NO: 1982 - DNA, 203 bp, Cricetulus griseus
atagtttcctgtaaaccgacagaaaacattacatttaggcagataatgcacaaagcaatgacattttcgtttattactgaaattgctgattatctaaagcatggttttaatgtttttataaaatttgggtatgttctttaatcttcttaggcggatgctccaactccctcgagcacacccgatttacagtgctacaaacacag

SEQ ID NO: 1983 - DNA, 246 bp, Cricetulus griseus
  misc_feature (60)..(136): n is a, c, g, or t
  misc_feature (140)..(166): n is a, c, g, or t
  misc_feature (182)..(221): n is a, c, g, or t
cccgagttcattcgccgcttctctgtgaggactgctgccgccgccgctgacaatgcagannnnnnnnnnnnnnnnnnnnnnnnnnnnnnnnnnnnnnnnnnnnnnnnnnnnnnnnnnnnnnnnnnnnnnnnnnnnnaagnnnnnnnnnnnnnnnnnnnnnnnnnnntgaccagcagaggctnnnnnnnnnnnnnnnnnnnnnnnnnnnnnnnnnnnnnnnngtccgactacaacatccagaaggag

SEQ ID NO: 1984 - DNA, 576 bp, Cricetulus griseus
cagtgatgaggatgcagtgctgactccctcaggggtcacgggagctggcacaggtgatgaaggggatggccagacacctgggagcacatagcagcggagccgctgagccaggctgctgctttgtcgtctgtccgatgcccgtccctccctgcaggccacatcatggtggtgtctattgccggggtggccgcaggctggatccacgtgtcccctctgcagcagatggggatgccaggatgcggcttgggactcagacctcatcatattgacgagcagaaagaacatttcccgccctcctccgatcgaaacggcacattgacacttgtcacagcttctgctggctctcagaccgtctctcccaccctgggcagtgacagttcgaactctgggctcactgttctgttgagcaacctgctgtctgctcggcttcccgctctaccgggtccacatgactaatgcctcttgttcatttctgatggcttggcttttgagggcctggatgaagctgcttgtgggttgagctgacttgatgcccctgtgggcagcgtccggcccccacggtgactccctaagttt

SEQ ID NO: 1985 - DNA, 577 bp, Cricetulus griseus
gggccctgctccgagctttcccgggataagtagcattagcggcgggaaagagccggccgctgcaaggaacgaagagtatccgacaactagagtattggaagaggctggaaaagaaggcagacacaaggcttcgctccctgagttgcttgggacccctcttcagggttgtctccagcaggaaggctggtgggaactcaaggacagaagcagaggtaacgagtcagctggttctgcatttgtcatcgttcgctgttccttctttggaggggagttattttccctgagctgggtggacaccctgggcctatggggcctccttctatccccgcatcattccggccagaagatgagctcgagcacctgaccaagaagatgctgtatgacatggaaaatccccctgctgatgactactttggccgctgtgctcgctgtggggaaaacgtagttggggaaggaacaggatgcaccgccatggatcaggtcttccatgtgaattgcttcacctgcatcgtctgtaacaacaaactccgaggacaacctttctatgccgtggagaagaaggcgtactgtgagccct

SEQ ID NO: 1986 - DNA, 557 bp, Cricetulus griseus
  misc_feature (519)..(536): n is a, c, g, or t
aaatgagtttaaggaatggcagtacttcaagagcctgcacaggttcactcacatcccttcaggaaagtgcttagatcgatcagatgtccttcatcaagtcttcatctccaactgtgactccaataaaatgactcagaagtgggaaatgaataacattcacagtgtttaagaagagtgcacaaaaccaataatctacctactgacaagtacacttacagaggactgaaaatcgcctggaacctgctgcaaccgttattactaattctgtacagctccaatcctggaacctctgatcagattgaaggacattgataaactgtgatttttacaataacattatcatctgcagttactgtttacaaaactgcttttaccttaaactctgtagatgtttacatcctttttcttttgtttttagatgacgttggtaatttgtgcctttaactccgttcagaacagagttaaagcatatgttgtcttctttgggaatacactcaggggtctgaaaggcagtttggnnnnnnnnnnnnnnnnnngtggcttttaacacacttgaa

SEQ ID NO: 1987 - DNA, 561 bp, Cricetulus griseus
  misc_feature (62)..(76): n is a, c, g, or t
  misc_feature (254)..(254): n is a, c, g, or t
gtcgacccacgcgggcgagtggatccagtgaccgtatttgcctcactgtccccagaggtctnnnnnnnnnnnnnnntccccaagtccctccttactcaacctttggagagaacagcttcaatcacgagcttccccaagacaacccggaagtcacctgttcctaagaattcagccttggtccttctttgttcctgtccccagtgccagggggcctctggtttggagggtacatacactactttagcagaactcanatgttgggggatgggagggaaacgagaatgaccacagagtccctggataatgtagtagtagatgtctccacagggtgacacaatggatggccttgcttgattgtgttaggtcacagtattgggaggatgtcccttcatcttgtctagttgaagtcactgtacggtctatagttgcaaaacaagcaaaggaggattgaacacttcatgttacatctttaccttacagctaactcaagggttgtttttctctggggaccgtcccatcacccagatccctgctctaggctctcctaatgtgtggcttgat

SEQ ID NO: 1988 - DNA, 195 bp, Cricetulus griseus
  misc_feature (67)..(117): n is a, c, g, or t
ttgattgcgggccggccatggcgcttcacgtccccaaggccccgggcttcgcccatatgctcaaggnnnnnnnnnnnnnnnnnnnnnnnnnnnnnnnnnnnnnnnnnnnnnnnnnnnaagcttgcaaggagctttctgagactacccgtgcagtatatggaccaaatggaatgaataaaatggtcatcacgtcgc

SEQ ID NO: 1989 - DNA, 578 bp, Cricetulus griseus
  misc_feature (370)..(429): n is a, c, g, or t
ggaggagctgtggttgttacgctctacaggatgggttttcctgaagctgccagctccttcagaactcatcagattgaggctgcgcccaccagctctgcaggtgatggattcaaggcagatcttgtctttaaggagatcgagaagaagcttgaagaggaaggagaacagttcgtgaagaaaattggtggcatttttgccttcaaagtgaaggatggccctgggggcaaagaagccacctgggtggtagatgtgaagaacggcaaagcatcagtgctgcccaactcagataagaaggctgactgcactatcaccatggctgactcacacttgctggctttgatgactggtaaaatgaaccctcagtcggccnnnnnnnnnnnnnnnnnnnnnnnnnnnnnnnnnnnnnnnnnnnnnnnnnnnnnnnnnnnnctccagcttcagcctggcaaagctaagctatgaagatctccatttggaaacctcagcacatcaggatgagatggatagatatgtagatatccacctctcattgtcaggacttagtccgacatttcccgattagcatgaagtaaatttgt

SEQ ID NO: 1990 - DNA, 579 bp, Cricetulus griseus
ctggcatccagagatgttgtatctcgatccatgactcttgagatccgtgaaggaagaggctgtggccccgagaaagatcacgtctacctgcagttgcaccatctgccccctgagcagctggccacacgtctgcctgggattgcagagacagccatgatcttcgctggcgtggatgtcactaaggagcctatccctgtcctccccactgtgcattacaacatgggtgggattcccactaactacaaagggcaggtgctgaagcaattgaatggacaggatcaggttgtgcctggcctgtatgcctgtggggaggctgcctgtgcttcattgcatggtgccaaccggcttggagcaaattccctattggacctcgtagtctttggccgagcctgtgccctgagcattgcagaatcttgcaggcctggagataaagttccttcaattaaagcatatgctggagaagactcagtctgaatcttgacaagttaagattcgctgatggaagcataagatcatcagaactacgcctcagcatgcccaagtcaatgcagaatcatgctgcaatgttcccggggggaa

SEQ ID NO: 1991 - DNA, 202 bp, Cricetulus griseus
gtgctggtcaaggacttcaccttcgaaggcttcagccgcctgcgcttcctcaacctgggccgcatgatacacggtgtccccgtagagtgactggtccgaccactcaattcactggctgccttggacctctcaggcatccagacaggcgacgctacctttgtaacacaggggaaggacagtctgatgtcccttgggctctaca

SEQ ID NO: 1992 - DNA, 338 bp, Cricetulus griseus
tgcttgacgtcgggtctggggttgcttgtggtggcagtggctgaagccggcgtctgggaaaagcctaaacagaggagacgccatggacgatcagggctgccccaggtgtaagaccaccaaataccggaacccttcgttgaagctgatggggaacgtgtgcggacacactctgtgtgagagctgtgtggacttactgttcgtgagaggagctgggaactgtcctgagtgtggtactccactgagaaagagcaacttcagggtacagctctttgaagatcccaccgttgacaaggaggttgagattcggaaaaaagtgctgaagatatacaataaaaaaa

SEQ ID NO: 1993 - DNA, 115 bp, Cricetulus griseus
gtgcgagggatccgtgtccctggactcctgcgagtcttccctacccttggccgcgctcaacgtgcgagtgcggcgccgactctgtctgtgtcttggacgcgcggacgccggtggt

SEQ ID NO: 1994 - DNA, 579 bp, Cricetulus griseus
gggggggtctaactggaaggggcatctcatgagatggcacctgttcacagtgagttgaaaccacaggtttgcttgcagatggctcaagactaggggaagcagaggtgctacccacagaccccaaaccagtctctggtatagctacagagctccgctgtggagctgtcttcttggctggggctggtggaacaagacaagggatatctgccagtcttgtgggggtctctgggagactaggccacttgccaactgggggctgagaattcctgccttctgcctctgtttgccgttgctgccttcgctgccggtactcatataggctgagaggccgaagtctggcttcttgggttgtagcattggtgctcccttccaccttcagaggacctacaccactcttgacttcaggggtgatgttcttgggatggtctgaggactctagagaaagacgatttccctgagctgctgctactgcagcccgtctagggtcggttggtctgcacttaactagcacagggtctactggagccaggtcatttggaatagggtcaacggtcactgtgttagctggagacaagttat

SEQ ID NO: 1995 - DNA, 305 bp, Cricetulus griseus
  misc_feature (219)..(254): n is a, c, g, or t
tccgcaagaccatcatgcagctgtgtcatgaccgtggctacctggtgacccaagatgagctggaccagacacttgaggagttcaaggctcagtttggggacaaacccattgaaggaagacccaagcgcacagacctgacagtggtggtggcccacaacgatgatcccacagaccagatgtttgtgttcttcccagaggagcccaaggtgggtatcaagnnnnnnnnnnnnnnnnnnnnnnnnnnnnnnnnnnnnaacatcacttcggcgctgatcgtggtgcaacatggcatgacgccctctgcc

SEQ ID NO: 1996 - DNA, 506 bp, Cricetulus griseus
  misc_feature (407)..(407): n is a, c, g, or t
gagaatgtgagctgtgtctggttttcccatgatcataatacaggaaagcatgtgcaggctagggagaaagcaggctgggacagcgcctctgaatggacacttcagcagtttctccatgctttacttcccatccacatagctcccctataccacaccctaccaatgtctggattctagcctctgccacaccccacagcccagcaactcctcaggactttgttcctggacctcagtccccatagctggtggcctgtgtgcctgtgtggatgtgagacctcatgcagaggttccctccaagcctcttctagggacaggacctgacacagttgcttgctggctccaagttatgcccagggaggagtcgggtgccttacccatgtgccccttccctctaagtatagcttcantagatgagtttgggaggtttgcatatgaacacagaataaggctgaacacccccaataaaacatgcagcagaaagcccacgtggctgaaataagctctca

SEQ ID NO: 1997 - DNA, 567 bp, Cricetulus griseus
  misc_feature (416)..(416): n is a, c, g, or t
gtatgcaaatagaatggttgccagagcacttgctgcttttcctgaagacctgggcttagctcccagcacccatatcacagcaactcacaacctcctgtaactgcagttccaagggatctgttgccctctctggcttccttgggcacctgtgcacccacacatacccataaatgaaaataaatacaaattaagaaataaaaagtccatccccaggcttgttgcttggttatgttgcatgtagatttacacactcagtagcagtcttttagagggcaccccagacaacaacctgataacattgatggcatggcagtccctgcctacagccataagatagctcaggattcgacaaagttcaggtttaaagaaaaaaattgcatgggacaggtggggatacagctagagagatggctcantagttgagtgctggctgctcttccaaaggatccatgttcagttccctgcacccagttccaggggaaaatgaatactcttttctgatccctgctggcactaggcatgcatatgggttcgtacacacatgcagagaaatacacatacaccata

SEQ ID NO: 1998 - DNA, 448 bp, Cricetulus griseus
tgcacagtgttcatggctatcctagcacttttgccagttgtatgcatattctgtcagaggaaacctgttttcagagatggttaactgtggagagaaaatttgctcttcaaaaaatggactcaatgctctcatcagaggctgtttgggtatcccaatataaagacatcactgatgtggatgaaatgaaggttccagactgtgcagaagtttttatgactttacttttggttataactgacaggtataagaatcttcccacagccccccgaaagctgcagttcctggagttacagaaggacctactagatgacttcaggatacgattgacccaggtgatgaaagaagagaccagggctccacttgacttccgatactgtgcaattcttaatgccgtgaactacatctgaacagtcctggcagactgggctgacaatgttttctttctgca

SEQ ID NO: 1999 - DNA, 576 bp, Cricetulus griseus
  misc_feature (123)..(123): n is a, c, g, or t
  misc_feature (134)..(134): n is a, c, g, or t
  misc_feature (465)..(465): n is a, c, g, or t
gagagtctggggccttcctcgcttcctctgacccttactccagagagagactctttatgtggcattcagccccggcctggcctctgcttcactgtgtgtgtgatggatactggtgtgcaagtngagagtcacantcactgtacgatccaggaacacggcgacgtgagggggcatcaccatcacgaaaccctctctgaggggacactagagaattctaacacagcacttggtcaaataggcaacatcttcaacagcagttaatggaaaaagtgaggcgtgtgcctgcaccgaggaagctacaggaaaccagccctcctgagaaagtgccaacagagggataagactgtgttcaaatcaccagaactcacaaaaagccaggcaaggagctaggcacggtggccacgccacaccacacaggagggacaaatgcttttccgggcagctctgggccacccttcaactcanatactctcaagccagtgtgaggcacacctgtaatcatagcacttacaggttaaagcacaaggatctcaagttccagccctcccctggctacacagcaagatgctgtctcaa

SEQ ID NO: 2000 - DNA, 422 bp, Cricetulus griseus
  misc_feature (221)..(242): n is a, c, g, or t
agactagctggacattgttcccaccttcactcttccctctggtctttgagaagatcacagtgatttttataaaggttttttgggggagagtaaggatgatcctactcccagccgtctttcttccttacaaaaggaaaagaacgaacagggcatgacatcaatttgagccagtctcagataaaagttctacaagtgttaagaagagccctattgtttgtgannnnnnnnnnnnnnnnnnnnnncaccagcaagcagctgctccctctctccgacttagggttgagggagtagagagggtgtggccacctgcaccccttgtaaagagagtggggcagccttgttagcacagtataccttatcaggactctacgcactgccgggtcgtacaattattactattttgcaatttggaatgtattcta

SEQ ID NO: 2001 - DNA, 594 bp, Cricetulus griseus
  misc_feature (470)..(502): n is a, c, g, or t
gtcgacccacgcgtgggggaaggagcctcctgtgagtcagcctgcagcctcatcagactcagagacgtcggacagtgatgatgagtggacatttgggagcaataaaaataagaagaaaggaaaagccagaaaaatagagaagaaaggaaccatgaagaaacaagccagcggaactgcctcctcaggcagttcagacaaagacagttcagctgagagctcagctcctgaggaaggtgaagtgtcagattctgacagcaacagctcctcttctagttcagattcagactcctcatcagaagatgaagagttccatgatggctatggggaggatcttatgggagatgaggaagatagggcccgattggagcagatgacggagaaggagagggagcaggagctcttcaaccgcatagaaaagagggaagtgttgaaaagaaggtttgaaattaagaaaaaactaaaaacagccnnnnnnnnnnnnnnnnnnnnnnnnnnnnnnnnnccgcccccgggggggacctccactttttgttccttttatggagggtaaattgcccgctgggggaaatcatggccatagctgttccctggggg

SEQ ID NO: 2002 - DNA, 415 bp, Cricetulus griseus
gagccgtttcttcagcctagcaccacgtcttgaaggatgttttaggcatttcaaactgacattgttttttttgaaaggtcagattgcaccttaagagccagctgatagataataagagtgtaaaggcctgcaccctggagggtgtgtctcctgactgctgaaggagatttcctgaatcattgactgggagagtttgcgtggcatgaacgtgccgcgtgtgcttgtgcaaagtcagaggacagttagtgggagtcgcttgtttctgtctgccatgtgggtcctgtggatgagactcgggtgtctaggcttggctgcaagcacccctacctgcactattagctgtgagaatgttgcaggtgactgaagaaagtggcaactttttctctaagtatctgtggtttatgtccaaaattta

SEQ ID NO: 2003 - DNA, 501 bp, Cricetulus griseus
  misc_feature (295)..(317): n is a, c, g, or t
  misc_feature (320)..(332): n is a, c, g, or t
  misc_feature (376)..(406): n is a, c, g, or t
gggctttccttgtgtctagtatgaggaagctggccattgaaggtgcggagcaaaaccacccaaaactggaagttcctgagggtatacttccggctggctgcatagattccccagacaaaacaggcttactgtgagcttacaagttcactccctgaggagaaaaagagaagcttgaagaatccaagtagtagaaaacaaatgctccctgtctaccaacagcacgcagaggcagaggcagagggcagagggcagagggcagagggcagaggtcagaggcagaggcatctctgtgagnnnnnnnnnnnnnnnnnnnnnnnccnnnnnnnnnnnnntctctgaagccacagagactcaaaaagacaaacaaacaaaacgnnnnnnnnnnnnnnnnnnnnnnnnnnnnnnncaaacaagaacagcaataacaaaaaacccttctttgtgtgctccaaggtgcacaggtaaggaaggatattcagctcctgaaagtgtcacctctgt

SEQ ID NO: 2004 - DNA, 582 bp, Cricetulus griseus
  misc_feature (119)..(136): n is a, c, g, or t
tctggaatgctggccttgtatcctttctatgtccttgcttaactatgtgtgatactcttaatgtggggtatgtgggtatagccaatgcaactcagcatctagcatcgtagtggtgcttnnnnnnnnnnnnnnnnnnggagaggcagaggtaggtggatctgtgtaagttcaaggttcctacatagcctatgtagttttaggctagctagggttatgtagtgagaccctgtctcaaaaacagaaacaaaaattcaaaacaacaacaaaaagcaaaacaatccagtatcttttgctttatacacattcttgttcatggatttacttatctcaggtagtttatatttagcaccataaaagaagtaattgtcttcaagtagtttttgtattttctttgcgagtttaaggattttctctcatgattttatgaactgagttctcagtaatataaaaggtcctaattaaagaagtagggaatgcatacctgtgtgggtatgaacaacacccccttcctttccactgttaattgatgctgagcagtttattttgatatttgaatacttcttgacactgagggtttgagaa

SEQ ID NO: 2005 - DNA, 354 bp, Cricetulus griseus
gttcctgcggctgctgatgcccgcagcccccgcaccccaccgcggctcctacaagccggtgatcgtggtgcacgggctctttgacagttcctacagcttccgccacctgctggactacatcaatgagacgcaccccgggaccggggggacggtgctcgacctcttcgatggcagagagagcttgcggcccttgtgggagcaggtgcaagggttccgacaagccgtggtgcccattatggaaaaggcccccgaaagggtgcatctcatctgttactcccaagggggcctggggtgccgcgccttgctgactgtttcggatgagcacaacgtggattctttgatctgcctggcctc

SEQ ID NO: 2006 - DNA, 582 bp, Cricetulus griseus
  misc_feature (89)..(89): n is a, c, g, or t
  misc_feature (310)..(327): n is a, c, g, or t
  misc_feature (477)..(477): n is a, c, g, or t
caccaccaacctctctcaggttgtacgccgcaggactcagcggaggaagtctggcatcacctccctgctctttggggaggatgacctanaggctctcaaggccaagaatatcaagcagacagagctggtagctgacctccgagaagccgttttgcgtgtggctcgccacttccagtgcacagaccccaagaactgtagtgtggagctgaccccagactacagcatggagagccaccagcgggaccatgagaactatgtggcatgcttacgcagccaccggcgccgggccaaggccctgctggactttgannnnnnnnnnnnnnnnnngctaggcttccgaaaaaacgacatcatcacgatcatttctcagaaggacgagcactgctgggtgggtgagctgaacggccttaaaggctggtttccagccaagtttgtggaggtcctggatgaacggagcaaagagtactctattgcggnggatgactctgtgacagaaggagtcacagaccttgtgcgagggactctctgcccagccctcaaggccctgtttgaacatggactgaagaagccgtccttgcttgg

SEQ ID NO: 2007 - DNA, 581 bp, Cricetulus griseus
aagttgcttacagtggcagtacccagtctcagaatcacaaggattcccaccaggaattgttcccagaggattgcaagcacatgatttacaaccaaatgggtcttcagcacttaaaccatagaagccttctttacagacatcgcagcgctgtccttcaacatgcaatttgcaccggcactgaccagcaatgagacccgcagagaaatcagtgtaaccgtcacagattcctccattctcagaaccagctgggtcacaggtacatggttcacagagattggggtctcggacgtccctctcggggtgctggtagtagaatggtttgcactgctcgcagttgcgtcccatggtgttgtgctgacagtcatcacacacgcccccgctgacattcccagtggccaagaaaactgccatgtcaaagtgacatgagctggaatgttcattgcagttgcattttttgcaagcattgctgttccgaccttcagcaggtctccatgggaaatcatggtagatatccatgcacagctcacagtttatgcctttggtgttatgcctgcacatgcagtgtccatgaaccattcctt

SEQ ID NO: 2008 - DNA, 341 bp, Cricetulus griseus
tctcctgcaaaaatccttacaataaatgaggatggatcacttggtttgaaaacccctaaatctcacgtctgtgagcactgcaatgctgcctttagaacgaactatcacttacagagacatgtcttcattcatacaggcgaaagaccggggaatgtagtcaatgcgacatgcgttggatacagaagtacctgcttcacagacaccataagatccataccggcgaaaaaccatttcgctgtgatgagtgtggtgtgacattcatacagaaatatgacatggaaaggcacaagataactcacagtggagaaaagccttaccagggtgaatactgcttacaggat

SEQ ID NO: 2009 - DNA, 506 bp, Cricetulus griseus
gatgaaggatcaagtttgcttccttttgaaactgatgccgcagcaatgccagacacagtatgagctggggaaggttctccaactgcttgtcgggactgagcacctcttctctgatggtccagatgtgcagaaactgtgtgtcctcagccagatcttgaaggacacgcctgtagccatcaacccagctgttattaccagctacagcgctgagaattttcagcatgagtgtagatctattttggaaaagctgaaggcagatggacagtttgctgtggccaggagagtggcagagttagccgcattacctgtggacagcttggtgattgaacagctagcccaggaaatgaagaccctgaaacacactcagcagtggccccgcaaacacacaagaattgacttctggaaaaaatgccatgaaatttttaagaaaaactccatttccaacagggcagcctcttccttcttctccagtcaggtccctgtggtgagtgagcaccccactgagc

SEQ ID NO: 2010 - DNA, 303 bp, Cricetulus griseus
  misc_feature (110)..(110): n is a, c, g, or t
  misc_feature (220)..(220): n is a, c, g, or t
  misc_feature (294)..(294): n is a, c, g, or t
aaatggccaatttaagccgctgcaacctcgcacatgcaaatctctgctgtgctaatcttgaacgagctgatctttctggatcagtgctcgactgcgcaaatctccagggnagtcaagatgctctgctcaaacgcagaaggcgcatccctgaggctctgtaattttgaggatccttccggtcttaaagccaacttacagggtgctaatctgaaaggcgtanatatggaaggaagtcagatgacaggaattaaccttcgagttgccaccttaaaaaatgcaaaactgaagaactgnaatctcaga

SEQ ID NO: 2011 - DNA, 133 bp, Cricetulus griseus
  misc_feature (55)..(55): n is a, c, g, or t
  misc_feature (71)..(71): n is a, c, g, or t
  misc_feature (92)..(92): n is a, c, g, or t
  misc_feature (99)..(99): n is a, c, g, or t
  misc_feature (127)..(127): n is a, c, g, or t
tcttcaaggtaagtagatgggcatcggtggcgtcctcggcctcctctggttccanagacggttacctaagnattcctgccaggcacattganatgtgtntgatggtgacagctgatcacgggccatnctgtgt

SEQ ID NO: 2012 - DNA, 441 bp, Cricetulus griseus
  misc_feature (16)..(16): n is a, c, g, or t
  misc_feature (27)..(27): n is a, c, g, or t
  misc_feature (42)..(42): n is a, c, g, or t
  misc_feature (48)..(48): n is a, c, g, or t
  misc_feature (60)..(60): n is a, c, g, or t
  misc_feature (131)..(131): n is a, c, g, or t
  misc_feature (140)..(140): n is a, c, g, or t
  misc_feature (143)..(143): n is a, c, g, or t
  misc_feature (167)..(167): n is a, c, g, or t
  misc_feature (181)..(181): n is a, c, g, or t
  misc_feature (203)..(203): n is a, c, g, or t
  misc_feature (224)..(224): n is a, c, g, or t
  misc_feature (263)..(263): n is a, c, g, or t
  misc_feature (278)..(278): n is a, c, g, or t
  misc_feature (293)..(293): n is a, c, g, or t
  misc_feature (305)..(305): n is a, c, g, or t
  misc_feature (307)..(307): n is a, c, g, or t
  misc_feature (356)..(356): n is a, c, g, or t
  misc_feature (367)..(367): n is a, c, g, or t
  misc_feature (411)..(411): n is a, c, g, or t
  misc_feature (420)..(420): n is a, c, g, or t
gacggaaccaaccagngggagctgganaaacagctcagcagntaaaantacctgctgttnttccctaggacctgagctgggtcctcaacacccacattaggcagctgtaaccccacctgtacctccagctntcagggatntancacccttttttaccctccaccaantactcacacccacncatacaaataagtaatattatntttttaaaaaaaataatctantttaaccctttgactttatagctcaggaaaaactgaaanaacggggactatacnctgatacagtcaaanatggggcccggntntttgccagccaggcaaagcgtttgccatgcaaacctaagtacctgatgngatccccagtncccacaaaaaagctgagcacatagccggacagacacctgcacgngcacctgcntatacatacatacatttacac

SEQ ID NO: 2013 - DNA, 191 bp, Cricetulus griseus
  misc_feature (88)..(88): n is a, c, g, or t
  misc_feature (98)..(98): n is a, c, g, or t
  misc_feature (138)..(138): n is a, c, g, or t
  misc_feature (164)..(164): n is a, c, g, or t
  misc_feature (169)..(169): n is a, c, g, or t
  misc_feature (171)..(171): n is a, c, g, or t
  misc_feature (173)..(173): n is a, c, g, or t
aaaaagccagctctgagggtggtgcatccacgggtgctggcctggactcgctgcacaagaacagcgtcagtcaaatctcggtgctcancgggggcaangccaagtgctcgcagttctgcactacaggcatggtatggnggcatgagcatctgggatgtgaagancttgnantnagccttgaaggacctgaa

SEQ ID NO: 2014 - DNA, 394 bp, Cricetulus griseus
  misc_feature (193)..(193): n is a, c, g, or t
  misc_feature (361)..(361): n is a, c, g, or t
tttgcaacctaggctgattaaacctgcctattttattttcccattaaatcgacattaaaggaggacattgttttatagtaaatgtttgcacagtacccacaacagcccaggctaacttcaaaatgacatacatccctcaggctaagttgaaataaagctgcttatctgaccccgtaagaaatcaggagcaganaaaacagttggtaaggtgcttaattctagcataaaaattaaagcaattgtgatttttaaatcacattattcacataattgtttttggttttgctttttctttgtagtgctggggatgaagcccaggaccttgaacatgctagctagtgttccacccccacactatgtntgactttctaaactactgtggttttgtctagag

SEQ ID NO: 2015 - DNA, 551 bp, Cricetulus griseus
  misc_feature (455)..(455): n is a, c, g, or t
  misc_feature (465)..(465): n is a, c, g, or t
  misc_feature (550)..(550): n is a, c, g, or t
tgtgtttttaaaaggcaagtatgaatctttttaaaggctaaccaccgtgggcatagtttcctctaacattaaactgcagactccccccaaacccttatctagtagatacctgaaatgtgcttccccatgtttgaaacttcagattgcttacaaattaaagtttaatgtataactatggtactctaggttaactaaaataaaacagaacagtcaatactataataaaagttatatgaatctcaacatctaattatgctgtatttacccttctcatgagatgacccaacgtctataggagatgaagtgagcaaggtgttatgtcatatcactggtgattacgcaagggtcacctgcacacagcatggcagtacctggatgtccctatgataattaagatggctagtgagtggctgtcgagagggcagcatgtgcagtgtggatagctcatgtctcangaaagacaangtttcatgacattgctgagattgtctgcattttacagttagtcttttcacttgactttttataactgaagtcactgaaaagggang

SEQ ID NO: 2016 - DNA, 599 bp, Cricetulus griseus
  misc_feature (11)..(11): n is a, c, g, or t
  misc_feature (37)..(37): n is a, c, g, or t
  misc_feature (118)..(118): n is a, c, g, or t
  misc_feature (193)..(193): n is a, c, g, or t
  misc_feature (200)..(200): n is a, c, g, or t
  misc_feature (241)..(314): n is a, c, g, or t
  misc_feature (321)..(395): n is a, c, g, or t
  misc_feature (400)..(420): n is a, c, g, or t
  misc_feature (432)..(478): n is a, c, g, or t
  misc_feature (481)..(554): n is a, c, g, or t
  misc_feature (563)..(582): n is a, c, g, or t
  misc_feature (585)..(598): n is a, c, g, or t
taggggcgaantgggttaccggggcccccccttcggnggttcggacccacggcgttccgggtagggaactggccctttaacatttttaatttcggggcaggaacttgggccaacacanggggcttttcttgggaggatgatacaaatcttttaacgtgaattgttacagctcatggcattcgttataattttncttcatnagtaatacctctcaataaattggcgggtttggggaattgannnnnnnnnnnnnnnnnnnnnnnnnnnnnnnnnnnnnnnnnnnnnnnnnnnnnnnnnnnnnnnnnnnnnnnnnncaccttnnnnnnnnnnnnnnnnnnnnnnnnnnnnnnnnnnnnnnnnnnnnnnnnnnnnnnnnnnnnnnnnnnnnnnnnnnncaggnnnnnnnnnnnnnnnnnnnnnagcttcggtagnnnnnnnnnnnnnnnnnnnnnnnnnnnnnnnnnnnnnnnnnnnnnnntgnnnnnnnnnnnnnnnnnnnnnnnnnnnnnnnnnnnnnnnnnnnnnnnnnnnnnnnnnnnnnnnnnnnnnnnnnncgtctgatnnnnnnnnnnnnnnnnnnnnctnnnnnnnnnnnnnnt

SEQ ID NO: 2017 - DNA, 579 bp, Cricetulus griseus
ctccgggtccctcactgaacctgaaggtggctgattggctcctggagattggcactttccttgaccatcctggaactcactatgtaaatcagggtggtctcgaactcagagatttccctgcctctttccctctgagtgctaagcttaaaggatctctggcccaggaagcaaccgcagttaagcagtcacacatgggcgctgcagcaagtgaactgaggtgcatccagaaaacatagattcaggaccagagacataaagtcacccgggagccgagccaggaaggtctgagtgggaagcagtcgccccccactcccattgccaccctgtggaaaggccagctttgcttgggcttccatcctgattgatgtggacgtctctacctgggggatgaatgcaagggacacaaaacgaactggtcacctataatctgaacagcttccccagaaagcccgtgacatataaagaggaagaacacacccattgtcatttaatgtcattccacacagtggctgagcacataccatatgccagacattggccaagctgtgtggggaatcaaagttgggtaaaaacatgttc

SEQ ID NO: 2018 - DNA, 246 bp, Cricetulus griseus
aacaaaagaattatacatagaaagccattctcttcaaaccacacagaatttgctatttgtttgtttggcaatgtttatattggcaaaaatgtaaggataaataaagccatcctacctacacacaaattgagtcagtatatattttgagcagtgaaatttttcttttaaaattttttacactgtgcttctgattggcacatcatataaactgcctcttggtaaagtgaatgttcgagacttttcttt

SEQ ID NO: 2019 - DNA, 156 bp, Cricetulus griseus
  misc_feature (15)..(15): n is a, c, g, or t
  misc_feature (32)..(32): n is a, c, g, or t
  misc_feature (102)..(102): n is a, c, g, or t
  misc_feature (121)..(121): n is a, c, g, or t
  misc_feature (124)..(124): n is a, c, g, or t
  misc_feature (150)..(150): n is a, c, g, or t
cagctactccagganaagtggagacattgganctgctgctgatagtgtaagcttttccatgccacggttgctgggtgtttgtccttcctgaggtgaggccancagtgttcctgggagtgtncantctggacacaagtgctgagtcaccantatttt

SEQ ID NO: 2020 - DNA, 279 bp, Cricetulus griseus
  misc_feature (158)..(158): n is a, c, g, or t
  misc_feature (186)..(186): n is a, c, g, or t
  misc_feature (206)..(206): n is a, c, g, or t
  misc_feature (239)..(239): n is a, c, g, or t
  misc_feature (249)..(249): n is a, c, g, or t
  misc_feature (252)..(252): n is a, c, g, or t
ctgctggcgggagaggctgcaacgccgatgtctgaggagcgatgccgagagaaatcatcaccctacagttgggccagtgcggcaatcagattgggttcgagttctggaaacagctgtgtgctgagcatggcatcagccccgagggcatcgtagaaganttcgccaccgagggcactggaccgcaanggacgtcttttttctaccanggcagacgattgagcattacattcccttcgggnctgtggctgnctnggaccctgggaagcccccccggggtgg

SEQ ID NO: 2021 - DNA, 546 bp, Cricetulus griseus
  misc_feature (407)..(407): n is a, c, g, or t
  misc_feature (424)..(424): n is a, c, g, or t
  misc_feature (478)..(478): n is a, c, g, or t
  misc_feature (495)..(495): n is a, c, g, or t
  misc_feature (498)..(498): n is a, c, g, or t
  misc_feature (513)..(513): n is a, c, g, or t
  misc_feature (530)..(530): n is a, c, g, or t
taatcgcttggtaccttcaaaaggaaatggagtaagaaaattctgtgatatccagatccgaaggttacggaggttaggcattgaaaagactgaccccaccacactgacggatgacgagataatcagatttgtaagactggaaattgatccagaaaccataacgtggcagagagtgctggacaccaatgatagattcctgaggaagatcactattggacagtctccaacagagaaaggccacacacgcacggctcagtttgatatctctgtggccagtgaaattatggctgttctggccctcactacttctctgaaagatatgatagagagagtgggcaaaatggtggtggcatccagtaagaaaggcgaacccatcactgttgatgatctgggcgtgagtggagcantggcggcgctgttgaangatgcaatcaaacccaatcttatgcagaccttatagggcacaccggtgtttgtncacgctgggccctttgncancattgcacatggganttcctccattattgcanaccggattgcactcaa

SEQ ID NO: 2022 - DNA, 579 bp, Cricetulus griseus
  misc_feature (38)..(38): n is a, c, g, or t
  misc_feature (377)..(377): n is a, c, g, or t
  misc_feature (470)..(470): n is a, c, g, or t
  misc_feature (509)..(509): n is a, c, g, or t
  misc_feature (530)..(530): n is a, c, g, or t
  misc_feature (545)..(545): n is a, c, g, or t
  misc_feature (550)..(550): n is a, c, g, or t
tcagggaaagaaggggttcttgtggtccagtccatcanggtgagacaggaacactaggcaatagatcacatggcatgggtgatcaggaagtagagagagtttagtcctggggctcagttcactttcttctttgtattccgccctggagcccatgggacagggcgggtgactcctacagtggatcttcccatttcatctaatctaatatacatatgtgttcagtcacgctcagagtttggtctcctctgtgaagccagctactgccaagttcacaatatcagccatcactatgaggggaggtgtccaacaaaatgacagttggaaagaccaaactctaaggaaagagaagcaacaatagccattcaaatgtggtgtancttgcagcagctacatcagaagccaaaagaaagaccttttccacgcaccccgccctaaattttcagtgtcttcatgattcattctgaaaaganatgtcggggagggagcaatcctggaggtagtggcacaancctcccccccatgttgagcantgtctctttttgtancccangacagcttgtgggctcagcatcccaagta

SEQ ID NO: 2023 - DNA, 467 bp, Cricetulus griseus
  misc_feature (5)..(23): n is a, c, g, or t
  misc_feature (36)..(36): n is a, c, g, or t
  misc_feature (43)..(62): n is a, c, g, or t
  misc_feature (69)..(69): n is a, c, g, or t
  misc_feature (139)..(139): n is a, c, g, or t
  misc_feature (250)..(250): n is a, c, g, or t
  misc_feature (265)..(265): n is a, c, g, or t
  misc_feature (295)..(295): n is a, c, g, or t
  misc_feature (298)..(298): n is a, c, g, or t
  misc_feature (374)..(374): n is a, c, g, or t
  misc_feature (427)..(427): n is a, c, g, or t
  misc_feature (456)..(456): n is a, c, g, or t
ttatnnnnnnnnnnnnnnnnnnntcccccccttcgnagtcgtnnnnnnnnnnnnnnnnnnnnaccaggnatatcatggacccacacaaaagcagggctcattaagggcttacaggaggactggaagtgacaatcgcagnagcttgcatggggaatgtgctaggtcctctgtatatatgctgtggtcctttagcctgggtaacagtggggtctctgacccttttgttcctagtgggttgctttgctatgangctttttgctatgangttttattgcatgttgttagatatctccangangcctactcttttctgaagagaagtgtatatgggggagaggaaaagtgtgtggggaattaaactgggaggagtgganggagggaaactgcagtcccaatgtaacatatgagaaaagaataactaaaaagnaaaaaaaaaaccttaaagtatgacatagntaacatgcccc

SEQ ID NO: 2024 - DNA, 279 bp, Cricetulus griseus
  misc_feature (9)..(10): n is a, c, g, or t
  misc_feature (81)..(81): n is a, c, g, or t
  misc_feature (207)..(207): n is a, c, g, or t
  misc_feature (227)..(227): n is a, c, g, or t
  misc_feature (242)..(242): n is a, c, g, or t
  misc_feature (246)..(246): n is a, c, g, or t
  misc_feature (253)..(253): n is a, c, g, or t
aatacacannaaagcaagaaaatgagcatcttactcaggaacattctagaatgtggcaataaggatgggggagggaaacantttcccgggctggttcgcaggggaaccctggctcaaggtctggttctgggaatccatggggtagaagtgacttcttgcaaatgggtcacgctactacgcatatggtgcatgtgggtggaacataantgtgacttttgcctcttttnagaggtcaggtttgntganaggtttnaaatgacctggaaagtccatccaatg

SEQ ID NO: 2025 - DNA, 512 bp, Cricetulus griseus
  misc_feature (266)..(266): n is a, c, g, or t
  misc_feature (293)..(293): n is a, c, g, or t
  misc_feature (343)..(343): n is a, c, g, or t
  misc_feature (431)..(432): n is a, c, g, or t
  misc_feature (507)..(507): n is a, c, g, or t
catgtggccctctcaaggtaatttattttacgcatttactgtttaccgaacaaatgtctgactgtgcccgggtgacactgccctccaggggagaggacctttctcagctcatcactgcgatttgcacattgccccacgggacactcaggcctgcattctgtcccctggacgtggaaacattctgaaccggtctctctccctctgctgtgttcagacagaagcttgattgagtcttgagtgacaagcttggaatggttgtggctcanacatcgacctgcccaggaacaccaggncgtgtctagccgacaccttgatgccacaagcatgctccccctctgccgangtctatcggtctatcgggatggtgtgtggccagggggcggagctgaatccctcacacacctttcccactttcttcttgttaaaatccnngacaactcgaaactgaatctccccgaactctacttatctgatgaagtggtgggaccctctcaagttttcttttcntctgg

SEQ ID NO: 2026 - DNA, 412 bp, Cricetulus griseus
  misc_feature (190)..(190): n is a, c, g, or t
  misc_feature (225)..(251): n is a, c, g, or t
  misc_feature (337)..(337): n is a, c, g, or t
  misc_feature (375)..(375): n is a, c, g, or t
  misc_feature (406)..(406): n is a, c, g, or t
taaactgcatgtgccgcgccctataagacctttgacctccgcacccaagcgtcgtctggtgtccccgtgggacccagcccctcccagcgtcccgaatgctcttgaggaggaccagagtgagggcagcaagagctactcagcaacaatgtcttcagaagtggagacctcggaaggggtagatgagtcaganaaaaagaactctgtggccccagagaaggaaaatcnnnnnnnnnnnnnnnnnnnnnnnnnnntcctaaaggaagggaccaaggaagcacacgaccgggcagaaaatacccagtttgtcaaagacttcttgaaaggaaacattaagaangagctattttaagcttgccactaccgcactttattttnacatacctcagcccttggaggaggaaatggnacccga

SEQ ID NO: 2027 - DNA, 492 bp, Cricetulus griseus
  misc_feature (429)..(429): n is a, c, g, or t
  misc_feature (438)..(438): n is a, c, g, or t
  misc_feature (482)..(482): n is a, c, g, or t
aaatgggagtacactaaataagcagtaaattttgattcctttttcatgtatcttttgatagctatcatgaagaacagtgtaacagacagtaaaacaaaaccatggctgataaataataaaaatggaggttcaagggcaccatagatcttctatattttattaggtgatgcttgaaatatatttataaccatatctagttttaaatagctgcccaaaaagtaacctagggaatgatttaacctacatggtacttttaataaaacttccccagatgtcctatggtgattttgatgttccctgagaaaagaacagcctcaagtctcgggggcatctgtagaagaggtacagctggaactatctctaatttaacaaaataataataacagtaaaacatgttttctaatgaaaaacatgagatgatatattcanaaactctantagtggctatttatgaatcaacccctatagacctcattgggctnaaacagtaaa

SEQ ID NO: 2028 - DNA, 555 bp, Cricetulus griseus
  misc_feature (306)..(306): n is a, c, g, or t
  misc_feature (433)..(433): n is a, c, g, or t
  misc_feature (453)..(453): n is a, c, g, or t
  misc_feature (496)..(496): n is a, c, g, or t
  misc_feature (505)..(505): n is a, c, g, or t
  misc_feature (537)..(537): n is a, c, g, or t
ctatattaatcactttctttgtaatcccttcacagtcccaggtttagtgaaaaactgctgtaaacacgggggacacagtttaacaatgcaacttttaatgactgttttctttttccttaacctactaatagtttgtggatctgataagcaagggtgggtggctgagaaaaactctgtgttgggcttaatcagtcactacatccaaaccctaacaggtcaccctggtgaccagggcattcgtataagaaaagcattgtatgtgactctgtgcagcacccccagatgccaccctactctgatcatagngaatcttctgcttaggacaccaaagataagaattagatactactctcctttgtgtataatcttgtagacacttacttgatttttttgtttttttactttttaattctaaacgatacaaaatgctggngtatctatcttttcattcanccagcaaaccagaattagattatgctcattttttttcaaaaanggaagtaancaaaataataaatattgactcctgtgtttatnggctcacacacacacaca

SEQ ID NO: 2029 - DNA, 577 bp, Cricetulus griseus
  misc_feature (105)..(105): n is a, c, g, or t
  misc_feature (234)..(251): n is a, c, g, or t
  misc_feature (284)..(299): n is a, c, g, or t
  misc_feature (400)..(400): n is a, c, g, or t
  misc_feature (509)..(534): n is a, c, g, or t
  misc_feature (566)..(566): n is a, c, g, or t
agcgtgcagccgtcatggtcagccacctgcagctcaacaacggcgccaagtatgcccatcctgggcctgggcacctggaagtcccctcccggccaggtgactgangccgtgaaggctgccattgacattgggtaccgccacattgactgtgcccaggtgtaccagaatgagaaggaggtgggaatggccctccaggagaagctcaaggagcaggtggtgaaacgccaagacctnnnnnnnnnnnnnnnnnngtggtgcacgtttcacgacaagagcatggtgannnnnnnnnnnnnnnngacgctcagtgacctgcagctggactacctggacctctaccttattcactggccaacaggtttcaagcccgggcctgattacttcccactggacgaatcangaaatgtgattcccagtgagactgattttgtggacacttggacggccatggaacagctggtggatgaaggtttggtgaaatccattggtgtctccaacttcaaccctcnnnnnnnnnnnnnnnnnnnnnnnnnncccggcttaaaatataagcctgccggttaatnatattgaatgc

SEQ ID NO: 2030 - DNA, 398 bp, Cricetulus griseus
  misc_feature (225)..(260): n is a, c, g, or t
  misc_feature (313)..(313): n is a, c, g, or t
  misc_feature (351)..(351): n is a, c, g, or t
  misc_feature (378)..(378): n is a, c, g, or t
atggacagaaatttagaggtgcaggtccaaacaagaaagtggccaaggcaagtgcagcactagctgccttagagaagttgttttctggacccaatgcagcaaataataagaaaaaaaagatcattcctcaggcaaagggtgttgtgaatacagcagtatctgcagcagttcaggcagttcggggcagaggaagaggaactctgacaaggggagcgttcgtggggnnnnnnnnnnnnnnnnnnnnnnnnnnnnnnnnnnnnggaacaccatatggttacagcactgctgcccctgcatatggtttgcccaaganaatggttctgttacccgttatgaaattcccaacatatnctgttcccccactactcattcttttanttaaatgacagaagcttatt

SEQ ID NO: 2031 - DNA, 522 bp, Cricetulus griseus
  misc_feature (122)..(122): n is a, c, g, or t
  misc_feature (249)..(249): n is a, c, g, or t
  misc_feature (367)..(367): n is a, c, g, or t
  misc_feature (403)..(418): n is a, c, g, or t
  misc_feature (484)..(484): n is a, c, g, or t
  misc_feature (493)..(493): n is a, c, g, or t
  misc_feature (511)..(511): n is a, c, g, or t
gaggcgcgatggcaggtgtaggggtcgagcggctgcaggcgatggtgcgatttacgctgctggtgctcactgtgtgtgctgcgggtgcccatgggctctatttccacatcggcgagactganaagcgttgcttcatcgaggaaatacccgacgagaccatggtcatcggcaactatcgaacccagatgtgggacaagcagaaggaggtcttcctgccctcgacccctggcctgggcatgcacgtagaantgaaggacccggacggcaaggtggtactgtcccgacaatatggttccgagggccgcttcaccttcacgtcccacacacccggtgaccatcagatttgtctgcactccaactccaccangatggctctcttcgctggaggaaaactgcgtgtacnnnnnnnnnnnnnnnntggggagcatgccaacaactaccctgagattgctgctaaagataagttaacagagctgcagctttnagctcgacntttgcttgattaagtggnaacagatccag

SEQ ID NO: 2032 - DNA, 326 bp, Cricetulus griseus
  misc_feature (114)..(114): n is a, c, g, or t
  misc_feature (189)..(189): n is a, c, g, or t
  misc_feature (246)..(246): n is a, c, g, or t
  misc_feature (289)..(289): n is a, c, g, or t
  misc_feature (325)..(325): n is a, c, g, or t
ggtaagtgtgtgctgtctgagcatgtgcagatggaggagaagtgtgggggcttggtggggatccagaccaagatcgtgcaggtgtcagcaatggaggatgggaccgtcatcaangataccaatgtggtgctggagatccccgctgccaccaccattgcctgtggcatcatcgagctgtatgtgaaacangatggccagtttgaattctgtctcctccaagggaaacatggtggctttgagcatganaagaaagttgactctgtctacttggaccccctggcctacaganaatttgcattcctggacatgccagatgggggtcaana

SEQ ID NO: 2033 - DNA, 324 bp, Cricetulus griseus
  misc_feature (23)..(23): n is a, c, g, or t
  misc_feature (60)..(60): n is a, c, g, or t
  misc_feature (142)..(169): n is a, c, g, or t
  misc_feature (204)..(204): n is a, c, g, or t
  misc_feature (236)..(236): n is a, c, g, or t
  misc_feature (309)..(309): n is a, c, g, or t
acaaagaagtggatatcctcggnatattggttgtgtacattttaatcccagtactcgggnagtcagagtacaagtgaatccatgtgagctcgaggccagagagttctaggccagctagggctgcatagtgaaaccctatttnnnnnnnnnnnnnnnnnnnnnnnnnnnnataccttattaaatttagactaagcagaaaggaantgggaggagttgtttgagaaagaacaagaaantggcctcagggacataacactgttagacctgcctttcttcccacagctcatgtgcatgtaaccttgctccatngctcctctgtactgg

SEQ ID NO: 2034 - DNA, 277 bp, Cricetulus griseus
  misc_feature (120)..(120): n is a, c, g, or t
  misc_feature (129)..(129): n is a, c, g, or t
  misc_feature (164)..(164): n is a, c, g, or t
  misc_feature (181)..(181): n is a, c, g, or t
  misc_feature (238)..(238): n is a, c, g, or t
  misc_feature (263)..(263): n is a, c, g, or t
ctctggggaagctggaccgccccctctacagagttggcacagaaggcccagctcattaattcccaaggatggggaggccaggtctccactggagtaactctccgagggaccgcagcccanacacagggnatgaaactgttaggtcatgggggtcccagcttaanggggtcagccaccccangctggtaagggcagtgtggcccactctcaaggtgagggaccttctgcggagccctanggctggaattaaacccccggggctnagggggtattggag

SEQ ID NO: 2035 - DNA, 409 bp, Cricetulus griseus
  misc_feature (173)..(198): n is a, c, g, or t
agcaaacttgagacggctgaagcgcaggaggaagaggcgagcgtcagagctgcccgcgcagagctgctgctaaccgaggaacctgggttcctggagggagaagatggggaagacacagcaaagatactgcagacggacatcgtgggggctgtggacattgcaagtgctgccannnnnnnnnnnnnnnnnnnnnnnnnntttgggccctacagactgaactactctaggacagggagacacctggcattatgaggtcgtcggggtcatgtggctgccctcgattgggtgacaaagaagctcatgtgtgagatcaacgtcatggatgccgtgcaggacatccactttctccattctgaggctctgctcgctgtcgctcagatccggtggctttacatctatgatcaccagg

SEQ ID NO: 2036 - DNA, 600 bp, Cricetulus griseus
  misc_feature (4)..(22): n is a, c, g, or t
gacnnnnnnnnnnnnnnnnnnngggcacttccgcgggggagcagccggagagggagccatggggacagtgcacgcccggagtctggagcctcttccatcgagtggacctgactttggagctttgggagaagaagctgagtttgtggaagttgaacctgaggcgaaacaggaaattctggaaaacaaagatgtggtggttcagcatgttcattttgatggacttggacggactaaggatgacatcatcatttgtgaaattgaagatgtttttaaggctaaaaacctcattgaggtaatgcggaaatcacatgaaacccgtgaaaaactgcttcgcctaggaatttttaggcaagtggatgttttgatcgacacatgtcatggtgatgatgcactgccaaatggattagatgtcacctttgaagtgacagagttaaggaggcttactggcagttacaacaccatggttggaaacaatgaaagcagtatggtacttggcctcaaactccccaatctcctatgacgtgcagaaaaagtgacttttcagttttcatatggaaccaaagaaacttcctatggcctgtcattcttcataccacagct

SEQ ID NO: 2037 - DNA, 414 bp, Cricetulus griseus
tgaagtacagcttgtgtgatttcattttctggattggagattgttgaatggagccagaccttttgagaaagtctagaagatttaaaaagaagaacttagggaaggtgaaatagtttttttaaaaaaaaaacagatataattaagttcatatgcaaatctaaatagaaatgtaaatgactataaactctgtgataagcactaaaaacttcttgagtgggtgtggtggcttggtggtaaagggccttgctaacaggcctgatgatatgagtgccatcccgggacccacatggctgaagagaactagttcccacagttgctctctgacctccacacagggctgtgtggtgagcagttgatgctgtcttctctctgggtgggctctgggcctctgacttaggaagtccacttttgtgg

SEQ ID NO: 2038 - DNA, 519 bp, Cricetulus griseus
  misc_feature (199)..(303): n is a, c, g, or t
gagaaagtgggcattcttcaggaagctactgagaatctgacatgtctgggatgaaagatgggggaccatgtagaacatggtcaggtatacaaaagccagattaaagagagcacataagaaatatggggttccctctgtagacagtggaccaaaaggtctctaccacaagggttttcacaactaaatttgctgcattttnnnnnnnnnnnnnnnnnnnnnnnnnnnnnnnnnnnnnnnnnnnnnnnnnnnnnnnnnnnnnnnnnnnnnnnnnnnnnnnnnnnnnnnnnnnnnnnnnnnnnnnnnagaagaaaagtaaagaaaaaatatttgggggagagagaagaaaagtctgagagattgccataaactacagtttcacctttgacattggcagacacccatcctcaagaaggacaaagcctggaccctgcttctgcctctcatggacctgcagatgaatggggccttcttcattataaatagaaaaagaagctgcggctggaattgcagacaacaagg

SEQ ID NO: 2039 - DNA, 579 bp, Cricetulus griseus
gaacactactgcctagtacaaatcggtgacaataacagggtgtgccttattttgatacttggctccttttcattaggaggaccctcgttttttgtaagcactactgaccctgctgtatttaagatgctctcatgttaagtgtcaagatgtttgctttcttgttcttatgtattatttctgaaagtattttaatcaaaagtaaccctttgaagtttttataaaacgatgaccaaagtttctcttttgccaaaagttaaatacaaataaaatgttcacaagtctgtccctcatagataatttcaagtaagtgccaaaagtaactcaaggtgcccttgaagaaacagtgttaatacagtgtgagccttcgacattttcacagtccttcccataaaaatgctgtagataatgctgctcctccagacttggtttctcccatatagctatggaggtgagctgaactcgcgcctgtagatgagacgtttataagctatggcctccagcgcactgtgagcagcagctcggcagtctcacatcaaagctcttgaatgctatttactgcttctacccgtactccacttc

SEQ ID NO: 2040 - DNA, 467 bp, Cricetulus griseus
cttgataggggtgtatactgccttgataggggtgtatactgccttgataggggtgtatactgccatgataggaatatatacgtgtacacccttgaagtttgagtcaaaaggaacccttctttcctttttagatcctttttgtcaggttgtcttaccccaacaacacagaagttaacaaagacagagaagtgttgcacagagagaatgaggatttagggtaagtcagatggtctaaaacaaatacttgtatctttgagccaagggacaaaaagacgttttaatagagttaaagaggaattttccttggcaaaccctacgtagtagaaagttcaaagagcctcaaatagaaacaaatatccctcacacatacctagtggttgtgctaaaagccaacaatgaagagaaatgctggaaacaactagattaaaggagacatacgaagaaacaaagttgaaaactacactggg

SEQ ID NO: 2041 - DNA, 331 bp, Cricetulus griseus
attacatagtcataagagaaatgtgttcttggttttgttcttgtttccttttttttttaattttgtttttaatgaagttgtggtattattggttctacgctccctaaaacaacattctgctttgtggaaatccagactgaacgcagcaccctccctctgtgtacctagtgtgtttatcagcccggggctctcactacttgatattttttccattagttaagacagaaagatggtagctcattcagtaggggaggggaaatctgctgctaggtatgtctgaactaagtgccatacttgtctgggtcagatttgggaaacaacctctgtacat

SEQ ID NO: 2042 - DNA, 193 bp, Cricetulus griseus
tagaggccatcagcagcagtagaggcccagcctcctcctggtccccagcaagtgtgagctctgataacacaaaggagacaggaggctatggggcgaaaagcctaggctagagaaggatcactggctggagagaaaagcacttatggttctggcacactgcagaccttccctgctacccttacactcaccattg

SEQ ID NO: 2043 - DNA, 582 bp, Cricetulus griseus
ctgtaaaatcacaccccaacaccggagacaactcaactgaaatgcaaccccggagctctctgcatcacttacaggacactgcctgctgggcagcgcctccacttcagcagcttgtttgttgtctctgtaaagctggatctggcacatttcagctttcccagacatcggaacagtagaacattatctccaagtctcatgagcctcctgccctacccaggaggtaatgcttcaatcccagggaaactgccattaccctgttcccttaattgatttcttggtgttgttgagacagggtctctgaacataagccctgactttcctggaactcactatgtataccagggtagactgctaactcacagggatcctcctgcctatgcccctcatgctgggattgaaggttgtaccacctttcctgcctctttattgaatttctgtctcaaaggtgcttaatctttgagaccccttgtttggtggtggggggtggttgtaatggctcactgggtaaaaggacttgctgtgtaaacctgccgatctgagttcagtccctcaaacccctgtcaaggggggggagagacccag

SEQ ID NO: 2044 - DNA, 578 bp, Cricetulus griseus
ggtgtcattgtccataacaaagcagcagaaaatgtagcacagttgcttagtgtgagcacctcacttcccaaagacctgaattcaaatttggatagtcctgaatgcttaaatccctaaagaacacatggttattctttgtatgtatttcatcctaaaacatgttggtgtttgttcagagaccctggttgagaagagttctagataataaggtcatatatatgaaaaatgtctactgttgcgccagctagtgcttaacaatttcattcaagcccctaagtatgtgctctgctgttggctttctttggcatttgaacattgaattcagttttttacttggtttttgaagtataagcaaaacaagcaataaaaaggggaatggggcgcgctagtgtttgaatatgctctcttgttgctctaattctgtgcctctgtgcattattaatatttgaatgcatgcaatgctagcatgggactttggtcttcacaaatactgcaggttttccagaaaacactcacaaaacaataaatgtgatagacaacattccatttgttaaaggggctatgtgaataagcacggc

SEQ ID NO: 2045 - DNA, 494 bp, Cricetulus griseus
  misc_feature (490)..(490): n is a, c, g, or t
ccgccggggtcggtgaaggatcccaagatggccgggcgtaaacttgccctaaaaaccattgattgggtgtcttttgtggagatcatacctcgaaaccaaaagacaattgcaaactccctgaagtcttggaatgagaccctccacaccaggttggctaatctgcctgagaaaccaccagcgattgactgggcttattacaagaccagagtggccaaggctggcttggtggatgattttgaaaagaagtacaatgccctgaagattccagtgcctgaggataaatacacagccctggtggacaatgaggaaagggaggatgtgaagaactgtgctgcgttcctgtctgaatcccaggacaggatccaggaatatgagaagcagctggagaagattaagaacatcatcccctttgatcagatgaccattgatgacttgaatgaagtcttcccagaaaccaagctggacaagaagaagtacccctactggcctnacca

SEQ ID NO: 2046 - DNA, 580 bp, Cricetulus griseus
  misc_feature (2)..(14): n is a, c, g, or t
  misc_feature (181)..(193): n is a, c, g, or t
  misc_feature (195)..(212): n is a, c, g, or t
  misc_feature (561)..(561): n is a, c, g, or t
tnnnnnnnnnnnnnttaatttgctaaggtactgactgctaactaatttcaaagatttttacaaaaaacgtagagccaacctggtagtggtgtatgcctgtgatctcggcactggggaggcagaggtaggcaaatctgcatatagtgagaacatattttagagaagcaatctcaaattgtcnnnnnnnnnnnnngnnnnnnnnnnnnnnnnnngctttatgttttgagccaaggtctcactatataggcctggcctggaactcattatgtagactaggatgaccttaaactcatggggatccatctgcctcagcctcccaaatactggaaccaaaggcatgtaccaccaggtctggctgcaaattgacttttaaaattaactacctaatttgttttgggccacttacatattagtttctgtacatctctaaaagagtgacttttaaaatctataaaatgttaagtttaagttttgggttgttggggcagtagttacattgtgactctcacatccgccttagttaagtgcatcaccagtcaatagaatgtctgcagggcttanatgtaccaacagatagctc

SEQ ID NO: 2047 - DNA, 371 bp, Cricetulus griseus
tgaccagtcgaactggatttgtcccactgaacatgtctctttaactaactacagttttcttacctccatattttaatagttaggaatattaagaatatttgtggcatggttttgcatctacaaaattatctcatttgcttgaatggtggcttgagtactcctaatgaggtatatggggcaaatgttagctctccaagtgaagaaattgaaacccataaatttaccaacttgcacccaaattggacagcgagtggtagagatttctaataccggggtttacgcattaaccctatttatctaaccaaatcgccgctcttattattttgcattccatctaggaatgatagaccgcgaaactaatttttagcacc

SEQ ID NO: 2048 - DNA, 580 bp, Cricetulus griseus
tgggcagggccaaggtcagtcctcagatgagagctcttctgctccatcctgtgtgcctcaagcacttgacttttctccaaacaagagtgaatctcctccttcccatggctccaccacagaggcagctcaaggtgaaacagagcctcatgaagacaacacaagccccactgagggtcttctcctggacatcaagctggaccaactcaccatcactcctgaagcaggaggcagagacctagctgaccgccctctcatagacttcagcaacacccctgagtccaacatggctttgggacccagcagctggcccctgattgaccttgtaatgaatactccagacatgggtagaaatgatgtggggaaacctccaaaagctgagcttgggcagctgattgacctgagttccccactgatccatctgagccctgaggctgacaaagaaaatgtggattcaccacttctcaagttctgagcaaagcacaactctgccctttactctgtttatttctgttgtggctttaagcccattagaagcaaatttgaaaggaactgtatttgattcggaggaggccttgtgtct

SEQ ID NO: 2049 - DNA, 327 bp, Cricetulus griseus
cattccatgtgctgtactcataggtcaaagccagactggatgttttcacctcagcgtctcatggctgtttcagtctctgtatgctctacaccccatttgtcatctctcttcctagactgtcaacagtagaagaaatgctagctgaagatgaacagttaacaagttatccataaggatccttgcgtttatgagatgtaagaatagcaacgcagccaggttccaccccaagccaggaccgggcctggcaagctgcaaggcgccttccttgatccttctgttacttaggctcttaaatggctcctcattcgttttgccttgagctgtcat

SEQ ID NO: 2050 - DNA, 579 bp, Cricetulus griseus
  misc_feature (440)..(457): n is a, c, g, or t
taaagagtgttatatctgagccatggggtattcccaccaaaaaatggttagaactgccaaggtataatcagttaagcagggaaggtattctttggctagcattagtatctttcaactgcagttgatgatgtgaatggctgtcatactcccttttcagttctctcactgctttctctgctgctagtgtgtgctttcctcccttctgttgcctatgtctccatcaggttttcgaagtggggcaggaattgctttgatgcgaaacccaacagtgttagagaatctttatgcttctctgttgaagaggttgggctgtgggagccctacccacaagtctctggcctcttagtccccagcactgtgtgacaaaacagttgacataacaactgaagagaggagaggttgattttgagtcatggtctgagagggttatttatagtccnnnnnnnnnnnnnnnnnnccatagaaatggtaccatgtggctgaagacttcatattgtgtggctggaccagatgcatatagacaggaagggggcttatagatccccaaggatatgcccccagtgactcacttcctccaac

SEQ ID NO: 2051 - DNA, 509 bp, Cricetulus griseus
gttcgaccccactgcgctccggggcagggaagggccttaggaaactaacatgctttcactactgagggggacggacggacggacggacgcactcgggtctcgctggcgctgttctgaaaccatctggctggctttctgaggtcaggctgggcgggggctgtcattggccgcgctgccgatcacactggccctcatccctccagcgatctcgcgctgttctgtaaattcctggtgctaacatcccatgccgctcccccgtggcccccccagccgcctgcccagtccagggctggtccaagaatgacgtgggggatggcctctgtgtaatgcgctggtgattttttccttcccctttatgccccttaaaattttaatttttgccccaaacatgccgggccaactaaagggtggtgagagggatttgattcccaccatgcccacaagaaccaacctgcagtaaacacttctgtgggccgccgcgcatagcacgccgcgggcacctactgccc

SEQ ID NO: 2052 - DNA, 404 bp, Cricetulus griseus
aacatgaccctgagttgagataaacccttatcacccctttaagggtcacgtgtgggaaggatggcaaataaatcattgttcaactccagggaaagtgtagagctatgcagacatgctaactgcccactgagaggttttattggctccaaatgctttttagttttgaagtagttgctggcttgaactagagatgttttcacacacaaacaaaaaccatgcatctcccgctgaatggcagctttaaagtggaggagttccagcccagattctctctcaacactattagtttgacattggggagcagatgtctgtgcccgctggggctggggcaggccagttctatcttattgccatccatgcttcttcttctactctcaaggctgcctccctctggctgtagtgtc

SEQ ID NO: 2053 - DNA, 200 bp, Cricetulus griseus
gtcgaccccgcgtccgtggaggtccccgacggcacccagtgtcaccgcaaaacctacatcaccactgccctcggcggcctcatcggcgccataggctcagcttacagcgtcgtactcaacccggcagattcccacgtgggaagcaatgggcccaggggcctgggcccggggtacaccgtgtcacttgcaagctggccatt

SEQ ID NO: 2054 - DNA, 506 bp, Cricetulus griseus
  misc_feature (457)..(483): n is a, c, g, or t
cagtgggtgtttgactgtgtgaatgcccggctcctcctccctgtggcagagtacttccctggggtgcagctgcccccacacctctcacccttcgtatctgagaaggaaggagattacattccccctgagaagctgaagctactggctctgcagcggggagaagatccaggagacttgaaagaagaagaggatgaagatgaggatgaggatgatgaagatgatgacaacgaaggtgatggtgatgtgggggaaaatgaggatgaggaagaagtggacgctgattcagagaaggaggaggaagcgcacctgtcggtcttggagcagcagaggctggaagggaagaagccccaggtggtggccggcactgtgaaactggaagacaagcagcggctggcccaggaagaagaaagtgaggccaatcgcctggccatcatgatgatgaaaaagcgggagaagnnnnnnnnnnnnnnnnnnnnnnnnnnnaagcggcgcaaaatccgtgaggc

SEQ ID NO: 2055 - DNA, 176 bp, Cricetulus griseus
cgcgctcgcagagcttatctcttctgtcgggaaactggcgtctcttcccttgctgttcctcagccccctctctcccccttgctttctcaccttctctgggaccactcacccaaagacctcccttctcccctgcccgcccacttatgggacaaaatgctgcggacactgacctcttg

SEQ ID NO: 2056 - DNA, 399 bp, Cricetulus griseus
  misc_feature (349)..(395): n is a, c, g, or t
taggaacgcgggtcttcccgctgttgctgtggggaccacgggccgaacacacgatcccggcctgaggtggtggtgggaagcccaccgcactttgctgcgacgtcatggagggtggcgggggaagtggcaacaaaacctccggcgggttagctggcttcttcggagcaggaggagcgggctactcgcactctgatttggccggcgttccgcgtgagtatcaggcctagcttgctacctctctctgtctgcttcctgggacagctagaaatgtgtagcattccttgtcccctttcttgctcgcgttcacaaggttcaccgtcagtgatggggtttccagactgaacggaannnnnnnnnnnnnnnnnnnnnnnnnnnnnnnnnnnnnnnnnnnnnnnagat

SEQ ID NO: 2057 - DNA, 581 bp, Cricetulus griseus
gatttgcactcaatcatccagagctggtagaaggtcttgtgctcattaacattgacccgtgtgctaaaggctggatcgactgggcagcttccaaactctcaggcttgacgaccaacattgtggacataattctggctcatcacttggggcaggaggagttgcaggccaatttggacctcattcaaacctacagactgcacattgcccaagacatcaaccaagaaaacctccagctcttcttgggttcctataatggacgcagagacctggagattgaaagacccatactgggccaaaatgacaacaggttgaaaactttaaagtgttctactttactggtggtaggggacaattcacctgctgtggaggctgtggttgaatgtaattctcgccttgaccctataaatacaactttgctaaaaatggcagactgtggaggactgccccaagtagttcaacctggaaagctcaccgaggccttcaagtactttttgcaaggaatgggctacataccatctgccaacatgacccggctcggccgatcacgaacccttccacctcgatagcattgggtctggaga

SEQ ID NO: 2058 - DNA, 450 bp, Cricetulus griseus
acctaggatggccaaagagctcctcaggaagcacagcttgggtcaagttcttgccttagttttaggggcagcagcgggaaggagggaacagggtgttctccccgggcctatttctgcccgagttccccagctccagggactctatttatctcccaagctgggagcctgctgtgaagggtagagcaagggatgcctctgtcacttgagttaactgagctgttcctttctactcccctgggaagaggtcctatggccttccctccctacgacaaggctggatggggcctggagcttgggaagtcagaaaatgaaaacagtcctggactcataggaggccccatccttttgctcactcactgggaaggtgggagaaggctttcctgtccttgtgtctgaggctacagagtagggtaggaccaagtcacccacactgtggtagctcccttgggg

SEQ ID NO: 2059 - DNA, 490 bp, Cricetulus griseus
accccaaccagcccctggtcatcctggagatggagagtggcgcctcggccaaggccctgaatgaagctttgaagctgttcaagactcattctcctcagacgtctgcaatgctcttcacagtggacaacgaggctggcaagatcacatgcttgtgtcaggttccccagaatgcagccaaccgaggcctaaaagccagcgaatgggtgcagcaggtttcaggcctgatggatggtaaaggaggtggcaaggatgtgtctgcccaggccacaggcaagaacgtgggctgcctccaggaagccttgcagctggctacctcctttgcccagctccgcctgggagatgtgaagaactgacaggagagaagccctcactgggaagcgtttccccatcaaacaaatgcgtcagaatgcaggagtgcacccatgagctcccctgccatgaagacatttgagtcttgggacctttcagtcggcctatccgtcctaatcca

SEQ ID NO: 2060 - DNA, 295 bp, Cricetulus griseus
gttcttgaaagaaaatggttgggattttggatgtgtctgcagacctgttaggaaatcctatttatgagtccagttggtattgtttgttatctcaaaaaatatcagatagtacctagatgtatgaagtctttctaacattgaaaaatgaaataatgagacattgtatcacagtaaatacaaaatgatgattctgggagaaatattttccttcacttcaaaatattctttattaatgatgaatttaaaaggatggcttcttttctctttctttttggatgcttaacatcaggatttt

SEQ ID NO: 2061 - DNA, 578 bp, Cricetulus griseus
aggctgcggagtggttcgtcttctggggtacaggcatggcgtaccacggcctcactgtgcctctgatcgtgatgagcgttttctggggcttcgtgggccttctcgtgccctggtttatccccaagggtcctaaccggggagttattatcaccatgttggtgacctgttcaatttgctgctatctcttttggctgattgcaattctggcccagctcaatcctctctttggaccacagttgaaaaatgaaaccatctggtatctgaagtaccactggccttgaggatgaagacatgctccacagtgcccaggccctgagatcagagaaagaatgccttctagatgcaaaaccacctccacacccataccactttcttcggtagcctactttgggcattattaccggccttacacttgaagaccttcctctgcatacagcattttttccctacacctttttcacactctgaagaattatgtgcctacttaactgactctgtgagatgcgtctgtactccgccgagagaaaagatgccgtttacagaaatctgttactgttagtcttggatcccgtggcttt

SEQ ID NO: 2062 - DNA, 575 bp, Cricetulus griseus
  misc_feature (521)..(521): n is a, c, g, or t
tcacacttaatttcatgatgtcattatttccatataggaaaaatagagtagatgggctgtgaagaatagtttaattataatcactcatctaattatttaatcaatttaaaataataaatctttttaactagctgtattatcaattaaataacactgaattggcctattttaaataaaaaactaatttgtttataaacattagcatttttttaaatgttgaggctaaactattctcagcaatttcttcatcaccagttttgcagacagttttgtgtgtgctgtcaaaaagcagctgtacttacacatgcacagggcataaggactacagtgcagaaatgtgtttgtgccctgtgtacacatgcacatgcatgctataaaggcaagtagacatggccaacaagagtgaacatccacattctagacaagcatgctaccatccttccatttatgaaatctttgtgacctatttctttcttgcaaaataatgtgttaataagcataggagaaaaataacgggaatntaactatctctacatctgttcatgctgcacacattaaagcctactctctttccc

SEQ ID NO: 2063 - DNA, 212 bp, Cricetulus griseus
  misc_feature (119)..(137): n is a, c, g, or t
gcagccacctggccaaggtgacggttgaagtggtcctggcgcacccgggcggcggctccacatgacgagccaactctttcgtactggccctggtagccggaactgctactcgaggctgnnnnnnnnnnnnnnnnnnntaaagggagaggaggagggagacggcgtcctataagacctagaaaccaaacccgaagggtaaaagtgcggacatt

SEQ ID NO: 2064 - DNA, 459 bp, Cricetulus griseus
ggcggaggcccggtgcgttcaagattcggcctcgcccgtagtccaccgccatggccgaggaaggcattgctgctggaggtgtaatggacgtcaacaccgcgcttcaagaggtgctgaagaccgccctcatccacgatggcctggcgcgcggcatccgcgaggccgccaaagccctatacaagcgccaagcccatctctgtgtgctcgcatccaattgtgatgagcccatgtatgtcaagttggtggaggccctttgtgctgaacaccagatcaatctaattaaggttgatgacaacaagaaactacgggaatgggtaggcctctgtaaaattgatccagaggggaagccacggaaactggttggctgcagttgtgtattggttaaggactatggcaaagaatctcaggccaaggatgtcatcgaacagtacttcaagtgcgagacatgaataaataaaa

SEQ ID NO: 2065 - DNA, 556 bp, Cricetulus griseus
  misc_feature (139)..(139): n is a, c, g, or t
  misc_feature (334)..(350): n is a, c, g, or t
  misc_feature (498)..(498): n is a, c, g, or t
ggacgtaaagcaggaggatcgtacaggttccaggttaagcaggtccgcttgagctctggttgaggaacttctgttggtgtttgggccacaggaatctgcaaccatggatgactcacatatgcttgaagacctgctttanacttgggttttcctgggaaccttgcagctacactaaagttgaatgaattgttgaagagacctatgaggtgacattgtaattgcaaaaagcccatgtgatccaaaatcaaatatttgtaaaagactaattggcttggaaggagacaaaatcctcaacactggtacatcagatatctttaaaaaccgtagttatgtnnnnnnnnnnnnnnnnnggttagaaggtgataacttacagaattctacagactccaggtactacgggcctataccatatggactaataccatgacggatcttcttcaagatttggcctttcagagattttggatttcttcgtgacagcccaaacagggacagacnttctgatgattagcaagcatttacctttttgacttgattttcgtctcctattcatacg

SEQ ID NO: 2066 - DNA, 576 bp, Cricetulus griseus
cctgctggtcacatggaaatatattaaggccaaatcttctgatatccgttcccagagtttctttcaactggattaagcctccagttccaaggcaagcccaagtttgtggcctccagcattaaaactcttcccatctaccagagcagacagtgtaagcttcacaccaggcctcagagtctgagtatagcccactccaattaaactagagttgttgacctttgcagaaatggaagctgtaagatccaactggtatttagctgcaatgccaaaacgagtgcagttggtacctgatgtccaagcaaggtttactgaagtgtcaaaatcttcacatactttctgataaattgatcctccaaattctgtcccattattgacattagtatgtagtcggaagtccccagtcctgtagcccactgcaaagttactcctagtcagctttgacttggcactgtcaaaggtcatctggtacccatcaagccagccctccttaccaatgacagctgagccatgcatggcaggtcccagcaaaatcaaagtcaacatcacagcgcaagcgtatacactccctcttgtaag

SEQ ID NO: 2067 - DNA, 532 bp, Cricetulus griseus
  misc_feature (475)..(527): n is a, c, g, or t
  misc_feature (531)..(531): n is a, c, g, or t
aacagaagctatgacccacttgggtttaacagatatctatagaacattccatccaaacacaaaagaatataccttctcagtgccacatggaaccttctctaaaatcaacacatcctcagcaacatagcaaacctcaacagatacgaaaaaattggaataaccccattgtatcttattggatcaccatggtttaaagttagaattcaacagcaacacaattgcagaaaccatacaaacacagggaaattgaacaatgcacaattacaccattcctgggtcaaggaagaaataaaaacagaaattaaagacttcctagaatccaatgagaattaagacacagcattaataaagtaaaaacaaagaatacaaagaatcactgtaacaaaagaattggttctttgagaaaatcaataagatagagaaacctttatccaaactaaccaaaaggcaaaaagagaacatgcacattaacaannnnnnnnnnnnnnnnnnnnnnnnnnnnnnnnnnnnnnnnnnnnnnnnnnnnntttna

SEQ ID NO: 2068 - DNA, 339 bp, Cricetulus griseus
gtcgacccacgcgctgcgctggggattattccaggaagctgtcaagtataaggtccactggtttctaaccacggcagcgtaagaaagtacaggaaagactgtcgcctagaggtagctggttgaaacccgtaagagctcatcaagtcaccggcaggttggcactcccatgctggggcctacacacgtgctgagcagtgtcctgggtatcccttgcctctggcaccctctgtggctctcggtacacccaagcaagtattgctccactgcgtgggcgcagtatataaaacggttgcctgtgctcctcgatatagagccactgtagcataattcctgggccac

SEQ ID NO: 2069 - DNA, 566 bp, Cricetulus griseus
  misc_feature (140)..(240): n is a, c, g, or t
tcggtctttacaaagagttgacttggttcaggtctgaaaatgagacttaggacaaaacactaatgctctccaggaggttgttctctaaaagaagagccctagccctcaagcctagtttagtaagaaatgcttggtgcagnnnnnnnnnnnnnnnnnnnnnnnnnnnnnnnnnnnnnnnnnnnnnnnnnnnnnnnnnnnnnnnnnnnnnnnnnnnnnnnnnnnnnnnnnnnnnnnnnnnnngagaaaaatggcccctcagacatgtctgggtaaatagctagaaacagctcctctgctcacgcagatctcagcagctcaatacacaagcgacttgctgttctcacgtctatctgtagtgtttgaagattgaagtatataaagatctgggaaaataacagtgcccgcaccagttctcggagagtcagcaaatcaaattctggacatgagattccttgcagtctagtgtacttgaggttgaaagagatagaaaatctcatttactgaggaccttctctacgtgcaaattaagagtgggggtaattaattttgcttttcttgcctctgga

SEQ ID NO: 2070 - DNA, 454 bp, Cricetulus griseus
  misc_feature (182)..(203): n is a, c, g, or t
gcaccatcatggaccattatgatctcccagcagaccaacgactacatgcagcccgaataggactgggaccgggacctgctcctggatccggcctgggaagaagcagcagaggaagacgttcacggcctggtgcggcggtcacctgcggaaggcagggacacagatcgagaacattgaggagnnnnnnnnnnnnnnnnnnnnnntcatgctgctcctggaggtgtatctcaagcgaacgcttggccacgccacagagaggcatgatgcgagtgcacaagatgttcaacgtcaacaagggcctggatctcataggcagcgaaggagtcaagctggcgtgcatcggggccgaagagattgcggatgggaatgtgaacacgaccctgggcatgatctggaccatcatccctcgctctgccatccaagacatctccgtggaatagacattagccaaaga

SEQ ID NO: 2071 - DNA, 225 bp, Cricetulus griseus
  misc_feature (15)..(37): n is a, c, g, or t
  misc_feature (61)..(89): n is a, c, g, or t
  misc_feature (110)..(111): n is a, c, g, or t
  misc_feature (136)..(136): n is a, c, g, or t
  misc_feature (174)..(174): n is a, c, g, or t
aataaaaattattannnnnnnnnnnnnnnnnnnnnnncgccccactcaaatatgttcattnnnnnnnnnnnnnnnnnnnnnnnnnnnnntcctttgtgctggatttaccnnacaaaatttttgacaggggattatntcccttaggctgattacccattttaccaccattccagnaataccctagctgagggggcgattccttcattcagttcacccccaccattt

SEQ ID NO: 2072 - DNA, 578 bp, Cricetulus griseus
cgagcaggcctgcgagcagcttgggtgctggaggaggagcggggggctcggttctctagccatggcacaagtagagaaacgaggcggcttgctccggaaatcctcagcctcaaaaaaaaccactaaaggagaaagtggtgctgatgtatgatgagatttttatggtaaggcctgttatactgcacagctagattgactctttgtttctttaggaatttttaaagttgtgcttatcagtttatttctctgtgtgtatacacatgtgtgtttgagcaacagcacaagagaacacaaatctcggtgtgtgtcctttccccatgtgggttctgaggattgggccagatcatcaggcttggtggcaaaagtgcctttggacactgagtcttgtggctgtcagtttttttttagatagagtcttgctgtgtggctgagtcaggcgtggaaatgactgtgcagatcaaatcgtccttaaacttgcagtgaccgtcctgctacatcctcttgagtgctgagattataggcatgagctaccttgattcttcagttttttttttagcccaaataatctctgttaaaaa

SEQ ID NO: 2073 - DNA, 225 bp, Cricetulus griseus
  misc_feature (159)..(197): n is a, c, g, or t
  misc_feature (200)..(220): n is a, c, g, or t
atgacttaccattctatccatagattaatgcatccctcaactgtcatcagagaggcttctttacacagtagatggtaaagagacccacaactgtccaagtaagaaaataaaagtaagagacccagaatgggcagcttttaattaatggatcacatcaannnnnnnnnnnnnnnnnnnnnnnnnnnnnnnnnnnnnnntcnnnnnnnnnnnnnnnnnnnnngtgtg

SEQ ID NO: 2074 - DNA, 580 bp, Cricetulus griseus
ggggcgccatggcgttgtgcgcgcccggggcctacctgacgcaccagcagaaggtgctgcggctgtacaagcgcgcgctgcgccacctcgagtcgtggtgtatccacaggagaaaaataccggtactttgcttgtttgctgagagcccgatttgaagagcataagaatgagaaggacatgatgaaggctacacagctgctgcaggaggcggaagaggaattctggcaaaatcagcatcctcagccgtacatcttcccggactctcccgggggcacctcctatgagagatacgaatgctacaaggttccggaatggttcttagattactggcacccttctgagaaagcagtgtatcctgattacttttccaagagggagcagtggaagaaactgaagatggagagctgggaacgggaggttaagcagctgcaggaggagacaccctctgacggtgtcatgactgaagctctgcctcccgccagaaaggaaggtgacttgcccccgctgtggtggcatatcgtgaccagacctcggggacggcccgtgtagacactgttcacgcttgccagtgaaagaactt

SEQ ID NO: 2075 - DNA, 572 bp, Cricetulus griseus
attttgctgacattgaaggctacgtggacttcaggacactgccaggaaagggacaaaatctgactggtctcaagtgttctggtctcaagtgttcttactttagtctccaagtatctggactacagggtgccactggcctatcacatttctttctatttatttatttttgggtacgtatataggagtttgtatgtctgtctgtgcatcacatgcatgcagtggccatggaggccagaagaaggcattagttccccagagtaacaaacggttatgagctgtcatttgagcgccaggatttgaacctgggtccccctggatgagtggttagtgcccttaacagctaagctacttctccaccatcaccacccctagtctacatttcttaagttcttgaaggcatcttctcaacaatgaagtggggatgaatacagtgtgaggtctcggagcacagtgacagggctggggaggggccaacaataatgcctctgtgacactcagccttctcttcgtcctcgcaatgcacagcatatggtatcctgtgacaccaaagtgcctgcctggcattctctcag

SEQ ID NO: 2076 - DNA, 579 bp, Cricetulus griseus
tttttggtttacaagaccaatgtaatttttatactattaggacattaagtgaattttagtacactatcttcaattatactggcgattggtataaaaataacgataatagagaagtatataatagaagcaatttgtccaataataacgaatgggtattctactggttggcctccgattcatgttaggagtaataggtctgctactaatagtcagtatatagtttgtgtaataggtcgaaaaattatggttcgaagtttagatgtgtgtagtaatgatagagttgctaggattaggatagagaggattagggctaggactcctcctagtttattagggatagatcgtaggatagcgtaagcgaataggaagtatcattctggtttaatgtgtgcgggagtattgagtggatttgcaggagtataattatcagggtctcctaaaatatctgggaaaaacaatactaaagttatgagagcaattaatagcatgaaggctcctagtaggtctttaatagtatagtagggatgaaatggaattttatctgcgtcagaatctaagcctgttgggttattagagccg

SEQ ID NO: 2077 - DNA, 579 bp, Cricetulus griseus
cgagtctgcaagagtcaccttctggattgctgcccccatgacatccttgctgggacgcgcatggatttaggagaatgtaccaaaatccacgacttggccctccgagcagattatgaaattgcaagtaaagaaagagacctgttttttgaattagatgcaatggatcacttagagtccttcattgcagagtgtgaccggagaactgaacttgccaagaagcggctggcagaaacacaggaggagatcagtgcagaagtttctgcaaaggctgaaaaggtacatgagttgaatgaagaaataggaaaacttcttgctaaagcagagcaactaggagctgaaggaaatgtggatgagtcccagaagatccttatggaagtggaaaaagttcgtgcaaagaaaaaagaagcagaggaagaatatagaaataccatgcctgcatccagttttcaacagcaaaagctccgagtctgcgaggtttgttcagcttaccttggtctccatgacaatgaccgtcgtcttgcagatcacttcgggggcaagttacacttggggttcattcagatccgagagaagcttgat

SEQ ID NO: 2078 - DNA, 448 bp, Cricetulus griseus
catgctcttcccttcagcggagacaaaagatagcagctatttcattctgtgagtatactacatcccttaattctttcaccaccacattaaactgccattttcaatagagatctgaaaaatgtattattacatttacctgttatttcgaaaagaattagtaagcaattaaagggaaaggataaaagtagggcaaaaatgtttctgttttttcagaccagctagcattttgagagtttaaaatgactagaaaggcaaactgttaggtattcagaaggaaaatgtgaatgttttcccaaaggcattattaacaattaataatcattacagtggtgccttgtttacctgaccttgtgtaaattcagcagcctggtaattagacccagattttgcacattcgtatatttccatgcatagatttgactcattcattcatccattaaaatttgct

SEQ ID NO: 2079 - DNA, 579 bp, Cricetulus griseus
gactatgacattttctaaagctatcagataatttcaaaaacatggaaagataagcagatttggattggtgattttataggtccttgtagagtgtttgtctaacatgtttgaagttctgggttggatctctagctccacatatatgagacatggtggctcgtgactataaatccagcatttggaaggtggaggcaaaacagtcaaggtcatcttcagctgcatgagaccctgtctcaaaaaagttaagcccagaaaaaaggcccagaaatactttttaatgggcatacatataggaagagaccaataggtctggagagatggctcagctgttaaaggcaaggctcaccaccaaaaatataagagaccagtagtgatcaaatatagagctcacttgaaaacatatgaaagcctaatttgttaattcagataatatgcatgtgggtaagtcctagttaataagaagttataatgaatgcccttgttctgtggagaagttaagaatggcaaagctgagaagtatttcttccaacagaagttctagcagtgctctctctgtgagtaagcccgctaagtaagaca

SEQ ID NO: 2080 - DNA, 508 bp, Cricetulus griseus
ctctggcaagtccctgcttaaccttcatagatgtttttctttttcggtattcatttagttaaagaattcagcaaattatttgatttacacttcattctgttctgttttgccatccctcaagttttcctgacctctacatgtgagctgtggtgcttgctttgcctttgttcccaataaaataaataatataattaaactctttgaaaggagaaatgaagtaaataaatattacctatcaaatgatttgatagcatgactgaattttaaaagacataattcttatttgtgcatatgtgtacatatgtgcaaatacatgtgccaggtgccatcagagttcaaaagatggtgtcagatcctctgaaactggagccacacatgggtgtgagccgcccaagaaagtggtgggaaccgaactggcccttgggaaaagcaataagcacctttaactgctgagccatctcttctatgcctctgctcctcttgtcccccttacatttatttattctcc

SEQ ID NO: 2081 - DNA, 512 bp, Cricetulus griseus
tgtagatgtaatcgatcagaacagagctttagtcgatggaccttgcactcgggtgaggagacaggccatgccttttaagtgcatgcagcttactgacttcatcctcaagttcccacacagtgcccgccagaaatatgtacggaaagcttgggagaaagcagatatcaatacgaaatggtcggccacaagatgggccaagaagattgatgcccgagaaaggaaagccaagatgacagattttgatcgtttcaaagtaatgaaagcaaagaaaatgaggaacagaatcatcaagactgaggtcaagaaacttcagagagctgctatcctgaaagcttcgcccaaaaaagctcctgttgctaaagctgccattgcagcggcagcggctgcagctgcagctgctaaagctaaagttccagccaagaaggggacagcaccaggcaagaaggctgcaggccagaaagctgcaagccagaaagctgcagctcctgctaaaggtcagaagagtcagaaga

SEQ ID NO: 2082 - DNA, 578 bp, Cricetulus griseus
taagtttaaaaaactacaaggcattgtttttgctaggtagactggcatccaagtagaggctgcctggttttttgtccccccgtataaccagggaccatctgaaagtcaattttttagccagatagctattgtgagcataagcgtcagtgtttagcaagaacttctgagcagcttattctgctgtgtaagaagcacctttagaaatgatggactccaaatgggcagctcttcctcttaaactcagtatttttagtgctagagtaagagtgacccgtagactgctttgccctcttagccaggctctcctgagcaggactggtgaagagctggtctcctcggtgtccctttgcactcatcttttcacaggtaggtagtgcttaagaagcactctggaggactagagcccatgtccacctcaactctcttcagtgtcaagtaagtgacactgccaagagcagcaggtacatccagaaagacttatgtcaccctaacaggataggacaatagatggccccaacacctgtgatagatcacattggtggagccctttgttttggtgacattcattgacagtacag

SEQ ID NO: 2083 - DNA, 504 bp, Cricetulus griseus
atccaagaccacattatcgcactctgtgagtagagaataaagatagttaatctcacacaaagtagaactaaaagaaattgatcattgttgaaagcagttgtttattcttcattaaatcaatgattcctgactcctgaactaaactgagttcaaattaagtttggggctttactttgtgttgcagttagggtttctattgctgccatgaaacaccatgacaaaaaaagcaagttggggaggaaagggtttattaggcttacatttcaatattgctgttcatcactaaagggggggggtgttgaggcatgaactgatgcttaagccatggagggaagcttcttacttcccatggcttgtttagttgactttcttattgaacccaggaccagcagacaaaggttggcaccacccactgtgggggaggtcctcccctcttgttcactaaatgagaaaatgccttacagctttctttcttcgccgactctagctcgtgtcaacctgaca

SEQ ID NO: 2084 - DNA, 578 bp, Cricetulus griseus
atagctttatgagatagtaaagggaaatcagtcttttatatttacaaatgaagaggagggaactcaaggggattatctaatttacccatggacatgtggttgtcaagttgatactctgaattatcatttgtgtggttttctccctaatgggaacctacaatccattaagccattatatgttgtgcactggggtagacacatgtgagtctcctcactcagtggatgaagagggtgtatgttctcctggctttctaagacaaatttgttttaaataaaactttattcatctatttttgtctttatatacctagtgattagtgatttaatttgcccctttctgggcacagaaaaacacagaaggatcaaagccacacattgagacagtgacctcacaaaattaaatagtgagtaaatatatgtgaattttctgaaactagacagtgatgtgaattctcataacaacaaaaaatatttgaacatactggtattcatattttttcccatattataatataaagcaacttggaaacaagattcataagtactaagttttgggtgccaagcttatctccagcact

SEQ ID NO: 2085 - DNA, 578 bp, Cricetulus griseus
atcgacaagttcggcttcatcgtgggttcgcaaggcgccgagggcgcgctggaggaagttcccctggaggtgctgaggcagagggagtccaagtggctggacatgctcaacaactgggacaaatggatggccaagaagcacaagaagattcgtcttcgttgccagaagggcattccaccttctctgcggggacgggcctggcagtacctgtcaggaggcaaagtgaaacttcagcagaatcctggaaaatttgatgagctggacatgtctcctggggaccccaagtggctagatgtgattgaacgtgacctgcaccggcagttccctttccatgagatgtttgtgtcccgaggaggtcatggccagcaagacctgttccgtgtgctgaaagcctacacgctataccgccctgaggagggctactgccaggcccaggcacccattgctgctgtgctactcatgcacatgcctgcagagcaagccttctggtgtctggtacaagtctgtgagaagtacctgcctggctactatagtgagaaactggaggcaatccaactggatggcgagatcctcttctc

SEQ ID NO: 2086 - DNA, 167 bp, Cricetulus griseus
agccaagcttgaatccttactctgctgttaattttatacccatgggcaaatcactcaagctcttagttacttcacgattcaaatgagagagaccattactaatctgttcgcttaccgcaattgatggattaagtgacattattccacctccttttgacgaggttacg

SEQ ID NO: 2087 - DNA, 500 bp, Cricetulus griseus
  misc_feature (42)..(62): n is a, c, g, or t
  misc_feature (444)..(463): n is a, c, g, or t
gcatcatgcaacatcggaggctcatggaccaggtaccaggtnnnnnnnnnnnnnnnnnnnnntagaagcgcagccgcaagaagcccagtggagcttcgcatccatgacctggaggacgacctggtaaatgtcctccgatgccattgatgccagtggcgaggtaagcagcagagcctctaaggctaaaaaaaaggccccaatgaccaaagggggcaggaagaagaaaaagaagaagggctcagatgatgaggcctttgaggacagtgatgatggggactttgagggccaggatgtggactacatgtcagatggctccagcagctccccggatgatacagagggcaaacccaaagtgccgctttatgatgatggccccaagggtgtggttgagcagagtgagagcattgaatacagtgtataggataagcctcctgaggaagacannnnnnnnnnnnnnnnnnnngaagttcccactccacagataataaacgcatttaaga

SEQ ID NO: 2088 - DNA, 580 bp, Cricetulus griseus
  misc_feature (468)..(492): n is a, c, g, or t
gtggaggctgcagtggtcgtcgccactctccgagcttcatcatgccgcctaaggatgacaagaagaagaaagatgccgggaagtcggcaaagaaagataaagacccagtaaataagtctggaggcaaggccaaaaagaagaagtggtccaaaggcaaagttcgggacaagctcaacaatctagtcctgtttgacaaagctacatacgacaaactctgtaaggaagtgcccaattataagcttattactccagctgtggtctctgagagactgaagattcgaggttccttggccagggcagcccttcaggagctacttagtaaagggcttatcaagctggtttcaaagcacagagcccaagtaatttacaccagaaacacaaagggtggagatgccccagctgctggtgaagatgcataaacaggttcaatcagctgtgcatttggaaaaataaaactttattaaatcnnnnnnnnnnnnnnnnnnnnnnnnncgggccgccccgcgggggagctccaccttttggtcccttttaggaagggttaattgcgccctgggggaaaacatgggcatagctggtt

SEQ ID NO: 2089 - DNA, 577 bp, Cricetulus griseus
tgttttctttcagtagcttttaaaagtgacctttaaatggatttaagcaggaagggaaagcattgcttctccacctttttctctgtattgataaattcaaactcaagaagctcattttagaagtatttcaactatgaaaatggaaaaattgccttacatcctgatcatattccaggaaaacatgaaagtttcggtctttactgagaacagggtgagaagaaagccgctgaagaaagacttcatgggaagacacagtcttcttaaagacagcgagatactcagcttccagttcttgcttcatcttagcaaactcttcttttgtcatagatccttcaccttctcccagtttctgcatcttctctcgagggccatcgaagtctggctttgtaggagcaggagggataataagcccggcataatctgttgtttctgtaagagtgtcatgcagccacacaaagtcttcatgctgccttgtaacagaaaattctgggctctggaatgtgggcagtgtggtcttggtgtgtactgtaaacttgaccttatctctttcactgagtgcatcgggtatgtcgatctg

SEQ ID NO: 2090 - DNA, 553 bp, Cricetulus griseus
taaagaattgtagttttcctttccacacatgaaatctttgagtccggaagcttgaatttaatcgatctttataatggaagaccccctagtgccaaataatatgtatcacttaaaagttagtgtcctgggaaagatgaacatgttggctcctgtgctttgattcatatggaaaatggaaaagacattagatgatggttcctggggtgacactctgcacttagcctgtctcgtgaaccgtgaccaggctcagtgagttccttgtggcaaatgcccgtgggggtgcatggggggtgttccagtgcctaagcctttgcaactccttcttgaggcaaaggagacttcttcttattgcatttctttgtatttacttgacctctcagagttctcttttttcctctagtaacctccatttaaggccttgaatgttttatatgtatgtggcagaacaatatgcaaactttgctcttagagatttttgttttttgtctagaacataaaaccagactattcatttagttctctttgaaatccaaagaatatgcatagattttat

SEQ ID NO: 2091 - DNA, 486 bp, Cricetulus griseus
  misc_feature (60)..(129): n is a, c, g, or t
  misc_feature (152)..(204): n is a, c, g, or t
  misc_feature (233)..(279): n is a, c, g, or t
  misc_feature (300)..(319): n is a, c, g, or t
  misc_feature (321)..(369): n is a, c, g, or t
  misc_feature (380)..(406): n is a, c, g, or t
  misc_feature (426)..(448): n is a, c, g, or t
tttttattctattgaccttacctgtaataataactatatttaacttctataagacaatcnnnnnnnnnnnnnnnnnnnnnnnnnnnnnnnnnnnnnnnnnnnnnnnnnnnnnnnnnnnnnnnnnnnnnntattttattctaacactgaatgnnnnnnnnnnnnnnnnnnnnnnnnnnnnnnnnnnnnnnnnnnnnnnnnnnnnngtctaaaatgtgatttattctggattagnnnnnnnnnnnnnnnnnnnnnnnnnnnnnnnnnnnnnnnnnnnnnnngctcatgatatatgcattcannnnnnnnnnnnnnnnnnnngnnnnnnnnnnnnnnnnnnnnnnnnnnnnnnnnnnnnnnnnnnnnnnnnnctaacaatatnnnnnnnnnnnnnnnnnnnnnnnnnnnaggaggaatgatatcattcnnnnnnnnnnnnnnnnnnnnnnnacgacaagacgcaaatactgcagccctacaggcaattt

SEQ ID NO: 2092 - DNA, 580 bp, Cricetulus griseus
  misc_feature (18)..(330): n is a, c, g, or t
ggaccagaaaccctgatnnnnnnnnnnnnnnnnnnnnnnnnnnnnnnnnnnnnnnnnnnnnnnnnnnnnnnnnnnnnnnnnnnnnnnnnnnnnnnnnnnnnnnnnnnnnnnnnnnnnnnnnnnnnnnnnnnnnnnnnnnnnnnnnnnnnnnnnnnnnnnnnnnnnnnnnnnnnnnnnnnnnnnnnnnnnnnnnnnnnnnnnnnnnnnnnnnnnnnnnnnnnnnnnnnnnnnnnnnnnnnnnnnnnnnnnnnnnnnnnnnnnnnnnnnnnnnnnnnnnnnnnnnnnnnnnnnnnnnnnnnnnnnnnnnnnnnnnnnnnnnnnnnnnnnnnnagatcctgaaagttatccgtaaaaacattgcgaagaagtgccctgagctcttctctgagctggctgaagacaagaaaactataagaaattctacgaggccttctccaagaacttaaagcttgcaatccatgatgattcccttaatccgtcggcgttctctcttgactgttgcgctatcatacctctccagctgggagatgaaatgacttccctgtccgaaaatgtgtgccgtgttgtaggagacccaaaa

SEQ ID NO: 2093 - DNA, 578 bp, Cricetulus griseus
  misc_feature (111)..(137): n is a, c, g, or t
actaccagtttggctaccgaaaatttgatggtacagaggggcctcgcacccccaagtacatgaacaacatcacctactactttgacaatctcagcagcactgagatttacnnnnnnnnnnnnnnnnnnnnnnnnnnntatatcaagcgccagattgaatactacttcagcgtggacaatttagagcgagacttcttcctgagacggaaaatggatgctgatggtttccttcccatcacccttattgcttcctttcaccgtgtacaggccctaaccactgacatttcactcatcttttcggctctaaaggacagcacggtggtggagatcgttgaggagaaagtccgaaggagggaacaacctgagaagtggccacttcctggtccaccaatagtggattattcacaaacagatttctctcagcttctcaactgcccagagtttgttccccgccagcactaccagatagagactgagtcagcacctggttctccccgtgctgttaccccagtgccaaccaaaacagaggatgtcagcaacctgaagaccctttccaaaggcctgtctgccagcctctca

SEQ ID NO: 2094 - DNA, 211 bp, Cricetulus griseus
  misc_feature (120)..(120): n is a, c, g, or t
  misc_feature (135)..(135): n is a, c, g, or t
ggtaaacgccctggagcggagctggaggaacagcggagcagaacagaaggccctggtggacaatgagcagctgcgccacgagctagcccagctcatagccatgcagctggtaagcgcccnggaccagggcctgcnataggatgcggagagggaaaccattgcccacggagcgcgctacagcaagctggaagagaagcacaatgggctcatt

SEQ ID NO: 2095 - DNA, 581 bp, Cricetulus griseus
  misc_feature (62)..(213): n is a, c, g, or t
  misc_feature (231)..(300): n is a, c, g, or t
  misc_feature (303)..(437): n is a, c, g, or t
  misc_feature (439)..(461): n is a, c, g, or t
  misc_feature (477)..(493): n is a, c, g, or t
  misc_feature (495)..(507): n is a, c, g, or t
ttattttccttatttttattctattgaccttacctgtaataataactatatttaacttctannnnnnnnnnnnnnnnnnnnnnnnnnnnnnnnnnnnnnnnnnnnnnnnnnnnnnnnnnnnnnnnnnnnnnnnnnnnnnnnnnnnnnnnnnnnnnnnnnnnnnnnnnnnnnnnnnnnnnnnnnnnnnnnnnnnnnnnnnnnnnnnnnnnnnnngtaatctaaaatttgatnnnnnnnnnnnnnnnnnnnnnnnnnnnnnnnnnnnnnnnnnnnnnnnnnnnnnnnnnnnnnnnnnnnnnnatnnnnnnnnnnnnnnnnnnnnnnnnnnnnnnnnnnnnnnnnnnnnnnnnnnnnnnnnnnnnnnnnnnnnnnnnnnnnnnnnnnnnnnnnnnnnnnnnnnnnnnnnnnnnnnnnnnnnnnnnnnnnnnnnnnnnnnntnnnnnnnnnnnnnnnnnnnnnnnacgacaagacgcaaannnnnnnnnnnnnnnnncnnnnnnnnnnnnncgcatgggggacattggctttgtataacaatagccggcccattgctaaaataatattcctgggaatttcaacaa

SEQ ID NO: 2096 - DNA, 509 bp, Cricetulus griseus
  misc_feature (240)..(264): n is a, c, g, or t
cggataaatcgcaagcctcacagcaagaaatggatgggaaaaataaatctgtggaaattttggaagatagttctgaggaaaattccaaattgcaggtgatccaaccgaaattggggaataacatggacacccagcgtaatgacctggagttaaagttagcaggggcagagcgggagaagcagaagctgagcagggaggtggctaggctccagaaagatcttcgtgtgctgagaaaggagnnnnnnnnnnnnnnnnnnnnnnnnnagagagagtgcacgcaggaagcggaggagaagctcaaacaggagcaagaggatcttgagttgaaacacacttccatcctgaagcagctgatgagggagtttaatacccagctggcacagaaggagcaggaactagaaaggaccattcaggagaccatccataaggcccaggaggtggaagctgagcttctggagagccaccaggaagagacgcaacagttgcacagatagattgcggagaaagac

SEQ ID NO: 2097 - DNA, 396 bp, Cricetulus griseus
ctaaatctttctggccctcttcccaatggggccacattgaataagtctaatttttctgctttttgctgttaatttggctgctttaattggcttactgaggatgggtggccacacctggcttgttaaaccacaggctgggacccccaaatccagtagtgttttctcttgctttcttgtctctgggaaaggggtacacagtgaaaccttgtctccaaaagcttaaagagaaaaggaaggaaaaagaaatggagactgctgtgctgactagtaaccggctacttagtcgctgtttctcaatgattcatgggctccatgtcaatgaaagctgttggaaaaaatgggttttcccctttttcttttcttttttttcctttcctttccttttcttttttcttc

SEQ ID NO: 2098 - DNA, 579 bp, Cricetulus griseus
  misc_feature (123)..(154): n is a, c, g, or t
  misc_feature (547)..(568): n is a, c, g, or t
cgtggaggagggcgaggaaacctgcgtcttgtcctcacacagcgggactgcgggctccaagtcggggggcgacaagatgttctccctcaagaagtggaacgcggtagccatgtggagctgggnnnnnnnnnnnnnnnnnnnnnnnnnnnnnnnngtccaggtgatggatgcctgcctcagatgtcaagccgaaaacaaacaagaggactgtgttgtggtctggggagaatgtaatcattcctttcacaactgctgcatgtctctgtgggtgaaacagaacaatcgctgtcctctctgccagcaggactgggtggtccaaagaattggcaaatgagaggtagtagaaggctttcctggtgtggttgtgaccctggatgatcttgctgccaagtgaccggacgaaggctataacactccagcggatcagttcttcagatagaaagggtgcagtcttttgagactcatccagggcatggcttagcattttgtcagttgaattttgagaagttgtctacaagatagataatttattaaaaatggcctttcnnnnnnnnnnnnnnnnnnnnnncgggccctcca

SEQ ID NO: 2099 - DNA, 507 bp, Cricetulus griseus
attccaccccattggctcagctagctgaccatccattggagcattttgtccattttgaaactgaatgacacttttgttcgtgattaacagaggtgaaagaagccaattattgggccctctttttccatagaacagctgctgttggatttaactgcgggcaaatatggccttttactactgcaaggatgttgtgatgacagtttatttttatagaactatgtgactgaaaacaaaatctgtctgacttttgttatgaatatgccctggaatttatcatggaagggtgagtttgtcgagctgttttgtagttctctgtaaaaatagcatatatgttgtgtatgatacacatgtgcatattttagcatctttttaatgcaaggatctgatgttaaacattgggttttttactcatacatatgtagctccttcagcctttttctgtgttacttttaatgtgaactcataatgtattaaagttaggaagcaattagtgggagattgagtggt

SEQ ID NO: 2100 - DNA, 581 bp, Cricetulus griseus
  misc_feature (309)..(323): n is a, c, g, or t
gtgaggacagaagtgaattacacagaggaagtggaagaccctgtggactcggatggtatgtagtttatctgatcctaacagaaatactgttcttagggaaaggaatctggacaaagacaagtcagaggcagaaaacaaaaaaggcagtaaatgcatcttttcagtgcattaggtgaggcattgagaattcatcatctcccatctcatccttagggacattcaaagtccacttgaaaatcacatttgggttgtaactgacatctaatccagctacccatgatatttcgcctcatttaactttgaagtctnnnnnnnnnnnnnnntccatttctatgtcagtatttaagtatttcagatcaaaaatagacatgctaggaaaatacgttcaatgtttgtgaattatttttttaattcctaaaagtatttactaccctcaaagtacctttctttgactctaaagaaagaagctaaagcctcctctaccaatccttcaggaataattagcaagtactttatatactcaattgatttacaaagataatatagtttatttccagaatgaatgctttctttttgtttta

SEQ ID NO: 2101 - DNA, 581 bp, Cricetulus griseus; identical to SEQ ID NO: 2100
  misc_feature (309)..(323): n is a, c, g, or t

SEQ ID NO: 2102 - DNA, 579 bp, Cricetulus griseus
  misc_feature (530)..(530): n is a, c, g, or t
agaccacaggttctgcattgttacagttatatataatagttggcagtgagttatttttacttcatataaaaccatttcagtagttgaaagatttcagggttttaaggcaggaagccggtgaaaggtgtttgttgcacttctgcagaagtagctctgaagtagtgtgaaggattacagtttgtctctctgagacacaaaagagcatagcaagtgtctttccttttggtaagttctcagtgtagtaggcagtgaatccaatctaatgtgtagtatttatctacccatccctcaagagaccctttaaggcaatggttctcaacttgtgggttgctacccctttaggggttacatactaggcatctttgcatatcatatatttacattatgatttataacagtagcaaaattacagttatgaggtagcaatgaaataattttatggttggggtcatcacaaggtgaagaactgtattaaagggtcacagttttatgaaagttgagaaacactgctctaagagattgaagttcangttgtccacactgaacgtgggtataataactgagggaaactggtgtggc

SEQ ID NO: 2103 - DNA, 442 bp, Cricetulus griseus
ttggtctttatctcatatacatttaattctccattctctgacccacatccagttctcctcaggtctctaaacagggatattaaactgcatgtctgaatccatgtacagataagtcagtctcatgactcaaaagtaagctatttccaaagatggcaacctggtgctggacccatcctaaaaacacaatgtctgtgcgagactgagtgtacatcttgctacacaatggagcctcatgggccgtgcctgcttgggaatgcccacattggagttctgcaaacctgggaggtcatttgtatgcccagtctcctgggactgactcccttcagaggttagtttcagtggaagatttggatcaccaggcttacattcgcttttagtcctggctctaacactgacttgctttgtgatcttacgtgataaccacatgaggacaaagtgtttt

SEQ ID NO: 2104 - DNA, 442 bp, Cricetulus griseus; identical to SEQ ID NO: 2103

SEQ ID NO: 2105 - DNA, 499 bp, Cricetulus griseus
aatgatataacttgtatggtaaattaaattttttatttaatttactttcttacatggtctgttaggtggggaaagcgattaagacagggtctagctttgtagcgcaggcttactttgaattgacagtttctctgcctcagcctgtcatggtggaagctttgcccctgtccctggcatctgtatacccaaagagtctataatgtcatggtggaggcttcaccccagatcctggcatccatatacccaaagagtctccctggaagttccactaggatgacactgtaacaggtacttgtgagtaggaactgaggctgcctaggaattgacatatgccttgttatgctagtaggcactacaagcatgagataagaagagtgaccccttttagctagtaggaagtcctggaatggacgctggcttttgtctaaatgccagactttgtgaaaaggaatttcttgggtcctaacaggaacacaggcctgaatgactggcttaaatg

SEQ ID NO: 2106 - DNA, 506 bp, Cricetulus griseus
cgctgttgctgtggggaccacggccgaacacacgatcccggcctgaggtggtggtgggaagcccaccgcactttgctgcgacgtcatggagggtggcgggggaagtggcaacaaaacctccggcggcttatctggcttcttcggagcaggaggagcgggctactcgcactctgatttggccggcgttccgctaactggtatgaatcccctgtctccatatttaaatgtggatccacgatatcttgttcaagatactgatgagttcattttgccaactggagctaacaaaacccgaggccgatttgagttagctttttttaccattggaggatgttgcatgacaggggctgcatttggggcaatgaacggtcttcggctaagattgaaggaaacccagatcatggcctggtctaaaccaagaaatgtacagattttgaatatggtgactaggcaaggagcactttgggctaatactctaaggtccttggctttgctctatagcgcat

SEQ ID NO: 2107 - DNA, 435 bp, Cricetulus griseus
caagaacactttgataattgagcacaaaggtttctctgttaaatcatggctattaggagatattgccacttactaacccagtctgagctgctacaccccatatcccagggtctgccttccacctgttagttgctcaccgtgcagtcctaatatccatgtttggatttatatgaaaattctgcttgtctgtgatctgagcatagaggagaagtgctgctcagaaatccatatttgtctctgtcggcaactttgaaggttctgagtgagtaaccagaagagaggttagcatggcgtaaggagtatgtacgtggaaattactccaatggggtttgagtatggctgacctggggagttctctaatgtctggtctgcatcatttggaaggcaggcaatttcatttaatgcaaggtgtcataaaccttttctcttggggat

SEQ ID NO: 2108 - DNA, 579 bp, Cricetulus griseus
atgtggcctggagccgaggggtggagtgagacctgtgtgctattctgagtttccagagaatttgtgtgacaaagattttttttttcctgaactttcctgactctctaaactgtccttgatatcttcttcccaccggtgaaggtagatgggagcacacagcaggttctgattctgtgtgttttaaaagggctttgtaggaatgatttgtgtaataatagttaagtaaatgatagcctgatagatagccatgattctgaacaccagctctgcctaactaaagggagcctgaagcagggacgagcacttgccctaatttaacagagaatgccagccagtctgccatgggaacctgcaggccttctctgcccaggacagaaaggcagcacctaagcatctctttggaaggcacctgtcctccaaagcctctgtgctgtatcctgaagttcattgaaggaaccttccttctgaagtcctgttggtgaccaagaacaagtcctaaaagttacttgggtgcatcttgtccttaaccctttacaaagtttatcattgccacctaatgaaccctgcaaatgaaagtca

SEQ ID NO: 2109 - DNA, 578 bp, Cricetulus griseus
aacttagacattgtcccaggtctttattatattgataaaatttaactatattttcatttaaaagtaaagtatctaatctaaaaccatctttaataatataggtaatgtttagatccaacaagtttctgacctttgtttagactagtgggttgttacattagatgaaagaatccaatgatcagcttcacttgtgcttttgtatataaacagtaacctatttcatacttgccaaacatgtatgatgattggtgaaattgtgctggatgtatcaagtccttcctgtattgtttcttctgtcccaattccaccaaagatacataaagcaaatcaccgttatttggtactactaataaataattccctttatattccttctattgtatctcatttaacctcaaacgcttttcagtcagccttcagcaaactgcggcaatgtgtaattaccctgactcttcctgtattttctgtgcttaagtggtttaatcttgctggctttcatcattattacttattttccatatgaaaaacaagctgatgggctcacatgagaaaactacttctctgttggcttgttttta

SEQ ID NO: 2110 - DNA, 555 bp, Cricetulus griseus
  misc_feature (524)..(524): n is a, c, g, or t
aaatgtaaaagttagctattaagaagcctgagctataggctcagcatttataattcatactcagcctctgagtcagttatttggtactgggctgttcggacaggaaacatctgtttacatatggggccccaggttgggtgtcagataaagcattaatctaattaatcttaccaataacaaattgggagccaaatatcagaataaaaacctgaaagatcagagaagcaatggagcagagcagctacagttgcttcctacctcttccattcctctgaccaaaagggcccagatcctctctccacctgccttatcacttactgtctgtatagtcctccagatctctatggttaactagtggctagttccaccctcttgactacaagcaagctttaattttcagaacacaaacaaaatatcacacaacactataatggtgaatgcatgtcaatatatttggctagattcacagtgtgttgcaccaagaataaaccctaatgtaaaaagtaaataaattagtacactanaaataaataaaattttgcctttgtctgcatg

SEQ ID NO: 2111 - DNA, 498 bp, Cricetulus griseus
ccacttgctcctggctaattctgtaaaagttaaatggtgtctgtatgcagcatttgggcctctgtaaaaccactgggctgccctgggccagagtcctgatgcaaaagtacctaatggggtgagtcattgtgtgctctgccacgccaatgccacctgttccttcccctgggcctggattcccctctggcatttcgttccacggttccacacaattctttaagaagcctaccaacccaaccagggtaaggctccagggtccagctcaaccttctacacctggcacatcacaaaagcttttctgtgtctatggatgtctccaaggacaaccaaatgttgtgtatcgatgcagtcaaaggaattcatgggcttgaccaaaatctcaagggggttcagcatccaaaacagactgataactgtaactctaaggcactgggtcataactcaatccactcaataaatagacacaccgactttaccttttacttaaccctctggtgg

SEQ ID NO: 2112 - DNA, 81 bp, Cricetulus griseus
  misc_feature (41)..(41): n is a, c, g, or t
ctcatcatttacttcacaattttcttcagggcccaatagtncactatgctgcagctccaagtttcctttcttatatgaaat

SEQ ID NO: 2113 - DNA, 567 bp, Cricetulus griseus
  misc_feature (28)..(47): n is a, c, g, or t
  misc_feature (54)..(86): n is a, c, g, or t
  misc_feature (88)..(124): n is a, c, g, or t
gcgttcgcgagcgggcgacaccgaggannnnnnnnnnnnnnnnnnnnctttaannnnnnnnnnnnnnnnnnnnnnnnnnnnnnnnngnnnnnnnnnnnnnnnnnnnnnnnnnnnnnnnnnnnnnatagtaaggactcttgaagactttgacctgggcccaacggaaaagtgtgtgagaatcaactcggtgtctagtggtttggctgaagctgacctaaagacaattctgcagtcccaggttcttccctctagtttgatgctgccgaaagtagaaagtcctgaagaaatccggtggttttcagacaaattttcattccacttaaatggccgaaaacttgaacaaccaatgaatttaatcccctttgtggaaactgcaatgggtttgctcaattttaatgcagcgtgtgaagaaacagtgaggattgggcctcaagtgggcctgttcctatatgcatttgtgtttggaggagaagattttctagccagcataggtgcaacaagcaataaggacacccaagacatcctctatgtcccacagaaaatagtcgtcatatgcgatagcctttg

SEQ ID NO: 2114 - DNA, 579 bp, Cricetulus griseus
ggcctcggcccggatggcggcggcggctgcgccgagctggggactgaaggcggtcttggcttcagggcccaggaggaactgctgctgctcttcaccatggcttctctgcacccggctttctccttccaccagcgggtcaccctgagggagcacctggagaggctccgcatcgcgctccgcgtggagcccgaggacccggaggtggagccgtgcaactttgcgggcttcagggcccagaacgactctgcttgtggtgattatatacagagtaatgagactggcttagtagaacaagcccaaatacctcaagacggactcactgtggcccctcacagagctcatcgagaagctgtacacattgagaagataatgttgaaaggagtgcagagaaaaagggctgacaagtattgggagtacactttcaaacttccaaaggaattgtcttctgagacctttgacaaggccatcttaagagccctgaatcatggttctctaaaaagggaagagcggcggcaccctgacctggagcctatcctcaagcagctatttttcaacttcatcccaagcttttcttcagag

SEQ ID NO: 2115 - DNA, 556 bp, Cricetulus griseus
  misc_feature (357)..(396): n is a, c, g, or t
  misc_feature (398)..(418): n is a, c, g, or t
ctgcaaaggaaaaaggccaacacacaaaggcagacccatcagaataacaaccaacttctcaatggagactctgaaagccagaaggtcctaaacagatgctctgcagacactaagaaaccatggatgccaccccatacaactatacccagcaaactttcactcactatagatggagaaaacaagatattccatgacaaaaccagatttaagtaatacctatccacaaatccagccctacagaaaatactagaaggaaaactccaacccaaggaagttagctgcacccacaaaaacacaggcaatagataaccccacaccagcaaattccaaagaagagaaacacacacactaccaccnnnnnnnnnnnnnnnnnnnnnnnnnnnnnnnnnnnnnnnntnnnnnnnnnnnnnnnnnnnnnccaaaaatataacaggaatgaacaattactggtcattaatatcccttaatatcaacagactcaattttcatataaaaggcacaggctgaatgaatggatatgaaaacaggagccaaccttctgctgcataaaagaaac

SEQ ID NO: 2116 - DNA, 442 bp, Cricetulus griseus
  misc_feature (143)..(160): n is a, c, g, or t
acaacctcccccccatgttgagcagtgtctctttatgtagcccaagacagcttgtggcctcagcatcccaagtacttagattataggcttgagccatcatgcctggctttgctcatcagactatgatggctaattttcagtannnnnnnnnnnnnnnnnngagatacatagatagcttgtaaaacatttctggttctttgtgtctgtgagggcgtttctagaagatattagcatttaaataggcaggcccagtaaagcagatctactttcatcccagtgtgggtgggcataatgccacccacggaaggcacagccattatagaggctgcacatttggaattactttgttagcatcccttggtttcaaggcttcagactaggactttattatatataacactatctcccctgttctccaacatgtaatgagagctcctgggag

SEQ ID NO: 2117 - DNA, 576 bp, Cricetulus griseus
  misc_feature (10)..(22): n is a, c, g, or t
  misc_feature (24)..(58): n is a, c, g, or t
  misc_feature (68)..(112): n is a, c, g, or t
  misc_feature (511)..(511): n is a, c, g, or t
tcgatcggannnnnnnnnnnnnannnnnnnnnnnnnnnnnnnnnnnnnnnnnnnnnnngttaattgcnnnnnnnnnnnnnnnnnnnnnnnnnnnnnnnnnnnnnnnnnnnnnttatctcgctcaaatcttctcctctttaggaacggaggggtaatctaactcctgaggaaagagatgcaaggacagttttctgcatgcaactggcagcaagaattcgaccaagggatttggaagagtttttctctacagtaggaaaggttcgagatgtgaggatgatttctgatagaaattcaagacgttccaaaggaattgcctatgtggaatttgttgatgttagttcagtgcctctagcaattggattaactggccaacgtgttttatgagtgccaattatagtacaggcatcacaggtaacttcttgatttagatattggtcattgagctgggtgtcacatcatatgcagcagtggcttatggttaggcaggagaattggaatcaatttgactcancttgggctatgtattaattattcattaacagacctaataagtggaatcaatgagatgggagttta

SEQ ID NO: 2118 - DNA, 316 bp, Cricetulus griseus
  misc_feature (38)..(93): n is a, c, g, or t
  misc_feature (107)..(139): n is a, c, g, or t
  misc_feature (154)..(173): n is a, c, g, or t
  misc_feature (184)..(243): n is a, c, g, or t
ctcagctccagtttctttcttatatgaattgggttagnnnnnnnnnnnnnnnnnnnnnnnnnnnnnnnnnnnnnnnnnnnnnnnnnnnnnnnnatagaagcatcaannnnnnnnnnnnnnnnnnnnnnnnnnnnnnnnntaatctttgttgtgnnnnnnnnnnnnnnnnnnnnacaaataggtnnnnnnnnnnnnnnnnnnnnnnnnnnnnnnnnnnnnnnnnnnnnnnnnnnnnnnnnnnnngtcaataaattaagggcctttctccattttaccgcctggattcccggaggtaccccagggaaatccacttcaa

SEQ ID NO: 2119 - DNA, 334 bp, Cricetulus griseus
  misc_feature (20)..(119): n is a, c, g, or t
gcgagcggccgacaccgaannnnnnnnnnnnnnnnnnnnnnnnnnnnnnnnnnnnnnnnnnnnnnnnnnnnnnnnnnnnnnnnnnnnnnnnnnnnnnnnnnnnnnnnnnnnnnnnnnnntccgcctgcctttgcctcccaattgcgggggttaaaggcatttccctcctacaccacctggctaaaaattgatttttgaaattatgcgttaatgggtatctgggggtaggtaattatggatgcccaaggaaaccaaaggaaggggttgattccctggggctggatttagagggggttgggccacctggggggaaccgaactcaggtcctttgaaa

SEQ ID NO: 2120 - DNA, 492 bp, Cricetulus griseus
  misc_feature (396)..(396): n is a, c, g, or t
cagtactgtaaggaaagatgtatgtcctaagtgtgaaagtaatagtttgcatgaaagtagtagtttgatagggtatttaaaaaaagggtgtgtgtgttctgtgataaaaagaaaaatgggtaagtagcaaatgcatcatgtaagaattttccttcatgtgagctgtcttctttatgtaaaacacaaaatgttaattataaaagtgatatgtacttacagatcaggtttcatataattaccctttgcactgcttcaccaaagatactcttaaatgataatctgtcattatctatagtgaagaatatcatagaaaaatacaattgatgctaccaccttgattcatggtaaagaatctgcagtttattcaccctcgtttttatattaatagattgtttntaatacatgaagaaggcaaatggtgcctgagttaaactaagaaaatattctgagcttcttatgcctctggtagaggaatggagctctcaacattta

SEQ ID NO: 2121 - DNA, 567 bp, Cricetulus griseus
gcagtctcccacccaccccgggaagacagctttatgagatttctctctgaccaacatccccacagcttttcctgcagtgtcaaattatttatcttctttgcattcgattcccatgaaatcaagatcattccttttactcaacagtatgccaaggcaccttttcgttatatctgcctcctaaataaaacagcttaaaagacggacattttagggagttaggacttgtcaaatatggctaaggcccagggaactgaaaacagactcctacagttaggtggggccctgaataaatagtgacattatttacacgaggaagccagctcatctggaggcttgtgcctagaacagcacacccagagtgtttgcatgacgctctgtgcaacgtcgacagacgaaacagcgaggtaacgtgccttcttcaaggacatcatcaagcttgccgaaggcctcctcagaaaagctttggaacatcctagctctttaaaaattccatttaatcagtatgcttgagtcctgccatcatcatcattgcttgaatagccttgatcaatgacctgagctccccat

SEQ ID NO: 2122 - DNA, 567 bp, Cricetulus griseus
ggcagaccgtttcacattcccaccagcagtgagtgacggttcaaatgtccccacatctcaagcagcacttgttattgctcatctttgataataactgccctggtagggttagagtgacatttccctgtggtttgatgtacatttccccgatgttgagtttcttcatgagctcattggatatttatatgtctactttgaagatttgaatctacagtccattttaaatttttaaaaaattgttgagtttttagaattctgtctatattttgggtactagacccttaccaactgtgtgattcacaatttgttttcccatttggtgtattgtattcatttctggagtgttatttgaggcagggatggtattaattttgatgggctgtgccttgcttttcctttggttgcttgtgtctggtctgggcttccaaagacacatgttttcttctaagagctgcagtcatgtaatggatggggggcctgcttctttggtgtggggctatctagtcattccggaacatttattgaaaaaattcttatttcccacttcaatattattccacttgccct

SEQ ID NO: 2123 - DNA, 578 bp, Cricetulus griseus
cgccgggggacaccgcgcagcggctggcaccatgaagatctggacttcggagcacgtctttgaccatccatgggaaatggttaccacggctgcaatgcagaaataccccaaccccatgaatcccagtgtagtgggcgttgacgtgctggacagacatgtggatccctctggaaagctgcacagccacagactcctcagcacagagtggggcctgccttccattgtgaagtctcttattggtgccgcaagaacaaaaacgtacgtgcaggagcactctgtggtcgacccggtaaagaagacaatggagctcaagtccaccaatatctcatttacaaatatggtctcagtagacgagaggctcacatacaagccgcacccccaggacccagagaaaactgtcttgacccaggaagccatcatcaccgtgaaaggggtcagcctcagcagctaccttgaaggactcatggcaagcaccatatcttccaatgctaacaaaggccgagaagcaatggaatgggtgatccataaactgaacgctgagattgaagacttggcagcatcagcaagaggaagcatac

SEQ ID NO: 2124 - DNA, 434 bp, Cricetulus griseus
actttgacaaaatttttatgttaactaaaaaataaaaaaaaatgtaaaagacttaaataatacaagaaaaaaaattgtctaagaatgtctaagaaagtcagagaaataaaataaaagattatagagagttaaaacaaatggtaaaagggatggagggttaaagcaagttgttggaggtcagagaaaaagattgctacacaaagttataaaggggtaaaataagttgtaaaaggtcagaggaaagttattaaaggtcacgagaaaagggtgttacaagtaaaaaaaaattgtaaactgtgctatggtttctcatgtgtacaaacagtaaatgttaaaaatggtgatataagttaaaattctaaccatattaagccaattctgttttaaaaagtcccgtgtatttctcaagtaatttatatatatttgctttaaaa

SEQ ID NO: 2125 - DNA, 578 bp, Cricetulus griseus
  misc_feature (551)..(577): n is a, c, g, or t
gcttgtctgttctgaggagcagtaggcagtttcctccgtccgatatctcgcataccgaagtgcgcgtctccacctcatggaagactcgatggacatggacatgagccctcttaggccacagaactaccttttcggttgtgaactaaaagctgacaaagattatcactttaaggtggataatgatgagaatgaacaccagttgtcactaagaacggttagtttaggggcaggggcaaaagatgaattacacatcgtagaggcagaagcaatgaattatgaaggcagtccaattaaagtaacgctggcaacattgaaaatgtccgtacaaccaacagtttcccttggtggctttgaaattacaccacctgtggtgttacagttgaagtgtggttcaaggcctgtgcacattagtggacagcatctagtagctgtagaggaagatgcagagtcagaggatgaagatgaggaggatgtgaaactcttaagtatgtctggcaagcgatctgctcctggaggtggtagcaaagttccacagaaaaaagtaaaaatcnnnnnnnnnnnnnnnnnnnnnnnnnnng

SEQ ID NO: 2126 - DNA, 474 bp, Cricetulus griseus
  misc_feature (342)..(342): n is a, c, g, or t
  misc_feature (411)..(411): n is a, c, g, or t
cgctgatctcagcctggaggagaaagaccagaggatcggggaactggacaggttgattgagcgaatggaaaaggtaacagatacagcctgggcctgctgtcccctgcccagtgcccttggtcccacagtttccttgaaaacctgcctagagtcagaagcctcagtactgacttctgtcagcgcccccagttttcagtgcaacacatcctgtaacaacacagaaggaagctgagcaaagttattatcttcctctctggtaactatttctactgttgtttgtttctgtagtcctggtaggcaaacacatggcctcgtgcatgtgttaggcaaaccccaacccancccatcaaaattattttgatatgttttaaaaaatcacctgtaaaattctttctcaaattaatattgcancaactacctttgtggcttctctaggcgtgcttgtcatttaacctgatgaaacaatgttatttg

SEQ ID NO: 2127 - DNA, 579 bp, Cricetulus griseus
cagacagatgtggtgctggagagggagctgagaactctacatccagatctgcaggtagcaagaagagagagccactgggcctagcttagacttctgaaacctcaaagcctaccccagtgataaacttcctttaatgtggctacatccaccccaacagggccacacctcctaattcttctaagtgacaccgctcttctatgacttagcattcacatatatgagcttatggggggggggaacccttattaaaaccaccaccaaatccaaggcaaaaaaaatcatcacaattgaaactaaaatgaaaattctctcttaaagtttgggcattagagtaggacactactgttgctactcttactaacattattctagaggcattagccagtgcattaaaatacagagaaaggtagacagaatgaaataaaacatttttaataaatgatttgatgacttatattttgacttttctctgaaaaacttatgaaaaaccaatagggaagtttaccctgggcgggtggttccaaaataaacctgaaaaatttatttggtttttttggggatggaaaccccccacatgcc

SEQ ID NO: 2128 - DNA, 578 bp, Cricetulus griseus
tcgtccggtgaaaaacttaaaaaacaggatgtattccagatgtcatctctgaattctcaagagcgggttgattactgtcacctgattaagaaactatgtgggtcggcgattgagaatcagtgctcagaccccaactgcacacacatggttgtcggggtacccattgcgcaatgagaagtacttagcctccatggcagctggcaagtgggcgcttcatcgttcctacctggaagcttgcatgaccgctgggtgctttgtgcaagaagaagactatgagtggggaagtagcgccatactggatgctctcactgatgtcactgaacaccagcggaaactagcacttgcggcaatgaggtggaggaaaagaatccagcaaaggcaagagtcaggcattgttgagggagcatttaatggctggaatgttattttacgcgttgatcggccccgagaagctggattcaagcgccttcttctggcaagcagagcaaaagtattacctggtcaaccagtacctgtatctaatgacgctacacatattttttgtgactgcaataaactgatacctgatgactgcagag

SEQ ID NO: 2129 - DNA, 579 bp, Cricetulus griseus
aacacagacaacaacaagaagctgaactgaggcccttgctacagcctgcattgttcacacagcatctgcttccatccccaaaacttgacaaagtcactactctcaggaatcctgccctaaatgccattggagtaccagtgtccctgaggaagccagtctcctatactagtattcttggttccacagagcatcaggggccacaaggaaatctccaagatcttttttcaaaataggaacctaaatgcaactgaattaaaaaaaaaatacctagccatgaagcctactagaagtcttcaggttcatgtcactgataagccaatgctaaacagccaccttggaccgagatcatcaaagatattttctttaagacattcctcacacgttaaacttgagctattttttgttgcttcagatgtatcctttgcatggtcaatggcttcttctgtagaagctttagtcatttgttgaactcttatttagatctaattcaagttttacatagaggcccaggtgtgaatgcagcccattagccacaagaccagagaagaaacagtaaactgtggaaggggtttctgcccc

SEQ ID NO: 2130 - DNA, 303 bp, Cricetulus griseus
  misc_feature (187)..(187): n is a, c, g, or t
cactgaaatatgagcacaaagaaattgagtatgtggagactgttacttctcgccagagtgaaatccataagttcattgcagatggctgcaaagaagccctgcttgaggaaaaaagcgcttctgctttctggtggacaagcactgtagctttgccaatcacatacactactatcaccttcagtctgcnaaattacttaattccaacctgtcccggaggcaggaaacctgtcgagatgccacataagcaccagagaaaatcatgaacatgatagaagcgataaaaacgcccatcttcacaccatt

SEQ ID NO: 2131 - DNA, 580 bp, Cricetulus griseus
caatatatgatatataaaccttaagtgaaatgaaaaaaatgatctattgcagataactgatggatgtagttttcttttttaaattagaaatgccacttctattgtattgtctcacacatgctctatataaatgaaaaatgttgattttttgatgatagactatatacacaggctattcccgttacgtaagtcagttctttaggcttatttgctgtgctggttttatttgtttttaatgtaaaaaggcagtattccctttttcaggttgctgagaaacttaagtggaactgaagtgcattgtgatacagttattgaactattttaaagatatagtttctttggaagcctaatgtttccagtgctgggtgcctgagtgcttctataccagctgtcaccaagcaagtctgaggcacctgagctagcccagtgcatatagagagagatccactgtgctttccttcaaatccagttcttccacagcaactagcctatagttagtatgtgctgttcttccactgttgttcactgtggctttttccaatctactttcctttaccaagtgtgtgctcatgtgcagcca

SEQ ID NO: 2132 - DNA, 578 bp, Cricetulus griseus
  misc_feature (575)..(575): n is a, c, g, or t
ctgtagaagacttccctacagagaaccctaacgataactctgtgctagggaacctgcgttctctgctccagatcttgcgccaagatatgactccaggaggtcattcagggggccgccgtcgccagcggggccgctcggtgcgtcgtctggttcgccgtctccgtcgttggggcctacttcctcgaaccaataccccagctcggacccctgagaccagatcccaggtcacagcatctgctgctccctctgaggccctggatgacagcacaggccaaagctgtgagggcggagcagtaggaggacaggatggggagcaggctcctccactacccgtcaagccccccatcccaaccccaagcacacttccagcccttgctactgtctctgagcccccaggacctctcccctcagtgcctctagaaccctcactgctgtctggagttgtacaggtcctccgaggccgtctgctacccagcctgtggcccccatgacccacttggaccccagctggacatcacacaacagtcctggccccaaaggatgaggatgatgtgttgttaatgccgctggctgancca

SEQ ID NO: 2133 - DNA, 579 bp, Cricetulus griseus
  misc_feature (18)..(489): n is a, c, g, or t
ttttatgaagcaaacttnnnnnnnnnnnnnnnnnnnnnnnnnnnnnnnnnnnnnnnnnnnnnnnnnnnnnnnnnnnnnnnnnnnnnnnnnnnnnnnnnnnnnnnnnnnnnnnnnnnnnnnnnnnnnnnnnnnnnnnnnnnnnnnnnnnnnnnnnnnnnnnnnnnnnnnnnnnnnnnnnnnnnnnnnnnnnnnnnnnnnnnnnnnnnnnnnnnnnnnnnnnnnnnnnnnnnnnnnnnnnnnnnnnnnnnnnnnnnnnnnnnnnnnnnnnnnnnnnnnnnnnnnnnnnnnnnnnnnnnnnnnnnnnnnnnnnnnnnnnnnnnnnnnnnnnnnnnnnnnnnnnnnnnnnnnnnnnnnnnnnnnnnnnnnnnnnnnnnnnnnnnnnnnnnnnnnnnnnnnnnnnnnnnnnnnnnnnnnnnnnnnnnnnnnnnnnnnnnnnnnnnnnnnnnnnnnnnnnnnnnnnnnnnnnnnnnnnnnnnnnnnnnnnnnnnngaaccccaaatacggaaaattgtggatcaaataagacctgataggcaaaccctaatgtggagtgcaacttggccaaaagaagtaagacag

SEQ ID NO: 2134 - DNA, 578 bp, Cricetulus griseus
acagagaacagcagagggaggagaaggagaagctgagggaagagacgcggcaagccaaggaggaggctcgaagaaggaaggaggaagagaaggagctgaaggagaaggagcggagggaaaagcgggagaaggatgagaaggagaaggcggaaaagcagcggctcaaggaggaacgacgcaaggagcgacaggaggctctggaggctaaactggaggaaaaaaggaagaaagaggaagagaagcggttacgggaagaagagaagcgcattaaggcagagaaggcagagatcaccaggttcttccagaagccaaagactccacaggcccccaagaccctggccggctcctgtggtaagtttgccccctttgaaatcaaagaacacatggtgctggctccacggtgccgggctaccttggaccaagacctttgtgatcggctggaccaacttctacagcagcagagtggggccagctccttcctcagtgacctgaaaggccggctgcccctgaggtctggacccacccatgtgtgcagccgcaacaccaacatcatggacagggtcattgtggagagcaag

SEQ ID NO: 2135 - DNA, 558 bp, Cricetulus griseus
  misc_feature (541)..(541): n is a, c, g, or t
acatttgccagcctctacgcacaagcctgaaaggtcctatggaaacactccatgtggctctgggctcttctctgattgctatgagtttaattctaatctttacaggatggatgtcagtgtcagcactttcttaattatgagtattggaagacactggaatctccatgtgtccaatgacaaggaactttacatttcatttgattttattctttgattttaagccttattttcacaaaacagcctagctggaatattgatgccatactgtattttgcatgctgctttcttccctagaggcattgagggcaactgtacttggtaacttttgctctctcaagatttgtcattttttcagccattcttcatgcccatgccagcaagagcttttatatcataatgataaagccagctcatacttatttgtccctgtaggtggtggtagtggtcagaaatggcttcaggcatccatgagtttcaagcttcagaagtacctggcaccttaatccaagcaaaaatatgacagcttataaaaacaaccaanaaaaaaaaataggggcg

SEQ ID NO: 2136 - DNA, 383 bp, Cricetulus griseus
caacccataggtgtgagaaccattgactctaatattgcctctcacgttctatctagtagtatttctaattcctgtcttagatgctagtaaagcacattgttttctgttttaaaaagtcttatgctgtcagtcactagcttgaagaaaacttttcttacagtggtggttgagattaagctttaaggattgagtcatctctccagccagcctggtctacagatcaagtgccaggacaggcagggctgctccgaaaaaccctgtcttgaaacaccaactaaaaaaaaaggggggggccccccccgggggagacccctacttatgcccccccatggaggggatgattaggcccctgcggttaaaacatagactattgttctccctga

SEQ ID NO: 2137 - DNA, 570 bp, Cricetulus griseus
  misc_feature (69)..(101): n is a, c, g, or t
  misc_feature (114)..(145): n is a, c, g, or t
  misc_feature (147)..(184): n is a, c, g, or t
  misc_feature (222)..(240): n is a, c, g, or t
  misc_feature (242)..(263): n is a, c, g, or t
  misc_feature (267)..(289): n is a, c, g, or t
  misc_feature (295)..(337): n is a, c, g, or t
  misc_feature (344)..(370): n is a, c, g, or t
  misc_feature (385)..(415): n is a, c, g, or t
  misc_feature (427)..(444): n is a, c, g, or t
attcaaatccaacatgggaaaagaaaagactcatatcaacatcgttgtcattggacacgtatattcatnnnnnnnnnnnnnnnnnnnnnnnnnnnnnnnnnaatgtggtggatnnnnnnnnnnnnnnnnnnnnnnnnnnnnnnnnannnnnnnnnnnnnnnnnnnnnnnnnnnnnnnnnnnnnnctgggtcttgggcaaactgaaagctgagcgtgagcggnnnnnnnnnnnnnnnnnnntnnnnnnnnnnnnnnnnnnnnnnaaannnnnnnnnnnnnnnnnnnnnnncccaannnnnnnnnnnnnnnnnnnnnnnnnnnnnnnnnnnnnnnnnnntgctgannnnnnnnnnnnnnnnnnnnnnnnnnngtgttggagaatctnnnnnnnnnnnnnnnnnnnnnnnnnnnnnnnctgagcatgccnnnnnnnnnnnnnnnnnntgtgtgaaacagctaattgtgggtgttaacaaaatggatgccaccgagccaccttacagcctgaagagattctaggaaattgtgaaagaggtcagcgcctacattaagaacattgggttcgaccct

SEQ ID NO: 2138 - DNA, 578 bp, Cricetulus griseus
  misc_feature (87)..(108): n is a, c, g, or t
acactgtctaacacaatccagaggtcacagctaggtccgacaactaatctgtctctagagatgagttcagggcagctggcatccagnnnnnnnnnnnnnnnnnnnnnnacagaattagatatggttccaggaagagatgggctgaccagctataaccattcccaggtttctgtccagcctgtggcaactacaggagcagaacacaacaaatcccttgagaagtcagatggtctctttgcccaggacagagatccaaggttttcagaaatctatcccaacatcagtgcagatcagagtaaaggcatctcctccagcactgtccctgctacccaacagctattctcccagggcaactcattccctcctaacccccggccggcagaaaatttcaggaatagtggtctgacccctcctgtaaccattgtccagccatcatcttctgcaaggcagatgttggcccagatttctcgtcactccaactctacccagggagcagctccaacttggacccctagtacccgtccaggcttctctgcacaagtgcccacacaggctacagccaagactcgttcttccca

SEQ ID NO: 2139 - DNA, 501 bp, Cricetulus griseus
  misc_feature (6)..(6): n is a, c, g, or t
  misc_feature (30)..(30): n is a, c, g, or t
  misc_feature (32)..(32): n is a, c, g, or t
  misc_feature (35)..(36): n is a, c, g, or t
  misc_feature (49)..(50): n is a, c, g, or t
agtggnacgatcatatggggtaccccgggncnccnncccctacgaaggnntcgaccccacgcccgctccggtgaatggctgcactctggcatgtggtatgcgagatgacatctctgagattatggcgaaaccacattacacacgagcgccgcatgtgcatgccctctgcacatggagaatgagcctggtgcaatccataggcagagagatgccctccggggtgcagtcctaaatggaggcccccccagcacccgtataacaccttgattctctaaatgggctagtgatgagatgccgtccactaacactggggaaagcaacctgcaagaggccatgctgaagacctgcaagaacagggacatgtgagaaaatcactgaagattccgctgctactacatttgatgccctgaacgctcgtgtcacggagcttgaacggcagctatctcgggggggccgatacaaatgcctcatttgcatggactcatactcgatgcccctgac

SEQ ID NO: 2140 - DNA, 574 bp, Cricetulus griseus
gaagggtaatatggggctggggtgagcaggagactgaggatgggcagaagtgggtggctctctctgctccatgataagggcagggggcccttatcagtctggcctttggttgtcaggaaaggcctgacagtttacttgacaatgcccaggtcctgctttccttctgcccataccattgagagcctggagcaacaaatgactcaattatccagtccactcagttcccaatgcaagtctctcctactccaagcctcagttttcctgtttacaaaagtgcctgagattgggggacctctgggactgtccacagtgcttatcagggatcctccacttggggactaacataacctcttgggtccaaataacatctcccaagagagtcctcccgggcccaccctggtcctcatctaaatttgacattgtaccttgcttcctgcccacatctaacaggcagggcacagcctgacctgttccaagcaaaggctggttggtggacagcttatccctctctccaagaggcaggtggaccagagtcacgagctctacttcaaaatgttacttacatgcagacata

SEQ ID NO: 2141 - DNA, 580 bp, Cricetulus griseus
gtgatcctctgcaattctgtagagttgatccgtgagaggctgactgtatctgaagatgaaccacaagtggagcaccagaaggaatcaaagcacaatgacgactatgtatatgacatttactatatggagatggcccctccaggatggattgagaacattctgtctgtgcagccctacagccaggagtgggagctggtgaatgatgatcagcaaccagaagatacgtatgaagatgaagatgatgaaaacagtgaaaataattggcgcaatgagtatccagatgaagaaagcagtgatgaagatgaagattctagagactctaatgaatacaacagcctcagcgaggaggaaagaggcagcagacaattgatgtggagcaagtaccctttggatgtacagaaggagtttggctatgataacccccatgatctggattcagattgatagtctcgtgagattcttccacaagcccttgagagctctgtgactgcagtgccatcatcttatgatgccttactggagatgtagaaagaaaaactataccccagcacaatacagacttaactaagggctcttctgc

SEQ ID NO: 2142 - DNA, 330 bp, Cricetulus griseus
cagcttctcgggaccagtgctgctggccactgccttccgaactcggcacactccctcattcccttctgattccgaacgaggttccagggaggggggtggggtgcagagcgaagaggggtgcagacactgctcccctggccgagctctacgccagtgctcccccatctgcctgttggcgacattttctttatttctttttttttttatagggtatattttttttcctcattttttaaagaaaaaacaaaatcgggccaggcaaactttgaaaaacaaacaaaatcaccctgtgcccctccgtgggaggcttatttttccacaccttgccgg

SEQ ID NO: 2143 - DNA, 579 bp, Cricetulus griseus
gcccatccctaccgggccttccccgtgctgctgctggatgctgtgccctggtacctgcggctgtatgtgcacacgctcaccattacctccaagggcaaggagaacaaaccaagttacatccactaccaacctgcccaggaccggcagcagccccacctcctggagatgctgattcagctgccagccaactctgtcaccaaggtctccatccagtttgagcgggccctgctcaagtggactgaatacacaccagaccccaaccacggcttctatgtcagcccatctgtcctcagcgctctggtgcccagtgtggtggcagccaaaccagtggactgggaagggagtcctctcttcaacaccttgttcccagtgtctgatggctccagctactttgtacgactctacacagagcccttgctggtaaacctgcctacacctgacttcagcatgccctacaatgtaatctgccttacatgcactgtggtggctgtgtgctacggctccttctaaacctcctcacccgcaccttccacattgaggagcccaaatcgggtggcctggccaagagattggccaacc

SEQ ID NO: 2144 - DNA, 334 bp, Cricetulus griseus
  misc_feature (81)..(98): n is a, c, g, or t
  misc_feature (222)..(239): n is a, c, g, or t
catgagggtcataagagcaagaaagaggatattagttagtgaaaacagtgattcaacttctagtcctacctggctgaattnnnnnnnnnnnnnnnnnnattttattctatacttcttttcagttccatctttaaattttttttcaagacagggtttctctgataggtttgtggaccagcctggctccaaactcataaatatccaactgcctttgcctccccnnnnnnnnnnnnnnnnnnttgccccaccaccacctggcaacagtttcaaatttttaaaccacagcaatgtaaaaaattgaacattactgggcctccaaacaggtctgcctttg

SEQ ID NO: 2145 - DNA, 329 bp, Cricetulus griseus
  misc_feature (4)..(24): n is a, c, g, or t
  misc_feature (85)..(85): n is a, c, g, or t
tcgnnnnnnnnnnnnnnnnnnnnngtctccgcctccgccggcggggaccccaagctaccacgactgcgggacccacagccctgcnagatacggagccacgatgttcccgagggagaccaagtggaacatctcgttcgctccctgcggcttcctcggcgtctaccacattggcggggcctcctgcctccgtgagcacgcgcccttcctggtggccaacgccaaccacatctacggcgcctcggccggtgcgctcaccgccacggctctggtcactggggcctgcctgggtgaagcagcggcaaacattattgatgtgtccaaggaggccc

SEQ ID NO: 2146 - DNA, 536 bp, Cricetulus griseus
ccgagaaatagtactgttgactttagcaaggttgacatgaatttcatgaggaaaattcccacaggagctgaggcttccaatgttttggtaggagaagtggactttttggagagacctatcattgcatttgtgagactggctcctgcagttctcctttccgggttgacagaggtccctgtgcccactaggtttttgtttctgttactgggcccagcagggaaggcctcacaataccatgaaattggcagatccatagccactctcatgactgatgagatttttcatgatgtagcttataaagcaaaagatcgaaatgacctcttatctggaattgatgaatttttagatcaagtaactgtccttcctccaggagagtgggatccttccatacgcatagaaccaccaaaaagtgttccttctcatgaaaagaggaagattcctgtgtttcctaatggatctgctcctgtgtctactgagcctcctaacgaggctgctcatcatgctgggcctgagctgcagaggactggacggctctt

SEQ ID NO: 2147 - DNA, 531 bp, Cricetulus griseus
  misc_feature (4)..(5): n is a, c, g, or t
  misc_feature (13)..(15): n is a, c, g, or t
  misc_feature (27)..(27): n is a, c, g, or t
  misc_feature (32)..(32): n is a, c, g, or t
  misc_feature (35)..(36): n is a, c, g, or t
gggnntaccgggnnncccccccttcgnaggtncgnnacccacgtcgttccgtcccacgtcgttccgtcccacgtccgtccgggaaaaaccaggaagtctccaagtcgggatctgtgaaggaccggatatcgggaagttcaaagcgttcgttggaggggagcgatgactacgggaaggcgcagatatccaaaagcagcagcaaggaatccaggtcatccaaactccacaaggagaagacacgcaaggaacgtgagttaaagtctggacacaaggaccgcagcaaaagccatcggaagagggaaacacccaaaagttacaaaacggtagatagccccaaacggaggtccaggagtccccataggaagtggtctgacagctccaagcaagatgacagcccttcgggagcttcttatggccaagactatgaccttagccccccgaggtctcacacctctagcaattatgactcctacaagaagagtcctggcggtacctcaagaaggcagtcaatcagtccaccctacaaagagc

SEQ ID NO: 2148 - DNA, 310 bp, Cricetulus griseus
ttgctggcagccgtggtgaagatacaggctacagctaaccaagttcgtgacgccactgataacgaactgccagtgacaaaggaagttgtgctcaatgggaacaggaacgaaatgtataggccactccaagatgaggaagagcgataccttctccatcagctccatttggcatccgtcctgatagaagatagtgtctttgtgccagggactcaaagaggactggggaagctcatacctgacctgtcttttgtgtttttctctagccacacaccctgtggggatgcctccattattccaatgcttgatttcg

SEQ ID NO: 2149 - DNA, 578 bp, Cricetulus griseus
ccactgagacagctcctcagctccatgccttcttccatctctaggaagatggtcagtgttgttcactcctgcacccccagttctgttctttctctcccatcattgtggctcccttgttatacctaagttccatgtctaatttgttttggtaatcactatatctttttagagagtgccttattttcttaacaagcaatgattaatgaacaactgagtctttccttggattcattcatgaaccaacttgttcattttgcttttgagtctggagaagctgtgggtgggactgataatagattgtgtgacactggatgttgctccaatctatccaggtttagacatggtagtccctcccaactggcaaggtctctgactaatgtgagaaatgaattaaactggggggaaaattggcatcactggtctacaggagttcagtgtactgcttaagcattcattatgtgcattctgtgccttctggtcatgttgtctgcattaaagaagcaaaattagagttgaaagattatgctttcattgtcacaccacaccgtcaccagtgtcctaaactggcctcatactga

SEQ ID NO: 2150 - DNA, 579 bp, Cricetulus griseus
atgcatacagttcgggcatgcaagcagtctgtcatgcatacatataaaagtgtaatacaattataaaaattaaactaatctatgggcccagtataaggaaaatgtactgtttgcctcctgaattaatgtgtggacttcgcttgctgtgcatcacaatgggagacttgagcccagggattcaatgtagatcccacacaccctaagacaaatagtcctttggcatttccacagttgctcacatgcctctctcacatcatggagatttcctgactctcggaggtgacagacccaaacacaaacttttatttctaagatagcatcctgtacagcaccttgtttttactttggctactaaactaaaatagtcactggcttcctcggttttaagcaaagaggttttcagttctacgtttatgagtttctcattttttaagtggagcagcttggccaacaccacaaacctaaatatttttgctagtacaagtaccatccgctgcagacgagttctttacaggaggaaacctggcttctccctgcttgggtctggccaaatagacatcccgccaggcttaccatgaa

SEQ ID NO: 2151 - DNA, 580 bp, Cricetulus griseus
  misc_feature (200)..(220): n is a, c, g, or t
  misc_feature (459)..(482): n is a, c, g, or t
tacatggctttttgtgttattggcttgaatatatcttcagaggccatgaattgagagagagtgtagagaccacctaagaggggctggagggagggacaggaacaatgatataaagagatttttaacttcaacaaaaatatttttaatctgacttttgttgaaaggagagggatataaggctgtaaagatatagctgtgtnnnnnnnnnnnnnnnnnnnnnttggttaagagcactagctgctctcccagaagacgcaggttcagttcccagcaaccacatggtgactcacaactgtctgtaactgcagttccaggggatctgacaccttcacaccaatgcacacaaaataaataagttaaataaaaattttaaaaagatatagctgtgctcatttgaataagctgtcaccaatgcttgtggcttcagtcactctaagtggccatcacccatcaatagtnnnnnnnnnnnnnnnnnnnnnnnngacaagttgggcaagcaagtacaccgccaacgagagggaagcagttttagccatgctgtaatgagagctttctacaatgtgttcagtaaagaccaaag

SEQ ID NO: 2152 - DNA, 374 bp, Cricetulus griseus
  misc_feature (150)..(167): n is a, c, g, or t
  misc_feature (205)..(251): n is a, c, g, or t
agggtgtcaatgcatacatactatcatgcattcagtcctgccatattccatactgttgttgggcttacggtacttagaaaaatattagtcattcttatgccatctttaaatattttcatattaaagttccttcttgttttttttttaacnnnnnnnnnnnnnnnnnnccttcttttattttaattgtgtatattttatttatgannnnnnnnnnnnnnnnnnnnnnnnnnnnnnnnnnnnnnnnnnnnnnnggagagggagagagagataacacacaaaagaccaccttggggagtctttcttcagaactccacctttctctcttgtaacattctctcattgctcgggaagacaaactccccatttaggctaat

SEQ ID NO: 2153 - DNA, 491 bp, Cricetulus griseus
  misc_feature (120)..(142): n is a, c, g, or t
tttgtcaaagccatctccacgacctgcatacccaattaccccgacaggaatctgcccacagtattcgtgtatctggatggtgatatcaaggcacagttcattggtcctctggtgttcagnnnnnnnnnnnnnnnnnnnnnnnagttggagtggaaactgtctgagtcaggggcaatcaagactgacctggaggagaaccccaagaagcccatcgaagacagattactgtcctcagtgcgaggctctgttcccatgagaagggacagtgattctgaggacgactaagatagcagccactgtaaatttttgaactgtcttgatatgacatattgtctggattttcaataaggaggaagaaacaaaaatttatcatattttggtttctaacctttttataattatttaaattttatacatttcagaaataatcatggccaaaaattttatttaattccttggaactctttaaattaataatgtctctttaagaa

SEQ ID NO: 2154 - DNA, 400 bp, Cricetulus griseus
  misc_feature (342)..(342): n is a, c, g, or t
taaaggcaagtgctaccatgcctggcctacatttgattcttttaagtgcagtcattgattaaatatttcttatatcttttagaattcaactaaagcaaatatgctactacagctgaattgtttggggctatttgacggattgaatattttatgtagtgtcatgtatttgtctttctttttcagtgctggggattaagttctgtatgcttagtaaataggcgctatcgctgagctacatccccaaccattgagctggaagacttttaaaagaaaatgctcttaaataatttggattttccttaaaatcttattggatgctgtaactatgttaactttttttantgtcttcatggaattcacttaaaataatttgcatgaagctggagaaatatcttaacta

SEQ ID NO: 2155 - DNA, 579 bp, Cricetulus griseus
cccatcaaggagccccttcggtcagtcctccagtacaactcagccatgaaaaatgacacggacacgcctgctgaactgagtgagctgcgaagcaccatcatcaacctgctagaccctcctcctgaggtctcagccctcatcaacaagctggactttgccatgtctacctatctcttgtctgagtatcggctggaatacatgagggtgctgcgttccacacaccctgatcgcttccaagtaatgttctgctactttgaggataaagctattcataaagacaaatctgggatgatgcagggtgtcattgctgtggctgacaaagtgtctgatgccttcctgaacatgatggcagataaagctaagaccaaggagaatgaagaagagctggaacggcatgcccagtttctgctggagaacttcaaccacattcacaacaagataaggagggtggctgataaatacctgtctggtctggtggataagtttccacatttgctctggagtggaactgtgctgaagaccatgctggacatcctgcagaccctgtcactatcactaagggctgatattcacaaggac

SEQ ID NO: 2156 - DNA, 461 bp, Cricetulus griseus
  misc_feature (5)..(23): n is a, c, g, or t
  misc_feature (435)..(457): n is a, c, g, or t
ccgannnnnnnnnnnnnnnnnnncagagaaagtgacgttgttgatgtgatggagaagtgcgatgacggatggttcgtgggaacctcaagaagaaccaaattctttggtacctttcccggaaactatgtcaagaggctgtgaatcaccttcctccttatttactccacatttcaacaacacatctgcagaactcacctgaaatgtccccgcaggcctgttgctgtcttgccttatggtttccacaggccatctccatctccacctgctgccaccagatcaccagcagtgactgccgctgggagcttcaaggaaatgtggcaaatttacaccctcataaatgcagtttcctgctttctgccctgaacttttaaatgtctgtgatatggaataagaatgaaagtcatcataattttaaaaagtggaatagttgaggcnnnnnnnnnnnnnnnnnnnnnnntaga

SEQ ID NO: 2157 - DNA, 481 bp, Cricetulus griseus
  misc_feature (31)..(46): n is a, c, g, or t
  misc_feature (83)..(101): n is a, c, g, or t
gcggtggccatggaggcgtacgatcaggtcnnnnnnnnnnnnnnnnagctgaaaggcgtcgcggagctcggcgtgaccaagcnnnnnnnnnnnnnnnnnnncaaggacaaggccaagctgctggaggccatggggacgagcaagaagagcgaggaggagaagcggcgctgcctggacaagcgcacgccggcgcaagcggccttcgagaagatgcaggagaaacggcaaatggaaagaatcctgaagaaggcatccaaaacccataagcagagagtggaggacttcaacagacacctggacacactcacagagcactatgacattcctaaagtcagctggaccaagtaacctgcccctggtgcaaaagacaggccaggttggctgtattgctccctcagtgttttctagaatgttctacatctgcctggtgcatctgctgagcccaagctttctgaaacttgaattaaagtcaggctgtcct

SEQ ID NO: 2158 - DNA, 580 bp, Cricetulus griseus
caagatgatatttattcaccaaacaagtgaatgcataaaaatacagccaactgacatccagcccgatatattcagctacttgttgcatattatgtacacaggaaaagggccaaaacagattgtggatcatagtcgtttggaggaagggatccgatttctccatgctgactacctttcccacattgcaactgaaatgaatcaagtgttctcaccagagactgtgcagacctcaaatctctatggtattcagatttcaacaacccagaaagcagctgtcaaacaagggctggagttcaaagaaactcctcccagtaacagtggaaaccgagctgctgtccagggtgaccacccccagttgcagctctctcttgcaattgggctagatgatggaagtgctgaacagcagagggcccatcctgctgcccaagctgtggaggagcaccagaagcccccagtgtccatcaaacaggagcgatgtgatccagagactgtgatctcccaaggccactcctcatcctcttccgaagagactggtccctcttttacagagaacagtatcaaagtccacttatgccattac

SEQ ID NO: 2159 - DNA, 167 bp, Cricetulus griseus
  misc_feature (161)..(161): n is a, c, g, or t
agtgtgcctttgagagccctcggtcatattaacttcagtcatttggctggcctcgctcgtgtgagagttctgggcactgctctgcttctttctgcacagagcttcctgttcatcttcccccacgccacgcagcagagagcattcattgtcatgcctgtttncaccct

SEQ ID NO: 2160 - DNA, 523 bp, Cricetulus griseus
gctccctggagacggagaacgcagggctgcgccttcgcatcacagagtctgaagaggtggtcagccgagaggtgtccggcatcaaggcggcctacgaggccgagctgggggatgcccgcaagaccctcgactccgtggccaaggagcgcgcccgcctgcagctggagctgagcaaagtgcgtgaggagttcaaggagctgaaggctcgaaataccaagaaggagggtgacttgctggctgcccaggcccggctcaaggatctggaggctctcctcaactccaaggaagctgcactgagcactgctctcagtgagaagcgcacactagagggcgagctccatgatcttcgggggcaggtagccaagctcgaggcagccctaggtgaggctaagaagcaacttcaggatgagatgcttcggcgagtggatgctgagaacaggctgcagactctgaaggaggaactggacttccagaagaacatctatagtgaggagctgcgtgagaccaagcgccggcatgagac

SEQ ID NO: 2161 - DNA, 520 bp, Cricetulus griseus
gtgtcggaggcgtccgctggaaaatggcggaatacttggcctccatcttcggcaccgagaaagacaaagtcaactgttcgttttatttcaaaattggagcatgtcgtcatggagatagatgttctcggttgcacaataaaccgacctttagccagaccattgccctcttgaacatttaccgtaaccctcaaaactcttcccagtctgctgacggtttgcgctgtgctgtgagcgacgtggagatgcaggagcactatgacgagttctttgaggaagtcttcactgagatggaagaaaagtacggcgaggttgaggagatgaatgtctgtgacaacctatgagaccatctggtggggaacgtgtatgtcaagttccgacgtgaggaggatgcagagaaagctgtgattgacttgaataaccgttggtttaatgggcagccaatccatgcagagctgtccccagtgactgacttcagggaagcctgttgccgccagtatgaaatgggagagtgcacaagagg

SEQ ID NO: 2162 - DNA, 384 bp, Cricetulus griseus
gttcttgaacttttttttttagaatcactttggagtagtaagtcaccatcttatttattctagggggacatttatttgttactccgtcataaaaggctagaccacactgccttgaaaggattaaatctgaaaggggtatctgttctccattccacttatttggggccaatagaaaatccttttatgtagaacatgtattaaatgcagtaagacagaaaatggattctaaagacctgcacagggctgaaaaagctaaaccaggactactgtggatttgttagtaacaatttaaggacctttgtcaggaagatcttacgtttgcagataagtataacttccacattggtgggttagaaattcttgaggcctttaaaagatactttc

SEQ ID NO: 2163 - DNA, 495 bp, Cricetulus griseus
  misc_feature (3)..(31): n is a, c, g, or t
  misc_feature (448)..(484): n is a, c, g, or t
cannnnnnnnnnnnnnnnnnnnnnnnnnnnncttgtacattctaggtcagcctgttctacattgtaagtttgagaccagccaagactacatagtgagagtctgtctctaaaaaccaaaacaaataaaaccccacaaagacaactactactaatgcatataacacttaaaaaattttagatgcattgtgctaaatacaagaagtcactacatattctacgattctatttgagtaaactcaggaaaaggcgagacttagggcagaaaacatgttgggtagttgaaggagaagggtttaccagaggagcattggggacttagaggaggggcaatctgattgttctatttcttgattactatgattatataagtgcttatttaaaacacacaggatcacaataccacataacacctgacattctctcctggcctctgtacacctccatgcannnnnnnnnnnnnnnnnnnnnnnnnnnnnnnnnnnnntgggcacatat

SEQ ID NO: 2164 - DNA, 568 bp, Cricetulus griseus
  misc_feature (363)..(377): n is a, c, g, or t
agatgaaaagataaatgagatgtcgaaggaagtcatgaagttgaaggaggccctcaacagcctctcgcagctctcctactccacaagttcatccaagaggcaggcccagcagctggaagcgctgcagcagcaggtcaaacagctacagaaccagctgtctgaatgtaagaagcaacaccaggaggtcatatcggtttatagaatgcatcttctgtatgccgttcagggccaaatggatgaagatgtccagaaagtcctgaagcaaatacttaccatgtgtaaaaaccagtcccagaagaagtaaaactaggattccttggcaggacactgcccctttgttgcctatttttgtgttagatctgnnnnnnnnnnnnnnnactaccattgttcttatccatggtgtgcactgtgacctagcatagcttcttttccagagttttctggggatgagtctcaagagatgatgccctcctcaaaactgcataggtacttcagaccagcagaggtgagggatccttgtcatctctttagaatctacaggatcagctatgccccaaagcctagtcta

SEQ ID NO: 2165 - DNA, 550 bp, Cricetulus griseus
tcacagctgagtgagtgcaggctttggaatttcactgctaccccatccctgcctaaggagcacaggtgtctcaggcactgaggttaacattgcccatcaccctcaaccaactcttaagtgtaggctggacagatggtccagtggctaagagcctgagtcattactactgctaccaatactgacaggaacagtggcatatatggctgagcctgagcccagtgctgagtgagttccccgctcttaccagagagggcatctgaagtagctggtgtgtccaatttcatgaaggctgcttcaatagcttggctgaaggaattctggaaactgggcacaggaacacggtcagagttatcactctccccatcgctgtccacaggggccggaggaaccaagctgttctcatctaaaaacaaaagtgaaaagtctagaactgttattgaaagggctgctcctaactcacctgttccctgcccggctctcacctttctttggagcagttttgggccacacgtctgcttttgccttcccaaccctcagcatctgccaagtg

SEQ ID NO: 2166 - DNA, 579 bp, Cricetulus griseus
  misc_feature (314)..(332): n is a, c, g, or t
  misc_feature (442)..(456): n is a, c, g, or t
  misc_feature (481)..(496): n is a, c, g, or t
cttcccaggccagggggaggaggtcccatgtctggcagagcccgcattagcctcaatcacttaaggacgtgcaggcagaccaagtccagcgggaggacttgtgactcttactcacccaccatccttctgccatttaacctcatccagctggctttgcaggagccagttttgatctcttaattgctgagactccaggcgcagattttccatttcacacaactgatcctgagaatacaccaaataactgtttttcagaagaaacatcagactgggtgctattttgcttctcaaggttgagactgaagctgggtgtnnnnnnnnnnnnnnnnnnntctagcacttgcaaggcagagtttgccagacatgagttccaagacaaccaggtctgtgaagtgagaacttgcattacaccccacttccccaaagaaaaggttgtgactcnnnnnnnnnnnnnnnttatattaaagtacagcactgagtnnnnnnnnnnnnnnnngtttgtgacatgctcttggagtcttgaaactgtgactcatgaacatactatcttaaacactttaagcatatttaaaaacagat

SEQ ID NO: 2167 - DNA, 579 bp, Cricetulus griseus
cctactcctgtctgccttatgggcctgttgcctaccacctgtctgcaaccctcatctccgtggccagccctcttgcctgtttcctccccatcttcctgcctaacaggtcgctgttgttcctggggttgctcacagtgttgggaaccagctttggggcctacaatatggccatggctgccatgagcccctgccccatcctgcatggtcactggggtggagaagtcctcatcgtgctttcctgggtgctgtttgcagcctgtctcagctatgtcaaggtgatgctgggtgtgatcttgcgtgaccggagccgcagtgccctcttgtggtgtggggcaccggtgcatctgggctcgctgattggcgccctgctcatgttcccactggttaacgtgctgcggctcttctcatctgcggactactgcagcctggactgttctgtctagcctcacttgggcaccacaagacaccggcgctgaggtggaaaaccagaacccatagaggcaaaggctaacgactcccacccccttcttcgtgtggttatagatctgggtctgagctgtttaacccacaagccctcct

SEQ ID NO: 2168 - DNA, 579 bp, Cricetulus griseus
  misc_feature (569)..(569): n is a, c, g, or t
tttctgcgccccagtccgcggaatgacccgctcgcggctcgccgcctcggccgcccacgacccctagacaccgacacccgccctaggatcaaaccactggcgcagaccggtcccgccacgccgagcctgtggtccgttctaagggcggctcgcctgaggatttgtagatactgagtcgaagttggggctaatccacatcatggaaatggaaaccactgaacctgagccagactgtgtagtacagcctccctctcctcctgacgacttttcatgccaaatgagaatctctgagaagatcagtccattgaaaacttggtttaagaaaaaacaggatcagaaacgattgggaactggaaccctgaggtctttgagaccaatattaaatactttgctagaatctggctcgcttgatggagtttttagagctagagaccaaaatgcagatgagagcagcttacatgaacgtatggtgaaaaaacccctggaactcaacccatcatgttcaccagcagaaaacagtatgtctgtcctgattcctgatgagacaaatgttgagggccagttaccanaagctcatcc

SEQ ID NO: 2169 - DNA, 338 bp, Cricetulus griseus
ctccatcacttctcagtggttttgctttccctagagcctttttccactgagagagatccagtggcctcttgttgctcacctatgcaaggtggtgctttagtaatgcagaagcggccatgatcacattcttcctatgccttcccctttccagtttgtcctaacagggtctctgcttgcactcattttctaggaagcaaagaaagccctggctatggattattgtgttacctaccgtatcacttttttttttttcactcaaatattaaattattatattgtatatacataggtaaattttaaggccactgttcaggagcctggaactgaaaatcattaca

SEQ ID NO: 2170 - DNA, 528 bp, Cricetulus griseus
ggggggggagggagccgtggaggctggagtgctgacagcctgctcagcctgagggactccgggggacttggtgtcagtgagtggtgttgcagatgaagcaggggccagccccaggaaggtggctgtaggtttggagtctgatgaggtgctggccaacggccctgtcaaaggtgagacaagaggggtcaggaggctgggtgtcttcaaaggcgaaggggccgcagtagttgctgctgcagtaggctctgaggatggtggggctggagatggagagtcctgcatcttcttcaagctctccaacagcgggttagagctaggcataggcactgggagggaggctggtgaggcggcaagccctaccgcagcaggcagggtgaatgtgaatggaggattggcagcaggtggggtttcagtggctgaagtggaggcgtcatctatcttgtcctccaagaccttgttaaaccactgcagtgaggctttcctctccatgtccaggtcttccgcagtgatggaatatcctatctcaag

SEQ ID NO: 2171 - DNA, 467 bp, Cricetulus griseus
  misc_feature (98)..(122): n is a, c, g, or t
  misc_feature (199)..(219): n is a, c, g, or t
aaagctccattgttgctccagaaggtttctcttgcccttctgacagggtgtacagttgctgtttatgagccagtatttaatatttttaacctatgtcnnnnnnnnnnnnnnnnnnnnnnnnntttgtctgtgtagccttggctgccctggaacttgatctgtagaccaggctggtctcgaactcagagttctcctgctnnnnnnnnnnnnnnnnnnnnnttaaagaaaggcatgtgccaccactacccagctaacctatgtcttaaaggatatttgtattgtttatttttcatgttggagcaatctctttggaagtacctttcattttttttctggggttaattgccacaggctttgatgttgtatcaacatagggtagtatatttttgccagaaggacacaagtatgaagaggcagatcatgtcgtatttggatcttcactgggtgaatgagtggaggctgtgagc

SEQ ID NO: 2172 - DNA, 421 bp, Cricetulus griseus
tgggtcacctttctaggcgatcccaagaacctctatatgttgttcttccccgcggcctactacgcctctcgccgactgggcatctgcgtgctctggatcaccttcattactgagtggctcaacctcgtcttcaagtggtttctgtttggagacaggcccttttggtgggtgcatgagtctgggtactccagccagactccagtccaggttcaccagttcccctcttcttgtgagactggcccaagcagcccttctggccattgcatgatcacaggagcagctctctggcctataatgacagccatttcttctcaggtggcatctcggtcccgaagcccctgggtaagggtgattcctagcctggcttattgcaccttcttattggcagtcggactatctcgggtcttcctcttagcacatt

SEQ ID NO: 2173 - DNA, 510 bp, Cricetulus griseus
aagccatgctagaggatacactggttgctctatttgatttggagaaagtttcctttttcttcaaaccatcagaagaggagcccctgattgcaaatgtccctcttacgtaccaagtggaaggaagccggcaggccctgaaagtttacttctacatcgatagttaccattttgagcaactgcctcaacggttgaagaatggaggaggctttaaagtgcacccagttctctttacacaagccctggagagcatggaaggatattcctatagagacaacctgtccgtggaagagtttcaagcccagataaacacagcctccctggaaaaggtcagacagtacaatcagaagctcagggcattctacttggacaagtcaaattcaccgccaaatgccacatccaaagctgcctacatcgagaagctcatgaggcctctcaatgctttagatgaactttaccggctggtcacctcgtttatcagatccaaacgcattgctgcgtgtgtgaacacac

SEQ ID NO: 2174 - DNA, 461 bp, Cricetulus griseus
  misc_feature (106)..(135): n is a, c, g, or t
  misc_feature (141)..(159): n is a, c, g, or t
  misc_feature (161)..(174): n is a, c, g, or t
tacagagtgagctcaaagccagcctgggctacagcgtaagctccaagccagcctgagctacaatgttcaaaaattaaagatctaagccgggcattggtggcacatnnnnnnnnnnnnnnnnnnnnnnnnnnnnnntcaggnnnnnnnnnnnnnnnnnnnannnnnnnnnnnnnncagaacgagttccaggataggctccaaagctacacagagaaaccctgtcttgaaaaaccaaaaaaaaaataaaataaaataaagacctatccagatgtggttttgcattcctttagtcctagaacctaggagataagggcatatgagcatgtgggtcctgagttcttgtgtcattgggccccttcctccccccataactcatacctttaatcctagcactcaggaggaagaggcagcagatctctttgagttaaaggccagcttggtttacacagcaaggacagtaa

SEQ ID NO: 2175 - DNA, 461 bp, Cricetulus griseus; identical to SEQ ID NO: 2174
  misc_feature (106)..(135): n is a, c, g, or t
  misc_feature (141)..(159): n is a, c, g, or t
  misc_feature (161)..(174): n is a, c, g, or t

SEQ ID NO: 2176 - DNA, 505 bp, Cricetulus griseus
tttgggaggaggaaggtactctttgagcacatccaactcatccattgccgctcttctctgtgccctttacccacatttcccagcccacagcactgacaaccgctatcatctccaggctctccggcacctctatgtgctagctgcagaaccaaggctcctggtacctgtggatgtggatacaaacacaccatgctatgcccttatagaagttacttacaagggcactcagtggtatgatcagaccaaagaagaactgatggctccaacccttcttccagaacttcatctgttaaagcagatgaaagttaaagggccaagatactgggaactgctcatagatttaagcaagggagaacagcacttgaaatccattctttctaaagatggggttttatatgtaaagctcatggcaggccagctgtcctacaaagaagatccaatggggtggcagagtttgttggcgcagactgtgtctaacaggaactcggatgtcaggtctttcaag

SEQ ID NO: 2177 - DNA, 523 bp, Cricetulus griseus
cttgtcccgcttccagttttccgtggctcctcctcctgtcgttgcaggtgtaattcctgggactcagatggaccacacatccccgacctacatgcttgctaacttaacccacttacattcagaacaacttctgcagggcttgaatctccttcgtcagcatcacgaactctgtgacatcgttcttcgagtaggtgatgttaaaattcatgctcacaaagtggtacttgccagcatcagcccatactttaaagctatgttcactggcaacctttctgagaaagagaacagtgaggttgagtttcagtgcattgatgaagctgcactgcaggccattgtggagtatgcctatacgggaaccgttttcatttctcaggatacggttgaatctctcctgccagcagcaaacctactccagataaaacttgtcctgaaagaatgttgtgcatttcttgaaagccagtttgaccctggtaactgtattggaatttcccgttttgcagagacgtatggttgtcatgacctt

SEQ ID NO: 2178 - DNA, 459 bp, Cricetulus griseus
ttcaccaggctgtaaccaacctaggtaaattgcagattttcctagtaggcctgtgctggctcagctaagtgtgactgcagtgagcactgctggggctccctggctagcagtagtcacttatatatttgtagagttggtagatgtttagggtattgttcgggtggcattaagatcctgtgtcgtcatatctagtaagtagagacccccaggataggcactagaggagtcctcagagtaagtactgaggtaagcttgaatgagtagatcactctggtattgccagttgaatgctgtgtaccctgccaagaaatacacaaataaaagtactaattcaaaccaagaaagctgctgcagttttcattctcagagaacagtcattgaattctgcttattggacaacacagtctgtcagtgaatcattagagtggtaggtccaagtttgaagacccagacagcatt

SEQ ID NO: 2179 - DNA, 580 bp, Cricetulus griseus
gtgtgtgtctgggggtgccgagggggacgtgggggcgaagcacaaccggccatggcagcagcggaggacgaggacgggggccccgaaggcccaaaccgcgagcggggcggggcgggcgcgaccttcgaatgtaatatttgtctggagaccgctcgcgaggctgtggtcagcgtgtgcggacacctgtactgctggccctgtcttcatcagtggctggagacgcggccagaccggcaagagtgccccgtgtgtaaagccggcatcagcagggacacagtcgtccctctctacggccgcggcagccacaagccgcaggaccccagactgaaaactccaccgcgccctcagggccagcgacccgccccggagagcagaggggggttccagccgttcggggacaccgggggcttccacttctcatttggtgtcggagcttttccctttggctttttcaccaccgtgttcaatgcccacgagcctttccggcggagagcaggtgtggatctgggacagggtcaccccgtctccagctggcaagactccctgttcctgtttctcgccatcttcttctttttctggc

SEQ ID NO: 2180 - DNA, 510 bp, Cricetulus griseus
tgcagccttccatcatatttatagatgaaatagactcctttctacgaaaccgttcaagttctgaccatgaagctacagcaatgatgaaagctcaatttatgagcctctgggatggattggatactgatcatagctgccaggtgatagtgatgggagctaccaatcgccctcaagaccttgactcagctataatgagaagaatgcctacaaggtttcatatcaaccagcctgctctaaaacagagagaagcaatcttgaaactcatcctgaaaaatgaaaatgtggatagacatgtagatcttctagaagttgcccaggaaactgatgggttttcaggaagtgatctaaaagaaatgtgtcgagatgctgctctcctctgtgtcagggagtatgtcaattctacatcagaagaaagtcatgaagaagatgaaatccggcctgtgcagcagcaggacctgcatcgggcaattgagaagatgaagaaatcaaccgatgcagcgtttcagaatg

SEQ ID NO: 2181 - DNA, 581 bp, Cricetulus griseus
  misc_feature (22)..(61): n is a, c, g, or t
  misc_feature (89)..(141): n is a, c, g, or t
  misc_feature (149)..(205): n is a, c, g, or t
  misc_feature (208)..(220): n is a, c, g, or t
  misc_feature (250)..(289): n is a, c, g, or t
  misc_feature (311)..(336): n is a, c, g, or t
  misc_feature (349)..(433): n is a, c, g, or t
cccccctgaccagcagaggttnnnnnnnnnnnnnnnnnnnnnnnnnnnnnnnnnnnnnnnntccgactacaacatccagaaggagtctnnnnnnnnnnnnnnnnnnnnnnnnnnnnnnnnnnnnnnnnnnnnnnnnnnnnncctgacannnnnnnnnnnnnnnnnnnnnnnnnnnnnnnnnnnnnnnnnnnnnnnnnnnnnnnnnaannnnnnnnnnnnngagggcattccccctgaccagcagaggtcnnnnnnnnnnnnnnnnnnnnnnnnnnnnnnnnnnnnnnnntccgactacaacatccagaagnnnnnnnnnnnnnnnnnnnnnnnnnnactgatgggtggnnnnnnnnnnnnnnnnnnnnnnnnnnnnnnnnnnnnnnnnnnnnnnnnnnnnnnnnnnnnnnnnnnnnnnnnnnnnnnnnnnnnnaagatccaagacaaggatggcattccccctgaaaacagacgtgcatctttgcccgcaatcagctggaagatggcggcaccctgtccgactacaacatccagaaggagtccaccctgcacctggttctacgcctcatgggtgggatgca

SEQ ID NO: 2182 - DNA, 519 bp, Cricetulus griseus
tctgcctccactccaaccgacaacccacgtctctcctcacctttctggaaattgttcccatagggatccgtagagctcctgagccgcagctggcgcaggccactgtctccgcctgatccattcattggaagccggtcttttctccgaatccaagttccttgcgtgctgccccttagagcggcgggcagcgacatggagaagagcagcgagaccaacggctacctcgacggcacccaggcagagcctgaggccgggccccgcacgcccgagacggcggctaggaaatcgcggcgctgcgttgacttttttcggcgccaggcgctggtactgctcactgtgtcgggggtgatagtgggcgctggtatgggcgcggcgctgcgcgggctgcatctcacccgcactcaggtcttctacctggccttccccggcgagatgctactccgcatgctgcgcatgatcatcctgccgctggtggtttgcagcctggtgtcgggcgccgcctccctggacgccagctcc

SEQ ID NO: 2183 - DNA, 578 bp, Cricetulus griseus
ctttcagttgtcacagacccagccactgagcctgccattttctgggcaaggctagatcccggtgctgtaagacagctcgacacaacttgacttccttctttttcctcctttaggactagctgtttgctaactttgtcaagcccagctgtggtgggaagaattaggaatcaagtagtatgtatgatctcgtcacagtgctatttctagctctttatagacctgtttccaactagaaacagctggaaaacgaaaggaaaaaagtgtgtggggcatgcttctattctgattgtatacctattgaaattactgtgaggcccctccagccccttcctaggaattaattttggttttacagcaaaaattgacttttttccaatcatgtcattgaaagtgcctttaacaggaaaaataattactgaatgggaatttgcttaagaagccacaggatgaatgctttgggccccttacatgatgcagtggggagtttttcccttctttttctcttgtggacaatagctaaatagcagtattagttacaagcttggttgcagtgttcctatcttgggggctggtttata

SEQ ID NO: 2184 - DNA, 510 bp, Cricetulus griseus
  misc_feature (476)..(497): n is a, c, g, or t
acaaaagtggttgagagagagtacctgggagaattgggagaagctctagagaggaaatgggaggaagaaagcgatggaattctattttaattaagactgcattaggcctaaaacattttttccttagatttaaatgtctaagatctgggaacatatctgtaacagagaactttcccagcatgtgcaaagttctggctttgattcccaataccaccaatgtgggatatttaaatatctaaattatgaacaagtggagagaatcataataaactgttatgtaaattaaaggctcaaatgttcctatgttctcattctgaaggtaactgtttaggaactagatagtgatgcatgccaataatcctgacacttgagcaactaaggcaatcacatatttaatcccagtttgggttatatatctgtatttaaaaaaaaaaagttttggccaggcagtggtggtgcatgcctctaatcccaannnnnnnnnnnnnnnnnnnnnnagatctcttgagt

SEQ ID NO: 2185 - DNA, 536 bp, Cricetulus griseus
  misc_feature (108)..(125): n is a, c, g, or t
cgcttctccaggacgtggtgtgtccaggcgtgcggcggcctgcaggaggcccacccgggtcatttcttgagcctgtctctggtgctttctgaagtgaatcctgcgtgnnnnnnnnnnnnnnnnnntgtgggaacctgcgggcctcgggcgggagagatggatgcaagttcacacgacaagcagccctctgaagccagggagtgtgtcgttaataattctggaaatgcctcttttatcttgggaaccggaaagtctgtgacgcctcataagcgtgtagaagacgcgactcctaatctttgcacccccgttacggttaagtcacctttgaacttctccacgataaccgtagagcagttgggaatcacccctgaaagctttgttaagaccccttcaggaaagtcagcttcccttcagaagaccaggagacgttctacagttggtgtccggggctctccggaaacaaattgcctgatccgtttcattgctcaacagcgaagcctaaagaatgctgcaagatctctgttgactcagaattc

SEQ ID NO: 2186 - DNA, 492 bp, Cricetulus griseus
gccggtcgaaagagaagaggaagtctaagcacaagctgaagaaaaggagaggccatccctctgaagagcccagtgaaaacatcaataccccaacaagattgactccacaattacagatgaagccaatgtccaatagagaaagaaactgtgtattaaagcatcatgtgttcttggtccgaaactgggaaaagattcatcagaaacaggaggaagtaaagcacacccgtgacattcactcagcatcactgtatacccgttggaatggcatctgcagagatgatggcaatattaagtctgatgtcttcatgacccagttctctgccctacagacagctagatctgttcgaacaagacgattggcagctgcagaggaaaacctggaagtggctcgggcagctcgcctagcacagatcttcaaagagatctgtgatggtatcatctcttacaaagattcttcccagcaagcccttgcagctccacttttgaatcttc

SEQ ID NO: 2187 - DNA, 568 bp, Cricetulus griseus
aaaaccctaaacactccaactcttatgatatgttcatgagagggagaagaaatattgtccggagcacaaagaatacatgatcctcagttgctaacagagagagctttgcaccatggaattgatttggagaaaatcaaagcttacattgattccttccgctttggagcccctcctcatgctggtggaggcattgggttggaaagggtgacgatgctgtttttaggactgcataatgtacgtcagacatccatgttccctcgtgaccccaaacgactcacaccttaaagccacactgttttttctctccagtaatctgcagttgatcagattatacctgagaaacttaagttatgcagtaacttaagtagaataactgtcttactaaagtgccacgattgctttttaagtagttcagtacaaattaagaaaaagcattttgaacttcagatatgtttcagtaggaaatgcttgaacatttgaaatgagaaatttttatggttaaaattcctagtctgtctctacagaaatgttaaggggaattttaagcagtttaagaatgtatgattct

SEQ ID NO: 2188 - DNA, 537 bp, Cricetulus griseus
  misc_feature (14)..(48): n is a, c, g, or t
attggggtaccgcnnnnnnnnnnnnnnnnnnnnnnnnnnnnnnnnnnnaaacttcaaaatgaacaaagtgagtagaaagaaggtagctgatgatttgcataaggctcaacagtcactgaactttatccactcaaaaattgcactaaaagctgctggagacaatgctgttattgggaatagtagtgtttccccagaaacgggagctcctgagaaagagacaatgtctgtgagtctgaatcagactgtggtccagttacagcaactgcttcaggaagtcaatcagcaactcatgaaggagaagtgatcctggctgtgggagtgaagtcattggaaattactcgaaggcgttgtattatattttgccaaatgaaagccttatttatgtttcaccctttctactttgtcacacactgaacagttttgtcttttctaaccttgttagactactgacttacagagaaaacacttaaaaagccaactctgtagacacctccagagtttagttttataataaactgtttgaattaatagacctga

SEQ ID NO: 2189 - DNA, 449 bp, Cricetulus griseus
gcccttgttttgtagtatttttaaagagaagcaccatcttggcatttcttaaaggagaactgtcctttgtaactgaccacttctttgtcatctattaaggggctcaaaaaagagtaatggacatagcaaatgttcatggactgccatgtgttgtgtactcctagttttgtttagcaatggacagaagactcaggtctcagatataaacatgttactcgtgagtggcagaaagtaaagaagtaaattccatcaactaacaggagagaagaatggaaatgtgctgtcaagcgtctctgtgatagagaggtctcactgacttaaggaggggagtcattggtgctgtcaagcgtctctgtgatagagaggtcttactgacttggggaggggcgtcattgtggagtcgtgtgggtgtgtggaagactgctccaggcagacagcatggtgagact

SEQ ID NO: 2190 - DNA, 579 bp, Cricetulus griseus
  misc_feature (532)..(547): n is a, c, g, or t
tatcattgaagttggtacaccacccacagggaaccagcccttcccaaagaaggcagtagatgttttctttcctccagaagcacaaaatgactttcctgttgcaatgcagataagtgaaaagcatgatgtggtgttcttgattaccaaggatggttatatccacctctatgatcttgagactggcacatgcatctacatgaacagaatcagtggagaaacgatcttcgttactgcacctcatgaagccacagctggaataataggagtcaacagaaagggacaagttctgtcagtttgtgtggaagaagaaaacataattccttacatcaccaatgtcctacaaaatcctgatttggctctgagaatggctgtgcgcaacaacttatctggtgctgaagaactctttgcccggaaatttaacgctcttttcgcccaatgaaactactcataggctgcaaaggtggctgctaatgcaccaaagggaatccttcgtactccagacaccatccgtcgattccagagtgtcccagcnnnnnnnnnnnnnnnngcacctctcctttcatactctggaatcctttt

SEQ ID NO: 2191 - DNA, 579 bp, Cricetulus griseus
  misc_feature (269)..(283): n is a, c, g, or t
  misc_feature (549)..(575): n is a, c, g, or t
cagtatgtcaaggcggcctcttacctgctttccatccacaaagtgtatgaagctgtggaacttctcaagtcaaatcatttctacagagaagctattgcagttgccaaggctcggctgcgccctgatgaccccgttctgaatgacctggacctgagctggggttccatcctggagagagatggccactacgctattgcagccaagtgctacttaggagccacttccgcctatgatgcagccaaagttctggccagaaaaggagatgcagnnnnnnnnnnnnnnnctgcagagctggcttccatagcaggagaaagtgagctggctgcttccctggctctcagatgtgcccaggagctgcttctggtgaagaactgggtgggcgcacaggaagccttgcggcttcatgaaagcttgcagggccagagactggtcttctgcctccttgagcttctgtgccggcacttagaggaaaagcagcctccagaggtcagaagcccctcctccgtttaccaccagtgggccacaagctctgaaggaaccttggtgcannnnnnnnnnnnnnnnnnnnnnnnnnncttg

SEQ ID NO: 2192 - DNA, 580 bp, Cricetulus griseus
  misc_feature (488)..(488): n is a, c, g, or t
  misc_feature (577)..(577): n is a, c, g, or t
agtaggggctgcttcttccactcagcaattttggggaggcctgagctgtgctgtccttctgagcctttgtctcttgagggcctttgttcatcctggccgctcagcagctctaagtacacacacgcacacgcacgcacgcatgtgtacacacatgtatgcatgcatgcacgcacacacactcacaaaccaaccagaggtctaggaaaggacagccacttcctgtaggcttcagctctgcatacagatgacaggagtagaaatacaggccaagttccctacggtgacctcaggttggcctcagagctcatgtgtcagttcctaacccatctttgtttataaacaccagaatttctgcctcacccgtaggcagtttattagtgagtagagccagttaagaaccactttcaatacctggaaactttctaaaagtctttggtaatgtgagaagcaactaacagaagagcagggcataacttccttttggcctncgtttgccagtcactccctctccatttgcctacgtcctgctcatcagctcatatctgatactgcaggcagcttactgtttcctttctangac

SEQ ID NO: 2193 - DNA, 474 bp, Cricetulus griseus
agcactgctgacccaagtatctcctgaaggctaccaattgttcttaaaccaggagtggggaatatgaggtgtgtgcccctccctctgccacagttggttctcataagtcaatgagtgctacctgacattcctgccagcctaccagagtgaatgaataccagtcccccccttgcttcatagagagtgggcatgagggaaccatgatctctgtgtcagctctattccctggtgaccagaaacacttgagtgtcactgttgagcccatggacacggaccaagccacagtccctgtgacaatgcactctcatttcaaccacgatgctgtcaaagatggctgctttagtcaggcacacagggctcagtctggtggcctcttgcatcttggcccaatcttcctgctgccttgtgattgagtaataatcccgggagctggtttgcctgtaaatctgaaatcacatcccatgtttgtttgct

SEQ ID NO: 2194 - DNA, 525 bp, Cricetulus griseus
atgtcttgctgataccgacaggtttgtttcagccattggcattgttagtagatagaatattttaattagggtgaaagattatatttatacttaagtagagctccattataaatcagtgacagcctctgctttccttttttactttttgtcttacaaatgtctgtccagttatttgatgggataatatgaatgagacccacaatggagtgagaaaggtatacaatgtttttgtcagggattttattctataccattattgctgtattatgaaagcaattagaacttgattgccgtttggaatgctttcatttttcacatatatgctgctgttttcctataaatccacaagtcctcagatgttattagtagttgttagcacttcttttttaacaatgagagatgagcttttatatttagccaccaactaataatgttattaaagtttaatttttgttatagtttatcaaaaattaacattttcacttctaaaatgttctgattttacctctgtaactgacagctgat

SEQ ID NO: 2195 - DNA, 491 bp, Cricetulus griseus
  misc_feature (149)..(168): n is a, c, g, or t
tcctcgatggtgctggctgccgctggaggggtggaacaccagcggctcctagaacttgcccagaagcacttcagcagcgtctctcgagagtatgaagaggatgctgtacctggtgtaactccatgtcgcttcactggcagtgagatccnnnnnnnnnnnnnnnnnnnncctttagcccacgtggccattgctgtagaaggacctggctggtgtaacccggacaatgtggccctccaagtggccaatgccatcattggccactatgactgcacttatggtggaggagtgaacatgtccagccctctggcttccgttgctgtgtctaacaagctttgccagagtttccaaaccttcaacaattcctactctgagactgggctgctaggtgcacactttgtatgtgatggcatgagcatcgatgacatggtcttcttcctgcaaggccagtggatgcgcctgtgcaccagtgccacagagagtgaagtgacccg

SEQ ID NO: 2196 - DNA, 525 bp, Cricetulus griseus
  misc_feature (42)..(42): n is a, c, g, or t
atcagacagtgcaggagaagaatgcgatgcagcggagggggnccgaaaactaaaggtgtccagggtgccgtcctccatcccctcaagaaaacctttttacatctccattccttattccacttggatttcctctatcaaggaagcccattcatgtgtatgggatcaactgtttatagtcttttcacactgcagctttgggaaactccatcccttgatttgtgttgtctcggccttcctggtgtgcagttactgctgtagaaaagtatcaatagcttcatttcatataaacacgagtaacttccagacacttgtgtagaggactgacagtgcatttggtatttaagtaatctgaaccagttcttcaagtggctgtgttttgtattactgtgaagatatggaaatgtagtacattacaatttaaaataattgtaataataacttcctgatttctacattccctctctgaccctcctcgggggtttcctttcagaagcaacttttccatactcgtactgcatattcctt

SEQ ID NO: 2197 - DNA, 441 bp, Cricetulus griseus
  misc_feature (355)..(410): n is a, c, g, or t
gactattttagagaaggtacagggccagctgctgcctggcagtctcaatggccaacactaaatgaaggtgtttgaaattagggagggacatgtcccagcaaactgggagcacatgctctgtctccacagcaaccagccactgcaggcaacatttccttcctcccctgttctctctgcttgctgttgttttgacgctgttctgcttgcttgtcttctgactggggataaggaatggctgggctctcaagcacagctaatttgaagagtgtggggccaggcacttgcatgagggcagatggagcatggctctgaagctacttctagggctgctgtgggacccacttgttgacctctnnnnnnnnnnnnnnnnnnnnnnnnnnnnnnnnnnnnnnnnnnnnnnnnnnnnnnnncgcactctcccgcatctctgtgtgaaaacac

SEQ ID NO: 2198 - DNA, 438 bp, Cricetulus griseus
  misc_feature (254)..(279): n is a, c, g, or t
ccatatgcccagcagccaatgcagaccccaccccacagtaacatgatgtacacggcccccggacaccatggctacatgaacacaggcatgtccaaacagtctctcaatgggtcctacatgagaaggtaggcagcctggcagcccacagagcccactgggccgctctgttggattgatctgcacaaatacctttgaagagtacgatttcaaaaccagcattggtgtgaatgcaaaaacattgttggcaccatttnnnnnnnnnnnnnnnnnnnnnnnnnntgtttgcagcaaaaagccttatacaagtgggtcctctttttccttttttctttttgggccccttggtttctgtaactttaatataaaattctctgcaaaggaaggccccccttaggactacagttgggcagcagccactcattgggcctgcttccttta

SEQ ID NO: 2199 - DNA, 523 bp, Cricetulus griseus
cttacaagtcattcacctcaggggctttgtcatggtgagaaagcacactaacagtagtcttggtgggactgtccatcaaatagtcctgtccactgtgtctgaggaacagggactctggctgagggaaagccgcagggatgggaactgccaagctcccagatccttcctgaagaccctactaatccatagcctgaagtgggaggttgtggggaccttcttggcattagtctgaggtctgaagcctggttggtcagcgttgttttcattgctatgcttagcctccatgtgtttctgttgtttgtgatcagagaggctcagctgatcagatatctattcaaagagccccttagatgatcaaacagcacaggaactgattgatgatgggcccagattaagatggaggagaaagcgctatgcaaagaaagccacagcagactatctttagttcatcaaaccacagacagcgaggcaattggataagtgtccagatgtctaacgacagagaagagaggctccttggctg

SEQ ID NO: 2200 - DNA, 438 bp, Cricetulus griseus
tgaaggtgaagcgggagccgggtgagaatggcaccagcctgactgatgaggagctggtgaccatgtcggttcgagagctgaaccagcacctgagaggcctgtccaaggaagagatcatccagctgaagcagcgccggcgcacacttaagaaccgcggctacgcagccagctgcagagtgaagcgtgtgacccataaggaggagctggagaagcagaaggcggagctgcagcaggaagtggagaagctggcctccgaaaacgccagcatgaagctggagtttgacgccctgcgctccaagtatgaggccctgcagaactttgccaggaccgtggcccgcagccctgtggccccagctcggggtccccttgctgctggcctggggcctttggtccctggcaaggtggctgccaccagcgtcattacaatagtaaagtcca

SEQ ID NO: 2201 - DNA, 473 bp, Cricetulus griseus
  misc_feature (11)..(51): n is a, c, g, or t
  misc_feature (134)..(134): n is a, c, g, or t
gggcgacttgnnnnnnnnnnnnnnnnnnnnnnnnnnnnnnnnnnnnnnnnntggcatgattgaagaaataattcataggcagcagggaaccccatccatcaacattcttaagtcaagaaagggacttagctttnctagggtaggctctctataagagtacctggtcaatgtcagcgcaatggcgtttatcctttgaaagaccatgtttatggtagacttaagtggcattcagtatcatggtatccagtagctataaattttctccaatattttttcagacacatggtactacaaactcaaatgttttgcccttatctggtacatcagattcatggatcagataatctgttcaccccaaagggtagagatatcatgcccaataatataaaacttatccttggttcctcaaagattatagtgaaatattttcaggctaatgtagagtataggtggcaatacttggagtaaacctt

SEQ ID NO: 2202 - DNA, 250 bp, Cricetulus griseus
tatgtccagagaagaaattagatatatttacatgtaaaccaacacaaggggtgagtcagataggcttaagagtcctgttgggcatggcctctacaccaagctgggtacattttaaaagtatatctaaaccctactaaagggaccatagggttggtcgttcaccaacaagtcatatttctttgccagaaagaaatgttaaaaaatacttgcttaataaagggaggggggtgggaaaaggtatagagaggga

SEQ ID NO: 2203 - DNA, 404 bp, Cricetulus griseus
tcaatacacttgtcaaacctgaaggatatacaataccagcagtatgccctaatggaaactgtagactttggctaataagtatgtggcaatgtaagtccagcagttgttgcaagtctggttttgtaggtctgtatcgttctggtatgggatgctgatagtaggggaggctgtgggggaactctctgttcaattttgatgcgaaattaaaactgttgtaaacaataaaatctgtttgaaaggaaaaattggaaaggaatgattagtagatgttcaatatattcccatgctaatcattaaaaataactaaaaattatagaaaaaagaaaacggggaaggaatcaaaagaatacactgcaaaaatatatcacatcaaacacaaaataaggtagtaacatgaactgaga

SEQ ID NO: 2204 - DNA, 107 bp, Cricetulus griseus
ttctttgccagaagctaaatcatggcaatgaccaccagtctcccagtagcagtaactataatggcctggtagagagctttgagctgggttccggggggcacactgat

SEQ ID NO: 2205 - DNA, 579 bp, Cricetulus griseus
taaagacgtttgccactgtgcccagcaaataaaaatttgaaatgctacaatattttatgagtcagggagtttagtagtaaaagtgtcttggaagttcccagctagctgccctagagttatggcaaaaagcagtaaattctgtgtgaattatttttataattatggttcacttaaggggtgacattggatagcttaatttaccataaatcactagacaataaatatgatttaacagtatttatagagttcaacttggctaggatgtttttctgtcttggagttaagaaaatgttgaaatcttagcggcccagtctccaagaacatcactgaccacaatagctcgtgcttataccgtgtctaggattgctatgctcctcagagaaggcgttatgaggggaatagtgtgtgtgttgggccatgcatggtgccacacacttttagtcctagatctccctgagtttgagaccagtctggtctatatagtgagactctatctcaaaacaaaacatagaaagaaatgaaatagaaaaagaaaagtctgtgtacagtgtggacctcggactccttggctatgtgtct

SEQ ID NO: 2206 - DNA, 568 bp, Cricetulus griseus
gtcgacccacgccgtcgcgaaaaacaaaatggtcaaccataaaaccatacatgtcccatactagttctgttcttggttatttattccaaatgaaatgaaagcagattcctaaaaagactttcagtgagtgtttaggtgagcattatttataatagccaaaaactgaaatcaacctaatgtccatcaactgatgaatgtgttctatccatgcagtagaacactttgtttcttttacattatgttttaatgatttccagtggtgtatctattttccagatttctttacccaacgtaatttcttagataacctttttcctggattcattataattttacagtaaccgttacttgaggaatttccaaaataagtgagtttgttatttgtttgttgtatgttgtttgagtccttacatgcaccaaaacatttttatttttgctgttgcatgagcctcatttttcctcagaactttaagggtataaaactctgacctatagccgtaccaccctgagtgctctattctcgtcttatttcagaagctaagcaaggccccagcctacttagtgcttg

SEQ ID NO: 2207 - DNA, 429 bp, Cricetulus griseus
  misc_feature (371)..(385): n is a, c, g, or t
atgatgacttttgcaactttagtgacaatctgcgagtcacatactagatatggctgggtagcaactcattgcagagcaggtgcttagcacacataaggtcctgctctcatctcaagcaccagaggaaaacaaaacaacaaaagaccctataaaaacaaattctatcttttcttcttaatgtcttagaccaaggggaggagggacaggtgctggtcttgagtaatacgaaagaatgattatccaactgtgcttcattaattccatctctgcttcaagcagcatagcccagtacaagtctatggtgctgtaaggacagacaggtgactgaccacaccatccagtgcttctctcatcacaacaaaagtctctgnnnnnnnnnnnnnnnacatggtgctaggacaaggcgtggatgaaatactgaagggagat

SEQ ID NO: 2208 - DNA, 429 bp, Cricetulus griseus; identical to SEQ ID NO: 2207
  misc_feature (371)..(385): n is a, c, g, or t

SEQ ID NO: 2209 - DNA, 551 bp, Cricetulus griseus
  misc_feature (20)..(112): n is a, c, g, or t
  misc_feature (159)..(198): n is a, c, g, or t
  misc_feature (223)..(279): n is a, c, g, or t
  misc_feature (304)..(344): n is a, c, g, or t
  misc_feature (346)..(380): n is a, c, g, or t
  misc_feature (386)..(492): n is a, c, g, or t
tgctgaaggctgtgatgcgnnnnnnnnnnnnnnnnnnnnnnnnnnnnnnnnnnnnnnnnnnnnnnnnnnnnnnnnnnnnnnnnnnnnnnnnnnnnnnnnnnnnnnnnnnnnntctacgatgggccacctgatgatgaggcggccatgggcattaaaagnnnnnnnnnnnnnnnnnnnnnnnnnnnnnnnnnnnnnnnnatggtgccaacctccgacaaaggcnnnnnnnnnnnnnnnnnnnnnnnnnnnnnnnnnnnnnnnnnnnnnnnnnnnnnnnnnccgcatcatgggccccaactacacnnnnnnnnnnnnnnnnnnnnnnnnnnnnnnnnnnnnnnnnngnnnnnnnnnnnnnnnnnnnnnnnnnnnnnnnnnnnttgagnnnnnnnnnnnnnnnnnnnnnnnnnnnnnnnnnnnnnnnnnnnnnnnnnnnnnnnnnnnnnnnnnnnnnnnnnnnnnnnnnnnnnnnnnnnnnnnnnnnnnnnnnnncttcatcgtcagccctgtcgtcatattggctgcggaggccaataacccagctgacctgc

SEQ ID NO: 2210 - DNA, 551 bp, Cricetulus griseus
gccggcgtcgcctcgagcagtcgcaaccatgagcgggaccttagcgaagatcgcggagatcgaagccgagatggcccggactcaaaagaacaaggctacagcacatcaccttgggctgcttaaggctcgtcttgctaagcttcgaagagaactcatcacccctaaaggtggtggtggtggtgggccaggagaaggttttgatgtggctaagacaggtgatgctcggattgggtttgtgggtttcccgtctgtggggaagtcaactctgctgagtaacctagcaggagtgtattctgaagtggcagcttacgaattcactactttgaccaccgtgcctggtgtcatcagatataaaggagccaagatccagctcctggatctcccgggtattattgaaggtgccaaagatgggaaaggcagaggtcgtcaagtcattgcagtggcccgaacatgtaatttgatcttgattgttctggatgtcctaaaaccattgggacataagaagataattgaaaatgaattggaaggctttgggattcgattgaacagca

SEQ ID NO: 2211 - DNA, 524 bp, Cricetulus griseus
tgagatcagcgttagaggtgtcaagataggtgtcaaagccgatgatgctcaggaggccaagggaaataaatgtagccactttttccagctaaaaaacatctctttctgtggatatcatccaaagaacaacaagtactttggtttcatgaccaagcaccctgctgaccaccggtttgcctgccatgtctttgtgtctgaagactccaccaaagccctggcagagtctgtggggcgtgcatttcagcagttctacaagcagtttgtggagtacacctgtcctacagaagatatctacctggagtagcagtgccaccaccctctgcagccctctgccccaggccagtactaggacagctggcaacggacaggatgtggcactgccacaagagaatgggggagtgagggctgtttcgggggggcaggggtatggggagaagcagatgcagtttattgtaatatatggggttagattcatctatggaggacagtacaggctctctggggactggtgaaaggtcaagctg

SEQ ID NO: 2212 - DNA, 416 bp, Cricetulus griseus
acaagaacccaagaagggagagccagagaagcagtgagccctggagaagctccagcgggtcacagctgcctcctgccaccctgcaccacatcaacgctacgagaaacgcacactgttcaccattgccattgtggttctaatgcaggcaaatacactgtttgattatgcctagttctacgttcctttcagctcactcgtatctttagtgcaattaacgtctgttctgatttatgttgtgtcctgagagctgaagtcttaagctttggtggcctttgaagagtgacagcaagttttacctaaccctgtgggggggaggttgccagcagaatgccttgtagttatttgatagaatttattactgtatatttaacagatctgcgtatatatatatattataataaaagaatgtgagatga

SEQ ID NO: 2213 - DNA, 572 bp, Cricetulus griseus
atcgaaggccagcagagagttcggggacagcctgagtttggagattcttcagattattaaggagtcccagcagcagcatggcttacggcacggagacttccagcggtacaggggctactgttccagaagacaaagacgtgtccggaaaacactcaactttaaaatggggaacagacacaaattcactgggaagaaagtaaccgaggagctcctgactgataacaggtacttgttgctggttctgatggatgcagagagagcctggagctacgccatgcagctcaaacaggaagccaatactgagccccgaaagcgctttcacctgctgtcccgcctgcgcaaagccgtgaagcatgccgaggaactggagcgcttgtgtgagagcaaccgcgtggatgccaagaccaagctagaggctcaggcctacactgcttacctctcaagaatgttgcgctttgaacatcaagaatggaaagctgccattgaggcttttaacaagtgcgaaacgatctacgagaagcttgccagtgcgttcacagaggagcaggcagtgctgtacaagcagcgtgtgg

SEQ ID NO: 2214 - DNA, 510 bp, Cricetulus griseus
ctaaaaaaaaagtgtgggctgttaaattaaatggttaaacaaatgttaaacaaaactttacttagtggcgatcatacatcataatcagtatttttcaatacagtacttgtccaaggcactacatgcatagctacccttcaaaaacaaatggagagagggtggggaaggagtgggaggaagaaatcagagctgtaaaccaggggcaggcctgggaaaagggcaagagaaaggatacaaactttcagttctaagttctggatacttaatatacagtacagtaatcaatactaatgtatatttgaaacttgctgagagtagaccaagtgttctcatcaaaaaagaaactgaagggacctgggtgaggcatatgctaattaatttgacaatggtaacaattatttcacaacctctgcatgcatcaaaatatcacgccgcacatttttaatctataaatgattatcttgtgagtcacatctcaatagaataaagctagagaaaggaaacaatatc

SEQ ID NO: 2215 - DNA, 579 bp, Cricetulus griseus
  misc_feature (143)..(182): n is a, c, g, or t
aggctggtctcaaactcacacagatccacctgtctctgcctgctgagtgctgggactaaaggtgtgcttctcatcgccccactactttttcatatttatcagtgtgctttagaacgtggggcttattttctcatagaataatnnnnnnnnnnnnnnnnnnnnnnnnnnnnnnnnnnnnnnnnttatcctggtatattcttttggaagctgcatacaatggattgcttccaatttaagtatctgattgggtcagtctggaaattaacatttgtgaaggcaataccacagtgctttcccatgattcttttattgcttcatagtttttcatgatgtaggtataccataatttttaagttaattttttattgatgggcagttggatgctaatgcacacagtttctgtagttaataatctttttcatgaagcatttatatgtacgcaaataaatgtgaggataggttcccagatgtgagatggctgagccaaagggaagagtacatttgttatttggtggccagtttgcctctaccctttaaagttcttggctgggattcatgtaacaaaagacatgttcccaa

SEQ ID NO: 2216 - DNA, 562 bp, Cricetulus griseus
  misc_feature (2)..(19): n is a, c, g, or t
annnnnnnnnnnnnnnnnntcctcctccaagataagcagcgcgaaaatctactgcgtggcttgtcaggagctcgactcagatgtggataaagacaatccggctctgaatccacaagcggccctctctcaagctcgggaacaccagctcgcctccacgacagagcctgccacaggctctcgtcccacaccccatcccccagtaccccgtccagagcactgtgagggagctgcagcagggctcaaggcagcccatgggcctcccctacctgctgcacctctaaatacagatgtggtggcttacacacagacagccctcctgcagaagctaacctgggcttcagctgagctgggctctaccacctccttggagactagtattcatctgtgtgggcttatccgggcttgtgctgaggccctgtgcagcctgaagcagcttcagctctgagacctctactccaacctgtgttcccctgagaaaaaccctctagaaaaacagctgttcctctgtgcggcttgttcctttcttggttctgagagcatgcaagcccccgctctatacatg

SEQ ID NO: 2217 - DNA, 581 bp, Cricetulus griseus
cagatctccttttccccgaggcttcgctatggcggactgttgtgtaccgatatgcccacggccaatgtgtatccctccatgctatgctgaccttggcaaagctgccagagatattttcaacaaaggatttggctttgggttggtaaagctggatgtgaaaacaaagtcatgcagcggtgtggaattttcaacatctggttcatctaatacggacactggtaaagtcagtgggaccttggagaccaaatataaatggtgtgagtatggtctgactttcacagaaaaatggaacaccgataacactctggggacagagattgcaattgaagatcagatatgccaaggtttgaagctgacgtttgatactaccttttcaccaaacacaggaaagaaaagtggtaaaatcaagtctgcttacaagagggagtgtataaaccttggctgtgatgttgactttgattttgctggacctgccatccatggctcaactgtctttggttacgaaggctggcttgctgggtaccagatgacctttgacagtgccaagtcaaagctgactatgagtaactttgcagtgggct

SEQ ID NO: 2218 - DNA, 578 bp, Cricetulus griseus
ctcttaggcctcgggtggggatcatttttccgggtgtgtttacactgtgaggttgttcctttcaagaattcctgaggagagttcaaagaggccttctctttgagcgatttggagagcgagaatgagagtgagacttgaagagggaatggggccggaggtgcctttatctgcagagaattgctccagctttcctgatagaagctgctgccgcctcttaaacagcttagtgcagtcaaaagacaggctgacttgaaaggctgttttacagcaagatcagcaggggccacgaagcagagagtggagcgatggaggctaagcctcctcagtgggaggggtctatcaaagagaggccctggctgattctgactgcctctgcccctgaaacccatctgcaaaagctggccatctgtcagcctaccctccctggccaggaccaataggcccaactcttggggggttgggtgtggccctgccatgcggctggtgtcagtgcagtgcattgatcgcccgccgggcgggctgggccgcaagctgggcagctcctgcttaatgtgattgaaaggcagttaaaatggcgg

SEQ ID NO: 2219 - DNA, 579 bp, Cricetulus griseus
atttttagcctcttctgactggtccttcttggatttcaaatggcctccagcactttaattttctgactaaatttcttattaaattcacagtccaggcattatattaaaataaaatatgaattgtattggaaataaactattgaagctattgagaatggaaagaatcaggtccatcagagccaccaactatgtacttcattttctgtgtctcggtttttaatctgtaaaatatgggcaataatccttagctcttcgagccattgaaaaggtttcatagttaatccctggcacaccttagaataactgcttctgagtcactccaccgtcctgctgctgtagtcagcgcattctcacgccttcatgaacaccctgacttcccagggcaatgccagcatggactccatccttacagcaacacccagctttcaaattacagaggccgcgtgtgtcagccctcagtgtgccatggtcagtgctagggaagctctcctcatcagagccaaacaaacaaagtttgttttgtgaatgtagaacagcaaacaaaacagattaattttagttcgtagtgtataacattgt

SEQ ID NO: 2220 - DNA, 578 bp, Cricetulus griseus
  misc_feature (409)..(409): n is a, c, g, or t
ttcgaaatggacaacagagaaaaagggagaccagcggttctgtcctttggcagatgaggaggcagcttcttctggagttgatgggcattcttcctacagtgaggagtactcgtattgtagaagaagccgatgtggagatggagcccactgtgtctgtgtactcggggctgaaggaagagcatgttgtgaaagccagtgcactcttacgtctatactgtgccttgatggggattgctggactcaaaccaactgaagaagaagctgaacagttgctgcagttgatgaccagccgccctcctgccacaccagctggggttcgatttgtttctctctctttctgtatgctgctggccttttctacacttgtcagcacaccagatcatgagcagctgatggtggtgtggctcanctggatgatcaaagaagaggcttactttgagagtacatcaagtgtctccgcttcttttggggagatgttgttattggtggccatgtatttccatagcaaccaccttagtgctatcattgacttagtctgcctcaccttggggatgaagattgtgattaagccaagctcc

SEQ ID NO: 2221 - DNA, 529 bp, Cricetulus griseus
tagactcagctcttctctcaactcttccaaaaggccatccagacaggctgaagagtatgacctcatctgattttattttagacagttcataaattttacttgccttaaaaaataaatttttgttaagtattctggtttaagaacatcttggtaaacatgggcaatgggaatgcttaaaatattgggatttactagtcattgtgatttgctctactatgacactatatgtataaatatagttattgtgaatgtttttccatgcctgtttaactagcttcttaatatgtgaaaagtgtcagcctgtgtttctattgtatttcaaatcttaataaatacactatctttttaatgtagccaaagaattgccatagttcagccaaattgaacattgttttaaatctgtcctaatgtggataaaaggtgatagtacattgcactttttgaggcattataattttattataattattgctgtgtgtgtgtatgtgtgtctgtcttgtctacatctaaatatatgtagagatcacag

SEQ ID NO: 2222 - DNA, 580 bp, Cricetulus griseus
  misc_feature (264)..(280): n is a, c, g, or t
tcagttcgatctttaacattgagatggtgaaagacaaaactgcagaggaaatacaacagatttggcagcagtatttttcagcgaaagacacagtctatgcggttattccaaaagagaagtttgatttgatctggaaccgggctcagtcctgcccaacatttctttgtgcactgccaagaagagatggttatgagttctttgtaggacaatggaccggtactgaactccacttcactgcacttataaatattcagacccgagggnnnnnnnnnnnnnnnnngttgattttatatcactatcctgaacttaaggaggaaaaaggcatagtgctgatgacagcagaaatggattccacatttctgaatgttgctgaggcacagtgcattgccaatcaagttcaactcttctacgccactgataggagggagatctttggactagtagagacctttaacttcagaccaaatgagttcaaatatatgtctgtcatcgctgaattggagcaaagtggacttggagcagaactgaaatgtgcccacaaccaggataagacttagagacatcttgattggcccttcat

SEQ ID NO: 2223 - DNA, 579 bp, Cricetulus griseus
  misc_feature (487)..(487): n is a, c, g, or t
gagtacccagagcctgagaaaagtgagaaggagatcaggagagagatccgggctctgctcaagcctcacatgagactggatgacagaaactgggcaatacagaatttccctcccctgggttccgtggtactgctggagcagcttcggacgtgtgctgtagacttcatgagcttctacgcgtgtgcatcttatgtcttcttgcaggagaatactcctatgcggactaatgctgagtatttacttttgaagaagattggcctcagaaggcagaggaagaagagaggcatctgcttgagtgagagtggcctttgtgccctggaagagctagtcagtgtgtgctgcgatggctgccctgtgatcctgttgtgtggcccttgtgacattgggaagtcaacattcagtagaatactgattaaccggttactgaacagccttcccgcggttgactatctggaatgtgatctggggcagacagagttcactcctnctggctgcgttgccttacttaacatcacagaaccacttctgggaccacctttcactcacccgaggaggccacagaagatggcgtattacggg

SEQ ID NO: 2224 - DNA, 580 bp, Cricetulus griseus
  misc_feature (500)..(530): n is a, c, g, or t
ttaatgctggaggccacaaacttgggcttgccttggaactggaggcttaatccagttgaaagaaacctctgggaacggatatcagaagatttggccttaatatatttccatgtgaccagcaggctccccccttccccccagaaggggattaaatcaaagggtgattaaacaagagctgtattttaaatatttagacagtttcctgttggctggtttctagttatcagtgctgctatggtgcagccacctatacattatttaaatgtatttaactgttaaatgtgctacccaccaatgatgaaatagacgtttatgaaaaccgtgccatggtgtgcatgtttgttttatgttcttttaacattgactattgtactgaatgagatggatcagtggatgttttaagatgaagtaaaaaaaatttttttttgttatattcagccgtcattagaattactttggtaatcccaaacatgacaaattatgaataaaacaagtgtacnnnnnnnnnnnnnnnnnnnnnnnnnnnnnnncccgggggggacctccagctttggttccctttattgaggggtattggccc

SEQ ID NO: 2225 - DNA, 581 bp, Cricetulus griseus
agcattgttgcccaatagggcagcaagttatgtgggactaagatatgtaaggaaatgtaggcagagaggaatcatcatgtgatcccacaaagtgacttagttgggcagaaactgtcactagctaaccataaaggacagataggcagggagtgatgtatcctgacagaatcagaatataagcagggacaaacaggaaatcgctctcttctctacagagatgcaaagcagtcgagatgtagcaggcagaggagttgcaggtctggcattctgggtaagataagaccacatggaaatacttagattagtagttatgggttaataaataaaacagagctatccaataagaaaccctagtcactgggcaacaatttcatgactaatatagtgtcttcatgttcatttggggcagagaaaggcggcgggacctgcaggatgggaattactcatgttacagatataaaattatatcaattattagttatagggttggtaaaggtaggaggtagaaaattgcttagcacacataagaccatgaatgaataaataaataaaacatctattttaaaacaccagtatataaa

SEQ ID NO: 2226 - DNA, 568 bp, Cricetulus griseus
  misc_feature (154)..(189): n is a, c, g, or t
  misc_feature (483)..(483): n is a, c, g, or t
tcatagctaggtaagggctttctctttctgccccccaaccgaaccttaagaacggttctgtatatgtgagtgagtgggtgataacttttattttttgttttatcaagaaacagaagtagctttggccaggaatccattcttcctcagcattgcnnnnnnnnnnnnnnnnnnnnnnnnnnnnnnnnnnnntgaaatgataggttgtcctatgtccctgttaaaacattccagtgtcaaaaaactgcagtttgcaggtaagcggtctgaggctgacctaagtgaggatggaccttgggctacttactatacataatcctcgttcttgaagttcaaacaaggctcgaagaaaaagattgcccatgtaattacatctcagcgggttctttttcccatctgtcccacctttgtgtcaccagcgcccatacattggcctcaactattccttacattcacggaacagtttctctcaacatttctaacggncgaataatgtcatttagtggttgctttttgagtccgcatcagggaagcaagccctgctcaatatttaacaatcacttctacctgt

SEQ ID NO: 2227 - DNA, 578 bp, Cricetulus griseus
gcccggccgcgggcagtcgggcccgggtctacgccgaggtgaacagcctgaggagccgcgagtactgggactacgaagcccacgtcccgagctggggtaatcaagatgattaccaactggttcgaaaacttggtcggggcaagtgtagtgaagtatttgaggccattaacatcaccaacaatgagagggtggttgtaaaaattctgaagccagtgaagaaaaagaagataaaacgagaggttaagattctggagaaccttcgaggtggaacaaatatcattaagctgattgacactgtaaaggaccctgtgtcaaagacaccagctttggtatttgaatatatcaataatacagattttaagcaactctaccagatcctgactgactttgatatccggttttatatgtatgaactacttaaagctctggattactgccacagcaagggaatcatgcacagggatgtgaaacctcacaatgtcatgatagatcaccaacaaaaaaagctccgactgattgattgaggtctggcggagttctatcatcctgcccatgagtacaatgttcgagtggcctcg

SEQ ID NO: 2228 - DNA, 579 bp, Cricetulus griseus
tacctccgccggggaaagatggccgcgtgcgggctgtcccgacaggtacggagcttcagtacatccgtggtcaggccctttgccaaacttgtgaggcccccggttcagatatatggcatcgagggtcgctatgctactgccctttactctgctgcagttaaacagaacaagctggaccaggtggagaaggagctgctgcgtgtgggccaactcctgaaggaccccaaggtgtctcttgccgttctgaatccctatgtcaagcgctctatcaaagtgaaaagcctgagtgacatcacagcaaaggagaagctttctccgctgaccgccaacctcatgaatttacttgctgaaaacggtcgcctagacaatacccatggcatcatctctgccttttccaccatcatgagtgtccaccgtggagaagtgccctgcatggtgaccacagcatctgctttaaatgaagctgttctctctgagttaaagacggtgctgaagagcttcctgggcaaaggccaagtattgaacctgaaggttaagactgacccgtcaatcatgggtgggatgattgtccaaattggg

SEQ ID NO: 2229 - DNA, 567 bp, Cricetulus griseus
cttagaagagctcaaccgccgttaccaaccagcactgcggctccagaagcagcaactggtgaatggctatcggcgttttgatccagcccgaggcatggagtacacattggacttgcagctggaagcgctgacgccccagggtggccgctggcccctcacccgaagggtacagctcctccggcccctgagccgagtggagatcttgcctgtgccctatgtcactgaggcttctcggctcactgtgctattgccgatagccgcagctgagcgtgacctggcttctagcttcctagaagcctttgccacagcagcactggagcctggtgacgcagcctccttgaccctgctgctactgtatgagccacgccaggcccagcgggcagcccatgcagatgtcttcgcaccggtcaaggcccatgtggcagagctagagcggcgtttccctggtgcccgagtgccctggctcatcgtgcagacagctgcaccctctccactgcgtgtgatggatctactctccaagaagcacccactagacactctgttcctgctggccgggccagacacagt

SEQ ID NO: 2230 - DNA, 581 bp, Cricetulus griseus
cagctattcgaagagtccggaagacagacaataatcgcattgctagagcctgtggggcacggatagtcagccgaccagaggagctgagagaagatgatgttggtacaggtgcaggcctattggaaatcaagaagattggagatgaggacttgactttcatcactgagtgcaaagacccaaaggcctgcaccattcttcttagaggagccagcaaggagattctgtcggaagtagaacgcaacctccaggatgccatgcaagtgtgccgaaacgttctcctggaccctcagttggtgcctggtggtggagcctcggagatggctgtggcccatgccttgacagaaaaatctaaggccatgactggtgtggaacaatggccatatagagctgtggcccaagctttagaggtcatccctcgtaccttgatccataactgtggggcgagtaccattcgtctgcttacctcccttcgggccaagcacacccaggagaattgtgagacctgcggtgtgaatggtgagactggtaccttggtggacatgaaagagctgggaatatgggagccgttggctgtgaagcta

SEQ ID NO: 2231 - DNA, 84 bp, Cricetulus griseus
cactcaaaagggcggaattggggtacacgcgggctcccccaccttatcgaaggatcaggacacacacacgccctctgcccgcgt

SEQ ID NO: 2232 - DNA, 579 bp, Cricetulus griseus
ttggctgttcgagtgcatcgctcgccacccgagtttcccctgcgggctcccacgcacacccgccagctgttgccttctgcgaacatgtctaagtcactgaagaagctggtggaggagagcagggagaagaatcagccggaagtggacgtgagtgacaggggcatctccaatatgttggatgtcaacggcttgttctccttggcccatatcacacagctggtgctcagtcacaacaagctaacaaccgtgcccccaaatgtagcagaactgaagaacttggaggtgcttaacttcttcaataaccagattgaggaactgcccacccagatcagcagccttcagaaactcaaacacctgaacctgggcatgaacaggttgaacacactgcctcgaggattcggctctctcccagctctggaggtcctggacttgacctacaacaacctgaatgaacattctctccccggaaacttcttctacctcaccaccctgcgtgcactctatctaagtgacaacgattttgaaatcctgcctccagatattgggaagctcacaaagttgcagatactcagcctcagg

SEQ ID NO: 2233 - DNA, 600 bp, Cricetulus griseus
  misc_feature (30)..(30): n is a, c, g, or t
  misc_feature (38)..(38): n is a, c, g, or t
  misc_feature (46)..(46): n is a, c, g, or t
  misc_feature (51)..(51): n is a, c, g, or t
  misc_feature (56)..(80): n is a, c, g, or t
  misc_feature (83)..(103): n is a, c, g, or t
cacagagggacagtgtatcgccgcgtcaanacgaactncactcatnagggncgaannnnnnnnnnnnnnnnnnnnnnnnnggnnnnnnnnnnnnnnnnnnnnncggggcaatgagctgaccgccctgggagctctaccaaggcacctgaacaatataatgccaccgccttcaacttcctaaaccgtccccaactggccccaaggtcctccaacagtcctatatcttcccctcctccatcagtgccctgggagggggcggtcacagaacggggcattaccagccggcacttactcattgggctgccttctggagcaatcctttccctccccaaagccttgctggatccccggcgtgctgagatcccaacagaacaaagcagagaggagaacctcatcccatattctccagatgtgcagatccatgcagagcgattcataaactacaaccagacagtttctcgaatgcgaggcatctacacagcaccatcagggcttgagtccacttgtttggttgtggcctacggtttggacatttaccaaactcgagtttacccatccaagcagttcgatgtcctgaaggatgactatgactatgtgcta

SEQ ID NO: 2234 - DNA, 579 bp, Cricetulus griseus
agcgatcccggggtcagggcatcaagatggcgttgcgcgcggcgtgtgcggccgtgtgccggcgctggcggcaggaattggggaatttgtctgtaaatggttctaagagcagcacagcccaaactggtggcctcctgctcagcaccagtgtgaggtgggctccattgtcacgcttgcacatcgatgttccaaaggatttgaccaagcccacgataaccacgtctgatgagccagacacattgtataaacgcctgtccatcttagtgaaagcccatgacaaggctgtattagacagttacgaatattttgccgtgctcgctgctaaagaacttggcatttctattaatgtacatgagccgccaaggaagattgagcggttcactcttctcaagtcagtgcacattttcaagaagcacagggttcagtatgagatgaggacactctacagatgttttgagttaaaacacttgaccggatgcacagccaatgtctacttggaatatatccagcgaaacttacccgaaggggttgccatggaagtaacaaagacacagatacagcagttgccagaacacatca

SEQ ID NO: 2235 - DNA, 503 bp, Cricetulus griseus
  misc_feature (359)..(378): n is a, c, g, or t
taggctgcgacgaggtgaggcgaggcggcgttgctcggtgggcaccatgtcgaggcatgcgaaccgtggcaccgagagcaagaaaatgagttctgagctatttacgctgacgtatggagcgcttgtcacccagctgtgcaaggacgatgaaaacgatgaagacgtgaataagcagctggacagaatgggctataacattggagtccgactaattgaagattttttggcacgttcaaatgttggaagatgtcatgattttcgggaaactgcggatgtcattgctaaggtggcattcaagatgtacttatgcatcactccaagcatcacgaattggagcccagctggcgatgaattctccnnnnnnnnnnnnnnnnnnnngttggtggactttgtggagcttcccgatagccactcatcccttatttactccaacctcctgtgtggggtgctgcggagagccttggagatggtccagatggctgtggaagccaagtttgtccatg

SEQ ID NO: 2236 - DNA, 555 bp, Cricetulus griseus
ctcataaccaggccaagaagggggagggggcccataaccaggccaagaagggggagggggcccataaccaggccaagaaggggggagagggagctcaaaatcagggcaaaaagggggaaacaaatcaaaaccaggctaaaaaaggtgatggagtccagaaccaagcaaagaagggggaaggaccccagaaccagggcaagaagggggaagcaactcaaaaccagggcaaaaaaatggaaggagcccataaccaaggcaagaagacagagggaaccccaaaccaaggcaagaagggagaagggacccaaaaccaggctaaaaaattagaagactctcctaaccaaggaaaaaaagcagagggggcccagaaccagggcaagaaaggagagggggcccataaccagactaagaaaggagaggggccccagaaccagggcaagataggagagggggcccataaccagggcaagaaaggagagggggcccataaccagggcaagataggagagggggcccataaccatggcaagataggagaggggccccagatccatg

SEQ ID NO: 2237 - DNA, 485 bp, Cricetulus griseus
tttctgattgtgttcctgtgcagtgtttgtacatggagttgtgcactgtggaaatggcacaggggtcctttgtgaatttgccttttcacattgtttgaccatcttcctaattatctagaggctgtgtgatgttttatcagctggacatgccatttaaagttctgttcctgaatagttcatttgggtttaattgttgtctattatcaaaaagattgcggtcagcaaccctatgcatgcaactattatttcttattggagtatttttcttaagatttattttaaactatgtatgactgtgtatgtctgttcacatgagtgcaggtgcccatggaggctagaagaaattgttggatttcttatagctgactagttagtggctcaaagtcacctgatgtgggtgctgggacttgaactaggatcctttgcaatagcaataagcacttatccactgagccatctctccggcccctggattattattattc

SEQ ID NO: 2238 - DNA, 246 bp, Cricetulus griseus
cctctcctcattccaaccggaccacaccgcctgaagcggctcagaacggccagtcccccatggcagccctgattttactagcagacaatgccgggggcagtgatgcttggaaagatgccacccaggttcactccaccaccaggaggagcggcagcagtccgtcctcttcctcctctatgaaccaaagaaggtcttggccccatataggtggggggccatgccactggcaccacatgaggactggag

SEQ ID NO: 2239 - DNA, 567 bp, Cricetulus griseus
ctccaagtgctgtatccacaggaagctccagccccagcactccccagcctgccccccagctgtccctcagtgtctcctccacctgtccccaagcaccgtctcctgcaccccctttggaggctgtgccctgctgtgtgcagccttcatccccagccccagccccagcccagcgtcgcagtatcatctctaggctgtttgggacctcaccagctgcagaagtgtccccttcacctccagagccagctccagccctagaggccccagcaagagtccagaatgttgaggattttgtccctgaagatggccttgatcgaagcttcctggaagacacaaccctgcctaaagacaagaagaaaattggaaccaaaggcccacagcaggatagtgacagtgatgatggggaggccgtatgagggaacccaatggtggctggtttccaagatgatgtggacatagaagaccagccacatggcaaatccctgctgtcctcagaccccatccccagtaagaacatcagtctttccagtgaagaggaagatgaaggactggcaggccaccccagagtgg

SEQ ID NO: 2240 - DNA, 377 bp, Cricetulus griseus
ccctgagaccaactacctcttcatgggagactttgtggaccgtggtttctacagtgttgaaaccttcctcctcctgctggctcttaaggttcgatatcctgaccgcatgagtttgatccggggcaatcatgagagccgccagatcacccatgtctatggcttctatgatgaatgcttgcgcaaatatggttcagtgactgtatggcgctactgcactgagatctttgactacctcagcctgtctgccatcattgatggcaagatcttctgtgtgcatgggggcctctccccttccatccagaccctggaccatatccggacaattgaccgaaagcaataggtaccccatgatggacccatgtgtgacctcttgcggt

SEQ ID NO: 2241 - DNA, 395 bp, Cricetulus griseus
tgtgtatgcttttgtgtgtctgtactgtgtatacatgtgtgtgatatgtgtatacttcgcgtgtgtatatacttgtcttatataattgtagacaatttattgcacaaaaatgccatgaccaaaagcagtttgaggaggaaaggggtgattgtgtcttatacttctgcatcacagtgctttaacaaaaggaaactggggcaggaactggaattagaaacctataggcaggaactgatgcatacactgtggaagaacacttgtttcctggcttgctaagcctgcttttttatagcacccaggaccatcagcccatggatggccccacccatggggaataaagtcctcccccacagaatacgacccttccctatcaattattattaatcaataaaatg

SEQ ID NO: 2242 - DNA, 395 bp, Cricetulus griseus; identical to SEQ ID NO: 2241

SEQ ID NO: 2243 - DNA, 578 bp, Cricetulus griseus
agccaaaccagccctacagatggatatcctacaaacaggtgtctgatcgagcagagtacctgggctcctgtcttttgcacaaaggatataagccatctcaggaccaatttgttggcatctttgctcaaaataggccagagtgggtcatctctgagttggcctgttacacatattccatggtagctgtgcccctgtatgacactttgggagcagaagccatcatatacgttatcaacaaggctgatatccctgtggtcatttgtgatacaccccaaaaagcaacaatgctaatagaaaatgtagagaagggccttacaccaggcctgaagatagtcatcatcatggatccctttgatgatgacctgacagaaagaggagagaagagtgggattgagatattatccctgtctgatgctgagaatctatgcaaagagaacttcaaaaagccagtgcctccaaacccagaaaacctaagtgttgtctgcttcaccagtggaactacaggtgaccccaaaggagctatgataacccatcaaaatattgtttcaaacatggctgctttcctcagattgttggaa

SEQ ID NO: 2244 - DNA, 570 bp, Cricetulus griseus
acggatggtggtagagagtgtggagaggatcttccggagtttccccaggggtgatgctggagaggtcacatccctgctgaagctgaataagaagctggcgcggagtgtgggccacatctttgagatggatgacaacgacggccagaaagaagaggagatccggaagtacagcatcatctatggccgcctggactccaagcggcgggagggcaagcagctcagcttgcatgagctgaccatcaacgaggctgctgcccagttctgcatgagggacaacacacttttacttcgaagggtagaactcttctcattgtcccgccaagtagcccgagagagcacctatctttcctccttgaagggatccaggcttcactctgaagagttaggaggcccaccactgaagaaactgaaacaagaggttggggaacagagtcataccgaaatccatcagcctcccccaggccccgagtcctatgcacccccataccgccccagcctataggaggacagcgccagtctgtctggggagagcctatatggccacttgcaggctgtggggtcgtgcccaag

SEQ ID NO: 2245 - DNA, 579 bp, Cricetulus griseus
  misc_feature (57)..(100): n is a, c, g, or t
  misc_feature (508)..(522): n is a, c, g, or t
  misc_feature (554)..(554): n is a, c, g, or t
tttctagcagaaggccaagacgttagcacatttgtggctgaacagaaggtggaatannnnnnnnnnnnnnnnnnnnnnnnnnnnnnnnnnnnnnnnnnnncctttgaggagctgcgaaagcagctggagaagctgctgaaggaggacagcggtaaccagccggtgtttgactggatagaggccaacctgaatgagcagcagatagcatccaatacattagttcgagccctcatgacaactgtctgttattctgcaattatctttgagactcctctccgagtggatgttgcagtgttgaaagtgcgagcgagactgctacagaaatacttgtgtgatgagcagaaggagctacaagcactctacgccctccatgcccttgtagtgaccttagaacagcctgccaacctgcttcggatgttctttgatgccctgtatgatgaggacgtcgtgaaagaagacgctttctacagctgggaaagcagcaaggaccctgctgagcagcatggcnnnnnnnnnnnnnnnaaatctgtcacagccttcttcaattggcttcnaaaggctgaggaggaggagtctgat

SEQ ID NO: 2246 - DNA, 600 bp, Cricetulus griseus
  misc_feature (30)..(73): n is a, c, g, or t
catcgtgtggaaatgttgatccgcttcaannnnnnnnnnnnnnnnnnnnnnnnnnnnnnnnnnnnnnnnnnnntcgacccacgcgtccgaagctttcctacttgaaaaggcctgtggagaatataggtttatgggaaatttcgaagtcagtcattctctctctcttctgtctcctctctcctctatccctctctgtctctcttccctattaaatttctgaggagactggggtcttgggaggttgtccatgccggccaaccctacagacatgcattattgtttctggcttgctcatttattgactgatttttgcagtgctgggactcagacccaggtacttacgcacgctaagcagttactctgccattgagctaagctcaggttccagttttttcttttacttgatcatgtaagaagtaaaaatacctatgtagattaatctttttgaatatcaatgtcattacccttgctaattataaaataatctttaaattcatcagcttttattttatataaatataggctctatagaactcatcatgattgcataatatgtctgaagtttcatcttaacgctgaataaccaccgaccgtattcgg

SEQ ID NO: 2247 - DNA, 289 bp, Cricetulus griseus
  misc_feature (2)..(26): n is a, c, g, or t
  misc_feature (32)..(52): n is a, c, g, or t
  misc_feature (59)..(128): n is a, c, g, or t
  misc_feature (139)..(185): n is a, c, g, or t
  misc_feature (229)..(253): n is a, c, g, or t
tnnnnnnnnnnnnnnnnnnnnnnnnncggtcnnnnnnnnnnnnnnnnnnnnnccgcgannnnnnnnnnnnnnnnnnnnnnnnnnnnnnnnnnnnnnnnnnnnnnnnnnnnnnnnnnnnnnnnnnnnnnctgggcacctnnnnnnnnnnnnnnnnnnnnnnnnnnnnnnnnnnnnnnnnnnnnnnnaccaagcatgtccttactggctcagctgataacacctgtccgcnnnnnnnnnnnnnnnnnnnnnnnnncactggccctacggaaaaccaactaacccgtccaaa

SEQ ID NO: 2248 - DNA, 526 bp, Cricetulus griseus
  misc_feature (4)..(36): n is a, c, g, or t
tcgnnnnnnnnnnnnnnnnnnnnnnnnnnnnnnnnngtcaccatggacgccgagatggagttcaactgcgagatgaacaagagaactgggcaacccatgatccacatctatctggataaggagacaggaaagcctaaaggtgatgcaacagtgtcctatgaagatgcacgaactgccaaggctgctgtggaatggtttgatggaaaagattttcaaggaagcaaacttaaagtttctcttgcccgaaagaagcctccaatgaacagcatgcggggtggcatgccacctcgagagggcagagggatgccaccaccacttcgtggaggtcctggtggcccatgtggtcctggaggacccatgggacgcatgggaggccgtggatgagacagaggaggcttccccccacggggaccccgaggctcccgagggaacccctctggaggaggaaatgtccagcaccgatctggagactggcagtgtcccaatccgggctgcggaaaccagatctccgcctggagaacagaat

SEQ ID NO: 2249 - DNA, 432 bp, Cricetulus griseus
cccgtgggtgaaagacgagcattacacgaaaactggccatttagggatgagcatggtgaacagagcataactgaaatgatggcttggcaggcgttacgggtagactaggcgcaggatgctgagtgccaggccttgagactacaggtggcagcaggagatggagctgctcatcccctaccagggcaaaatcaagagcgaacggaggcccaccacgagcgccagctggaaaatctagagcatagggtgtgtctgcgcacagcgcatcttgagctaaatattgaagaggagctagccgccctgcaaagagatcgcagcgagagaatcaagattctcctggacagacaagatcgagagacggagacttttgacatggacatgcctctaatgggattagggaattaggggaccttagattttcctaaggaggaccat

SEQ ID NO: 2250 - DNA, 482 bp, Cricetulus griseus
  misc_feature (5)..(33): n is a, c, g, or t
gactnnnnnnnnnnnnnnnnnnnnnnnnnnnnnaagacgagcagacaagaaaactggccattttggcagagcagtatgaacagagtataaatgagatgatggcttctcaggcgttacggctagacgaggcgcaggaggcagagtgccaggccttgagactacagctgcagcaggagatggagctgctcaacgcctaccagagcaaaatcaagatgcagacagaggcccagcacgagcgcgagctgcagaagctagagcagagggtgtctctgcgcagagcgcatcttgagcagaagattgaagaggagcttgccgccctgcagaaggaacgcagcgagagaatcaagattctcctggaaagacaagagcgagagacggagacttttgacatggagagcctcagaatgggatttgggaatttggtgacattagattttcctaaggaggactatagatgagattaaatttttttgccatttaca

SEQ ID NO: 2251 - DNA, 600 bp, Cricetulus griseus
  misc_feature (9)..(63): n is a, c, g, or t
  misc_feature (71)..(72): n is a, c, g, or t
  misc_feature (76)..(77): n is a, c, g, or t
aatacgggnnnnnnnnnnnnnnnnnnnnnnnnnnnnnnnnnnnnnnnnnnnnnnnnnnnnnnnacccgggnncccnncccctcgagggtgcgacccacggcgtgccggaaaaaaaaaaagccaggggattcatgtttgggtatgttataaggggagggacttcatcagatgtggacgatttctatctatatccaactctgcaggttggagttagcataaaacttggaaaaatctactggggctttctttcctgactgtgggtcattttctttggggttctcccttttctgatcaccggttctaaacagctttgccacttttgtgtcccaaggcaataaataggaaacaaaactttgtaaaggggaacaagaaaagttacctgttaccctatcaaagtccactgtctcgggtgacactaacgaggacatggggaaggggacactggagtgtgttatcttggggtgctgatgcaggtgcagggtctcaaatatacaaccaggtggtatttctcaaaagttggccacttggttctgaatcctatcctcttaatttctgcaggaaagttaaagttacatggtgttgcattttgttctgggtggg

SEQ ID NO: 2252 - DNA, 579 bp, Cricetulus griseus
  misc_feature (15)..(34): n is a, c, g, or t
  misc_feature (71)..(95): n is a, c, g, or t
  misc_feature (174)..(202): n is a, c, g, or t
  misc_feature (472)..(484): n is a, c, g, or t
  misc_feature (486)..(498): n is a, c, g, or t
  misc_feature (508)..(539): n is a, c, g, or t
aaaaccagctacttnnnnnnnnnnnnnnnnnnnntaggttaagagcactgcttgttcttccaaaggtcctnnnnnnnnnnnnnnnnnnnnnnnnngtggctcacagccatctggaatgagatctggtgccctcctctggcctgtaggcaacatgcaggcagaacactgtacacnnnnnnnnnnnnnnnnnnnnnnnnnnnnncttaaaaaaataaaataaaaccagctactttttttccaggtgtgatggtatacactcaagtctgctgaggcaggattgttgtaggttctaggtcaagcttcactacagtacccttgtctcacatcccctccttcagtgaaagaaagaaaatacctcttaatcttgttatggaaaagtcagatcttcagcttgcttcatcacttgactataagagatgttttaacttcagaggaataatactccaacaaagctgggcgttggtggcgcatnnnnnnnnnnnnnannnnnnnnnnnnnaaggcatgcnnnnnnnnnnnnnnnnnnnnnnnnnnnnnnnnccagaacgagtgccaagataggctccaaagctatacagag

SEQ ID NO: 2253 - DNA, 532 bp, Cricetulus griseus
ccctccaggaaattagaatgtatccagtgctggaccctggttccctccaggaaattagaatgtatccagtgctggaccctggttttcctttaaagtcagtaggaaagtgaaaacgcaaaataaaggaacttcagtgtaaaattaaaggcgagataaagaatgtgcatagaaaggctattgattttgttttaactaaaggatgataacctgctagaagcaaccgagaaacttgaagtctgagctgcaacttagagctgggttcaaaagtcagaggcagggactgaggattgagaaacaggcttggtatcagccatgctttgatacaaaccagggtgtactgtgtacaaacatcactgtccttcagacttttggtgaaattacacaataaagaggtggtcattgttaactaaggcattaacagcctaaacagtgctgctccgagttcatgggtcaaagtgagggtgcagtgtacagtgttaccgcatcagagaacggctggaaagatttccctaatgacccctacagtttaact

SEQ ID NO: 2254 - DNA, 521 bp, Cricetulus griseus
  misc_feature (39)..(53): n is a, c, g, or t
ctagaggaactcatgggcttctaggactcagtttccccnnnnnnnnnnnnnnnttggccaagggaggagctcagtggaggagcctcatggatggaggctgctttcctctctcctctggaagtcaagagggtaggatggaccctgtcaccccacacagtgacccaccccagtcaatcagcctttcctgagcccatggccccaggattagaaagctcctccatgaagctagctgcctggtggctggtagggagttgacagaatcctccagccacactaaccctgttgtgtacatcctgttttcaataatgactcaccccactaatgtccatcagagcccccaaatggactgactttctttggaaataaggtttttatatgagacaatgctggctttcaatggactttaagaaggccatgtgtagacacagacacatagaaggaaaaagaacagcaatgaccacagccaagaggggagtgaggaccttctgcatccccaaggtgctgggagagccaggaaggac

SEQ ID NO: 2255 - DNA, 214 bp, Cricetulus griseus
  misc_feature (157)..(157): n is a, c, g, or t
  misc_feature (172)..(172): n is a, c, g, or t
ccacctttcactcacccgaggaggccacagaagatggcgtattacgggaagatgagttgtcacaacgactatgagaattacattgagatcgtaaaatacgtgttccgggattacaggagggagtccccactcatcatcaacacaatggggctgggtngaaagagggaccgcnctgcttgcctgctggtgggaccctgatcccgactggttgtgc

SEQ ID NO: 2256 - DNA, 386 bp, Cricetulus griseus
gccctgttgcatttactattgcaacaccagagcccataacaagtacttcaatatggtggagtctcattgtttcttgaatggtgattggataaatttacaaaagcatattagaaggtacagtacagcaaaggacagaaagctctgagtgcttggtaagtctgaaacctaaatgctaaaaaagacaggttggagttttctacaaataaaatggacgatggtgaagaggaagaggatgaatacgaacaggaggaggaataggaagcggaggagggagaggtaccttccctgaaacaagaactccaatgcccagatcatgtttattaattcactaaatatttattaaacatctacagtgtgccagatggttgtctagtcattccatatga

SEQ ID NO: 2257 - DNA, 580 bp, Cricetulus griseus
atctttggctctcagaagagaccgatagtggagttctctttagaggatcgaaggaaacttaaagtaaaggagctgaggatccaacgcagcctgcaaaaaatgtcatctaagcctgtaaccggtaagccccaaaaggagcaaaaagaacatgggaaagacaagcaacagaaagcagtgaggcctacacagaatcccagccaggcttctggagagcagaaagggaaggcccgccccacctcgtggacagggttccagaccaaggctgaagtggagcaggtggagctgcctgatgggaagaagagaagaaaggtcctggcactcccttcacaccgaggccccaaaattaggttgcgggacaaaggcaaagtgaagtcccttcctcctaagaagtcaaagccccagacaggccagcggaaacagaagcagcagcagttaccttctttgcaggcacctaagaagaaagctaaggaaaataaggcagaagcccacttcaaccaactggttgaacagtataagcagaaattgttgggtccttctaaaggaccaccccttatgaagagaagcaagtggtttgatactt

SEQ ID NO: 2258 - DNA, 214 bp, Cricetulus griseus
  misc_feature (63)..(78): n is a, c, g, or t
  misc_feature (80)..(94): n is a, c, g, or t
  misc_feature (109)..(128): n is a, c, g, or t
  misc_feature (181)..(203): n is a, c, g, or t
attattttccttattcttattctattgaccttacctgtaataataactgtatttaacttctannnnnnnnnnnnnnnngnnnnnnnnnnnnnnncaacaattgagctgnnnnnnnnnnnnnnnnnnnncgcactatgcactttagtggagggtaacactgaattgctaattactaattggnnnnnnnnnnnnnnnnnnnnnnngaagctatccg

SEQ ID NO: 2259 - DNA, 580 bp, Cricetulus griseus
aagctaggataagtgattatttgaaagcctaaccctttgctgggtctgagatgagcaccatttgtgatccttcttcaagggcagtgttgtgatccctctagtgtcattataatgatccaaattaaacgaaagatgacaggtgcctagaatggaggcaggcattttatgttgaatataaggagacagcctgtggaccatttcccttcagacaccctttgcagggtttccatgtcttgtatccaatgagtctaagccatagattttgacctcttagacttttcatctctcaactgtgtcatcctgtactgttgaagaagctactggctggttttgccactcctgaactgtttccctctgtgcaagctatcttacttagcacagccccagcacatactggctgcagtgtgtgcctcctttataaaagcactggaatatgagctgtactctagccaaacctgtaggaaggggtgtctttcctaatctgtggaatttaggtgcctcttcccgggcattctgtttgtgtaattagtccaacagaggggcacatttctctgactgtcctcattgtacccatggcagg

SEQ ID NO: 2260 - DNA, 581 bp, Cricetulus griseus
gggagcggcggcggcagacgcgtgtggcgaccggcgcgggaaagcggcttcctagttggggaagcgttagccccggggcagctgtcaccggtgtgctactggaaggccccttcagcgagcttctaggagcttgagacggtcacggtgccctccaactctcagctggaaggaaagatggttgaagcagatcgcccagggaagctcttcattggcgggctcaatacggaaacaaatgagaaagccctggaagcagtatttggcaagtatggacgaatagtggaaatacttttgatgaaagaccgtgaaaccaacaaatcaagaggatttgcttttgtcaccttcgaaagcccagcagatgctaaagatgcagccagagatatgaatgggaagtccttggatgggaaagccatcaaggtggagcaagctaccaaaccatcatttgagagtggcaggcgtggaccacctccacctccaagaagcagaggccctcccagaggtcttcgaggaggaagtggaggaactaggggacccccttcacgtggaggatacatggatgatgggggctattccatgaactttaa

SEQ ID NO: 2261 - DNA, 578 bp, Cricetulus griseus
  misc_feature (507)..(507): n is a, c, g, or t
gatgcttgagttccaaaagtgtgtggtgtttgttcctcctcattctcttctgagactgttgattttaaacacttgattgtggaagaaaagcttgtatgaaccccctcccccccttacccttccatgtcccaaaaaagcaaccaacagtgaagctttgtttcattggggaagtccccggagcaggtgggaaaggccatggagaatggcaatacaactgggtcttgagctaaataaatgggagcttctctggtgcccttacttcctctgcacacttggacccttgagccagaggcagcccctaacaggtgcccaagccacaagttaagggggcttttgtctgaaggtcttcttagggccagactctgaggacactgccaccctagagcacatgcatgcccagccatcgtccctgtttcctggccttggagcatcgtgccttcagctgcccttggaatcatgagagacttcaatcctgcctcactggcttccccatctgtcccctactangtactgtgctttctcagttccccaccacgagcttcatgggccactgtcactgagtgtccctaccatcttgt

SEQ ID NO: 2262 - DNA, 505 bp, Cricetulus griseus
aaacaaacaatctaaaaagcctgaatgcttggagtcataccttcatatccagttgcaatcaccaatagtgaattgaattagtggtttttaggttgatatcaaggagctacttaagaccaaggtcttttaataaccctaatataaaatgtctagttattatttacaattctagagagcagtcatcaggttctatatgatggcatctgttcttaaatgtctctgtttatttttctttttatttagagtaaaattaagaagcggtcatgggttctccatgagtgtttggagagagttcctgaaaatgtggatgctgccaaggagctgctgcagtatggattgaggggcacagacctggaggctctcatggctatagggaagggggcagaccacggcaggttggttctggagatcatgctcactgcagagggaccgggagaaaagtacgctgatacatctaaccaggggaccttaattcaccattgaagcctttgcagggaccacggct

SEQ ID NO: 2263 - DNA, 578 bp, Cricetulus griseus
  misc_feature (569)..(569): n is a, c, g, or t
agctacctgcggcgcgggagtcctcagctctgggtgcgtggcatccacagccggccggagcagcaccaccagctttcataggaggagcaaggcctctggggctgacggaggtggccctcggctgctgtccattgcgggcactcgaccgtcggtgcggaatggacagctgctggtgtcaaccgggctcccagccctggaccagctcttaagtggaggtttagctgttggaacagttcttctgattgaagaagataaatacagtatttattcacctttgctcttcaagtatttcctggcagaaggaattgtcaatgggcatactctgttggttgcatctgccaaagaaaagcctgccgacattttacaggaactccctgcaccactacttgatgacaatggtaaaaaagagcttgaagatgttcataattctaaaacaccagaatcagatgttaacatgaaaatagcctggcgataccagttgcaacccaagatgcaagttgggccagtgtcatcttcacgatttggtcactattatgatgtatcaaaaaggattcctcaggagctactangaagttaaa

SEQ ID NO: 2264 - DNA, 505 bp, Cricetulus griseus
  misc_feature (32)..(47): n is a, c, g, or t
gaaaaagaacagaaaagaagattattacaaannnnnnnnnnnnnnnnacacaatcagaagtactttaaaaaagcatgtgcattacagagatcagaaagaaatgaattctcttcttactgattatgccattgactcaaaatccaaggatgtcaagacaaacgtgggtctcaccgaaataaaaaatgccttaaagaaacagatatacagagacgtatatagagctcaggctgtacgatacaactgcattagaatagataaacagcctgtatacaatgtagaggttaagaatgcagagctccccagaggaatattaaacttaattgaaagcctcatagagggacaattctttaaagaagccattgaagagctttgctctttgcaagcccattatgtccctcctgtgtgccttctccacacccttctagagaatgtcctacaggataacatagatacattttctggtcgatactttcatatattatcagctcttcttcatctgcatcct

SEQ ID NO: 2265 - DNA, 523 bp, Cricetulus griseus
  misc_feature (139)..(153): n is a, c, g, or t
agggccacgtagcttaggcggtccgggtagacggcgcatcttcctcatggcttctgcggacacctggcgtgtgggggacggcgccgggggcgccttccagccttacctcgattccttgaggcaggagctgcagcagagnnnnnnnnnnnnnnngtccgtggcggtggcggtgctcgcggtcctgctgacgctggtgttctggaagttcatctggagcaggaagagcagtcagagagctgttctcttcgttgggctttgtgactctgggaaaacgttactgtttgtcaggttgctaactggccactacagagacacacagacttccattaccaacagttctgctgcatacaaagtcaacaataacaggggcaacagcctgactctgattgacctccctgggcacgagagcttgaggcttcagttcttagatcgctttaagtcttcatccaaggctgtggcgttcgtggtggatagtgcaacgttccagcgggaggtgaaagatgtggctgagtttctgtatcag

SEQ ID NO: 2266 - DNA, 579 bp, Cricetulus griseus
aaactaatctatgctcatgtagaagtctgatctagagcactttcagggagatgactaatataacaaaaaaagttaagataaggtccccatgagactgaaagaaacacatcatataacttttcactagtattgaaatcatactagcttggtatagacaatggataggatgtggggaggaaatccttcttgaaatttttaccggggcttcttttctaccaaatctaatgggggcagtgcagtgatcaaaaaggaaattaattgtgccaatttataccattttaagtcaggagaaccattttaataatgacagtacaactgaaaatcaaacaattgtttggtgtacaattatgaagtcgttcctggaaatgaaagttaaatgcattgtctctctggaaaacactttgagtatgtgtgatcatttctgctgatgacattaaatgacagtcagatgctaactactccctcagtcaactatgagcaccagtaatggtaactaaggaaaaatctatatttagttttcttatctatagtagttctaattaatgaatgctttgttaatgtgcatatatgtgtaccatg

SEQ ID NO: 2267 - DNA, 570 bp, Cricetulus griseus
ccggttacgactagtcctgccatccgcagatcccgagccggggtgcaccatgcccgcggtgctggggttcgaaggcagcgccaacaagatcggcgtgggcgtggtgcgcgacggcaaggtgctggcgaacccgcggcgcacttacgtcacggccccgggcacagggttccttccaggtgacacagcccggcaccatcgagctgttattctagacctactgcaagaggcactgacagaagctgggttaacctcccaggacattgattgcattgcttacaccaaaggtcctggtatgggagccccattggcttctgtagctgtcgttgcccgtactgtggcccagttgtggaataagcctttggtaggtgtgaaccactgcataggccacattgaaatgggccgcctcatcactggagccattagcccaactgttttgtatgtcagcggaggaaatactcaggtgatttcctactcagaacatcgttaccgcatctttggggaaactattgatattgctgtgggaaattgtctggatcgttttgctcgagtgctgaagatttccaatgaccc

SEQ ID NO: 2268 - DNA, 515 bp, Cricetulus griseus
agggataggtacaatcaccaccaccctggaaccaagggtctctcacaccattgctcagtgctgaactataactgccacccatccccacataccaaatagagcagtggcaacctctccctcccccgacctaactcttggaacttagtcctcctcctttcttcccattaagtctgagaggtaagagctaggttatggaaggaagggtttggccagaagtgggaatagccaagtgccccggacctctcatcttccctccgtcctgctttccacctcccttgggtacacacacagccttttgggaacagccggggccaggactgggtcacctatgagctgaatcagcctctcctcctgagtcccagggcccctgcagttcccgagtctgttttgtcctgcagcctcttgccctctggttccactttatatccaccttttccttttgttcaattcttatctttatttcttttattatcaaatgatgtggtctatggaaaaaataaaaatctgacttagtt

SEQ ID NO: 2269 - DNA, 436 bp, Cricetulus griseus
  misc_feature (234)..(290): n is a, c, g, or t
attttagttcactctgttcctcacaagtctcttcagtaaattgtcctgcatctagacttgcagtcattactgaataatagtgtgggttaaattagaatgccattgtggggtaagtgagatggtccagtgagaaaagtcctagcccagaactcacacagtggaaagagacaaactactcccacaaactgccctctgacctccatgcctataccatggtaaatagactagatatannnnnnnnnnnnnnnnnnnnnnnnnnnnnnnnnnnnnnnnnnnnnnnnnnnnnnnnntaaaaatatttagagaataacatcggtgtaaaggattatagggaagtaaggaaagaggtttgggaaaaatgaaaaagtagaataaagcatctgtttggatccagtctagatgaagatacaattcttactattattggggatagaga

SEQ ID NO: 2270 - DNA, 577 bp, Cricetulus griseus
  misc_feature (3)..(15): n is a, c, g, or t
  misc_feature (167)..(181): n is a, c, g, or t
tcnnnnnnnnnnnnncctctttttacattttgaaattttaaaacagccaaacttaggtgtcctgctgtcctcagggtcccaagggaagggaccctgggcaggtctagcaccaagtccaccccactattagctttacgtggactcgcaatgggcagcaagcagtagtnnnnnnnnnnnnnnnacctgcctccagcaataaacttctaaatatctatctctacctccatcaaaataactatggtgagaattaagaggaggaggaaatcagccatacaggagatgcccctctgctgagtgtccaaggacaaaaaaaccaggccactagggaaaggtgtccagatggtaggaacagagtcattaagatgggtggcctgatacacagatttcagatcaataatgacacaagggtaggctaatgtaacctacattagaaggtgtgctgttgtactgagtagacagacccactgattccccaaaccgatttggctctttccacttgccagatatcagggtgggttccctgccttccgcagtacgtcatttagtacttttcagttggttgttttaatgcttcttc

SEQ ID NO: 2271 - DNA, 226 bp, Cricetulus griseus
  misc_feature (165)..(205): n is a, c, g, or t
ctggtaatgagccacggcctgtgggaacctttttctctctgtgaactaaaatctttcaattgtcacagggttgttttgctatcctaggtctgtatacataataattaaatctttttttaaaatgaaggaatatacacacactgagtaataacaaaaataaacaannnnnnnnnnnnnnnnnnnnnnnnnnnnnnnnnnnnnnnnnggttttttgagacagggtttc

SEQ ID NO: 2272 - DNA, 179 bp, Cricetulus griseus
cgctaggagaggtgaggggcgttcggttgaggcgaggcgagggctggagctccggggacttgcagggtttcaggtctcggtggtcccgcgagaaagagaggctagggtcctgggatctcaatccagggcagaattctctactttgaggaagccgggatgaggatctgcgggaccgctct

SEQ ID NO: 2273 - DNA, 574 bp, Cricetulus griseus
ggatcagaagttcaaggcctgcctaggtgccagagtgagtataaggctagatatctggataactaagtaagatcctatttcaagaaaagtaagctgggtggggagtgcgtaggtgtgtgtttagatggctcaccaggaaagggcaaccattgctgagcctgccatagagcagagtttgatccttgaaacccatatgacagaagaagggaacaaattcctgaaagttgtcctctgacctccacacactcaacatggtaggccttggtgccccttctctgtctacatgcacacacaaaacaaagaaatttaaatgtactattttttcaacaagaaagggaggggaaaaaagggctgagaattggtggcagaactgttactcagtttacatgatgtcctgggtttgccctctagcaataaaacaaaaaaatcaatccgggttaaggatttcctttttgtgacttctttgctcaaaataatttaaaagctttcccttgtacttagaaagaaatctaattaatgacttttcattgttctctaagatgataccatatgatctcacctctctgatctcatt

SEQ ID NO: 2274 - DNA, 566 bp, Cricetulus griseus
cacctaagctaatgtctggggtccacaaacacatattcacacgtgccctcaccactttccaacagaagctgcgactggagcaaggaatcagtctggactgcacacctcatcaggaggcgctgtttctcattttccttcattgtataaatgaagtctacattttgagctggactttttaattaatacatgtctcgttaaagatccaacaagacatctctcctttcttgcctttcagaactttgaaattcaagcaccacaggcctctatgttctgtgtaatacatccaagaccctcatataccacttcagatagcagatttgctcagcggggaacgtgcatacaattaacttattaacaataatgaaatgctgtaatcttgtgcatgctcatattagaatctgaagcccatgagtacattccaagtgatgatcacggcagtatccacacattatgttgatattatatatgcagcttatgtgacaccaaaatcacctatcgattatacaaaattaattcaatttgttgtttgtgtcatatgttctctctcactctctctctccctcccc

SEQ ID NO: 2275 - DNA, 455 bp, Cricetulus griseus
acatcaccaatgcctccggcagccaccacgtgttacgcaaagcccacaccagggtggatctggtgaccatggccacttccaagaatggtggcatctacctgctagccaaccagaagggctgcgacggtgaccgcctctactatgatggctgtgccatgattgccatgaatgggagcatctttgcccagggcacccagttctcattggatgatgtggaggtcctcactgccaccctggacctggaggacgtccggagctacagggcagagatctcatctcggaatctggaggcaagcagggtgagcccgtacccccgggtgaatgtggattttgccctctctgtaagtgaagacttactggaagaggtgtcagaacctatggagtggacataccacagtcctgaggaggagataagcctcggacctgcctgctggctctgggacttccttcgtcgg

SEQ ID NO: 2276 - DNA, 564 bp, Cricetulus griseus
gcttcaccaacacacagaacagttggtacaggatcagtatggcaattatgttattcagcatgtactggaacatggtcgacctgaagacaagagcaaaattgtttctgaaatcagaggaaaggtgttagccctgagtcaacataaatttgccagcaatgtagtagagaagtgtgttactcatgcctcccgtgctgagagagctttactgattgatgaggtgtgctgtcagaatgatggtcctcacagtgccttatacaccatgatgaaggatcagtatgccaattatgtggttcagaagatgattgatatggctgagcctgctcagagaaagataatcatgcataagattcgacctcacattactactcttcgaaaatatacatatgggaagcatatactggccaagttggaaaaatattatttgaaaaacagcccagatctagggcctatcggaggaccaccaaatggaatgctctaagggaaaggagaagattcaaccatgtttaaagaatgggttttctttgtgaattatcaaaacacaattcaactatgaatctttgattg

SEQ ID NO: 2277 - DNA, 467 bp, Cricetulus griseus
gagggtcatcctcacgagcacaggcatttcgtcgtccgacatcgagctggctggcttgtctctggccgagggggtggcagcgacgctgtcggtgaacccctgagagctgggcttgggtgggagaagcttgacagggacagacacgggcatgaccataggcgtgaggcgttctgcctcatgagggagcggtggcggcggatgcggaggtggcagtggcggctggggctgaagctgaggcggtggcggtggggccttctctccttcctcctacacagacaataaatgctttgatcctgggctgagagcagctctcccaagggggatacacttgcttctccttagagtttccagggcatcagtggtggggaacaaagtaccacagctgggggtttccttcctctaactctgggtccctgagccacattgaaggtatcatttctatatgaaaatatttttaaaaagttggt

SEQ ID NO: 2278 - DNA, 121 bp, Cricetulus griseus
aaatcttgtcctatctaaaaaccggagacagccagtatccaggcaagcagagtgcctactccaggtatcagccccagagcggatactgggtgattgggctgcagcataagcatgaatacat

SEQ ID NO: 2279 - DNA, 121 bp, Cricetulus griseus; identical to SEQ ID NO: 2278

SEQ ID NO: 2280 - DNA, 567 bp, Cricetulus griseus
cttcttgcatacctgggtcctccggagcacaagcccgtggcagatacacactggtccagccttaaccttaccagttccaagtttgaggaatttatgaccaggtaaaagacaactttaaaagggtgattgtattggggggcggggttcataaacaaaatttaccagcataccacttagtaagtgattgtattgcatttttgtgaccatgtttgcttgttttgatatgttgatttccttataaacataatggtgtcatttgtttgcttatttgtgtgtgtgctggtgtgcccttgtacacagttagcatatgaagtcagagaaccgcctatgggagtcatttctgcccttccatgtgtcccatggatcaagctcaggttgtcaggctgagccaccttgctggctctctttgtcatgtttttcattcaatactttcaagaacatataggtaacattttgttatcataataggaagataacagacataattgacctggattcacacctgattcatgggtcttttgaattcaagttctaaattctttctatcatactaactttgaatccttt

SEQ ID NO: 2281 - DNA, 545 bp, Cricetulus griseus
  misc_feature (85)..(129): n is a, c, g, or t
gacctatctcataccaacattttccaaacctaactgtcttcatagtgtaagatagaaacagatttaagcagggctttggccggannnnnnnnnnnnnnnnnnnnnnnnnnnnnnnnnnnnnnnnnnnnnagttggaggccagcctgctctacagagcgagtgccaggacagccaggcctacacattagagaaatgctgtcttgaaaaatcatacacacacaacacacacagattggacaagttatgcatcctgggatgggaagggggagtgtctgtgatgtatgacacacagcaagggccctgataccccagctcatgcttgctgaaggaatgaactgtgacactcatgaaccatgttggcctagactccctactccctccccagtctctgtacttggattttttacctcctggaaatatttattttcttaaggaaataatagtttattgtgactttttcttttgggaggggcagctgaaatgtcaggctctcggcctgagttcagagtggtgcacatggcagagagtctcctaacaacaaagcc

SEQ ID NO: 2282 - DNA, 483 bp, Cricetulus griseus
gggaaaaattaaaatgattgacatgcctgtagaaaggatgcatcctcatctgtccaaaggctacgcatatgtggagtttgagaatccagatgaggcagagaaggcatctgaaacacatggatggaggacaaatagatggccaagagatcactgctactgccgtgttggcaccctggcctagaccacccccacggcgattcagcccacccaggagaatgcttccaccgcctcccatgtggcgcaggtcacccccacggatgaggaggaggtctcgatccccaaggcgcaagtctcctgtgcgtaggaagtctcgatctcctggccgccgccgccacagaagccgattcagctccaactcctcccgataagcagggacattgattcgtacctctgtaacttatgttccccctactcagttttgtcctttctctagccaaatgtggatccaaagggaaggatcccacaccagggtggtctttgaag

SEQ ID NO: 2283 - DNA, 441 bp, Cricetulus griseus
ctttgaagggagatgattgtgactgtcatcctgaatttctgccacctccaatgaaacaagtacctgatgcaggctagctgggagataagaaaggtctgtttggctcaggattctgaggggtcacaaagtgtgctgcttatgttggctcagttctgctgagggctgtggatggcgatgaccatagagaccaggaaaccgtgagagaaaggaagagtctgacgccccatagcgtctcgagattacccacggtgacataaaggcctgtccgtgggtcccacttccgtaaagccttcacagcattcccgtcctgccacctgggaccttggtgagactaaactgcagcagttgtttccagaaagcactgaggcgagataggactcggcagtcatgagctccattggcttgtgtagggggctcggatgtgacccctgacacccatca

SEQ ID NO: 2284 - DNA, 246 bp, Cricetulus griseus
agacaatcaagctaaaagccccaccactactcagtcacctaaatcttcctttctggcaagcttgaatccaaaaacatggggaaggttaagtgcacagtccaacagcaacaacatctatcctacacgatctgcaggagtcagtggtcttgctcggtcatcctcaaaagacaccatatccaataatagagaaaaaattaaaggctggattaaggaacaggcacataaattcgttgagcgttactttag

SEQ ID NO: 2285 - DNA, 472 bp, Cricetulus griseus
tagtctacatctctcatcccggacaaggtgggaagatgtggtcaagcgatattcttcgcttcgagtacagggtagtaatctggcagaagtcttccaatgagacacagagtattacaaccacttattatacagaaaagatttcaaaactgttgccagagactacttactgtttaaaagttaaagcaatacattcgtccctcgggaaacacagcaattatagtgcagtgcaatgtataaacaccacataggccatcaagatgccagtgccggaaaacatataagtggatgcccgtggtgagagctatgttctgaaatgggactgtgcgtctacagacgtgagcttcagaacgcagtggctccctggctattttaaaagtatctctggaagctcttcaaatgaatggaaaccaatacctacctgtgcagatgtccaaactacgcactgtgtcttttctaaaaacaccatccacac

SEQ ID NO: 2286 - DNA, 92 bp, Cricetulus griseus
cttcttatcaatttactcttccttgcaattgcattctatattttctggctatggcttctatgaaaaaaaatctctggttttctgttttgaca

SEQ ID NO: 2287 - DNA, 455 bp, Cricetulus griseus
gacctcagcttttgcccgacaaccccgtgatgaacttgagcgtgtgcgtgtcagctgcgccatcatcttctttgccagcatcttccagtttgccatctggactgcagccctgctgcaccaaacagaaacactgcagccagctgtgcgatttggtgggcaggagcatgctttcatgtttgccaagcttgcactgtacccctgtgcaagcctgctggcctttgctgccacctgcctgctgagccgcttcagcacagccatcttccacctcatgcagattgcagtgccctttgccttcctgctgctccggctccttgtgcgccttaccctggcggcccttcaagtcctatggaacctccggccagagcaccctcaaccaggccagggtgaacctgaggcacagtctcagctcttgcctgccccctgctaatgccaaggaagccacatgtgcccattgc

SEQ ID NO: 2288 - DNA, 573 bp, Cricetulus griseus
  misc_feature (217)..(245): n is a, c, g, or t
aaaacgtccttctgccttagcttcagagtcgtgttagccttcctggtaaacagaaggttgagtctgcttgaggcagcattcaaactgcagagcaggcagcattggacctaatgttcatagaactaaggttcttgatttggactagctttattttccataggttatttatttgacttttctcgttcagaatgctcctcgggagtttccagctctttannnnnnnnnnnnnnnnnnnnnnnnnnnnnaaaggagaatgttcggactgtggtgaggacagtaactctatcaagcaagcaaggaggtatagtaggtctcaagagttgttgggctctacttttatgtaattgggaacacaatgtccttgggtgatacgtttgttcactttgtagttcttgatcagatatgaggatgaaaattggtactttttaacctgttgtttaaaaagttagaattcttgttcaggcagtcaagtttattggctgtccattttgagtaaagaatgttattacatctttaccgtataataaggacttgtcttaatttggattactattgctatgatcaaacaccata

SEQ ID NO: 2289 - DNA, 432 bp, Cricetulus griseus
  misc_feature (205)..(219): n is a, c, g, or t
atatctatcgctgcatggacgtattgctaggggaactggcaccataatactcagctggaggtgatgtaaagtgctgccctcggatgtgtgcattgtggaacatagtcccagattatatccactgtacctctaagataacatttaggaaattatgtgactattcgaaatgttttcagaggtgtatccttggtcacttctgggagcnnnnnnnnnnnnnnncatcagagccgctcaagaggcttttgttccataatgtttatccaagagagaagatttgaaatagccacatggccagcagcacgaggtggctgatcagattatgttttccacaaatggttctggaactcctgtgactaggcagagcagctcccttcctggaactgatgctctgctgatgtactacacccttacacagaaaactactgctttttc

SEQ ID NO: 2290 - DNA, 150 bp, Cricetulus griseus
  misc_feature (115)..(134): n is a, c, g, or t
caaagcttttttgggaaaaacctacctttgggtgcccgggaacttattttgaaaaccaggcgggccttaacctgaaaaattgcccggcctttgccttttaaaggcggaaataaannnnnnnnnnnnnnnnnnnnccccagggaaaattta

SEQ ID NO: 2291 - DNA, 580 bp, Cricetulus griseus
gatgggctcaggcgatgcctatccacatcagtattctttgaaactggagaaaggagattatacaattcgactacagattcgtcatgagcaaatcagtgatttggatcgtcttaaatatcttccatttattgtttctcataggttgtctaataccttgagcttagatattcatgaaaatcatagccttgcacttctaggaaagaagaaatcaagcagtttgacattaccacccaaatataaccagccattctttgttacttccttacctgatgataaaatacctaagggggcaggacccggatgctaccttgcaggctccttgacattgtcaaagactgagcttggaaagaaagctgatgtgatccctgttcattactatctaattcctccaccaacaaagacgaagaatggcagcaaagataaagaaaaggattcagaaaaggagaaagatttgaaagaagagtttactgaagcattgcgagatcttaaaatacagtggatgacgaagctcgattctagtgacatttacaatgaattgaaagaaacataccctgcttaccttcctctgtatgttgcacgg

SEQ ID NO: 2292 - DNA, 429 bp, Cricetulus griseus
  misc_feature (398)..(411): n is a, c, g, or t
  misc_feature (413)..(427): n is a, c, g, or t
accactttgcacctgccattatgtacagtcataactgtaattagtcaaataaacaaaaacagacccaaaagcaaaagttaaaataacaaacaagtcagtatcacccccctcccacggccagccgtctgccggtctgtccatctatctgtcttcttggagaagtgtctctttagaatgttttttgggttgtttattcttttgctgttgctttgagctaaaaagagtcacttctgggcgttcactcctcgtgaggtgtacacattcctccccttttccgaggcgtctctgcctctgtccctcatccctctgttttatggcttggtgtaatcccatgcatctgtgctttttgtcccctgcactgtctaaaacatcctcacacagacagtatcatgttgcgnnnnnnnnnnnnnncnnnnnnnnnnnnnnntg

SEQ ID NO: 2293 - DNA, 530 bp, Cricetulus griseus
atagctgaggaccttcagctctttgccttccgaggtgaggcgaaagtccggtccctagagcgcggagagcggcggtgccaggaggctcggtgggctccccttcaagtgtacgtctgtgagcggcctatgctgtttggcactcatgggtgtaagcaagttagatattctataccggagacttcttctcacaaaacttttcatcagaggatggggaaggccagaagatctcaagagactctttgaattcagaaagatgattggaaatcgagaaaggtgccagaatctggtttcaagtgactatccagtacacattgataaggctcctgagggttcaattttccaacattaaagaagaatattaaagaagactagttgaagaacagtcagattgtaagatcctagatggacactttgtttctcccatggcccactatgtgcctggtatcatgccaattgaatctgttattgcaaggttccaatttattgtgcctaaggaatggaacagcagatacagacctgtgtgcattcat

SEQ ID NO: 2294 - DNA, 500 bp, Cricetulus griseus
  misc_feature (214)..(214): n is a, c, g, or t
  misc_feature (232)..(254): n is a, c, g, or t
agttcttggccaaagcaccagggggaggaaagaagagggacattacatccaattgccacccatctccccactgccgtggccacgccctctctcagcactgtcccttcatctctatttcttgttgtagcttctcaccctcctgctcatttcctctggcatctcctgctctgaagaccaaatgactccctccttcctaagcacccatttgtcttanctccatgttctctgttgnnnnnnnnnnnnnnnnnnnnnnntttctggttcaggtgttatgcagtgctcccaggtattgagggagaccatcagtgacacttgaagcaatttttgctgttctcaaatttaaggttccctttacctgaaaccactctattgcctaccttccctggcttcttaagctcacttttcctcccccaccagagttaaatatctgaaagaagcagggatgaacagtttccatggctgtgtgagtttgtgttctggagtgctggtggaatcatctc

SEQ ID NO: 2295 - DNA, 578 bp, Cricetulus griseus
gggattaagagcacatactacttttgaagaggacaacagacaaaatgacaatgttgaaggaacatgtacaaatagaacttttaaccatcactaagtagatagtagcatgatgtcaccattctggaaagctgtgataattccacccccagtatatgtattgtgtgagtattttaatcccataaagatttaatgacataaacagaagatcaagaaaaattataagatagagtataatgataaggacaaaaactcagccagggctgattataggctgacaccccagttttaagagggtaaggtagcaagactataaagtcatgacaggtcaagtttaagaccacccttgaaacttagtgaaattctatgtcaaaacaacaaaatgggctggagatgtagcttggtgatagaagatttgcctagcatcttagccagtagaaagcctggaaaactgaaagaaaaatggttattccactgattaaaatttgatacagcatggctactgagcatgaaaacagtgttacacgtctctgggaatgtagctcattagggtgcttggccagcattcacaaagcccttgg

SEQ ID NO: 2296 - DNA, 541 bp, Cricetulus griseus
aaagataggtgaaatgggtcagtattcctacagaactctttttaactcaaataactaatttcagaaaattaagaaaactaactttgtatttggaattttgaaatatatggttgttagcatttggaataatgcttaaagtatgcctaaaaaagcacccaagaaaaatttcagttcatttacagaaaaaggtattttgtaatagtatagtagtgtattgcatagtactgttttaaagctgtaagtggagtttgtataaattcacaataattgatataaatagatctacagggatgatctgagatggattctttatcactcccatcccactgtgcctgtcatgggtgctgccagtaattcctagatggttgagatacgatggaggtgccgacagataccactgtagcattgcagtaaccttacacagcaagaaagggaataaaatactaagttcctaacagctgctttgtagctgtaaagttgttcaactagtcactcctgtttaaaaggaaggaggcttttttttgtcaccgacacagttcta

SEQ ID NO: 2297 - DNA, 513 bp, Cricetulus griseus
  misc_feature (68)..(105): n is a, c, g, or t
  misc_feature (219)..(236): n is a, c, g, or t
gatactgaacagacctgacaatgtattacattgcttctataaagcgaaggaatctagtattcatggtnnnnnnnnnnnnnnnnnnnnnnnnnnnnnnnnnnnnnnttatttccttattatatgaaatagcctaaaacatagaacagtggctaagaacaggagaaattgggctggagagattgctcaaaggttacaagtttccagaggtcctgagttcgnnnnnnnnnnnnnnnnnnatgaagaaattacaggaagtaagtgtgagagaaccatattccaggagggaaatggttataaatgttagagccacaagaaacaaaataatttcaaaggaaagacaagaaaagaagcttaaaactaattaaagaccctaatcactaaacaattctgaattaccattgaggaattagaaattttagtagagatagggagggtactgaagacagtatttcttcaagacaggcatgagagcctgtgcctgtaatctgagcaatcagtaggtagagcaagaag

SEQ ID NO: 2298 - DNA, 564 bp, Cricetulus griseus
  misc_feature (458)..(458): n is a, c, g, or t
tacttactggtgatgttctgtttattaagctgggtggtcttccttactctacttacatactccatgaaaattcagactctgtcatcatttatcatcagctgtagcttttggttgtcttttgcccattgagtttacttatgtaaaatgtcaagcaagcatgagagagaatgtgacctccctacactaatatgaaaatcccttaaagtctcttgaacatatttaaagtagtagtcgcattgtcttaaactctgccataagcttaagagttacttctttcttaaaggggtaaggcgcaggtttactaaagatatatgccaagagcctcacaactgtatagcaagactctccaagctttctttcctcccatgagatgccctcatctcactacttttactcatttctgccttcaggagttactcggagcacctgccctcttggcttgctatcaaatcacttancagggaggtgacatggctggggaggaaggctcttgggggtgcaaatgagaatagaactaaagtataggtgcagatatttctttccccaagtcccttattacaaaag

SEQ ID NO: 2299 - DNA, 554 bp, Cricetulus griseus
  misc_feature (19)..(36): n is a, c, g, or t
  misc_feature (38)..(54): n is a, c, g, or t
agagggagggagagagggnnnnnnnnnnnnnnnnnnannnnnnnnnnnnnnnnntggaaggagaaaagaaatatggggctggaaagagatttactatttatagtaacaacctgcacggtctagcacaaaaacagacccacagaccaatgatataaatccgcacaggtacaattacccaatttttgacaaatatatcaaaaatataaattggaaaaaaagctataccaaataatggttggaaaactagctgagattttgtagaagaatggaacagatcagactcttttaccctacacaaaaataaattcaaaatggctcaaagtcctgtaacgtcaaaattgacagaataaaatatgggtaagggccagtaatatggctcagtggaaaaagggcacctgttaataagcccggagacttaagattgatccctggaattcaggtatggaaagggagaagtgattcccactagttgtgtttagatctctacatgagtgctatgacacatatgaccacacacccaccaaatagtatacttaaaaaaaaaaaaattctca

SEQ ID NO: 2300 - DNA, 555 bp, Cricetulus griseus
cttttactgaacagtggacagatggttttgcatttcaaaatcttgtgaaacaacaagaatgggtgaatcaacaaagggaagatattgaacggcaaaggaaacttctagctaaacgcaaacctcccacagctaataattctcaggcacctgctaccaattctgaaccaaaacaaagaaaaaacaaggcagtcaatggagcagaaaatgatccctttgttaggccaaatttaccacaactgctcactctggcagaatatcatgaacaagaggaaattttcaaacttagactaggacatctcaaaaaggaagaggccgaaatccaggcagaattggagcgtttggaaagagtcaggaatcttcacatacgagagctcaagagaataaacaatgaggataattcacagttcaaagatcatccaacgttaaatgaaagatatttattacttcatctgcttggaagaggtggctttagtgaggtgtataaggcttttgacttgtatgagcaaagatacgctgctgtgaagatccaccagcttaataaaagctggagagacg

SEQ ID NO: 2301 - DNA, 342 bp, Cricetulus griseus
cctccccaggtcgcctgcccgccttcctccgcagtctggagccaggcggagcccagacctggcggggacagctgcatccccggcccgggacccaaagcctgccgccaccaccaccaccgtccatcgttggtaccggcaatggccttcgtatcgcccgatgtgcttgtgactgatttgaacccaaaatattgagaactcacgtctgtccccatcttaaccgtgcccgcccttaaggcttaactgcagcgccgctagactgtctgactttgagagcaccatggaccaaagtgggatggagattcctgtgactctcatcattaaagctccgaatcagaaatacag

SEQ ID NO: 2302 - DNA, 483 bp, Cricetulus griseus
acctacactctttgattgatccatactcattcttcaaggatctgcttaagcatcccatctttgaaacggcttttctggggccagagagatggttcagcagttaagagcacttgctgctctgcagatgactcaagttcagttcccagcacccacatggtggctcacagctatctgtgactccactgccaaaggatatgatgccctcttttgacctccagcaggcatcaggctcacacgtggtgcatatggtagacacacacattaaggcaaaacagccataaatcattacagagagagagttggtgaggcactgggatcatgaggagatgttttagtgggtaaagtacctgctttgcatgcgtaaagacctgtgtattattctaacaccctctttaagaagcctggtatggtgctgcacactgtaattgtagttctggggccatgcaggtggttccctggggtctgctgaccaactagcctggc

SEQ ID NO: 2303 - DNA, 483 bp, Cricetulus griseus; identical to SEQ ID NO: 2302

SEQ ID NO: 2304 - DNA, 553 bp, Cricetulus griseus
ttttgactgcaaccaattaagccgaccagtttcctctcgtggtggaccctggtgtgcaatggctgcagacagcaacctcctgggtagtgtacgcaacctattccttgtataggttgctctaagggacctaggagacaaatctttccagtaggtgttcttgtctctgatctcatgccgtccagaattgagggtccagacaggtatacgggatgactttgggaaaccccgggcttggtagccagggttcacactggccagatcattctgtacctctgcacctggttgcttagtaaagaataagtgattgaggtctcagatgggagaggtggtagtttcctggtccctagaatatcctgtatctcaagcaagtggggcttttccatgcatgattgtgaatctggtggtgtggcggctagggatatagcttagtgttagagcactgtgcctagcatgcttgtccttagcttccgccccagcacctaggggtagaaaaaaaactcttaaatcattgttaagaatgtaacaggaaggctgtgtggagtctgttcctaag

SEQ ID NO: 2305 - DNA, 523 bp, Cricetulus griseus
  misc_feature (421)..(442): n is a, c, g, or t
catctgacacagtgattatccttttgaggctgaatccattactgacttggtgtctaggtttttactccagtagggaggatttttgagtctgtagtacttacatgattattattgtttaaaaacaaaggctgtttttttcaaagacaaattgaagacccttgttggtgaaatcagccagatctggtgtacatacaggttcccacaggatgtgatagggtaatttaggatttggagacttaataaccagggctacccaggaaagtgacttgatgacatagtaccattaaataagagatgctcactcagtttgcttttgccactttcaaaatttaacttctcaggttattaatcagattattgtataagttagccagtagtctttagattaaaacaacagatgggaggtttgtggagtgtctcnnnnnnnnnnnnnnnnnnnnnngcccggaccctttgttcttcatttgaagaacatttgttccatagttaatcttccttccccaagtttgctattcaaatcaga

SEQ ID NO: 2306 - DNA, 536 bp, Cricetulus griseus
  misc_feature (152)..(168): n is a, c, g, or t
ctcagataattcattggaagtgagagagaattcacttcttttatggtattttgtttcagtttaccaccgtattttccactttgggatacttaaagatgtcataattaaagctgggcatggtggccccacatctgtactcctagcatgcaggnnnnnnnnnnnnnnnnnaactacatagtgagtttgcagccagcatgggctgtatgagtaaaataccaaactggggtgggggtgggtggcataaactgaagtaactcattctctccttaaagtagggtttcattactagtttatcaaatgtgcagactatacatccccaacctctagcacctcagcaataacaattccttggacttcagaggaatgggtttccaggtgttctaaaagaagtcattgttttcttcaacagtaaaaccaatacaatatgcaagaagtgtgctcagaacgtgcagctgtatggaacgcctaagccttgtcagtattgcaacataattgcagcatttattggcaataaatgccagcgctgcacgaattca

SEQ ID NO: 2307 - DNA, 498 bp, Cricetulus griseus
agtggctgggcgtggggggtaagccgcgcgcgcgaggtggaggccttcctgcgggcggtgcacgcgggctgtggaaacgcagttcgagactgcctcccggacgatgcctgaaataagagtcactcccttgggggctggccaggatgtgggccgcagctgcatcctggtctccatttcgggcaagaatgtcatgttggactgtgggatgcacatgggctacaatgatgacaggcgctttccagacttttcctacatcacccagagtggccggctgactgactttctggactgtgtaatcatcagccatttccacctggaccactgtggggcactctcttacttcagtgaaatggtgggctacgatgggcctatctacatgacccaccccacccaggccatctgccccatcctgttggaagactaccgcaagatcgcagtggacaagaagggagaggcaaacttcttcacttctcagatgatcaaagactgtatgaagaa

SEQ ID NO: 2308 - DNA, 578 bp, Cricetulus griseus
gttgcagcacatcaatcctttgttacccacttgccttaacaaggaggagagcagaacttgtaagtttgtgtccagtttcatgtctgagttgtctccagtcagagcagagctgcttggattcctcacacacgcgctcttgggagatagtttggctgctgaataccttatattgcatctcatctcaacagtatatacaagaagagatgttcttccactaggaaaatttacagttaacctgagtggctgcccacaaaatagtaccttcacagaacacctatatcggatcattcaacaccttgttccagcctcttttcgtctacagatgacaatagaaaacatgaaccaattgaaattcattccccacaaagactatacagccaatcgattggtcagcggtctcctccagctgcccaacaacacgtccctggtcattgatgagactcttctagagcaagggcagttggacacctcaagtgttcataatgtgactgcgctgagcaacctgataacctggcagaaggtggattatgacttcagttaccaccagatggagttcccgtgcagtatcaatgtgctcg

SEQ ID NO: 2309 - DNA, 580 bp, Cricetulus griseus
  misc_feature (84)..(103): n is a, c, g, or t
catgacaatgcagttcatcagccaccgattcccagaagaccatgaccccaccattgaagacgcttataagatccggattcgcannnnnnnnnnnnnnnnnnnnctggacattctggatacagctggacaggccgagttcacagccatgcgggatcagtacatgagagcaggagaagggtttatcatctgttactccatcacggatcgtcgaagtttccacgaagttcgggagtttaaacaacttatttaccgcgtccgacgcacggatgacacaccagtggttcttgtgggaaacaagtctgacttgaagcagctgagacaggtctccaaggaagagggattgtctctggctcgagaattcagctgtcccttttttgagacctccgctgcataccgttactacattgacgatgttttccatgctcttgtacgggaaatacgtaagaaagaaaaggaactagttttggccatggagaaaaaatctaaacccaaaagcagtgtatggaagatgctgaagtcaccattcaggaagaagaaggactctgtaacttgaggggagtgtaaaggatctgctgtgaac

SEQ ID NO: 2310 - DNA, 553 bp, Cricetulus griseus
taacaggtggtgtcactatatttgtggccttatatgattatgaagctagaactacagaagacctttcctttaagaagggtgaaagatttcaaataattaacaatacggaaggagactggtgggaagcaagatcaattgctaccggaaagaatggttatatccctagcaattatgtagcacctgcagattccattcaggcagaagaatggtattttggcaaaatgggtagaaaagatgctgaaagattacttctgaatcctgggaatcagcgaggtatattcttagtaagagaaagtgaaaccactaaaggtgcttattccctctcgattcgtgattgggatgaggtaaggggtgacaatgtgaagcattacaaaatcaggaaacttgacaatggtggatactacatcacaaccagagctcagtttgatactctgcagaaactggtgaagcactacacagaacatgctgatggtttatgccacaagttaacaactgtgtgtccaactgtgaaaccccagactcaaggtctagcaaaagacgcttgggaaatccc

SEQ ID NO: 2311 - DNA, 333 bp, Cricetulus griseus
gctctgtctaagcgggagctggatgagctgaaaccatggatagagaagacagtgaagagagtgctgggtttctcagagcccacagtggtcacagcggcattgaactgtgtgggtatagggcttggataagaagaaggcggctgatcacctgaaaccttttcttgatgattctactctccgatttgtggataagctgtttgaggctgtggaggaaggtcgaagctctagacattccaagtctagcagtgacagaagcagaaaacgagaactaaaggaggtgttcggtgatgactctgaaatctcaaaggaatcatcaggggtaaagaagcggcg

SEQ ID NO: 2312 - DNA, 544 bp, Cricetulus griseus
attcagctggattctccagctcagccccattccaaactaatcccactctctcagaaagaccaccaaaagtccaggattttctcccaaagctactatgtgctcaagacctcacctgcagggtatttaaacccaatcttcaagaatggccaagtgatttcttcttctccctttccctgcctcatctttgaaggctggaaaagtcacctcatagtacttggctcaataaatctggtctttctaatttggcttgatctggcctactactttggcagagaaacatattatcagggtatgaaacctatcagtgactaccctaattgtcctcagagaacctttatccagtaattgatgaaagcagatgcagagatccacagccaagcagtgggctgagcattgggagtcctcttgaagaaagggaggtgggattgtttgagctaggggttaaggccatgatggggaaacccacagagacagctgaccagagcctgtgggagctcatggactctataccaacagttaggaagcttacatgggaaagacttag

SEQ ID NO: 2313 - DNA, 600 bp, Cricetulus griseus
ggccctcaggtgttttatacatctggcagtcgtgagctcttaaaattgtttaaccttacatgagtgatagatctagtctcttctactgacttaatatcctacagacacttggatcttttgagaacaccaatgtcagttgcattgaaggtaactatcaacaaggtttcctttgggcttatatttgcatgacatggggattaagattatatttaacatacaggaacagctgtggatgtctatgcaagttcacctcacagcatgccactgccaagccttttaagccaacttgcatttgctatgtaacagtgtctcttgcatctgtaggatgaggggtcacagctcttgagatgtctttttaaaaagaaaattaaaatatattctttgtatatacactttcgtgccccctgacaaaggaatatacaacagcccaaactcgaccctcccaattcctccagttttacagctcctcccatcaacccagccccaggcaactgctgatatagtttcttcctctttttaagaggaagaatcccagctgtgcaggtggaattaacatacagacttctgggtggggttcctttcatttatttaactgctttt

SEQ ID NO: 2314 - DNA, 538 bp, Cricetulus griseus
aactcaggaggactggctggtgagtgtgcttccagagggatccagggtcggtgtggacccactcatcattcccacagattactggaagaagatggccaaggtacttcgaagtgctggtcaccaccttgtccctgtgaaggagaaccttgtggacaaaatctggacagaccggccagagcgcccctgcaagcccctcctcacactgggcctggattatacaggcatctcctggaaggagaaggttgcagaccttcggttgaaaatggctgagaggaacatcgtgtggtttgtggtcactgccctagatgagattgcatggctgttcaatctccgaggctcagacgtggagcacaatcctgtgtttttctcctatgcgattgtaggactagaggctatcatgctcttcattgatggggaccgaatcgatgcccccagtgtgaagcagcacctactccttgacttgggcctggaggccgaatatagaatccaggtcctcccttacaagtccatcctgagtgagctcaagaccctctgctcg

SEQ ID NO: 2315 - DNA, 536 bp, Cricetulus griseus
tagaaaaagtaccatttgggcgtgagtccactttgtgaccgtcagactgagtctatcgccaacatccagattggttttatgacttacctggtggagcctttatttaccgagtgggccaggttttcagacacaaggctgtcacagacaatgcttggacatgtggggctgaataaagcgagctggaagggactgcagagacaacagcccagcagtgaggatgccaatgctgcatttgagttgaactcccagttattaactcaagaaaatcggttatcctaacctgaaccagtgggacaaactccctcctgcgaggctgtggaaatgtgaaatgggtccccaagggaagagccagttctgacagccgacatttccaaggaaatgatgtcagcattatttatcatcgagatttcttgtgttggtcatttgagcccactttttagtgatgagatctgagtatacagcaatatgcacctggcttttgtgtgaaaccctgaacggacaaaggacagcaggggaaccgagaggattaacaagga

SEQ ID NO: 2316 - DNA, 514 bp, Cricetulus griseus
  misc_feature (110)..(132): n is a, c, g, or t
aatgtgttgaaagtgagatggttgcagtgagagacggagtgacactgccctcctgtgcaaatgctgaatcaacggtacaggaaaccttggtataggtcagcagacgatgnnnnnnnnnnnnnnnnnnnnnnnagaagtgagctgctgtcagtcacgcaagagagagatgattacaagagacagtgtcatgtgtacaccgagcagataaaagtcttacagcagaggatattagagctgaatgacaagtgcgtgaagaaggaaacttgtcaccagtccactgagactgaccctgtgttcttacttgaaagtgttaatggtcagtctgaaagtcctgaccacataggttctcagtatcagcaagctctggaagagatagagaggctgaagaaacagtgcagcactctgcagcatgtaaagactgagtgcagccagtgctctggtggtgagagtaagagcgaaatggatgagatggccgtgcagcttgatgacgtgtttcgacagctggacaagtgct

SEQ ID NO: 2317 - DNA, 426 bp, Cricetulus griseus
  misc_feature (342)..(366): n is a, c, g, or t
ctagacttgggagacaggaaataacaattgggaatcctaagcattggggtataattaaaactaggggtgggagagaagctggctgccctgacagagtaccaggaacacaaaattaggattagatctggagggcgggtctcagccaccaagatggctcatcaggtaagacacttaccaccaagcctaaggacttgagttcaagccctgacacccacatggtagaaggagagaagtaaccctgtaggttgtcctttgacctccacatgcatgcaatatacacacatcagggctggagagatggctcaaaggttaagagcattgattactctttcagaggttctnnnnnnnnnnnnnnnnnnnnnnnnngtgactcacaaccatctataatgaaatctggtgccctctgctggcctgcattcatacatg

SEQ ID NO: 2318 - DNA, 201 bp, Cricetulus griseus
  misc_feature (117)..(186): n is a, c, g, or t
atatttgcacacttcttacgtactgacaaagaatgtgataaaaatagcaaacacttggtaatgaccacatgctaggcacttccttagtgttttaatccttaaagctacttgtaccannnnnnnnnnnnnnnnnnnnnnnnnnnnnnnnnnnnnnnnnnnnnnnnnnnnnnnnnnnnnnnnnnnnnnctatatatatatttc

SEQ ID NO: 2319 - DNA, 403 bp, Cricetulus griseus
acctcagaactgtggctagaatatgtaatgataaagcatccagtgggaggtctgttaaacattccagaaacgttcatttctcagaaaatgggttgctgttctctttttttttgctccttttaatggatccttaaaaccaaagtaggggacccttttgaacccacacttttggtaattccttgattacttcccacacatggaaggaatgtcttttgaatgtaccaatctctttagtagtatttgatacaaaatgtacctggctttcaaaaaagcacttaacctgatttctgtttaccaacctttgaaaaaaaccagtttcatttattaaagttaaatgttttgtaggcccctgtggttatgtctttgtcacagcactataccatttaaataatttttttttctc

SEQ ID NO: 2320 - DNA, 449 bp, Cricetulus griseus
  misc_feature (18)..(35): n is a, c, g, or t
caccgcacccggcgggannnnnnnnnnnnnnnnnncagtaatgcccgggaaactcctctggggggacatcatggagctcgaggcacccttggaagagtccgagagccagaagaaggagaggcaaaaggtgcgctgcggctgggccgcgcctccctcgggctgcgctggcctgggcggggaggggagcggtccctgaaggggacgacctgtcagtaccgggcgcgagcttcccagggaaggcttcccctcgccttgctcggccctctgaggtcccggagaccgtccccgtcgccactctcccggacctggaggaggacggaccaaggcttgagcccggcatccgtggcacttcagcccgacgtcggcctctgcgcctggatccctcccaagagatgggcagactcgagctcccgtcgccgcggaatctgctcgttctccctttgctcggc

SEQ ID NO: 2321 - DNA, 372 bp, Cricetulus griseus
attcttccatggagcgtggactccgagacctggaagaggaaattcagatgctgaaatcaaatggggctttgagtaccgaagaacgggaagaagaaatgaagcaaatggaggtgtataggagccactccaaattcatgaaaaataaggtagaacaactgaaggaggaactaagttcgaaagaggctcaaggggaggagctgaaaaagagagctgctggtcttcagtctgagattgggcaggtgaaacaagagttgtccagaaaggacactgaactgctagccttacaaacaaagctagaaactctcacgaaccagttctcagacagtaagcaacatattgaggtgctaaaggagtctctcactgctaaggaac

SEQ ID NO: 2322 - DNA, 569 bp, Cricetulus griseus
  misc_feature (523)..(537): n is a, c, g, or t
gccttcaaccaagccccatcaggtcctgttgcttccagtagtgagctctttggcagtgccccacagcctgcagtagaactcatcggtggctcacagccaactttaggcccacctcctgctgcctcaaactcttccgacctatttgatcttatgggctcatcccaggcaaccatgacgtcttcccagagtatgaatttctctctgatgagcactaacactgtggggctcggtttgcccatgtcaaggtcacagaatgcagatatggtccagaagtcggccagcaaaaccctcccctctacttggtctgaccccagtgtcaacatcagcctagacaacttactacctggtatgcagccttccaagccccagcagccgtcgcttaacacaatgattcaacaacagaatatgcaacagcctctgaatgtgatgactcaaagctttggagctgtgaacctcagttctccatcaaacatgcttcctgtccggccacaaactaaccctctgatggggggacccatgcctnnnnnnnnnnnnnnngtgatgacgggcaccatgggaatgccccctct

SEQ ID NO: 2323 - DNA, 515 bp, Cricetulus griseus
ggaactaagaagacaaagtggtgttcctgaagagaatttacctcctattcgaaatgggaattttaggaaaaagaagaaaggcaaagctaaagattcttccaagaaaaccaaagaggaaaacacaaaaaacagaataaagtcttacgattatgatgcttgggcaaaacttgatgtggacagtatccttgatgaacttgacaaagaagataacacccacgattctgtgtcccaggaatcggagtcagaagatgacggtgttcgagtggattcccagaaggctcttgttctaaaagaaaagggcaataaatacttcaaacaaggaaaatatgatgaagcaattgaatgctacacaaaaggcatggatgctgacccgtataatcctgtgttaccaacaaacagagcatcagcttactttagattgaaaaaatttgctgttgctgagtctgactgtaatttggcaattgccttgagcaggagttacaccaaggcttacatcaggcgaggtgctgctcggt

SEQ ID NO: 2324 - DNA, 542 bp, Cricetulus griseus
gcgagcgccccccttttttttttaatgaatgaatgggcttttatagctcctttgtctatcctgagacctaattggctgttcaaaaaagtgacatagttccccactttataaaaaaaaatgcatttttgctgcctattttttgctcttttcccttctttgctttctttcccacctccccctttcttccctgtttcttataggggtactggaaattgaacctaggatttgcacatactcctacactactgagctatattccaaattatttttgacaagacgccactctgtaacccaggttttggccttaaacatgtgatcctcatgttttggcttcctgagattgtaggctggtgctaccagacttgtgataagaccttgtcccaaaaaacaaaaagccaagacagcagtttgttaaagtagcatttgaaggcaagatgactatggagtgattcgtaaataactaaccctttaaaaataaaaagtaggaaactgtttgatagcataagaagagccaacttcttttatcttcttcctatcaaaag

SEQ ID NO: 2325 - DNA, 579 bp, Cricetulus griseus
aaactattaccgtgaatttttagagaatacaaaggacagcgaaaggcttctcgtgtaaagctgagatctctggctttctgaccctctcctcacttcctctttctagtttggcttcattgcttctcattaggacagggtaggctaagttccctatgctgctagcatcctaagatgatacctttgtggaaataattgtgaatagcatgattcatttcgagcagaggctgagtttaggacagcagcttccattgacaagatttctgtgacgtgcattttaatgacctcttggctcccatacacagtatagcgacatatctactaagagaacccatgaattttttcagatagtgccctaaagacaattttatatgcctcactggtggctcttagtccccacacccccttgactttatcattgtttactagtaaaaagcagcattgccaaataattcccgattttccactctgaaaaatgcaatgtttaagcttttgaagttgtaggttaaacctgctgtcgttagtccttgctgtttgtgttgcttccctttatctggaatgtggcagttgccgctttacttt

SEQ ID NO: 2326 - DNA, 503 bp, Cricetulus griseus
  misc_feature (49)..(67): n is a, c, g, or t
caacagatattgcccttctcctccgagacctggaaacatcatgcagtgnnnnnnnnnnnnnnnnnnngaagatccgaaggcgaatgccagggacagatgctcctgggatcccggcagcgctggcctttggatcacaggtatccgacacactcctcgactgcaggaagcacttgacatgggtggtagctgttctgcaggaggtggcagctgcagccgcccagcttattgcccccctggcagagaatgaagggctgcctgtggctgcattggaggagctggctttcaaagcaagcgagcagatctacgggagcccctctagcagcccctatgagtgtctgcgccagtcatgcaccatcctcatcagcacgatgaacaagctggccacagccatgcaggagggcgagtacgatgcagagcggccccccagcaagcctcctccagttgaacttcgggctgcagccctgcgtgcagagatcacagatgctgaaggtctgggtttgaag

SEQ ID NO: 2327 - DNA, 497 bp, Cricetulus griseus
ccaacatcttcagcattccgtatttccagcagactggggtccgtggctttgcacgcagtatgcccacaagtggagccctggatcgggtagcaaacgccacaaaggtcgctttgtatgagaccccaactggctggaagttttttgggaacttgatggatgcaagcaaactgtccctttgtggggaggagagcttcgggactggttccgaccacattcgtgagaaagatggactgtgggctgtcctggcctggctctccattctggccacccgaaagcagagcgtggaggacatcctcaaagaccactggcaaaagtttggccggaacttctttaccaggtatgattatgaggaggtggaagccgagggtgcaaacaaaatgatgaaggacctggaagccctgatgttggaccgttcctttgtggggaagcagttctcatcaaatgataaagtctacactgtggagaaggctgataactttgaatatagtgacccggta

SEQ ID NO: 2328 - DNA, 252 bp, Cricetulus griseus
gtcccgcttcctgagggcgttaaaggaattctccgctgatcagtattgaccgtatgcgtcgccgttccaaatctcataagcgcaaactttgttaccgcgccgcccgtcgtaatgctcagcgtcgcaccgagcttaacgcttgtcgctacagtgttgatgacgggacgggtgcgtcgcgttccgtctgcgttgagcagatatggcggcacgaagatctcggcgtcgaagtgatttgtagcgcatgtgccgcag

SEQ ID NO: 2329 - DNA, 553 bp, Cricetulus griseus
ttctttttgcttttagtggttgcattggtggtaataggtgccaatgtgaggagtagaaggggtgtaagaacttcaaatataggatcattagaattttaataaacatttaaatgaattcaagtggctgtgtcttagtatcatggttttttgttttgttttagtataaactagatactaactgcattttattccattctccacattctttggaatattctttcattgaggaaacttaattaacctcccctttcttctatctcttaacctcttttcatttccatcccaccacccccattctactatgttctcttctagaatgactccaagaccacacactaaatgtctgacatgtaaatcaggcatgaagtttgacatacagataagtgtgatgttctgcttatagctgtctgccttctcagaaattctaagacatgtttctcatattcaggataatccaagggaaacagcacacatgggcataattttgcttaatgaccacttttaaaaatgggttatatcttaaaatggggatacccttacccaaaatgtttta

SEQ ID NO: 2330 - DNA, 580 bp, Cricetulus griseus
  misc_feature (459)..(478): n is a, c, g, or t
aggcagtgtggatcatgttggataaaaaggacccaggttaagagacaaacaggacaaatgtgcactttttatacaaaagatggagtttttcttcctggggattctaggatgctgcctccacttcaggaagcctgtgtcaagttcgccacccaaaggggtgttaattatgagttatttattctcttctgcatccattcaggaagagggagcagcagttatcccccctcacctgatgccgtcgtgttgcatgcacaggcaccaagatccacacgtgtggactcacacttcccaatccccaggcggacagttatttattacttaactttatggtggggcaagtatggacgcctcacattgtgtactattacaacagcgaagactccgagttgaaggacgtattttctctacagtaagagccggcagaaatgaagtcttgatccagtgaggggagttggactnnnnnnnnnnnnnnnnnnnnctttgcagacgcctagctgaggctggtgcagcagcccagtgactttgtgttgaattcacgagttcttcctcacacagcaccacttgctgacagcgttctagc

SEQ ID NO: 2331 - DNA, 537 bp, Cricetulus griseus
  misc_feature (181)..(197): n is a, c, g, or t
ggcttcaactccagctacctgaagaagtggtgtcctactggaggaacgagtttgactggaggaagcaggtggagaccctcaaccagtaccctcacttcaagaccaagattgaagggctggacatccacttcatccacgtgaagcctccccagctgccctcaggccgcaccccaaagccctnnnnnnnnnnnnnnnnntggcctggctccttctatgagttttacaagatcatcccgctgctgactgaccccaaggcccatggcctgagtcacgagcatgtgtttgaagtcatctgtccctccattcctggctatggcttctcagaggcatccagcaagaaaggcttcaatacggtggccactgctaggatcttctacaagctgatgtcacggctgggcttccataaattctacattcaaggcggggactggggctccctcatctgcaccaacatggcccagctggttcccaaccacgtgaaaggcctgcacttgaacatggcttttatctcaagaagtctctacaccctgacccctc

SEQ ID NO: 2332 - DNA, 78 bp, Cricetulus griseus
atctaaatcaagggagctcttttctgaagagactgcttgcccaaacccactccagacttacctcatagaaagaaatcc

SEQ ID NO: 2333 - DNA, 557 bp, Cricetulus griseus
tgtttaacaggagtataacaggttgaaagcagagcacattgctttttatctgtgataactaagagatgaatatgattggccaggactcagaaattataagttcaccttgacaagacatctagcaacaccagaactttaccactgaacttaatttgccactaactcaaatagcctcacagacctgtttgccaagtaggaggctggttttcctgtttctcatcaccaatgtggtgaggcactgatcaatctgacttgaatggaaatgctgtggtgaatcccagagtatgatgctaatggaaattattaggacattactcctagtgatttttgagtttgattaccaaggaagaatcacttcagctactataagtcaaccttatgagcaaagattaagctctttgtacctggtcttaatcctggatgttgttttttttattgcccaatgtccattccatctcactataacaacttcctggagttttttggaaccatctcttccaattttcagtccatgtgatttagacagtcttgttgaatcttgtgctggacatgttatt

SEQ ID NO: 2334 - DNA, 546 bp, Cricetulus griseus
  misc_feature (407)..(425): n is a, c, g, or t
gcgatgctccctaaccctgcgaagcactcgcagactcttcccccactcacctagcgcggacttaggcacctttcccttcgctgagttccgtagtttcagggcctgggaggcctttgccctcgccctccgggtccgcttcaccggagctccgctcgtcttggcctggccgggggcggcacgagaggctgtagggaaaggcggcgaaggaccgagtcggagggtgtgcaccaccccgtttccaccctcccagtcacttccctcgaggcctcctgcacagcgcgacgtctcaagggtggcggtactcaccctccgatgcggccagaagctccaggccgcgccgcagcaacgccgccgacatgctgccgagccctgcccacacgcccagccttacttccgctctggtagtnnnnnnnnnnnnnnnnnnngcggagccggaacctatggttccgcagcgggcggaagtacgcccttatggctcctctaacttgggaagagcaggaactggaggcatgtacaaagcgctgaagccacattagttgtctaatt

SEQ ID NO: 2335 - DNA, 475 bp, Cricetulus griseus
  misc_feature (85)..(461): n is a, c, g, or t
tttcatttcactgttggtgaaagcaagaaggcatctgccaaagtttcagatgggatttctactcagtacccagttgtggatcatnnnnnnnnnnnnnnnnnnnnnnnnnnnnnnnnnnnnnnnnnnnnnnnnnnnnnnnnnnnnnnnnnnnnnnnnnnnnnnnnnnnnnnnnnnnnnnnnnnnnnnnnnnnnnnnnnnnnnnnnnnnnnnnnnnnnnnnnnnnnnnnnnnnnnnnnnnnnnnnnnnnnnnnnnnnnnnnnnnnnnnnnnnnnnnnnnnnnnnnnnnnnnnnnnnnnnnnnnnnnnnnnnnnnnnnnnnnnnnnnnnnnnnnnnnnnnnnnnnnnnnnnnnnnnnnnnnnnnnnnnnnnnnnnnnnnnnnnnnnnnnnnnnnnnnnnnnnnnnnnnnnnnnnnnnnnnnnnnnnnnnnnnnnnnnnnnnnnnnnnnnnnnnnnnnnnnnnnntcatcggtgttgct

SEQ ID NO: 2336 - DNA, 580 bp, Cricetulus griseus
caatctaaaaacagtgcaaaccagaaaggggccaacttgagtcaggatgagtgatttttagtcagccttgcaaaggcccactattaaaccctattcatattttgtaaaaaatgattatactgcccttgagtcagatcagctataggaaaatcgctgttttatatatatagctactttccccatttttttccttcagattttgttaatttacaaaaggttttttagattagtgtctagtatctcagcatgtgtcttttaaaataacgagtaagaaggggaattcctgcgagttcaaggaaaaattcatttttcaatagttccttcagtgaagaaagcactttcacagccttttcagaagtagaaatttttgtttctacattttctctacctgaaagacttaactttgcccctggaatgttgcattttaagaattttttatgagctgggagtggtggtacatgcctttaatctcagagttcaggaagcagaggagatggatctctttaagctgaggctagcctgtagagttcaagggtgaccagagatacatacagagacagtctttaaaagaaaaaaaaaa

SEQ ID NO: 2337 - DNA, 190 bp, Cricetulus griseus
  misc_feature (18)..(47): n is a, c, g, or t
ctggaaaacaatctggcnnnnnnnnnnnnnnnnnnnnnnnnnnnnnncgactggcacatggacatggatctcctcattgatctgaacaaagcaaatgaagaagagttggaacgctaggatgaagacctggatgatgcacagaagaatccgggaaagagtgaaattcaaaatgcaatgatggcaaaagcgg

SEQ ID NO: 2338 - DNA, 231 bp, Cricetulus griseus
caaacttaattaactttttttcccttatataaaaaccctttatgggggggccacagttgcaccctgggtcctttaaacaaaaactttggggggggctttcacaaaatggtcagggaattcctgataaggaaactgggggaacacattttttttccaaagggcgggggttaggtacctttaggttttgaaaatggcatcaaagggggccttggcaaatttccccaggggggc

SEQ ID NO: 2339 - DNA, 544 bp, Cricetulus griseus
cggaagcagcatagtgactggggtgacaataagagctcgaacctggtcactttcccctcagaaagcgttgttgcgggccagctcggcaccctggagcccagctgtgacctctagggcagcatgagtggtctcaggaacctgaacaaagctggtgccagcctcttgtggtgacaccatgaggaggaccttgccttctcttccaaagctggcagccccgacctccccagcctccagtcgcagagcagcagctgacccaggagggcagaggtgccaaaaagagaggccaggaagacgattgcccacagcccagctcctctgtgagcacttggggcattcaagggcggggtatgctaagcactcctctgtccccttggggagaattgcttcgcatggattgtgatctggaaactgaccagaccctgggggagttattaagttggcaaacccggaacactgcatctaacctgagccgtagggggtaaaggagtcagtcggtgctccagtgtcccgggatgtggtaaagttctttcttaacctggatagt

SEQ ID NO: 2340 - DNA, 434 bp, Cricetulus griseus
  misc_feature (38)..(60): n is a, c, g, or t
tgaagcagcactacattgacctgaaagaccgtcctttnnnnnnnnnnnnnnnnnnnnnnngaactcagggcctgtggtggccatggtctgggaggggctcaatgtggtaaagacaggtcgaatgatgctgggagagaccaatccagctgattctaagccaggcaccattcgaggggatttttgcattcaggttggcaggaacatcattcatggcagtgattcggtgcaaagtgcagagaaagagatcagtctatggtttaagcctgaagaactgattgactacaagccttgtgctcatgactgggtatatgagtagaggtggataacgctgggtctttttccacattactgatggatccctggacacggctcttcattccacagaataaatggatcatcttttctaaaataataaagacaaagactttggaagt

SEQ ID NO: 2341 - DNA, 512 bp, Cricetulus griseus
agaacactttgaggtgaatgtggtgcctctcaccattcaactgtcacatcatttcttccataggatgatgggctttttctttcctggtcgaatgtggaagatgatgacgttggtgatgaacaggataagtctaaactggtgacaactggaataccagtactgaagcctcggcagctgatatcaacagacgatgcatccccactacgtcctgggaagggtgtgacacatggcttgacccggagttccagggtcataagatcatttcgcaaattacctgagcacccaattgatgatattgacaagatgaaagagcgagctgcaatgaacaactccttcatatacataaaaatcccacaagttccactgtgtgtcatttataaaggtgagaagaacagtgtggactggggtgaccttaatttggtgctaccctgtctggagtaccacaacaacacgtggacatggctggactttgccatggctgtcaaaagggacagccgaaaagctctggttgc

SEQ ID NO: 2342 - DNA, 513 bp, Cricetulus griseus
ccggagccgtgcagatcgcgtctctgtctcctctcctgtcgcttgtctcctcttctctcgctcttctctccgcctcgtcaggttcggctaagagtgagtggcaagatggcggcgcccatgtatgccaccctcccggctgtcgggcgttatggtgccagcacccatccaggacttggaggccctgcgcgccctcaccgcgctcttcaaggagtaccgtaaccgggaaacagcacccagaacgatcttccagagagtcttggatatcttaaagaaatctactcacgctgttgagctggcctgcagggacccttcccaagtggagcacctggcttccagtcttcagctaatcacagaatgtttcagatgtcttcggaatgcttgtatagagtgctctgtgaaccagaattcaatcaggaacctggatacaattggcgttgccgttgatttggttcttctctttcgtgaacttcgagtggaacaagactctttgttgacagcttttcgttgtggcct

SEQ ID NO: 2343 - DNA, 544 bp, Cricetulus griseus
tgtgcagtcacttctcggcttgctgggacatgataatacagatgtgtccatagccgtggttgatctgcttcaggagctgacagacatagacaccctccatgaaagtgaagaaggggcataatttctcatcgatgctctggtggatgggcaggtggtggcactcctggtgcagaatctggagcgcctggatgaatccgtgagggaagaggccgatggcgtacataacaccttagctattgtggaaaacatggcagagttccgtccagagatgtgcacagaggctgcccagcaggggctcctgcagtggctgttgaagaggctgaaggccaagatgcccttcgatgccaacaagctgtactgcagtgaagtgctggccatcctgctccaggacaatgatgacaacagggagctgctgggggagctggatgggatcgatgtgcttctgcagcagttatccgtgtttaaaagacacaatcccagtacagcggaggagcaggagatgatggagaacctgtttgacgcgctctgctcctgcttgatgctc

SEQ ID NO: 2344 - DNA, 255 bp, Cricetulus griseus
  misc_feature (3)..(24): n is a, c, g, or t
ccnnnnnnnnnnnnnnnnnnnnnncaaaagaaaaactttattctttatttccatatttctaaaataaaactggctgattaggttgctctgagggatcagtcaaacaaaccaaatcccatatcctcatttgattcctccgacttttccttggtttcacccttccctggggctgcagcggcaccaggaccaccagggggggcagcacccccaggaccagcacccccaaatgcaaatggatcacccaaaaaggccttg

SEQ ID NO: 2345 - DNA, 385 bp, Cricetulus griseus
tattaagttgggaatacttttaaaaaattaaccagtggaatcagaggagttggaccttacagggtagtagagaagctgaggagtctgggcatgtctgtaggaatgagaatttcattctgggacactcacatgagtcctgcacttccattttttcatctgcagagagagcatgacaggcagcacagctgcgtctcagggttgttgggaaggtgaccatttaaggggttagtccaatacctggcatgttaggagcaggcagtaagttttatctgtacctagcttacacccgtacttggagataaagcataaatcataagattttcgtatttgagatttaaaaggctgatttattttctgctgtgtggtctgttttcagaacaagctg

SEQ ID NO: 2346 - DNA, 497 bp, Cricetulus griseus
cttttatgtagaacccaaggaatgccttccctgtcttattttagccaaaacaactggttacatgccttccttgcagtgagcactacaatggatgtgattgtcaatgtgaatagcttagagtactacaaagggtaagctaattgaatgccttgaaagtattatccactggtcatatggtaaactttttttcagtattatttatagttgcacttgattacagttctgaggcgctggagcatttgtgcacctcacctgccttggcaagcctatttttgtgacatggcagcacagatttaacactatgcgttaaaagcacttttttttttaatgtgtttaatcccttaaaaagaatgccaattaagtttcattacctgtcattgatttatctagtacctcagggttcattcctcttacctgaatatcttcttcaataactgtgttgacatctttggtttcccattgagtatacactactgaataaatgtaggagttttatg

SEQ ID NO: 2347 - DNA, 454 bp, Cricetulus griseus
agcgagccgcagtacttgcgattactggctctggttccttcgagaggaacgcggcggcggcagggtcatcgcagctttagccagcggctgctgtcatgacgacccaggggggcctggtggccaaccgaggccggggggtcaagtgggccattgagctgagcgggccgggaggaggcagcatgggccgaagtgaccggggcaggggacagggagactcactctatccagtcggttacttggacaagcaagtgcctgataccagcgtgcaagagacagaccggatccttgtggagaaggtacagagcgctgctgggacatcgccctgggtcccctcaagcagattcctatgaacctcttcatcatgtacatggcaggcattaccatctccatcttccctactatgatggtgtgtatgatggcctggcgacccattcaagcacttatggctatttca

SEQ ID NO: 2348 - DNA, 574 bp, Cricetulus griseus
  misc_feature (515)..(568): n is a, c, g, or t
gatccctttactgttcatatggcagcaagaattattgccaagttagcagcttgggggaaagaattgatggaaggcagtgacttaaattactattttaattggattaaaactcagctgagttcacagaaacttcgtggtagcggtgttgctgttgaaacaggaacaatctcttcaagtgatagttctcagtatgtgcagtgtgttgctggctgtctgcaactgatgctccgggtcaatgagtaccgttttgcctgggtggaagcagatggggtgaactgtataatgggcgttttgagtaacaagtgtggctttcaactccaatatcaaatgattttttcaatatggctcctggcatttagtcctcaaatgtgtgaacaccttcgccgctacaatatcattcctgttctctcagacatccttcaagaatctgtcaaagaaaaagtaacaagaatcattcttgcagcattccgtaatttcctagaaaaatcaactgaaagagaaactcgccaagaatnnnnnnnnnnnnnnnnnnnnnnnnnnnnnnnnnnnnnnnnnnnnnnnnnnnnnnagcaga

SEQ ID NO: 2349 - DNA, 579 bp, Cricetulus griseus
  misc_feature (181)..(195): n is a, c, g, or t
ggtgtagacaagaggatcagcaggttcattctccccattggggccaccgtgaacatggatggcgcagccatcttccagtgtgtggccgcagtgttcatcgcccagctcaacaatgtggacctgaatgcagggcagattttcaccatcctagtgactgccactgcatccagtgttggagcannnnnnnnnnnnnnngggggagtcctcaccattgccattatcctagaggccattggattgtccacagattacctctctctgatcctggctgtggactggattgtggaccggactaccactgtggtgaatgtggaaggggatgccctgggagccggaatcctcaaccatctgaatcagaaggcaatgaagaaaggcgagcaggagctgcaggaagtgaaggtggaagccattcccaattgcaaatctgaggaggagacatcacctctggtgacacaccagaatccatcaggctctctggtcactgctccagaactggaatccaaggagtcggtgctgtgatggggctgggtcttggcccagcctgctagttaccagcaacccaccctggtagcctgccgc

SEQ ID NO: 2350 - DNA, 528 bp, Cricetulus griseus
tagttgcccacaaactgccctttccagcaaaggctgtaagccgtgagactctagaaaagatgcgccaaaatcaaaaagaaagagaaaataacaaccaaaatccctggacctttgagcgcatagccacggccaacatgcttggcatacggaaattcctgagcccatatgacttgacacagaaagggcagtattggggcaaattcttcctgcctaagcgtgtgtagtcaaagcccaggaacccacgtgcacacagacccttgagactgagtctgcatcttcactgtctttaggatctttggtggttcttggaccatagctaagcacatgagtaaatgacttctgaaaagttatgtcatctgattgttcctaattaaactctgagtgtaacctcaaggtacaacttctcattggtcagtttcagttgctcaaaagattaagaatgatttggcatagccagctgtggtggagcatgtcattaatcccagcactcaggagtcaaaggcaggcagatctcaattaagttcaagg

SEQ ID NO: 2351 - DNA, 496 bp, Cricetulus griseus
tactgggcttttgaaagccactcatttgcttcatttcattttactctggtgcctgggaagagccaggttgactaatgagagtgtggatatgtccttccctgtgtttttatgccaccactctaccagcacccaggagaggtccaggataggacttcacagactcacatgggccagcctgttgaccacgggggttacattgattgtttaggagcactgtctagggccctgccctctcacaaacattccaaattcgcattccttttaatcctcttgattattccaatagtatgcccattttcaccctaatataacatataatcataactggtattttaatgcactagtatttcataactctaatgtttactatttataaatcagaaaaggtgtttccacagttttaaaagttgtaggtgggataaactcaaatatttatgagagttgaaagtactttttaagcttgaatgtcatcccttttcctcttccactacaaaag

SEQ ID NO: 2352 - DNA, 536 bp, Cricetulus griseus
gctgttggccatgagtaccagtcaaaactttctaagcattgctcacaagtggactcggtccggggcttcggaggcaagtttggtgtccagatggacagggtagatcagtctgctgtaggctttgaataccaggggaaaacagagaagcacgcctcccaaaaagactattctagcggcttcggtggcaaattcggtgtgcaagctgaccgtgtggacaagagcgccgtgggctttgactaccagggcaagacagagaagcatgagtcccagaaagattattccaaaggttttggtggcaaatatggaatcgacaaggacaaggtggacaagagcgctgtgggctttgagtatcaaggcaaaacagagaagcatgaatcccagaaagactatgtgaaagggtttggaggaaaatttggtgtgcagacagacagacaagacaagtgtgcccttggctgggaccatcaggagaagctgcagctgcatgagtcccaaaaagactatgccaaaggatttggcgggaagtatggggtacagaa

SEQ ID NO: 2353 - DNA, 560 bp, Cricetulus griseus
  misc_feature (291)..(308): n is a, c, g, or t
ctcatcatgatacaggaggatgaagtcactgtcaactccagctcctccatggtgcacaagaaggatcatgtattcgtaagggatgaggcgggccacggcgatcccaggcctgagccgcggcctacccagtcagttcagagccaggccctccactatcggaaccgagagcgctttgccacgatcaaatccgcgtctttggttacacggcagatccacgagcatgagcaggagaacgagttgcgggaacagatgtcaggttataagcggatgcggcgccagcaccagaagcannnnnnnnnnnnnnnnnncaagctgaaggctgagatggatgatcaccgtctcaagctccagaaggaggtggagacgcatgccaacaactcgtccatcgagctggagaagctggccaagaagcaagtggctaccattgaaaaggaggcgaaggtagcctcagcggatgagaagaagttccagcagcagatcctggcccagcagaagaaggacttgacaactttcttagagagtcagaagaagcagtacaagatttgcaaggaaaaaataaa

SEQ ID NO: 2354 - DNA, 396 bp, Cricetulus griseus
aactctggaaagataataaggactgtttatctttgctaatgaagaagtctcttgagtctatgcccaagtgagcttcctgaataccactctgtgaacagcaatgaagccagaatctaggcataggggtccttgaaagttcatgcatatatattccttttcctagtatagactgtacttggatgtggctattgttatttatattacccattattagactggtttcttcaaaacactgattaattttattaatatgtgtagcaatacttcggaagtggctgtctcacaattctaaattgtgcaataaaagccatgtatgtatgactttggaatatgggcttgaactttgactaggatgcgggcgtgtttatgttctgtgacttcaaaatactggcttgt

SEQ ID NO: 2355 - DNA, 485 bp, Cricetulus griseus
tgctgttctgtcatgtgagccgtcggggcgccccattccccggtcccgtccttcgctccacactccacccagcagcccggccctccccggcgcctgcccaccctcaccctccgcctcacgggccccagacacctgtgtgtgtgtggtccctgtgcacctcgagtcacgggtggggggtgctctgcccgtcaccacactccacactcaccccgaacctctgagccgtgtgtcttcccttggtgagagacaggccgacccacctcatatcccctaaggttggggactcccaactccaagtcactgcaggtttacacagacggctcatgcccaccatggtctcaacctggtgtccccttgttgccccaggccagcctgtctgtgccttattgctactttggggagtctctgaggggaccaaatgagagggtctccctggccaatgcgccatcatcctggtgtgggcaggtggggtgaggccacacttc

SEQ ID NO: 2356 - DNA, 579 bp, Cricetulus griseus
ctgtctgcggaattcaagcatctgaccctgagggagcagagatgtgggaatgggggccgtgccaattgtgacgcctccttgattgtgacggaggagctgcatctgatcaccttcgagactgaggtataccaccagggcctcaagattgacctcgagacccactccttgccagttgtggtgatctccaacatctgtcagatgccaaacgcgtgggcatcaatcctgtggtataacatgctgaccaacaaccccaagaatgtgaacttcttcacgaagccaccaattggaacctgggaccaagtggcagaggtgctcagctggcagttctcatccaccacaaagcgagggctgagcattgagcatctgactacactggccgagaagctcttaggacctggtgtaaactactcagggtgtcagatcacatgggctaaattttgcaaagaaaacatggctggcaagggcttctccttctgggtgtggctagacaatatcattgaccttgtgaaaaagtatatcttggccctttggaatgaagggtacatcatgggcttcattagcaaggagcgggagcgtgcc

SEQ ID NO: 2357 - DNA, 520 bp, Cricetulus griseus
  misc_feature (180)..(207): n is a, c, g, or t
cttagggagaaaaactaacagatgaagaagtagatgaaatgatcagagaagcagatattgatggagacggacaagtcaactatgaagaattcgtacagatgatgactgcaaaatgaagacccactttcaactacttttccctctagaagaatcaaattgaaatcttttacttacctcttnnnnnnnnnnnnnnnnnnnnnnnnnnnnttcatttattcattctgtttctatctagcaaaactgaatgtcaaacgtaccttctgtccacacacaaaatctgcatgtattggttgggggtcctgtcccctaaaaatcaagcccccacatcagttttacagtataaatactcgtactaccttctaaggaagcacctaggggactccttaaagttccatttgctaatgattaataatacactgtttgggctggccagtttctcatgcatgcagcttgacaattgagcacagtcaggcctttgttttaaaaccaaaacagaaaaaaaacaaattcaaaacctcag

SEQ ID NO: 2358 - DNA, 423 bp, Cricetulus griseus
gctttgaggtgctgaagaaagtgaagtcactctgcctccgtcaaaacttaattaaatgcattgagaacctggaggaactgcagagtctccgagaactggatctctatgataatcagatcaagaagattgagaatctggaggcgctgacagaattggagattttagatatttcttttaatctgctgaggaacattgaagggattgacaaactgacacggctgaaaaaactcttcttggttaacaataagatcaataaaattgagaacataggtaccttacgtcaactgcagatgctggagctgggttcaaaccgcatccgggcaattgaaaatatcgacacgttaaccaacctggagagtttatttctgggtaaaaacaaaattacaaaacttcataacctggatgcacttaccaacctgacag

SEQ ID NO: 2359 - DNA, 438 bp, Cricetulus griseus
gtattcctgtgcccaaacttttccttggttgtggccagtcctcatatgtgaaggtagataatttggagaatttgtaatttgttcacatgagcttaaacctacagtactctgctccacggtggccattgttagagggtggtttgtggggggcaatattgagtgaggtttatatctcctgtggccagagccatctttcccttcattcacagatactcaaagatggtaaagctaatggtgatgagggctcaacagcaggtaagggcatttgttgctctttcagaggacccaggtttggttccccatgctctcatggtagcatacaaacatttgtagctctacttccaagggatccagtgccttttgacatatgtgacgtatccattcattacataattaaatctaataaaatcaaaaaccttatggtggcatagctgtatt

SEQ ID NO: 2360 - DNA, 195 bp, Cricetulus griseus
tcttctcacgaagacgacgaggagggtccattctacagcgcactgtcaggtaaatccatttctgagagccatccatggcatgttcctgagaacccttcccatcccaagcatcactacaaagcaatggaaggtgacgggactgtaacaccttttttttcagatgccagcaccccttacaaaccggcctatgtgaag

SEQ ID NO: 2361 - DNA, 164 bp, Cricetulus griseus
tttaaaagtcccggccgatattccctaacgccatgtccaggccgtccctcatcgcatttactccagccaccgactccagcgacctctggaaagatgggcagcagcaaccacagcctgagaagccagggccagtcctggatggggccgcagcccgggctttctac

SEQ ID NO: 2362 - DNA, 551 bp, Cricetulus griseus
actgtgaaaaaaatacttagtgacattgggttggaatactgtaaagaacatatagaagattttaaacagtttgaacctaatgacttttatttgaaaaacactacatgggaggatgtaggactctgggacccttcacttacaaaaaatcagggagaagttctgagcagcattcttacaagagaaggccttcctagagaaggtttggttttgaggacaggctctttctatccttggctatactggaactcaaaaatccgcctgtctctgcctccccagcactgggattaaagacagacaccagtacaccacctgaggagttggtggcaatccagagaactcaaaaccttcaggaaaaaaacaggagaaaagatgactgtttatcatgtgtatatttacctatttgagatagtaattctgaaagctggtctctaactagtatgctgtgtagtaaaccatggcttctgacccctttgccctgtctataaaacagtcagttaactgaagctgggtttctctttgtagctttggagaacctgtcctggcactcggat

SEQ ID NO: 2363 - DNA, 557 bp, Cricetulus griseus
agggcttatcctctcaggctgacttgaaatctgtcaactttctggctgtttgcacttttttggacttgtgaattgatgtagctgactctgtgttttccaggaaagtataaatttactctgattttaagaaaaacccaaccattcttttatttcccattaaaatatatgtattgggctgcagcagtggcaacacagaaactctgtttttgcagaggacccagcaggctcaattcccaatgcccaatacctatgtggcgacttacaaccatctatgtatgactccacttccagggatcaaatcccctcttctgacctgacctctgagggcaccctgcatgtgcatggtgcatataggtacattatcaggccatcatttatacacataaaataaatctaaagtgtgtgtgtatacagtaagggcatttaaattccatagaaccggttcagacagtgaataacttcacataatcttagtaagctgaagaaccctcttgtattctactcagcctgactttaagccatcttaatcatgagctatgcagtctgaaccatgggtc

SEQ ID NO: 2364 - DNA, 590 bp, Cricetulus griseus
agtgcaactctcctgtgtctcggcctgcacagctcaaccatgtccgggacatcctccaggagcctggggaaaggaagctcgcctccgggtccggttccagagggcctgatccgcgtctacagcatgaggttctgccccttcgctcagagggcactgatggtcctgaaggccaagggaatccgacatgaaatcgtcaatatcaacctgaaaaacaagcccgagtggttcctcaagaagaatcccactgggctggtaccagttctggaggacagtaagggtcgcttgatctccgaatctgtcatcatttgtgagtacctggatgaggcctaccctgacaagaagctgttcccagatgacccttatgagaaagctcggcagaagatgaccttagagtcattctccaaggtgccccctttggttacaaggtttattagggggaacaaggaagaccgctctgccctaaaggaagaattgaggaaagaattctacaagctggaggatgctttgactgattgtcagagcgaattccgtattggggatgctgtctctatgactgattatcttatgtggccttggtttcaacgactggg

SEQ ID NO: 2365 - DNA, 431 bp, Cricetulus griseus
tgtggaggtcagaggacaactttcaggagtcagttctctccttccaccatgtgggtcctgaggcttgaactcaagtgatcaggcttcccagcaagtaccttgactcactgagtcatcttgctggcttgagaaatgtgttttaaaactctgtttatagaggtcagggacatgagcacaggatacagaatctcagtcagaagatggctaaggtctggcgtgtttgtggacagcaagatgagtctaaatgttaagagagtagaagaccttaaatattctcaccagtcccaaatggtgactatgtgaggttgtagagtagatggtaattaatattttgcatggtatgcatgcatgcaccaagttgttgccttctacactttaaatacataattttatgtgccaactacaacttaatgaatctagagacattgaca

SEQ ID NO: 2366 - DNA, 494 bp, Cricetulus griseus
tcctcttctgctctttggctatgatttcccaagctcatgtgtgacaagaggatagataggcagcagtggagtgcctgggagattattgcagttattcaggtagactaggctccagacataaacatagaaaataagtgattatctattcttcccctgactcattctcctagctccctcccccctcttcccatgctcccaattttctcaggggatcttgaccctttccccttcccaggggaccatgtctgtctctcttaggatcctccttgtttactagcttccctggcagtgtggattgtaggctggtactctatgtctaaaatccacatataagtgagcacataccatgtttgtctttttgagattgagttacctctctcagaatgggttcttctagttccatccattttcctgcaaattttaagattccattgtttttttttcagctgaatagtacctcattgtgtaacagtaccacattttctctatccatc

SEQ ID NO: 2367 - DNA, 389 bp, Cricetulus griseus
ggccactcgtcgagctctgcacttcgtcttcaaagtggggaaccgcttccagacggtgcatttctttcgagatgtcctggggatgcaggttctacgccatgaggaatttgaagaaagctgcaaagctgcatgtaatgggccttatgatgggaaatggagtaaaacaatggtgggatttgggcctgaggatgatcattttgttgcagaactgacgtacaattatggcattggagactacaagcttggcaacgacttcatgggaatcacacttgcttccagccaggctatcagcaatgccaggaagctggagtggccactcaaaaaagttgcagaaggagtttttgaaactgaggccccgggaggatacaagttctatttacaagatcaaa

SEQ ID NO: 2368 - DNA, 479 bp, Cricetulus griseus
  misc_feature (406)..(406): n is a, c, g, or t
cgaaattggggcttgcccttctgcctctaagctgctgctgggaactgagaatgtgtctggggccctagctactggtgtcagaacatggagactgcagcccggtgcaatgctgtcgaccattgcaaacgccatgtgtggaactaattttccagcttgctgaagttgcagcctatttgtgggtctaggataatgaacacacaagatctatttgacttcattctaagtaggacccctactaccctacccccctttttttgtccttcccccatcttatagcattgctgtcttgtaagaggtgctgatggcccctttcagtgttccccttctgcctgaaggatgaggacattcagggcatcagctctccagctgccctttcacccacctgctggagggggtgctgagccanagagcaggaaggccttctgagccctgacttggtgtacggggtggggcttctgtggccacctcctatcttgaag

SEQ ID NO: 2369 - DNA, 561 bp, Cricetulus griseus
  misc_feature (32)..(73): n is a, c, g, or t
ctcttcgagagctgactggctccctcctggcnnnnnnnnnnnnnnnnnnnnnnnnnnnnnnnnnnnnnnnnnncttttccttcacgatgctgcatttcattaagaaccagctagaaactgctccaccccatgagttaaagaatacattccagctactacatgagatactggtcattgaagatcccatacaagtagagcgagtcaaatttgtatttgagacagaaaatggcttactagcgctgatgcaccacagtaaccatgtggacagcagccgttgctaccagtgtgtcaaattccttgttactcttgctcaaaagtgtcctgctgctaaagaatacttcaaggagaattcccatcactggagttgggctgtgcagtggttacaaaagaagatgtcagagcattattggactccacagagcaatgtctctaacgaaacctcaactggaaaaacctttcagcgaaccatctcagctcatgacacattagcatatgccacagctttattgaatgaaaaagagcaatcaggaagcagcaatgggtcagagagcagtcctgcca

SEQ ID NO: 2370 - DNA, 535 bp, Cricetulus griseus
ctctggaagatcttgtggtcaagagcaatctgaatccaaatgcaaaggagtttgttcctggggtgaagtactaacatatttgagtagacggggccctcttttggtggatgtagcacaatttccacactgtgaaggcagtattagaagacttcattgtaaaagctctctcgtcactgtgttacacttatgcattgccaaagtttttgttagtcttgcatgcttaataaaagtgctgagactgttacgaagtaagaagctgtcacacagttactgaaagtagaatggccccatggcttaatgtaaagacagcaatggaagaagcaccagtcaattgtgacaaagaaccaaattaaataaccttcaactctcactgacttgtctgtctttgaggctaaactggtcccttaggattaattgatactttttaatgtctacactttgcaaaaaataagtaaataagcaagtttaagttaggttctgattgttaagcagatttctcaattgcatttgtccattgaaaatacccttttctgaa

SEQ ID NO: 2371 - DNA, 474 bp, Cricetulus griseus
ctggacagctgagctctttcagaggcgccaggaactttcctcaagcccagccaggtaaccatcccatggcttgaattgggaatgaaatcttctaaaatatcagaacagaaagctttttgttcaacatggaggacaaaagacggcgagcccgcgtacagggagcctgggctgctcctgccaagagccagcctactgcccagccaggtactgctgctaggaaccatctttcccaaacaccagggcaggcctggaggagcaaggagcagcaactgcctgacagagagtttgtgttcaaagagcctcagctggttgtgcggacagccccagaacccagagtgattgacagggagggtgtgtatgaaatcagcctgtcacccacaggtgtgtctagggtgtgtctatatcctggctttgtggacttgaaggaagctgactggatattggagcgcctttgtcaggatgtcccctggaaac

SEQ ID NO: 2372 - DNA, 581 bp, Cricetulus griseus
  misc_feature (421)..(421): n is a, c, g, or t
  misc_feature (515)..(515): n is a, c, g, or t
ctggatatccccatgacattgggacactcctgccttcttcactctgactgtttgctacttctctatctttgaaacgctgccagaacacttgtgatcctcccttctccgtttgtaaggaatgtgattgtgggacctgcctgttctccttggctatcttggacttttgttctggtgctaactggcccaggcactgtgcagcagactcatctgggagtccccgactttctgcagactttccgcatcacgtacacctggagaaggctttgcttcctagtaaggcctcgaagggaggcggggtaccgcagggaggcagggtacctggccttctgtcccgtgtccatgagctcacagctgccctcctgcctgctgtacagggaatgtgtagcttttccccggggaaatgcacacaaagaagactcantgtctgggctgagagcggtgtcctgaaggcagacactgctcggagggaaaggtgaagctccctcctgcacatgggtgtgagggtgggggctcanggaccccggttctccagccatcagctgaaggaacgttctgtggctatcattctcctgaccttggaa

SEQ ID NO: 2373 - DNA, 525 bp, Cricetulus griseus
aactgcaaaaattatctccagagaagtgtcggatggcattgttgccccaggatatgaagaagaagccttgaagatactttctaaaaagaaaaatggaaactactgtgttcttcagatggaccagtcctacaaaccggatgaaaatgaagttcgaacactctttggtcttcgtttaagccagaagagaaataatggtgtcattgacaagtcgctatttagcaatattgtcaccaagaataaagatctgccggagtctgccctcagagacctcattgtagccactgttgctgtcaagtacactcagtccaactctgtgtgctacgccaaggacggacaggttattggcatcggagcaggacagcagtctcggatacactgcacgcgccttgcaggtgataaagcaaactcgtggtggctgcgacaccatccacgagtgctttccatgaagtttaaaaccggggtgaagagagcggaaatctccaatgccattgatcagtatgtgacggacaccattggtgagggaga

SEQ ID NO: 2374 - DNA, 392 bp, Cricetulus griseus
ggccggcagatgtgtcccctgtgtctgtgtcaggagagctgagtgcaagcaaggtaggtaaaaccaaccaaaggtaaatgtgtttaagatggcagtacagtggccttccacaaacagggcaagcattctgcatagtgctgtagagggtgaaaaactgttctgtcccattggtatttgcgtccctgctcttttgaggcctgtgatagtgtacattaaatggttggatggcaacagaatttcttttgcctgtaaaatgccatgtctatttagttattgctacaagtagctatattcatttctgtgtttggtatgtaaccatcaaaagactatgatgaaatacaatctcatgagagagagagtgccaataggttaaggtagtttatgtctactta

SEQ ID NO: 2375 - DNA, 230 bp, Cricetulus griseus
ctctgggccgccacctgcctggccgcgctctgcgtggagacagtgcaccaacagaacagcaccgtaaccccaactaccaacgtgaccgatccctggaccgtaaccaggcaacccaccccgacaacactaacgcccgccacgctgccagaaacctgcgataaccgcaacatctgggcttactgagtggatgtcaccattaataatactacctgcttttggattgaatgcaa

SEQ ID NO: 2376 - DNA, 566 bp, Cricetulus griseus
caatgtccgcttcaatgtcgccaaatccctacagaagataggacccattcttgacaacagcacactgcagagtgaagtcaagcccatcctggagaagctgacccaagaccaggatgtggatgtcaagtactttgcccaggaggctctgactgttctgtctcttgcctgatgctggaagaagaaccattgccggcctctggtgtccactctccaacccccaccatgtacctcccatagggaggtggtgggggccatgactgtcactccctgtgcatggtctgaccccaggcccctccccccagcacggttcctcctctctgtagcctggagagacttatctgtccacctcccaaggggctggggcagtgcaagttggggcagggcagcggcctgaaaggaagagctggctgttcctgcccacactgggagagacggagcatcctaggtcactggctcctgctgctgtaatagggaaccctcaccctctacttacaccaccaccctttctcagacccccaaccatggtttttttgtgtgtgtcaactgtgccatttttattttattcc

SEQ ID NO: 2377 - DNA, 487 bp, Cricetulus griseus
  misc_feature (218)..(218): n is a, c, g, or t
catgaccaagtgggagcagaagtatttggaggaacgggccatgaggcaatttgccatggatgccgccgctaccgcagccgcacagcgcgactctactctcatcagacactcccctcagccctcacccagcagcagcttcaacgagggcctgctggcaggcaaccacaggcaccaggagatggagagcaggttgaaggtgctccatgcccagatcctanagaaggatgcagtgatcaaggtccttcagcagcgatccaggaaagaccctggcaaggctacccagggcaccctgcggcctgccaaatctgtgccatccatctttgcggctgcagtggggattcagggctggcaaggactctcatccagcgatcggcaaaatgatgcacctggccggctgacagtggaccgtgtaccggcagaggagcccccggccacagctcctctccctacccacaccaagcacgggagcagagatggaagcactcag

SEQ ID NO: 2378 - DNA, 503 bp, Cricetulus griseus
  misc_feature (347)..(347): n is a, c, g, or t
gtcagccaagtcgattcatccacttgccttacgtccctgggatattacagtacttgttaatttgtataaagttcatgggcgtcttcccgtgcatggaagtactgatggtcctgagtgcccaacagcattcttggaacgactgtgttttgaaatgaaaaaaggattcagggagactatgctgcaacttgtcctatcacccctgaatgtatttatcagtgataactatcagcagcgaccacctgtggatgaagtactcagggaagggcacatcaatttgtcaggtctccagctgagagcacatgctatgttctcagcagaaggtcttcccttaggaagtgactctttanaatatgcatggctgattgatgtgcagactggaaaccttactgctaaagtcacagcaccacagctggcatgtctcttagaatgggggcaaacatttgtttttcatgtggtatgtcgtgaatatgaactggaaagaccaaagtcagtaataatatgcc

SEQ ID NO: 2379 - DNA, 564 bp, Cricetulus griseus
tactccaaagtcacgggaaagaactgattgaagagctcattgcaaagtcaaagcaagagaagaggagagacaggctcaacgagaagataaccttgagctcacagagaagctagaccaagactggaaagaaatccagactcttctgtgacgtaaatctcagaaatcagaaaacaaagagaaaaaggaaaaaccccagccagatgcatatgacataatggttcgtgagcttggctttgaaatgaaggctcagccctctaacaggatgaaaacagaagaggaattggcaaaagaggagcaagagcggctcaagaaattggaggctgagagacttcgaagaatgcttggaaaagatgaagatgaaaataaaaggaaaccaaaacatatgtcagcagatgacttaaatgatggatttatactagataaagatgataggcgtttgctttcttacaaagatgggaagatgaacattgaaaatgtccaggaggagcagagcaaggaagcaggtggccaagagagtgaccagaaagaggatgaagatgagagtgatgaggaagagggtgaaga

SEQ ID NO: 2380 - DNA, 146 bp, Cricetulus griseus
  misc_feature (90)..(90): n is a, c, g, or t
cgcccacgcgtccggatgtcttggatgaccttgtaaccttgcataattttaggaatcagttcttgccaaatgcattgagtagaatttttntcgtcacattcatgctccggaagaacgtggggagtaccttgaaactctcataacaa

SEQ ID NO: 2381 - DNA, 484 bp, Cricetulus griseus
  misc_feature (362)..(390): n is a, c, g, or t
gagataagaaagcccatgagaagttgacagagaggcgccctctgcacactgtggtgttggcattacccgagcgcgtcgagccagacagactgctgagcgactatattgagaaggaggtgaagtatttaggtcagttaacatccatacctggctacctgaacccctccagtaggactgaaatcctgcatttcatagacaaggcaaagcggtcccaccagcttcctggacacctgacccaggagcatgatgctgtgctcagtctgtctgcctacaacgtcaagctggcctggagggacggggaggacatgatccttagggtgcccatccatgacatcgctgctgtctcctatgtcagagatgannnnnnnnnnnnnnnnnnnnnnnnnnnnncccaggacccaggcatctctccgagccaaagtctatgtgcagaaagttctagaggcctcagcgcatgttccttgtcagatagtgcagtgggacc

SEQ ID NO: 2382 - DNA, 260 bp, Cricetulus griseus
agagggaagtgggagtgatgaagatgagaatgatgagggcaatgaagaagaccatagcagccctcctagtgaagtgggctgcaagaagaagaagggtaaagttcttagcagaaacagtgctgatgatgaggaactgaccaatgatgggctgaccctatctcaaagcaagagtaatgaggactcgctgattcttgagaagagtcaaaactggagttcccaaaaaatggaccatattctgatttgctgtgtttgtcttggag

SEQ ID NO: 2383 - DNA, 419 bp, Cricetulus griseus
agacataagcaactgtgcgatgtcattttagtcgctggcgatcgtaggattccagctcacagactggtgctctcctccgtctcagattatttcgctgctatgtttactaatgatgtcagggaggcaaggcaagaagaaataaagatggaaggtgtagagccgaattcgttgtggtccttaattcagtacgcatacacaggccggctggaactaaaagaagataacatcgagtgcctgctgtctacagcatgccttctccagctttcccaggttgtggaagcatgttgtaaatttctaatgaaacagctccacccatccaattgccttggaattcgttcttttgctgatgcccaaggctgcactgatttgcataaagtggcccacaattatactatggaacatttcatggaagtgatcag

SEQ ID NO: 2384 - DNA, 431 bp, Cricetulus griseus
atgctccctctgggtctcttctctaggcaccactctgagaagagctccttcaggaggagggtagcccaataaggcaggagccaacgaggtccaaagtccagaatgtagagaggggtgtcagccagagcaaccccggcagccacaatgcgtgcactcaatgatgcgaccctgtaacagaggatggggacatttgcatacactgctacagccctgcacatacctactgggacctgctgtacagggtgctggtgggacacatcttgaggccactggagcagtaggtgtacacttttaagttcctgtggccagaacagtcttgtaccaagggcatagtggctggctgtgggactggagcaatgctgtctttactttgttttctggagaccaagaactcattttaagcaaataaagttctctggtaaaactctgct

SEQ ID NO: 2385 - DNA, 579 bp, Cricetulus griseus
aatcaaaggtcatatgtctacttttgatcatctacattacagtaatccctgggatttcttacccagttttaaatgatgctgctttcatctgtttagcaaatgtacctgatggtttcctctaactagctcagttgacctttttaaaaggtttgatccttgagcaccttcaacaaaaattgaacactttgatcaggatattttatttattccactgtgcaaataaaaccaaatgctttgtcaacaagatggaatccatggtaaaaaggaaagaagtcggttacaaagacaaattagagggaagtttgtcctgttaaccaagtggggttattccttcattccaggttactgacttactatctgggattgatgggtaagacagcttgttgacagtgtcttcctgtttggattgttacagtgtcttagtgtgcccctcctgttacagctttccacactcaacctacttgcttctgtatttctgcttcctgtatattcttactacatatttttgactccagaagaatgacatctttagactgtttcagagccaatgatgatatttcctttagacaattattacat

SEQ ID NO: 2386 - DNA, 479 bp, Cricetulus griseus
  misc_feature (296)..(310): n is a, c, g, or t
gcctgaagaccattactttcttttgactgaacctccactgaatactccagaaaacagggaatatactgctgaaataatgtttgagtccttcaatgttccaggcttgtacattgctgtgcaggctgttcttgccttagctgcatcctggacctcaagacaagtaggagagaggacgctgacgggtacagtaatagacagcggagatggagtcactcatgtcattcctgtggctgaagggtatgtcatcggcagctgtattaaacacattccaattgcgggaagagatataacatacnnnnnnnnnnnnnnnctgcgagatcgagaagtaggaatccctcctgaacagtccctggaaactgcaaaagcagtgaaggaacgctatagttatgtctgcccagatttagtaaaagagtttaacaagtatgacactgatgggtcaaagtggatcaaacagtacaccggagtcaacgcaatctcaa

SEQ ID NO: 2387 - DNA, 114 bp, Cricetulus griseus
actttgaagaaaaacacagataaacgtggagagatattttcacataaacctaatactcagaaccacactgctttgattcgtaaacaaggaaacagcaattgcaatgaaaaaaaa

SEQ ID NO: 2388 - DNA, 356 bp, Cricetulus griseus
cgcgtccggtgcgtatatatttttgccactcacttttcaggtgattaaactcgatcaagtttattttaaggatctataaaagaaacagggaaagatttcacattggcttcctcttcgctgggttagctgcagccctgttagcagaaatccacaggaaatgggggtctgaggtgattgggttaatagagaagctttgggagttctgtgttagaatctggatgtcagaagctttggaaaagttttatatacagatatttgtattattaaatttggagccatagccagaagactcagatcataattggcttatttttctatttccttaactattgtaatttccacttttataataattt

SEQ ID NO: 2389 - DNA, 490 bp, Cricetulus griseus
  misc_feature (58)..(75): n is a, c, g, or t
aaatgtattcttttatgacaccttccatactgatcatgtagatcactaaacttcaggnnnnnnnnnnnnnnnnnngaaagattcagcatgccttaagatttggcatgtcagctgtgcctttagttcaagcacttaaaaggcagaggcgagaggatctctgagtttgaggccagcatggtctatctcatgagttccaggacagctagggctacacagagaaaccctgtctcagaaaataaaaacaaaaatagaaaccaaaaccaaaaccaaagtgatcatcaccaccaccaacaaagaggagttgggatgtctctgcagttaacagcactggctagtcttccagaagacctgggtttgattcgctgaatccacatggtatctcccaactgtcagtaatcctagttacaccctcttctgtcattggtagataccaaacaaacatgtacatacattcagacaacatgtcctaccacatgataaaaaagaaatg

SEQ ID NO: 2390 - DNA, 490 bp, Cricetulus griseus; identical to SEQ ID NO: 2389
  misc_feature (58)..(75): n is a, c, g, or t

SEQ ID NO: 2391 - DNA, 472 bp, Cricetulus griseus
  misc_feature (9)..(37): n is a, c, g, or t
cacgtgcannnnnnnnnnnnnnnnnnnnnnnnnnnnntataggctatcttcctcactcaccctccacttcagttgttcaaactgagtctcttactgaacccaaagctcatccacttggctagactagctggccatcaagtccctaggattcctgtctcagtctcccagcactggattacaggcttttcacatggtactcagttccttatgcttcacaacaatcattttaccaatagccatctgcccagcttccagctccattactggaagaaacttaaagcatagaattctgggtccctgcataaaaattaaaactatctactccaagtcagacatgtggccctgtgtctataatctcaactactcagcagtctaaagcaagaagatggagggaacatttgaggccagccgagagctacatacacacacaggctctacctccaaaataaataaataaataagactgctctag

SEQ ID NO: 2392 - DNA, 513 bp, Cricetulus griseus
ggactcgggtgaagatggcggcagccgaggccgcgaactgcatcatggagaattttgtagccaccttggctaatgggatgagcctccagccgcctcttgaagaagtttcctgtgctcaagcagaaagcagtgagaagcccaatgctgaggacatgacatccaaagactactactttgactcctatgcccactttggcatccatgaggagatgctgaaggatgaggtgcgtacccttacataccgcaactccatgtttcacaatcggcacctcttcaaagacaaggtggtgttggatgtgggttcaggcactggcatcctctgcatgtttgcagccaaggcaggggcccgcaaggtcattgggattgagtgttcgagcatatctgattatgcagtgaagattgttaaagccaacaagttagaccacgtggtgaccatcatcaagggcaaggtggaggaggtggagctgcctgtggacaaggttgacatcatcatcagcgagtggatgggctact

SEQ ID NO: 2393 - DNA, 531 bp, Cricetulus griseus
cgcaagaatttggttaaggaggaacaagaaaagtcagagaaggtttccaagcgagtcagtgcagtggaggaagtacggagccacgtgaaggtgctgcgggagatgctgagcatgtaccgcaggcccggccaggccctgcctgaccaggaggccttgcaggttgtgtatgaaagatgtgagaagctgcggccaaccctgttccggctagcaagtgacaccaccgatgatgacgacgcactggcggagattcttcaagcaaatgaccttctcactcagggggttctgctgtacaaacaggtggtggagggacgagtcaacgtggggaatgcagtggccgctccagtgggagaagttactgtccctagagtttttcctaatcaagtggcctgtgggaagaactgccccctcattgacctggagggaccctctttgcttcatcatgacctggcagccttagggatcagcgatattcccactacgaccaaggttgtcattccaagttgctgtaaagacaagaaacagcctgctgcc

SEQ ID NO: 2394 - DNA, 436 bp, Cricetulus griseus
tttgtttcatggtttctgtttcaatttcagttttgcaatgaaatcgggcatgcaaatatctgtccagttagacttgaatttccaaagttgttatgcaaatattagaccattttcacccagaattcccttagtggactagtgatagatatgatgtgtaatctcatgttaaagtgatatttcaaagccaaatgctggatggttgctactttaattacaagcatatcctagagtcctttttcttataatgaactctacatgtacatctttgatatctgtttgccagtcatctccttcccacctgtgtccacttgtctcatctagggagggctaagaaaaagatggattttgtcattataattatataacgtgacaatagattttaaagagcatgtgaacaaaataattgtcccaaaagactgagtatggagaaatcact

SEQ ID NO: 2395 - DNA, 509 bp, Cricetulus griseus
tactgtgtcgacataggaactggctgggtgttatagccatgagaccctggaccgtacatttgtccggtggatgggccagccatgtaatgtgggctgggctgggctgacttcacttgcacattgaaggtgggccttgaaggtgtggaggctgtagtgtaggaggctggaactggctgagggtgtggtttgagagttccgatgggagccactgggatgggtgcagcctggggtgcaggttgtggtttcatcgcagacttcttggttgctgtcagaggtggctggtttggaatgaccattctcttatgccctgtgacaggagtagggactgcaggagaggatgttgcactagtggaagcctgtgggggccgaggcttgtagggagagctgcactccagatcagccaggatactggtcaaggaatcaatttcggcgtccagactggaccgcctttcctccagggtcttgcctccaggatttccctgctgtactttgaaagcgccttcatccat

SEQ ID NO: 2396 - DNA, 352 bp, Cricetulus griseus
cccgggatctctaaaatcaaaatatctaaggagccttactgaatccaggatagagcagcttactgtgtctttatggcagtgccatccacttccccctggtaaagaatggaatgagtaacagcaaacactgtcctttgcattaccatctcaccacccctaaagcttcttaggctgtattcttcaaaacagaaggaagcacacttaagtgcaaaagagcactgctgccttggtattcctcctttttaatacactttgctctcaagttcaccctttctaggaacctagtcaagtgacttacatatactaggaattctcattaaatgtaacacaaagccttagcatataggcaaag

SEQ ID NO: 2397 - DNA, 546 bp, Cricetulus griseus
  misc_feature (219)..(233): n is a, c, g, or t
gaacagggagccccgcggcgccgtcgaggccgagctggaccccgtggagtacaccctccggaagcgacttccccaccgcctgccccggaggcccaatgacatttatgtcaacatgaagacggactttaaggcccagcttgcccgctgccaaaagctgctggacggaggcagcagggggcagagcgcctgcgccgagatctacatccacggcttgggtcnnnnnnnnnnnnnnnccatcaacatcgccctgcagctgcaggcgggcagctttgggtccctgcaggtggctgccaacacctccaccgtggagctggtggatgagctggaaccagagattgactctcgagagccactgaccaggatccggaacaactcggccatccacatccgggtcttcagggtcacgcctaagtagatggagtgaagccagactgtcatacaccaactcctgggagcacacacatccgggcgtcatgtggctgaggttgctgctagttcataggactcttgttctcatatggacctgttgtcagagccttgtaagaa

SEQ ID NO: 2398 - DNA, 372 bp, Cricetulus griseus
ttggaggaaagcaactgaagtccaaaaatgaggacacaggggtagaagttcaaatccgtccacatcacaaaaataccaggggggtgtggcagcccacctgtgaccccaaaatgcaaaacaaaaaggctaaaaggacctgaaagcaagccagctagcaaaacaaaaccaagtgacagtaaaatctgggttcaactgaaaaaccctgccttcaaataaagggcaaaaagagtgatccaagatggcaaacatctaccttattttggacacatggacacacagacccagacttggatggacggacacacacacaaatgctgaatacttccataagataaataaaccaaaagacaatggcacaatggcaaaagctca

SEQ ID NO: 2399 - DNA, 353 bp, Cricetulus griseus
  misc_feature (31)..(48): n is a, c, g, or t
  misc_feature (187)..(209): n is a, c, g, or t
tgacatgtaaaacaattttgtttctaattcnnnnnnnnnnnnnnnnnntgtagtatagcttccttgcccttattgtttatccaatgcagagtggtcatgccctggaaaccatatacacccaaacaacaaaaaacgggttcactagggggggtttatatatatttgggcatatacatacattatatgnnnnnnnnnnnnnnnnnnnnnnnttgtcaacttataagcggggaaatatgaggggtctggggggtatctgggaggggttgaaaggaaaaaacacaatagaaagggataggattctatttatagtaaaaaaacaaagattttaaaataaaacatgatttggtactaat

SEQ ID NO: 2400 - DNA, 579 bp, Cricetulus griseus
tctctcccttcccttccagcctgccctctcccctctttgtttccttccctcccttcttctttccttccttttcttctttggatttccttccttctctgatttgaatggtggggatcaatgctgtttcactcaaaggtgttgcatgcaaacacttctctttattctgcatttattgtgatttttggaaacaggtatcagccttcacagttgggtgaacaagttctgtcctacagatgtccagtttatttgcattttaaacattagcctatgatagtaatttaatgtagaatggagatattaaaaaagaagcaaattatttgaagctctctaatttgtggtaaaatattgcttattgtgactttggcatgtatttttgctagcaaatgctgtaagatttataccattcattggttgtttttgctattatttgtacacagtacagtaagcacaattggagttgtacatctagaagtattactgtagaatctctgagcagaatatgtgtaaccaaaatgagaaagaatataagaaatattcctgaagctaggtatgtctcacgattttgtagaatcttacagc

SEQ ID NO: 2401 - DNA, 395 bp, Cricetulus griseus
agtttcactctctagataagccctaaatctagcagcagtcttcctgccttggtctccccaggacccatgtcaagcccagaacaaggtatttttcatactgcgttcaaagaagagacagatttgtttttgctaacaaaaatgatagctggagagtgtcctatacgttctcacttgtgtttggtgggaatagaaaggtaattgcatagcttttaaattacagatgggttggggagatggttttgtgggcaaagtgcctgatccacaagcatgagaacctgagtttatgcccctagaaccaaagtaaaaacactggatggggcatcatgtacctataagcccagcactgatgagagaaaaggtagagacaggcagatcctggaggttcattggtcagc

SEQ ID NO: 2402 - DNA, 507 bp, Cricetulus griseus
ggaaaaatttagacttagagcacagttgcatactgtgccagactgtttttctcctggtgttaagatcttatgcatccacagggcatttgtcaagaccaggaagttggtgtcccacacccattaacactgacttgtgttctagtccagcatcagatccagaatctggacccaaatttagctctcatggctttattcccttgcaataaattagtcttccgccttcatttcctatgaccctgacactttggcatacatttaccatttggtgggatatcccccagtttaggtttgcagtcagtacattgaggttttgggaaatactttgtggatgatgtctgtgccctttttgttcatcatcatcaagaggaacatggtggttactggctagggtagcctctcccttgcagctcttccgtggcgctatcctttgttagcgctgtctctcattacaccttagtgagttgcacacagcactcatgactgtggtacttgttttatggtagtttg

SEQ ID NO: 2403 - DNA, 550 bp, Cricetulus griseus
  misc_feature (54)..(72): n is a, c, g, or t
aagtatgctgaggagcgttgggaggtggtcctgcacttcatggtgggctctccnnnnnnnnnnnnnnnnnnngacctggctcagctcctcagccaggctgggctcatgaaaagtgctgaacctggagagccaccttgtatcacttctgctggcttccagttcctgctgctggacacgtcggcccagctctggtacttcatgctgcagtatctgcagaccgcccagagtcggggcatggacctggtagagattctctctttcctcttccagctcagcttctctactttgggcaaggactactctgtagagggtatgagtgattctttgttgaacttcctacaacacctgcgtgagttcgggcttgttttccagaggaagaggaagtcccggcgttactaccccacacgcctggccatcaatctctcatccggtgtctctggggccgggggcagtgtgcatcagccaggcttcattgtcgtggagaccaattaccgactgtatgcctatactgagtcggagctacagattgcgctcatcgcacttttctctg

SEQ ID NO: 2404 - DNA, 510 bp, Cricetulus griseus
  misc_feature (40)..(58): n is a, c, g, or t
  misc_feature (92)..(109): n is a, c, g, or t
ttatctaaaagcagtttggttttgtggggaggctgcggtnnnnnnnnnnnnnnnnnnngctttggaggctgtcatggaactagtgctggtcnnnnnnnnnnnnnnnnnnacttgcctctgcctcccaagggctgggattaaaggcatgcgccaccactgcctggcacctaaaagcattttgaaaataatagttaaaaacaggagaacacacaactaaaattgttctttaaaaagtgggaatatttttatatcacacaacagaaacttcagcagtgtggtagactttaagctttgctaaagcaggctctgccatgcttatgcaatagcgttgtcctcctgcttgccagcagcttcagaccttacatgcacataatattgtcacaggcaagattgtctaacaagcctggtgggtactttcttcatctgggcactgtggcagccattagccacaagtagttgtattccagaaatatgctagtacagctgagagaataaatttttaatcttgct

SEQ ID NO: 2405 - DNA, 461 bp, Cricetulus griseus
tctctggtcccggcggtaagatggcggctaccgcggagtgcgatgtggtaatggcggggaccgagcctgaactgctagaggacgaagaagcaaagagggaggcagaatccttcaaggaacaagggaacgcatactatgctaagaaggactacaatgaagcttataactattacacaaaggccatagatatgtgtcctaaaaatgctagctattatggtaatcgagcagccacactgatgatgcttggacggttccgggaagctcttggagatgcgcagcagtcagtgagactggatgacagttttgtccggggtcacctccgtgaaggcaaatgccacctctcacttgggaatgcaatggcagcatgccggagtttccaaagagccctagaactggatcataaaaatgcccaggcacagcaggagttcaagaacgccaatgccgtcatggagtatgagaaa

SEQ ID NO: 2406 - DNA, 437 bp, Cricetulus griseus
  misc_feature (412)..(432): n is a, c, g, or t
tgtgctaaaaaaaaaactactgaaagaaatgagggcaaaataatcggaaggaattttatgttcatggactagaaaaataatatagtaaaaatgtctttatcacccaaagctacacactaatcctatccaaataccagcgatgcggatggagacagggctcagtggttaggaggacttttgctcttgtagaggacccaggttcaattccaagcactgaatggtggctcacaaccatttgtaactctagttccaaggggtctgatgccttctgccctctgaggatgctagacacacgtcgtacacatataggcagaatactcacataaatacatctgaaaaccattaaaaccataaatgattttctttacagataaagaaaaatagtcataaaactcatagggaacctcaaccnnnnnnnnnnnnnnnnnnnnntttta

SEQ ID NO: 2407 - DNA, 429 bp, Cricetulus griseus
ccgcaaatgtgaaaaaacctttagccagaactcccatctaactcagcatcagcaaattcatacagaagagaagccctataagtgcattgaatgtgacaaatcctttacccagagcatgcacctaactgaacatcagagtattcacactggagaagaaccttacaattgtcatgaatgcccaaagactttcagccagagcacatacctcattcagcatcagaagattcattcaggagagaagctttttggatgtgatgactgtggaaaagccttcaggtgtcgctctgctctaaccaaacaccagagactgcaccctgggatagctgctctaggaacatcataaatgtagctgctgttttcactttgggttttatagtgatgaatcagagcggggtaaggaacccctaaattattttaaatattccctat

SEQ ID NO: 2408 - DNA, 359 bp, Cricetulus griseus
cctcaatctcttagtaacgaagcattaatgaggagggctgtgtctttggtgacagatagcacctccacctttctgtcccaaaccacatatgctctgatggaagcaatcactgagtatacaaaggctgtttatacgttagtgtcactgtatcgacaatacacaagtttacttggaaaaatgaattcacaggaggaagatgaagtgtggcaggtgattataggagccagagttgagatgacgtcaaagcagcaggaatacatgaagctggaaaccacttggatgactgcagttagcctgtcaaagatggctgcagaggctgcctatcatactggagccgatcaggcctctataaccgccag

SEQ ID NO: 2409 - DNA, 445 bp, Cricetulus griseus
atggggagcctgagttccactactctgagcgcgtgatggatcttggcctgtctgaagaccacttttcccgccctgtgggtcttttcctggcctcggatgtccagcagctgcggtttttttttttagagtgcaagcaggtgattctggagctgcccgagcagtcggagaagcagaaagatgctgtggtgagactgatccacctccggctgaagctccaggagctgaaggatcccaatgaggaggaacccaatatccgggttctcctagaacaccgcttctataaggagaagagcaagagtgtcaagcaaacctgtgataagtgcaacacgatcatctggggcctcattcagacctggtacacctgcacaggatgttattaccgctgtcacagcaagtgcctgaacctcatctccaaaccatgtgtcagctccaaggttagtcacca

SEQ ID NO: 2410 - DNA, 527 bp, Cricetulus griseus
atgtgaaaccttttttaagatttttctcaaaagttttgaaaagctattagccaggatcatggtgtaataagacaacgtttttcctttaaaaaatttaagtgcgtgtgtagagttaagaagctgttgtacatttatgatttaataaaataattctaaaggaaattgtgtaattatagactttttattttaaataagttaaggagtgggtagtataattaaggtccattgcaaagttgttgttgtatttgtgtaagataaaatgctggtcagttttaagtgtgttgtctgcaattcatcaggattaaattatctagttaacttaagggatatctctgcaaggagaaacacctttttagatcttttagatgctgcttcttcaatgcaaggaaaggaaataaccccagcgaggtactcttcagggacacaggtctagtacaagagaactcttgacgactaagctcagccagtcttaagaaactgtgctgtgtctacaaagcttaaactacagtagttgataaggatgccaa

SEQ ID NO: 2411 - DNA, 80 bp, Cricetulus griseus
ctgtatatattctctgtacttgtaacttgatctctcactgtctccttgactagttctgaccttgaaagtcttctgctctg

SEQ ID NO: 2412 - DNA, 531 bp, Cricetulus griseus
  misc_feature (316)..(316): n is a, c, g, or t
tttttactagagtcagcacacttcctgcaaccagcacccggcagtgccatctcctccttgatgtcttcaactccacagagcacgagctgacaatctgtgccaggaacaactctgagcttgtcttgcatgccagcgagtgccagcgaatggctattcaagtggacaagttcaactttgaaagtgtcccagaatcccctggagagaagggacacttgacaaatctgaagcagctagaataagagaggcaggaggcacgaggcctggagatcagcagcaagctggacatctgctggagaatcccatctctaaagcgcancggtgaggcgagcgtggagggcctcctgaaccagctcgtcctggaacacctgcagctggcacctctgcagtgggatgtgctggtggatgggcagccatgtgactgtgaggtggcagctgcctgccaggttggtgaccctgtgcacttagaggtgcggctgacgaatcggagtccctacagcgtggggccctttgccctcactgtggtccccttcc

SEQ ID NO: 2413 - DNA, 312 bp, Cricetulus griseus
  misc_feature (216)..(311): n is a, c, g, or t
tttctgcctcagcccaggctctgtcctttgtgttcaccagattcctggagaggcctggctttcctgctgacctgacacatgtacctagggcacacatgctcattggtactgagggactgtggtgagctgcattcctaggggtaggtggcagggaaaggctggcttcagcggtagcaggtaccatttcctggcctgacaacatctgaggcctgacannnnnnnnnnnnnnnnnnnnnnnnnnnnnnnnnnnnnnnnnnnnnnnnnnnnnnnnnnnnnnnnnnnnnnnnnnnnnnnnnnnnnnnnnnnnnnnng

SEQ ID NO: 2414 - DNA, 523 bp, Cricetulus griseus
  misc_feature (370)..(389): n is a, c, g, or t
gaattagggagtggttatgaaaggaacccaccctacttacttatgagggaacccaaaatgtccaccagaaaggttctggtggcttataggttgctcctgtcctggaaatccttacttgctcagtgttctgagtagctgggatggtgcagttgtggcttgctttctcttgtggtaaaagtggttcagagggaagatctcatggcactttccctcagaagtcctttcaggtccttgcagttaaggaaggcagagctcccaagctccagctcagtttcattgtatagacagtgaaggtttcgttcaccccttttggggctggttgagacacgtttgtaaattaactcaccagtggtgtgcgagccttcgttgnnnnnnnnnnnnnnnnnnnntaacagagaagactagaaatgaagtctatggtatcacctgacgctgtcttttccgtctcaaggcatggactgtgagggaggcttgctagagaagggaggcaatgctaacgagtctcgttgtcacgactcacagg

SEQ ID NO: 2415 - DNA, 532 bp, Cricetulus griseus
ccgcgaggtgactcctgaccagaagcttctgtcccggagactcctgaccaagaccaacaggatgccacgttgggcagagcgactgtttcctgccaacgtcgcccactcggtgtacatcctggaggactcgattggggacccacagaagcaaaccatgaccaccttcacctggaacatcaaccacgcccggctgatggtggtggaggaacgatgtgtttactgtgtgaactctgacaacagcggctggaccgaaatccgtcgggaagcctgggtctcctctagcttatttggcgtctctagagctgtccaagaatttggtcttgcccggttcaaaagcaatgtgaccaagacaatgaagggctttgagtacatcttggccaagctacaaggtgaagccccttccaaaacacttgttgagacagccaaagaggccaaagaaaaggcaaaggagacagcgctggcagctacagagaaggccaaggacctggccaacaaggccgccaccaagcagcaacagcagcagcttgtgtag

SEQ ID NO: 2416 - DNA, 480 bp, Cricetulus griseus
  misc_feature (269)..(294): n is a, c, g, or t
gtaaggcatttttcctaatgtccaaatggaatatggcttcttttcagtggccctagccatgtcttcctcaactttatgctctgtttatgagcaaactgcaagtttttcagatccattttttttgtcttttgccaccagttctcactataaacttggataaatctgacagtagtgacaatgccaaagcctgaatgatgagctgactgggtttcccttgccttattaatctgttacctatgaatttagcctaagagtctcaggaccccgannnnnnnnnnnnnnnnnnnnnnnnnnaatatgatatcgaatggcctctagttcagttcccagtagtcctgttcccatctggaacccctgtctgaaagttctgcttacaccactctgtgctcactcacttatctaagcctttccagcaagccagctctaaaggcttacacaatgatgtgatcagggttagtcacagcaatgcccctactccca

SEQ ID NO: 2417 - DNA, 579 bp, Cricetulus griseus
  misc_feature (178)..(178): n is a, c, g, or t
ctgtggttctggcttcttgtggcagtgagcaggcttttgctctgtacctgtgggaggctctgcacacaatctttctgttctctgccctgctgctgcttgcccagcactcagctgaagtagaagaggctagccttggcatttgtgttctgctaggagcatgtggaggtggttgacatancctaagtgcatgctgagtgcctggaggaatgttctaagggggagcctggcacagcctcactcctgggtccttccttagtctccatgcttttctactccgtttctgttgttttccccagcttttgaggagttcagtgtgggttctggaatggctctctctaagggctgtgggtcagtcagttcatgaacggccaggacagtgtccttgttcttcctgttaccactgctgcctggaaagcaacaggacctgtgttctgcctcctaactggcagtgccccacagcttcctgccttcttatcccgggctgctttctcctcagctccctgaagagaggccttcagacagtctcccagtgcctgcaccgctcaacgtgcatcttcctgcttctatgtgtctcctccc

SEQ ID NO: 2418 - DNA, 379 bp, Cricetulus griseus
ggactgccctgttccttacaaagaaaagagaactctccccggggctcccgccggcttctccgggatcggtcgcgttaccgcactggacgcctcacggcgcccatctccgccactccggattcggggatctgaacccgactccctttcgatcggccgagggcaacggaggccatcgcccgtcccttcggaacggcgctcgcccatctctcaggaccgactgacccatgttcaactgctgttcacatggaacccttctccacttcggccttcaaagttctcgtttgaatatttgctactaccaccaagatctgcacctgcggcggctccacccgggcccgcgccctaagcttcaaggctcaccgcagcggccctcctactc

SEQ ID NO: 2419 - DNA, 405 bp, Cricetulus griseus
gaatttttttccttgctgtcttctccatctttcccttcttttgttctttgtttctttgtgcttttgagacagtatctgttagttaacccaggctggtcttgaactcctaggcctcctgcctttacctcctgaaaatgaaatcatatgctacgttgcccaacttcctctccagtaccaaatttgtattactaaacaaatgcccatgcacacagaaaatggagatgacttcataagtgtgataaactttactttttgaagagcagggtttattttattctgaaacttatgaaatccatttaatatgtatattggcctacctggctggttacgttattgggacaacgggttttttcctatctgaatttttttttgtgactgttcatttactcctttgtaaaatacttg

SEQ ID NO: 2420 - DNA, 378 bp, Cricetulus griseus
attcaaagcaagcggcagacaccttcccccaggctggctctgtccacccgctacagccctgatgagatgaacaacagccctaactttgaggagaagaggaagttcttgactttcttcaacctgacgcacatcagtgcagagaagaggaaagacagagagaggcttgttgaaatgctccgtgccatgaagcagagggcactgtccgcagcagtggcagactcagtgacaaactcctcgagggacagtccttccatctccctgagtgaaccagccacacagccagctcctctagagacagatcaacctgccggagtccctgcctccttgtcagatgtcccaaaggccgtggagactgggagactggaacagctccggcct

SEQ ID NO: 2421 - DNA, 578 bp, Cricetulus griseus
acataaacataaaataatcttaaaagaaacaagctatgtggcggtgcagcgtcagctctgtgaagaggtggagagcctacctcggtcactctgggatagaacccttgttgtatcagttgttgcttgataataacacatcagaacaagaaaccctccctctgctgagcgttcctgggctgtggagacagctttgagaacaaactaggcaaaagggtagaaggacttcatgtcagctccactttcagtttgctttaagggaattaaaagtacaaagctgcccctgtaaattcttttctttgccttcctagctctgtgttctacagagtccagtgtcctttcttcaaaattgcgaccaaggccagtggcctctccgaagacagcagttgctttctaagctatttagagcaatagatactttttggtcacatcaagtccaaggccttcgccaatctttcatgtcctgacctaaataaggtataggaactcttccttgctgagtgggtttcttaggaatatgcaaacgctgcagtcacaggcaatgggcccaggaagtggtttcatggacccgtcatcatagc

SEQ ID NO: 2422 - DNA, 540 bp, Cricetulus griseus
tttggagtgagacagaaatgggaccagaagtcacagaaaccccgagactcttcagttgaagttcgcagtgactgggaggtgaaggaggagatggattttcctcaactgatgaaaatgcgctacttggaagtgtcggagcctcaagacatcgagtgctgtggcgcactggagtactatgacaaagcctttgaccgcatcaccacgcggagcgagaagcctctgcggagcatcaagcgcatcttccacaccgttaccaccacagacgaccctgtcatccggaagctggcaaaaacgcagggcaatgtgtttgccactgatgccatcctagccacactgatgagctgcacacgctctgtgtactcctgggacattgtagtgcagagagtcgggtctaaactcttctttgacaagagggacaactctgacttcgacctcctgactgtgagtgagacagccaatgagccccctcaagatgaaggcaattccttcaactcaccccgcaacctggccatggaggccacctacatcaaccacaacttc

SEQ ID NO: 2423 - DNA, 566 bp, Cricetulus griseus
ttagtgtaggatgtaaaaatacttaagcatattcagttgttatattttctaggctttttcatgttcctttagagcatgttgatgatggctaaggcactgtgacctctgaggcatggaaggatgacctaagtttgtgagctttatttgacttggtaagggcataggtattgagggtaataatggtatctgtgattgttaattaacagtgagttaaaaacaaattgagtaaaaacaagttacttttatcaaaggcatttataaatgtttaatttttaggatgtattgtggaattacataccagaattctataattaataaaatgttgtatagcaatgtagtgtaactttctcagtatatagttgtagtcagtggaacaaagccttctagcatttatgagttactgattttaagacttaagtttctataaaatgacaactttaaatgctatttcctcctgctgactggtaatgaatattgacattttaccaataaatagaacttcagtgttcatatgcaaagttcttagtgtgttgctagtttgtatccctgtatttaagccaattgag

SEQ ID NO: 2424 - DNA, 479 bp, Cricetulus griseus
  misc_feature (257)..(276): n is a, c, g, or t
ttttgtgctttgagaatacagtttaaaacaatacttgcaattttaacatttcattgctttcctttttaacgaaatggcattggtttctcattgagaacccaacttactgtaattacagttataatactcgttagtgattttgtgctactgttgttaatcttttttgattctttttgtttttgagacaggatttccctgtgtagccctgactatcctggaactcagtgtgttggccttgaattcacagagatctgctnnnnnnnnnnnnnnnnnnnntgcgatcaagtgtttaccattactgcctaacagaattgattcttaattcagtcagttgaatgaaattaaagttggaatttttatcacagaattcctaattagagctaaaattcaagtatcttttatgtctattgctttttgtcttctaccattgtaagtcgtgtctgtgttgattattatctatgtgtgtatgatcatccgat

SEQ ID NO: 2425 - DNA, 579 bp, Cricetulus griseus
  misc_feature (2)..(15): n is a, c, g, or t
annnnnnnnnnnnnngagctcaaagtggcccagacggacggtgccaatgtggacatgcacctgaagcagattgaaatcaagaagttcaagtacgggattgaagagcacggcaaggtgaagatgagggggggcctgctgagaacctacatcatcagtatcctctttaagtctgtcttcgaggtggccttcctactcattcagtggtacatctacggcttcagcctgagtgccgtctacacctgcaaaagagatccctgcccccatcaggtggactgcttcctctcgcggcccacagagaaaaccatcttcatcatcttcatgttggtggtgtccttggtgtctctcgctttgaacatcattgagctcttctatgtcttcttcaagggcgttaaggatcgcgtgaagggaaggagcgatccttaccacgccaccaccggcccactgagcccctcaaaagactgtggctctccaaaatatgcctacttcaatggctgctcgtcaccaacagctcccctctcgcctatgtctcctcccgggtacaagctggttaccggtgacagaaacaattcctcctgccgc

SEQ ID NO: 2426 - DNA, 484 bp, Cricetulus griseus
taagccacaggatagagatcttatatggcagcgtaaggggagtgtctaggggtacgcacaggctcaggattggtgtgcctccaggcttggaggacttgccctgtgttgattggtcaactggttgttatggcccatatgccctcccagggctgttgctatgctctgcatgcacttgtccgtcagctaacttctgattggttccttgctacgaggccgccatctgacctcctagtgaccaaggcaaggtcaggcaagcattgttaagctcttatggctgccgaaatggggagctggtcccttcaaaatcactcttccttatttaacttgtatgtatatagattcatgttccatcatcagaattacagatgtctctcacacttacatgcttatgtgggatttttatttctggtcatctgaatagctgacagagattagaaattgtttgtgatatgggaacttggggttattttcctccccagtttgt

SEQ ID NO: 2427 - DNA, 147 bp, Cricetulus griseus
catatggttatattaggctatgtaggaggcacaaaggccttggtactcacagtaaaagcacaaggggagcctggaaagctaaacacacagggttattcctttgaaggaaggaatgtataatttagtggttcccaacctgtgggctgt

SEQ ID NO: 2428 - DNA, 147 bp, Cricetulus griseus; identical to SEQ ID NO: 2427

SEQ ID NO: 2429 - DNA, 283 bp, Cricetulus griseus
gtgctacgttcccctcctgtatgccggcatttgcaaagtggggtaccacgggatgtgctgctcttccagcatgaacggggccgcttctttgccatccttggactgttttgcgctggtcagggcatcttctggacctccctggctgttgcatcattgtcccgacctctgatccgggttcctgcagaggctcccaaccggggctacacggacctgtgctctgcactctggcgctacgggctagctattggttgcggcacgatgggagccttggtccttggtgctg

SEQ ID NO: 2430 - DNA, 120 bp, Cricetulus griseus
gtaggtgaaagacccgagctaacatgtggttagcttgttaaattacaataaagcctcatgcagttttcagcaagctctcaaatccgcctggtgattggggtgaccttggtcagggcctgt

SEQ ID NO: 2431 - DNA, 580 bp, Cricetulus griseus
  misc_feature (16)..(39): n is a, c, g, or t
  misc_feature (410)..(410): n is a, c, g, or t
ttattaaggcatgatnnnnnnnnnnnnnnnnnnnnnnnngatcatcctaaaggcaactccgttccccaaggatgggtccttcccccgatccccagcaacgacatctgggcaacagccgttaagcttcattaagaccctccaggagtgtggtccagcaggccagcactgcagctctagatgtcagtgatgctgccgtctcacgctgtagtcttctgcacaacttaaacttcatgcggcattgctgtagctggaagtcctgcttctctctattctctgccctggccagagttacctcttgaatcaagaggttgataaagttcttctggaaagggcctagatgaactgaagttattagcatgggcagtggccttcactcactaactgcctctgttttgagaggcttggcctantgtggcctacttatctgttctaagcttgttttgaattggcgggtaaatacagtcagcacacttggttactccttgaagatgttcacggagtagagttagcaggcactactccttattttcctctaccaactgccctccagcttccaggtcaaagtttgacctacagttct

SEQ ID NO: 2432 - DNA, 576 bp, Cricetulus griseus
actgcaggacagagagcgtgcgctcagagctcgagaggacagtctggagcagaaggagcgtgaactttgtattcgagagagactagcagaggacaaactggccagagctgaaagtttggtgaagaactacagcttgctgaaggagcagaggttcctgtgcctggctagtgacccagaccttgatcatccatccttagtaatgaggaagaaggttcatttccgtggggaaagcaaagagaacaccacaaggagtgagaattctgagagccagcttgtcaaatccaagtgcaaggacctgaagaagaggcttcatgctgcccagctgcgggctcaggccctgtcggatattgaaaagaactaccagctgaagagcaggcagatcctgggcatgcgctaggccagcaaggcatggagctgggccagtggtgggtactgccagcccactagagatttgtactcgactgctgtagttttgtgtgtctggttctgagctttgcctttgtgtgcagtgagcatgacgctgggattgtttgtgctctttttcagcagcaagtctacaataaggacatgtctccc

SEQ ID NO: 2433 - DNA, 522 bp, Cricetulus griseus
ctgtgtgaagaggtttaccacagaggaatgggtgaagctccagatggacaccacaccagggtcttccaaggaaaatgataaacagacccttcaatcaagcatcccaccactctgggcctgtagctgttttgctcatgacatcccggaagttcagcaacagagggctcatcttccagtggtgtttagaaaggtgacatgctctccagaagccctcttcatggaacagttctcagaatatgagcgatatgagcggttactttggacagagctgggctcacttcgtcaaggaatgctggtcatctctaagacctggactttggatcctggctcacaggagaagcaggaagtcatcttggatatgcttcatatttcccaggacagactcctgaccctgcacagctttgtcctgggagatggggagctggaagacacagcactgttctgagggaactaggtgctaagttaaagaactattgtaaacaaacggcactaactttaaagcagatgctggtaaatcatgct

SEQ ID NO: 2434 - DNA, 211 bp, Cricetulus griseus
tttcaataacactggcagtttccctcaaaatttcaatgaatattcgcacaaagaaccaagttgttgaagatttcctggtttgtgttttttttcccccccagggtgggggtggagattcgggcaaagcattctcatcccttcacacacaagtccagctggtggtaatgctgaaaatatctcatatgctctcacgcccggagcaccacccagc

SEQ ID NO: 2435 - DNA, 250 bp, Cricetulus griseus
gtcgtcttcgctttgctccgggtctcccgtgaccgccgagccgcggagctcgaccggcgtctgcccgcccgtgcggccctcgcgttcccgcggcagtccaagtctgtggagaaacattcgctatcatattagatgaccaaaatggacattcgaagggctgtggatgctgcagtcccaactaacatcattgcagctaaagctgccgaagttcgggccaacaaagtaaactggcagtcttaccttcaagggc

SEQ ID NO: 2436 - DNA, 578 bp, Cricetulus griseus
cattcaacaatgatgctggcttcgtggctgcactagataaggcttgtggtcgcttcataaacaacaatgcagttaccaaaatggcccagtcatccagtaaatcccctgagctgcttgctcggtactgtgactccttgttgaagaaaagttccaagaacccagaagaggcagaactagaagacaccctcaatcaagtgatggtggtcttcaagtacatcgaggacaaagatgtgtttcagaagttctatgcaaagatgcttgctaagagactggtccatcagaacagtgcgagtgacgatgcggaagcaagcatgatctccaagttaaagcaagcttgcggttttgagtatacctccaaacttcaacgaatgtttcaagacattggtgtaagcaaagatctgaatgaacagttcaaaaagcacctaacaaattcagaacccctggacttggacttcagtattcaggtcctcagttccggatcgtggccctttcagcagtcttgcacgtttgccttgccatcagagctggagcgcagttatcagcggtttacagccttctacgccagtcgccacagcggc

SEQ ID NO: 2437 - DNA, 580 bp, Cricetulus griseus
  misc_feature (525)..(525): n is a, c, g, or t
  misc_feature (552)..(552): n is a, c, g, or t
catagctccggtgtgagacatggtgttgtcggagctggcggcgcgtctcaattgcgctgagtacaaaaactgggtgaaggcagggcactgcctgctgctgctgcgcagctgcctgcagggcttcgtcggccgcgaggtgctctccttccatcgcagactgcttactgcagtccccggccttggtcccaacgccacctgccgcggcggttcccgatgcaacccgcgagctcgccagtttcagcctcagtgtcaggtgtgcatagagtggaaacgtgagatcttgaggcatcacatcaacagaaatggagacgtgcactggggaaactgccggcctggcctctggcctgtggacgcttgggaggtagccaaggccttcatgcctcgaggactggcagacaaacgaggacccgaggaatgtgatgcagttgctcttttaagtctcatcaattcctgtgatcacttcatggttgaccggaagaaagtcacagagctgttgacatctgactgggctgtgcacattcctgnagaagatgaacgagatggatgtgaatntgaaatgggaagttacttgagtgtgagc

SEQ ID NO: 2438 - DNA, 438 bp, Cricetulus griseus
cactgtcccagataaccatcggaacaagtttaaggtcattaatgtggatgatgatggaaatgagctgggctctggcataatggagcttacagacacagaactgatcctctacacccggaaacgcgactcggtaaaatggcactacctctgcctgcgacgatacggctatgactccaatctcttttcttttgaaagtggccgaaggtgtcagactggacaaggaatctttgcatttaagtgtgcccgtgcagaagaattatttaacatgttgcaagagattatgcaaaataacagtataaatgtggtagaagagccggttgtagaaaggaatagtcatcagacagaattggaagtccctataacacctcgaacacctacaactccagggtttgctgctcagaacttacctaatggatatccccgatacccctcatttgg

SEQ ID NO: 2439 - DNA, 380 bp, Cricetulus griseus
agtgttgcactgtaatctatcatatagagctatatgtatggaaatttttgatcagtttttttaagagatgtatcctgtttgcaaaggcacaataaaattgcatcttctagattataggcaataaaggtaacaataaaccttacttaaatcatactgatactctctgctcatttgattttttgggggaaaaaaagtctaacatatccagtagtttcagggatttcatttaacttaaaaattctgatatatttaatttataaatttcggacttatataatagagtttggaaaactataagaaatgctttgttaatgtgtgtattcctatgtaaaacacatggcttctcccgtgtatattttttaagattaaagaattgcaca

SEQ ID NO: 2440 - DNA, 177 bp, Cricetulus griseus
cttagggaacaagtccaagacctgtttaacaagaaattggtgaagccttgggcatcaaatacccagtgcaggtcccctacaagcgaatcaaaagcaatccaggttcagtcctcatcgagggcctgcctcctgggatcccattccgtaaaccctgcacctttggctcccacaacctgg

SEQ ID NO: 2441 - DNA, 151 bp, Cricetulus griseus
ggcactcctccccagccccttggaattgcagcctccccgagggccttccgactatggccgacccctcagcttcccaccaccccgcatcagagaaagcatccaagaagacttggcagaggaggctccgtgcccgcagggcgggcgggccaac

SEQ ID NO: 2442 - DNA, 523 bp, Cricetulus griseus
gcaaataaagagaaaaatctggagcaatataataaactggatcaggatctcaatgaagtcaaagctcgagttgaagaactggacagaaaatactatgaagtaaaaaataagaaagatgaactacaaagtgaaaggaattacttatggaaagaagagaatgcagagcaacaggcactcgctgctaaaagagaagacctggagaagaagcagcaacttcttagagcggcaacagggaaggccattttaaatggaatagacagcataaacaaagtgctagatcattttcgtcgaaaaggaataaaccaacatgttcaaaatggctaccatggcattgtaatgaataattttgagtgtgagccagctttctatacttgtgtggaggtcactgctggtaacaggttattttatcacattgttgattcagatgaagtcagcacaaagattttaatggagttcaataaaatgaatcttcctggagaggtgacttttctgcctcttaacaagttagatgtgagagataccg

SEQ ID NO: 2443 - DNA, 514 bp, Cricetulus griseus
atctttgaaaaatgaaaccttagttacagaatttaaattccaggtataagcccatggtttaagacaagagagtctagtttaaatgacaaggtctttagtcattagcttgtttacttcttactctattccaaatataatcctgttatgtcattatcaactatcgctggattttaaggtttcaatttttttgttgtaataatgaatttttctttccaacacaattttaaaatcaataatgatgatttaaaaaataaacaaatcaagaagttatagataacacatagagtgatgattaaagcataatcaaaatgtaaactgaagaactgcaagtgaattaaattagtgtgctacaaatagtgaacaaaaaaagcagtagataaaggtattttctgtgcacacaacttcaccacaatagaatctaccctcacatgtatcaatattaaattaaagtaatgaagttactggtaagaagtatagattaaaatcctaattataaagtcacaattgcagagta

SEQ ID NO: 2444 - DNA, 398 bp, Cricetulus griseus
taaaaatgtaaatgcaagttattgtcttaagtacatctttataactttaagcacactcacatatatttcttcctatgttatctattaatttttttcatttatttctgatatagtttctctctatgctgctcagtgagtgtgcagctgaaatattaaagccatgcttgttttctgcatactgagctcacaatggtggagaccaccttcctgagctaatggtattttaaaaacacctgcttccccattttattctggatacttgattactcatttacataataatattaaaatttaaattttgtcatattctggaatttgctgaagtctttggacctaagaacattatttgattattgagtgcttctctttacacaaagctatgtaccttcacaaaatag

SEQ ID NO: 2445 - DNA, 335 bp, Cricetulus griseus
  misc_feature (3)..(38): n is a, c, g, or t
cannnnnnnnnnnnnnnnnnnnnnnnnnnnnnnnnnnntgcctgcactttgagtctcctggaattcctggggactacctcatcactgccccctgcccttgcttctataagctaactcatgcaagaatacagtgttgaatattcaatgcccagagtctcaaaagttgcctggctttctctgtttaccagagtgggcagtgggacagaagaagttttgagttcctcatctataaatggatagtaagactgcccaatttctacggagtcagtttttatcctgtgaaaaattggaaggctgtgtggaacgcattgcatccctgctatggactaatttgc

SEQ ID NO: 2446 - DNA, 329 bp, Cricetulus griseus
  misc_feature (116)..(137): n is a, c, g, or t
gatcctttgttcttccacagacatgtctgctctgatttcactcaggaaacgtgctcagggtagagaagcctttggctggtgctaaaatagtgggctgtacccacatcacggcccannnnnnnnnnnnnnnnnnnnnnagaaaacagagggacttctaataaaaaaaaagggaagaaaacattttttttattaaaaataaacatgcctttccttcctacctagccagtccaattgctgttagatagaatacaaccccctgttcaaacaatggtgtagcatgttttgcttttgttcatatactaaacccatttttagcacatctgcctgag

SEQ ID NO: 2447 - DNA, 418 bp, Cricetulus griseus
cactgaccgaggcaatgacaactggctgattaaatatgactgcccaatggataattctagctgccgggacacagattgggtggtggtgaaggaacctgtcatcaaggtggctgccatagacaatgggctagctttcccactgaagcaccctgactcctggagggcatatcctttttactgggcctggttgccccaggcaaaagtcccattctctcaggagatcaaagagttgattcttcccaagatctcagaccctaacttcgtcaaggatttggaagaggacctatatgaactcttcaagaaagatcctggtttcgacaggggccagttccataagcagattgctgttatgaggggccagatcctaaatttgacccaggccctaaaagacaataagagtcccctgcacctggtccag

SEQ ID NO: 2448 - DNA, 569 bp, Cricetulus griseus
ttttacaatgactacagtgtaaaatcagcttcaggcactgtggatagcgcattgagaaagttcagacttaagatttttttcagacaatgatccttgtgtatgacccctttcccagtgagataacaattgctttcacagtgatgcgggaagtgcccttcttcacgggagccgggggaagccatcacatcacttctttgccacactggcaacagctttcttggcagcatcctccaggtccgcagctgatgtgatagggaggccactgtttctgaggattttctgagcctcttggacattagttccttcaagccggactactagtggcaccttgagttctaactcccggcaggctttggtgatcccattggcaatgatggcacagttgacaatcccaccaaatatattgacgaggatggcttccaccttgggatcagatgtgatcagtttgaatgcttgatagacttgggcttcctttacaccacctccaaggtccaagaagttagctggcttccctccattcaggaaaattatgtcacaagtagccatggctaatccagcgccattcacga

SEQ ID NO: 2449 - DNA, 563 bp, Cricetulus griseus
tccgataagaatcccaaagacagacattggagttcaagctgatgatcagaaaagcaaagcagccagtgctcaagagttctcacctctagcaatgctcagaccacaggggtgatcccctaaacctcagattgcatctgcagactgcactgccctccatcaagtctcaggatcccagactgctatgctctcctcatcgtgactggagactaattgccacacgagacccttttcttcttccttatatacatctctagtgctaggattaaaggcagtaaagccttccattgggagtcaacaaagtctgcataccaagttgaagcaggaccattctgccaccccctgcatatcaaggctgaccaagacttcatccagcagctgatagaagtagaaacagacactcacaactaatcaccgaactgaactggaacccagatgcagagaaggaccagtgaagagcacaggggtccagacaaggctggtgaaacccacagaaacagctgacctgaacatccaggaactcttgctccccagactgatagctggaataccagcatgggactgat

SEQ ID NO: 2450 - DNA, 454 bp, Cricetulus griseus
gtactacagtcctgagaacatgggacttcttgatcctgcgaccagtgatgggagagttattttcttcttgccttgggagaagatgactattgctggcactactgattcgccaacagacatcacatctcatcctattccttcggaagaagacatcaacttcatcttgaatgaagtgcggaactacctgagttgtgatgttgaagtgagaagaggggatgtcctggcagcatggagtggtattcgtccccttgttaccgatcccaagtctgcagacactcagtctatctcccgaaatcatgttgttgatgtcagtgagagtggcctcatcacaatagcaggtgggaagtggacgacatatcgctccatggcagaagatgctgtggatgcagctgtcaaggtccacaacttgaaagcaggaccgagtaggacagtggggctgttccttcaaggaggc

SEQ ID NO: 2451 - DNA, 233 bp, Cricetulus griseus
  misc_feature (126)..(141): n is a, c, g, or t
  misc_feature (143)..(159): n is a, c, g, or t
gaacagtcagtaacaatgggccctgacagtactttacaaatggcaattagattaagttggtcaatagatccagttcatgttgggcagttttggcacatgcctttagtccttagagtattagtgcannnnnnnnnnnnnnnnannnnnnnnnnnnnnnnnaccagccagttctacaagagttccaggacaggctccaaagccacagagaaaacctgtcttgaaacctcccccca

SEQ ID NO: 2452 - DNA, 554 bp, Cricetulus griseus
ttcttttattttcctgtaatacatctgtatcatcggagttttggaccaatcgaatacaaaggccccatgagtgctgtttacattgagaagtttgttcgccgggtgatgaaaccacttctctacatcccatctcaatcagaattgctagattttctctcgaactatgagcctggagtactcggctactttgagttcagtggttcacctcagccccctggctacttgaccttcttcacctcagcactgcactctttaaagaaagattacctaggaacaatacgatttggggttatcacaaataaacatcttgcgaaactggtatccttagtacactctggaagtgtgtatttacatagacatttcaacacatcacttgtcttccccagggaagtcatgaacttcacagctgagaacatctataagtgggcctcagaaaaccaggagacactcttccgatggctgcagccccatggaggcaagagtctgctgttgaacaatgagctgaagaaaggaccagcactcttcctattcataccttttgatcccttatctga

SEQ ID NO: 2453 - DNA, 153 bp, Cricetulus griseus
ctgtgccgccgcgagagacctggacacgccagatggacttcatcatgtcttgcgtgggcttcgccgtgggtctgggtaacgtgtggcgcttcccctacctgtgctacaagaacggcggaggtgtgttccttattccctatgtcctgattgccc

SEQ ID NO: 2454 - DNA, 105 bp, Cricetulus griseus
aatggatgcagtcccagacaaagtccacttcttcaacagcttttttcatagacagctggtaaccaaaggctataatggagttaagagatggactaaaaaggtgga

SEQ ID NO: 2455 - DNA, 509 bp, Cricetulus griseus
  misc_feature (192)..(251): n is a, c, g, or t
  misc_feature (479)..(479): n is a, c, g, or t
gatgaaactgccccccagaggtactgttgcccacccagaaggtcaatgatgaagaaagacgagcagaacagaggaagtatggggtgttcttcgacgatgactatgactacctgcagcacctgaaggagccatctgggcccgcagagctcattcccagtaccgccttcagcacaaacagcaatgatgagaaannnnnnnnnnnnnnnnnnnnnnnnnnnnnnnnnnnnnnnnnnnnnnnnnnnnnnnnnnnngaggatgttggattgttaaacaaagcagctccagtttcaggaccgcgactggatttggatcctgacattattgctgctctcgatgatgattttgactttgacgacccagataacctccttgaagatgacttcattctccgggcaaataagccgacaggagaagaggcaatgggtttgccggaatctgagagtgaagatgacaatgagtgggaagacatggacattgangaagggagcagtgatggctgtagctctgca

SEQ ID NO: 2456 - DNA, 463 bp, Cricetulus griseus
tttttgaggctgtatatgagcagaccaacgtgccccccaaacaccaggagtacctctttgagggtcacccttgtgtccttgagccaagcctctcagcgcagcacattgcccctacagccgccagcagccccctggttctgttcagcatggccagtgacacacccaagggcctgaccttcagggaccctgctctggacgtcgcaaagttcgtccccaaggttgacctacagtcagattacaacacagctaagggggtgctgggcgctggttaccaagccctgtggctggcgcgggtcctgctggatgggcaggtgctgatgcttcgagggttacactgggtcctggagatacttcagagcacgtgccagcagaccctggaggtcacgcggacagccctccccttcctcagcagcagcctgggcattgaaaggctcagcagtggggctgagatgcccgacttcca

SEQ ID NO: 2457 - DNA, 501 bp, Cricetulus griseus
ttgctaggacataacaagaacattcgcacaatagtgacaggcattgagatgttccacaagagccttgagagggctgaggcaggggataacctgggtgctctggtccgaggcctaaagcgggaagatttgaggcgaggcttggtcatggtcaagccaggctccatccagccccaccagaaggtggaggcccaggtttacatcctcaccaaggaggagggtggccgccacaaaccatttgtatctcattttatgcctgtcatgttctccctgacttgggacatggcctgtcgtgtcatcttgcctccaaggaaggagcttgccatgcctggagaggatttaaagctcagcctagttttgcggcagcccatgatcttagagaaaggccagcgtttcactttgagggatggcaacaagaccattggcactggtgttgtcattgacataccagccatgactgaagaggacaagaacatcaagtggagctgaatctggacttctcag

SEQ ID NO: 2458 - DNA, 450 bp, Cricetulus griseus
agggccgtgcacgtgttatctgtgcagcctctctctttggagaacttatctctgaggggctgctgtcaagatgcctggttcctttctggcaagcagcaggtagctaaagaaaaccagcaggtagcaaaggatgtcacactacatcaggccttgcttcgtctgccccagtaccagactgatctcttgctcaccttcaatcagcccccgtaaggaaggaaagggtgggaaactcgcgatctcccccgagccccctcgcccccctgacaattaggctgggtaggacaagcaggaagaaggaagattggctggtggattccttcaaggccgaggtcctctagggaataggaactgtaatcctgcaaacctaatgccggtccattgtctttctccctctgttccctcaccctaaactctaacaggaggtctcttggccctgaaaatctatcatgt

SEQ ID NO: 2459 - DNA, 578 bp, Cricetulus griseus
  misc_feature (562)..(562): n is a, c, g, or t
gcgatgctgatctttttgattcccatgacgacagagatgacgatggggaggcagggtcggtggaggagcacaagagtgttatcatgcacctcttatcacaagttaggctcggaatggatcttacaaaggtagttcttccgacgtttattcttgagagaagatctcttttagaaatgtatgcagacttcttcgcacatccggacctgtttgtgagcattagcgaccagaaggatcccagggatcgaatggttcaggttgtgaaatggtatctctcagccttccatgcaggaaggagaggatcagtagccaaaaagccgtacaatcctattttgggtgagatctttcagtgtcactggacattgccaaatgatactgaagagaacacagaacttgtttcagaaggaccggttccgtgggtttctaagaacagtgtaacatttgtggctgagcaagtttcccatcatccacccatttcagccttttacgctgagtgttttaacaagaagatacaattcaatgctcatatctggactaaatcaaaattccttgggatgtctattgnggtacacaacatatgc

SEQ ID NO: 2460 - DNA, 90 bp, Cricetulus griseus
cacgagcagttcaagtgtttctacatttgtgtctggagtcttagtgtcggagtatcacattcacagctcatacacactaacacacaaagg

SEQ ID NO: 2461 - DNA, 430 bp, Cricetulus griseus
  misc_feature (131)..(174): n is a, c, g, or t
  misc_feature (238)..(273): n is a, c, g, or t
atggcggcgtccatgttctacggccggcagttggccgctgccgtcctgaggagccaccggccgcaggctacactgcgggccgccgcccaggttttgggaaattctggattgtttaacaagcatggcctccnnnnnnnnnnnnnnnnnnnnnnnnnnnnnnnnnnnnnnnnnnnnttgagtatggaattattgcaggaagctggtgtctctgttcccaaaggcttcgtggcaaagtcannnnnnnnnnnnnnnnnnnnnnnnnnnnnnnnnnnntcaaaggatgttgtgataaaggcacaggttttagctggtggcagaggaaaaggaacattttcaagtggcctcaaaggatgagtgaagatagttttctctccagaagaagcaaaagctgtttcctcacagatgattgggaagaaattgatcaccaagc

SEQ ID NO: 2462 - DNA, 296 bp, Cricetulus griseus
gggagctaaggccgcgttggggtgaggccctcacttcatccggcgactagcaccgtgccggcagtccgcaacatggcctccgtctctgagctcgcctgcatctactccgccctcatcctccacgacgacgaggtgacagtcacggaggataagatcaatgccctcattaaagcagctggtgtcaatgttgaacctttctggcctggcctgtttgcaaaggccttggccaatgtcaacattgggagcctcatctgcaatgtaggggctggtggacctgctccagcagctggagctgc

SEQ ID NO: 2463 - DNA, 578 bp, Cricetulus griseus
  misc_feature (102)..(102): n is a, c, g, or t
  misc_feature (387)..(403): n is a, c, g, or t
  misc_feature (497)..(512): n is a, c, g, or t
taatacaaataaaccaagaatttgttagaactttacaatataatataaaactcttaatctttccctaaaatacagtctcagaaatgtatttagggtacatantaggaaaaatacaaacgaatgtgaacatgcatttaaagtcatgctatagttatgtagaactcttggaatttaacttgaaacatggaggattttaatttgatccttgaatttgggtcctttgaggaagaagtaaagttgcatgttcgaatcgatcagataatcactttctgtgactaaacttcaccgaattgtcaatgttttcctctgcatctaatgtgtccatcttgggcattcatgaagaaagtaatagctatactgtagtttaagaaccaacagcactgcatnnnnnnnnnnnnnnnnntcttttcagtttttaagtgataatttcatgactggcattttaaaagactgcagcagtatcattttgtttaagaaacatggattttgaaactgannnnnnnnnnnnnnnngacacacccagagttataattacaagtctgagaactggacagttctggaaggacattaactgcata

SEQ ID NO: 2464 - DNA, 428 bp, Cricetulus griseus
gtgcctggacctccgcgaccgggacgtcactctcggggacctgcccatccagtcaggtacgggcaccggccgggaccggggaagggtcacaaggtgccggtgggccagccgggggcctggcggagcccagctccgtccgtccgtccgtccgtccgggaaggcagggcaagtgtcaagtctcttcgctgcctgggagggaggagagcccggagccttgaacttcgcgcttccctgagccggcttccgcgagaccgccccattcgttttgtctcctctgctttcccaaaggacagcaggacccctatttctctctgtccccatcaccagcaggccagcagttgtgataaccgattttaaccaattggtgtgttttgggttttttttttctctctctctccggttaatttgtttttatagttttgtttcgt

SEQ ID NO: 2465 - DNA, 490 bp, Cricetulus griseus
ggcagcggtggaacacacctttaatcccaaagaataataaataatgtatgtgcctgtaatcccgggctgaagcagaagctgaaccaagtctggattgcataagttccagccaggtgagagcctgtctcaaaaagaagatgacagaaaacaagtatctcacagtagaaagggccattcctcatttcaccttgccgaggttacacttacagggttacaatcaaaattgtggctccttaaatttgattgtgaaatcttgctctttgttattctagacttaatttctttttttccttgtcctttttctttttaagatgcaagaaaatggcacagggaaaaaacctccaaaaaagagacctgatccagatacccttaagggcaagaaaaggaaggccctgccagctacagagatcccaggagctttggggcctgtcacctcggggaagaaacaaaaaaaagatgttcgggaaatcagaaagccaggagccaagtt

SEQ ID NO: 2466 - DNA, 494 bp, Cricetulus griseus
acagaaatggatttgatgtaaagttttaaatattttgtaaatatggactgcagttacagggtaaaagctacatgttgtgggaagctaggttttgcaagtttaatgcattcattggaagcagttctcacaggaagcactttgtgaataaaacatttgtttgaaaagacagattggtccaaatagccaaagaaagttgaaatagattatttataaaatcattttaaacagtgtatgttagtatgtgtgacagtactgtaaacactgaagcgggccgtgtgagacatatgtataagatacatatttttaaattgcaaaatagcatgcccaataagtctagagaaatggcaggccaactatttggaaagatgctataagttatggacttggaaaaaaataaatatttgaggatcttggtaaggggtagtagttgagagttttttaaattgttgtaaaatgagtcttaccccatttttctgggctttttaactcactgt

SEQ ID NO: 2467 - DNA, 146 bp, Cricetulus griseus
cgttctgttcggaaagtcttctgatgttcaagactcgtggagtcaaagagcttatctgtgttgtccttggacgcggtgacaaacatggtcatgtctctagatagctggatgtcattgatctgccgggagtgttccttatcgctcac

SEQ ID NO: 2468 - DNA, 119 bp, Cricetulus griseus
gtctggagcgggtcacctggcactcaccctgtgaggtgcttcataagatcagtgagagtgaggccgtgcatcctgtgaaaaactggatggacatgaagcggcgtgtggggccataccgg

SEQ ID NO: 2469 - DNA, 538 bp, Cricetulus griseus
ggtgtgtagtgcccacagaagccagaggccatcatcatatacccttgagctggaactatagatagctgtgagtcaaaccctggtcctctgcaagagcagcgagtgttcttaactgctgagccatctctccagaccctcaactcagtttttgtgcagaactctttcgctcacatttcgtaagtttctgagggttggaccgcatcctttcaattcaagtagataaacaaaatggatcttacctagaattcagctcaacaggtaaaagctggaatgcatgggagtgagcactgggtggtgagtgagttcagtgaaggacagggccgcaagtggcctctgtggtgttgagtgtaaagggatttttgcaccatctctgtccttcttgtgtctaggaaagtgtctggacaatatgtaattccccacaacttcaggtgtctctgttaaaggaatggagtgcaggagcacacagcttgtgatgtctatggaggaaagtggccctgacagctagagatcccaatgaagggcgccctccccccccccc

SEQ ID NO: 2470 - DNA, 490 bp, Cricetulus griseus
aggcctggcctctggctctgcagagacattgcctgccaacttccgggtcacctcctctatgtcatctccctctatgcagccaaagaaggttcaaatggatggtagtgtgtccggagcacagaggctggactctgccacagtcaggacttactcctgctagagcctcctgctgtttacccacactacttctacagatgacgacgccacggcagagacggtgcagagctcggtggagccccatctggcaacactcgctatatggacccaagatattttattacagagtttttaaacttgtgggggaaaaaatcacaaataccatagagaaaatattttagaattgactgtttcttatatttatgtaaacttacacttcctcatttatatagttacttactctttcatgtatatccaagctataaatatccttttgagtcaattcatgttcttatacctaattttagtcttttaaatgaatgtactgtaatgc

SEQ ID NO: 2471 - DNA, 146 bp, Cricetulus griseus
cactctgtgttatacacagtgggcacatctgtgtgtggagcccccgggcgctcaggtctctgggtcccagtgtgaagacactgtcgggggggggagtgccaatatcattggtgaccctttgaaatgaagggaatatagtgtaaaca

SEQ ID NO: 2472 - DNA, 146 bp, Cricetulus griseus; identical to SEQ ID NO: 2471

SEQ ID NO: 2473 - DNA, 577 bp, Cricetulus griseus
  misc_feature (522)..(522): n is a, c, g, or t
cacagatcagcaaatgctggtgacatttttctaggcaagaagaacttaaagttacttcacttcaaaagagactggatgtgacttcatactaaggcagcattaggtactgcatggaaataggtcattaactttaaattcttatcaaaatataatttaccagttcccaggatttccaatacaagaccacctgaagagaagccattgttcaattccagttcaatgtagatgacaaagtgaaatttagaagtaaaattgtctgttatttcagtctttattaactaactattcctttaaattttgcctgtcagtctatattgctgtttttactatacacaagattctttgtacaacttgtgagctttatgtgttatgtttttattatgtaaatatcattataaataaacttatttataaatgagagatttgttaattattggagctcatactttttaagacatcctgactgcaaaggtgctaggcaagctgttagaaggttgatgtcatcatacagtgctttggttntaggtatccaagactctgaacttttgactcaatagatataatcttgatactatat

SEQ ID NO: 2474 - DNA, 432 bp, Cricetulus griseus
ggtgacctgactcctggagacatcctttgcaggtgcagaagtcggcctcgcagttctcaataatgtcggaaccaatcagagtccttgtgactggagcagctggccaaattgcatattcactgttgtacagtattggaaatggatctgtgtttggtaaagaccagcccatcattcttgtgctcctggatatcacccccatgatgggtgttctggacggtgttctgatggaactgcaagattgtgctcttccccttctgaaagatgtcattgcaacagacaaagaagaggttgccttcaaagacctggatgtggctgtccttgtgggctccatgccaagaagggaaggcatggagaggaaagacctactgaaagcaaatgtcagaatcttcaaagcccagggtgctgccttggagaaatatgccaagaaatcag

SEQ ID NO: 2475 - DNA, 312 bp, Cricetulus griseus
tcggggggggggaccctgggacgcctagagctggtccgagtgattgaaggcaagatgcaggaccccaatgcagacaccgagtggaatgacatcttacgcaaaaagggcattctgccccttaaagaaagcctgaaggaactggaaaaggaggaagcagagaaggaggagcagcaactcctccagcagtcagtggtgaaaacatatgaagatatgactttggaggagctggaaaagaatgaggttgagttcaacgaggatgacgaacgatctatcgaaatgtaccggcagcaaaggctggctgagtggaaagca

SEQ ID NO: 2476 - DNA, 579 bp, Cricetulus griseus
gaacttcgaggagatccgcaggatgatgtaaaagatggcacctcgaggccttttgccctgccacctcagagccagggttggctccctgcagaggaagcagtttattagtgttctttagtcttcacacttgtctaaggatccactgttagggcttgcccgcgtgattctagatgtaccctgcgctgctagagtaagcactttacttccacactaagcagagcccacggttgtcacctcctctcctgcagcaagtgggactccgggggcatctggcctccacctggggctattagggtaactgggccctggcatggttagcacttctgtgtgttcccagggtgcactgtttctcatggccaggccctaacttgcagactaacttcactgtaataacagcaacccagagctttaggaaccacgtacccaaggagcacaagaatcccagcaccctactgcttgggctcctgccctcctggagatgaaggcctgtgacagacacttcaccaactccccttgacccagttacatagtcaccatccctagtggggtccctgtgggtagggttcccacagcaggcac

SEQ ID NO: 2477 - DNA, 537 bp, Cricetulus griseus
  misc_feature (144)..(163): n is a, c, g, or t
aaacacatctagcatgtattgttatgtagggggtagcgtgctatgttgtgatcacgagccattcacaaactccgtgataaaaaaaagtaatggctttcactgtaagcaagcaactgttacttaggaagatgagtatgcgtggannnnnnnnnnnnnnnnnnnntttgtgtattcgtttgctgctgtgcggtgtgcatctgcatcccgtggctttcctgaccgcctggaaagtgccgttctcctgcagtgcaagcgctggccgcctggtggcacatggcactagttcatggcactagttcatctgcctcccggactctgtctcctactctttcttaacacttttagagaatactccatattacagttcatccatcaaacatcaatagcaccctaaaaaggatactaatattttccacattccagaaattatatttaagatttgtttcttttgtcagaattgtacatagcaataagagctttaaggagaagaaagaaaaaaatagctttaaggttggacaaatacagatataatatagc

SEQ ID NO: 2478 - DNA, 564 bp, Cricetulus griseus
cagttcactaatgaagccagagaaatgggtgttattgctgccatgagagatggttttggtttcatcaagtgcgtggatcgtgatgctcgtatgttcttccacttcagtgaaattctagatgggaaccagctccacattgcagatgaagtagagtttactgtggttcctgatatgctctctgcccaaagaaatcatgctattaggattaaaaaacttcccaagggcacggtttcattccattcccattcagatcatcgttttctgggcactgtagaaaaagaagccaccttttcaaatcctaaaaccacaagcccaaataaaggcaaagacaaggaggcggaagatggcattattgcttatgatgactgtggggtgaaactgactattgcttttcaagccaaggatgtggaaggatctacttctcctcaaataggagataaggttgaatttagtattagtgacaaacagaggcctggacagcagattgcaacttgtgtgagacttttaggtcgtaattctaactccaaaaggctcttgggttatgtggcaactctgaaagataat

SEQ ID NO: 2479 - DNA, 360 bp, Cricetulus griseus
gtaaaactaaccctttgttttccagttgtaagaaacttgtgcaacaatgaacaggtaaactaacagcagtgctcagaaccccagtacagaagcggggagccagcaggatgggaatgtgttacctttaacccttgaagagaaggagaacaaagagtacctcaagtcattatttgagattctgatcctcatgggaaagcagaacatacccttggatggacatgaggccgacgagatcccagaaggcctctttgctccggataactttcatgcgctactggagtgtcgaatcaattctggagaagaggtcctgatgaagcgctttgagaccacagcggtgaacaccttattctgctctaaagc

SEQ ID NO: 2480 - DNA, 587 bp, Cricetulus griseus
  misc_feature (514)..(514): n is a, c, g, or t
tactggagctgtcttctaaaggaaactttacccagctcatgtgatcaaacttccaatccacaggccttttttcttcctcctaaggactgatgcaactttgtaagtatttggcgtagattccttccccaccagctctggggaggaacagttatgactgcagtgtgactcacttgactaccactgtgcctctggttctgattggccatcaccctgctctatccatctggctgtagagtactctaacctgcatctctttggttcttgcctctgctgttccttgccattgcactgagagcaggtcctgggctttgtgccttccttgtggttcacttcaataggcagtaatcaggagaacatactctagttcctaacgatggctatagaggagagaacaccctgtccttctgtgcctggacactacttagtttcctgtgctgtttccttcacagttccacccttccccaccccccctttccctttggcatgtatcacccttccgttttcctcctagttnctctcctcttttttttaatattaaaaataaattaggaatctctctctctctctgatggggaggaagactgaaa

SEQ ID NO: 2481 - DNA, 580 bp, Cricetulus griseus
cataggtctgagtttccttgagggcaccaaaagtgttctaaaaataggtcatgaacgaggttcttggcacttgcctgcatttttagcactcaggatgctgaggcagcaagattgagaatttgaggccagcctgggctatagtcaagaccctatctttaaaacaaacattagcaaaaatgtcatgatgtttccaaaaccccgaggacattaaaagaacacactgaaccatattctttaaatgggtgcattttgtggaatgtgccatcccgttgaagctataaaaatgttcttatacacacagaatcaatttctacatttcttgccaggtattttagtgacagccatgccatagtggacggtcatggacaatgctatccagcaaagcttgtcttggctctgctgctgctgcatagccagttcagggcagctgcatgactttagacaaatgtctctccctggacccccaactattgatctatagaaagaagttggctttagagacctctgagatcctcctgtccaactctgagtgtacttgtgttttcagggaggtgagcaaataccaagccatctttgtccc

SEQ ID NO: 2482 - DNA, 508 bp, Cricetulus griseus
gaatcaccttatgtgcgtttttgttttagactttgtatctccagtctctgatcttgagacaggaaaatagacactcaatagctcatctcctggttcaaagtactaggtgcaaataattgtctgtatagatagccgtccatttatgcttgtggagcagtagacattttttaaactgcttagtactctattctatataaccttttctcagttaacatctaagaaacccggccccttggaaaatgtcctaagataaaataaatttccctgagtactgtggtttctgcctgctgaagtttttttccatgactgttcttctcagctgaatattcctctaaaatctgagtgtaagtcttcagccaaaatgaacacccgtctgctcatccttttgtggcattattccaggtatggcatgttagtgtccaaggtaggaagactaaggcttcctcttcacctgcctctcttgctttgtagcctttgttgctgggggcacatcaccaccgtgttagag

SEQ ID NO: 2483 - DNA, 535 bp, Cricetulus griseus
  misc_feature (74)..(146): n is a, c, g, or t
acaggcgccatggttgtgctgcacgtgctgttcgagcatgcggtcggctacgcgctgttggccctgaaggaagnnnnnnnnnnnnnnnnnnnnnnnnnnnnnnnnnnnnnnnnnnnnnnnnnnnnnnnnnnnnnnnnnnnnnnnnntcgtctggtcgccttctgtccgttttcttcatcccaggttgccttggaaaatgccaatgccgtgtctgaaggtgttgttcatgaggacctccgtctgctcctggagacatacctgccgtctaaaaaaaagaaagtattgctgggggttggagaccccaagattggtgctgcaatacaagaggagttggggtacaactgccagactggaggtgtgatagctgagatccttcgaggagttcgtctgcacttccataatctggtgaagggtctaacagacctgtctgcgtgtaaagcccagctagggttgggacacagctattctcgggccaaagtgaaatttaatgtgaaccgggtggacaacatgatcatccagtccataagccttctgg

SEQ ID NO: 2484 - DNA, 568 bp, Cricetulus griseus
  misc_feature (368)..(386): n is a, c, g, or t
  misc_feature (524)..(524): n is a, c, g, or t
atagctcagtgggtaaaggtgccttcggccaagcctgatgactcaagttccgtccctgggacccacatgatggaaggaacaatggactctttcaggttgtctctgacctccacatgcatgccacaatgctcacacacattcacacaaagcggatgaaatactgaaaccaaaaacacaaggcatatggaggggagaggaaaggtcttaaatgatttctggtgtcttgtgtccatcaaaaacagacataaagaagaaagtgaacaaaaacgagcaaaataacacagcacagtcagcctcaccttgaacttgccattcccctgccacagcctcccaagtgatcaggtgtcaagcctggtcaccacatccannnnnnnnnnnnnnnnnnnatgctcccttacaccttgatgaaagatgaaccgagagactcaacagagaaccggaaacaagtaaacagaaatcttgtgcaaactggaaaactgacagtggattgaaactgaggcttaaaggaatcaatagccacttanagacagcttcatggagagctggaaccggaatagggagtgagaag

SEQ ID NO: 2485 - DNA, 334 bp, Cricetulus griseus
ttgcaggccaccctgatctataaagtaagttccaggacttccaggactgtttcacagagaaaccctgtctacacttgcctatctatatagataattaatacaaaggaagtggttttggacaatctagttttcactctaatcaatttcaatcacctttcctttaaagacatttttttttgtttgtatattctctaattcattgtctatcgtggtaagttagctttactgtaacaaataaaataagagaagtcacttcattccaatgagctcaaattataatcagatgtagaaaaataatttgagtgttctggaaatgaagtatgctggaaataca

SEQ ID NO: 2486 - DNA, 557 bp, Cricetulus griseus
gttacagaggaactttgagtgactgtccaggtagcaagatgtctctgtcaattctaaagtttatatattatacttttgtggtctttgatggagttgaagacagatagttatgattatagttttctttagttattataaaagataagctacctataagaccttcgactcacaaagataagatgatagaatattttctttaaatcttgctgaatgttaatgaactaaatatcgtaactatggttcttacttgataactgttttgttatgtattttactatgttaatggtaaaacccttctttcatttagacagaaaagaggagatgatgggggaggtccttctatgtatgtgtttgtcttattggttgatgaataaagcactgttggccaataaggaagcaagatagatgagactatgagtcgaggaggattctgggaaatgtagtagggaagagccgccatgtgatcccagaaagacatgacacattctgccggcgtcctcaataagtaagataagtttataaaatatatagattaatagttatgggtgatacttaag

SEQ ID NO: 2487 - DNA, 579 bp, Cricetulus griseus
  misc_feature (550)..(550): n is a, c, g, or t
cggctgccagggtcgtgccatgctgcagaatggaatctcatttgaatcaagatggattgcctagaccatcttatgtttttagtgctgacccaattgcaaggccttcagaaataaattttgatggcattaagcttgatctctctcgaaagttttccttagttgctgaaaaccctggggcagacagtttgggatctaaaaattacctccaagtttgtcttcgaataagaccatttacccagtcagaaaaagaacatgaggctgagggttgtgtacaagttctagattcgcagaatgttctgctgaaagatccccaaagcatccttggccagctaagtgagaagaactctggacagatggcacagaaattcagtttttctaaagtttttggaccagaaacttcacagaaagagttctttctgggttgcattatgcagccagtaaaagacctcttgaaaggacacagtcggctgatctttacatatgggctgaccaattctggaaaaacatatacatttcaaggcacagaagaaaatattggcattttgcctanaacactgaatgtattgtttggtagtcttc

SEQ ID NO: 2488 - DNA, 507 bp, Cricetulus griseus
gataaaagcggagctgccgagtccgccgccgtcgcgatggaggagcgagacgcggaagaggccggggggagaagccgcaggaaaaagcgcagccaccgtcagcgccgcctcccgccaccgtagaggttgaggccgcccatgggaaatcaaggaagtctgtcgaatcactttgaggaccaaggccctccccccatatctaggttgagcacggtatcccaccaaagagaattggccccacaaagccagttcaagcactagggataaatcctggtcccactgccagcggccacacagactgcccaagccacactactgtcacccacatttagggggccaaattggaccctatgcaggtttacccctttctccttggcctatagcaagaatgccccttactccacagcaggcgcactctgccatgggccaaatcgccttgcttcatgggaaaaccttgtttgtcattcctgccactgatggggaccacatgacacttccactcgtcaccca

SEQ ID NO: 2489 - DNA, 570 bp, Cricetulus griseus
ggaaccctgaactataaaccacccaacacagaagaattttattccagtctgataaatgaaatccacagaaagatgcctgaattcaacaagtacccggagcaccttctgacctcccttcttggcttggctttttctgaatactttccgactgagttcatcaatgttgctctaagtccagaatttgtcaggttagctcaagagaatagtaagtttgaactcactaaggaactgtatactcttgatggtacagttgccattgagtgtccagattacgagggcaatcgtcttaattctcaccttcagcaagaggcatctgtaaacctgtggaatttagcacgtaaggatatgaggtcaaagcccgagttcttagaagctctctgtttacttgagaccatcttaggtggcccccagtacatcaagcatcatatgattttgcctcacatccgatcttctgacttagaggttcagcttgatgctaacatgaagccactgccaattaacatcgaagtaacaccaacagatgatgtagcccaattacggtttaagcaggtgggagtcagcctcacagat

SEQ ID NO: 2490 - DNA, 423 bp, Cricetulus griseus
cgacttggtatactcgcaagcctgcagctggtttcagaatctaagagacagatttcgaagccaaatccttcaacactttgggtcaatgcctgaaagggaggaaaacctccaggcaacccccaatggccctgcatggtgttggtggctgctggcagtccttcctgtagaccctcggtatcagctctccgtgctgtcaatgaagtccctggaggaacggctgacaaagatacagcatatcctgacttacttttctagagaccagtctaagtaatgaactgcttggatctcacctagcttgctcttagccctgaggctgagaagcggttggatctcattctaaagtcaccctaatctggccccgttgtaggccagattgtccgctgcctttgcacacccagtgctggtttagaaattaaggaaaca

SEQ ID NO: 2491 - DNA, 583 bp, Cricetulus griseus
gttgcctgctaccgagggaggtcagaacagggcatctgatttcccctggaactggagttacagaaggttgtaagccaccatgtgggtgctgggaattgaactcgggttttctggaagagcagccggtgctctttaccagcccccttgttaagttttaaattcacaatcttttcaaccctgggcatgagatttggttaagcattttagtgggttgggtttttgtttaatttctaccctagtatcgtgtacatgataggtgtttgctggacttgttgatgttttgcatcattctgtgcattggtgcttgagacccatacagacttggggtgggactaacaagtaacaaggtgtggtgtttctgaagtcacccttttccgtgggttggaaaccacacactatatagtgcctgcctgcctttaccctatgaggtgatgatgggaagaactgctttgagcaagcaggcagctttatctggaagtagttggagaacatgtaaccctacagcaggcttactctgaggtggttttatggaggtggccagtgattggccaaacttgatggaccatcttaaagttgggttaag

SEQ ID NO: 2492 - DNA, 438 bp, Cricetulus griseus
aggggccaccccagtaccctctcctcttagctgtgtataaagtaaagtgcggctggacgggccacgcctgtgtcgggtgctacagctcccttccctactgctgacgggtcccagtactgaactaagcttttctagcataaacaagccactgctcttctgtctgttactaggaagtggaactgtggttcggctggaacttgtgaaagctgtgtgtgtgtggtagaggagcccctggtcttgggatggaagcttggggagtcgtgcaagcctcatagatcttgagctctaaatgcttttggaggtgcaatcaaatggctcgtttatgagaatggattagttctaggtgcactggacgtagcggaagaagcttgtttttctcctcagtgttagggaactttcttgttggggcaattcttaatgtcactcttgtctttcctt

SEQ ID NO: 2493 - DNA, 216 bp, Cricetulus griseus
  misc_feature (2)..(53): n is a, c, g, or t
annnnnnnnnnnnnnnnnnnnnnnnnnnnnnnnnnnnnnnnnnnnnnnnnnnnctcagcgctggaagatgccggcggtgatggccggctgacagaatggtggagatggcccgtgggtcgggccaggaaaggaggacgcccgctccggtggtgacccgcccaggtgtttactagattacctgagggagagggtgggatggggcgggggctggggggt

SEQ ID NO: 2494 - DNA, 577 bp, Cricetulus griseus
tttgcagccgtttttcacgttgcagttggatattcagtctgacaagatacgcacagtccaggatgcattggaaagcttggtggcaagagagtctgtccaaggttacaccaccaaatccatacttgagttgaagtcagtcgcagagtgactctggagaagctccctcctgtcctcgtgttgcacctgaagcgcttcgtctatgagaagacgggtgggtgtcagaagctagtcaagaacattgattatcctgtggacttggagatcagcagagaacttctttctccaggagtcaaaaataagaattttaaatgccacagaacctataggctgtttgcagtggtgtaccatcatggcaacagtgccacgggcggccactatactacggatgtcttccagattgggcttaatggctggctgcgaattgatgaccaaacggtcaaagttattaaccagtaccaggtggtgaagccaactgctgaccgcacagcctacctcctgtattaccgccgtgtggacctgctgtagccgtgtccgtgtgcctgtgtgtgtgcctgacgctgcttcctacaattcccaa

SEQ ID NO: 2495 - DNA, 428 bp, Cricetulus griseus
catttatttcgggtaaaaaagggatttttttatcgttggctcttttctaaatcttaaggagtggaggagccctgatcccatcactccttggagaacccgggtaaaatcccaaattcactttcccgggccccaaaattcccttttacccccacaacccagccagattttttttattttaacgaaacacagaaatccccatgggtttctttaaaccgaaatcccttttaaggggggtttttctccaaaaaaaccacctgttggaaataaaaggccccccttttttttggttttaaaaacggaacagaattttattccttattcccaaattaaataaacccaggggcacccagcacgggaccctttccaattcctgccacaaatggccctgaaacaaagaacccgggtttttaaaaaaattgggttttaaa

SEQ ID NO: 2496 - DNA, 422 bp, Cricetulus griseus
caacacctcactcaacccgcaggagctgcagcggcagcggcagcttcggatgttggaagatttgggcttcaaggaccttaccctgcagccacggggccccctggagcccatccttcccaagcccagggcccaccaggagccggggcagccagacgcagcaccagagtcgccaccggtgggctggcagtgccctggctgtactttcatcaacaaacccacacggcctggctgtgagatgtgctgtcgtgcaaggccagagacctaccagatacctgcctcataccagcccgatgaggaagagcgagcacgcctggctggagaggagcaggcgctgcgccagtaccagcagcggaaacagcagcagcaggaggggaactacctgcagcacgtgcagctggagcagaggagcctggtgctgaata

SEQ ID NO: 2497 - DNA, 512 bp, Cricetulus griseus
gattgctgcactttggaggctagcttgggctgcatagcaatttgaggcaagcctgtgctacatagtaaaaccctgtctcaaaaatgccaagaaaaaatttttttaatatgacacattaaaaaatgtaaatttttagtagctacttaaataaaaatctaaaattttacagtaaaaccttgaggtaggtaattgtcttaaagatgaattcttgtcctatggagagggagctagaaaaataagttcaattcagaattttaagtgacttgtttaaattcattcagctagtaaatattagactatacttcagcattatgtaacacaaaagcctattcagttttcaggcttagttaaattctataaatagttatttccattaagtttatttatcttagtcctgccaaaccacaaatgaccaagagcaaaaacttccagcattgatttaaaagaataaaacaatagttcaaagtcagaattaggagaagaaactcaaaacaggccaatgtggctgttga

SEQ ID NO: 2498 - DNA, 486 bp, Cricetulus griseus
tcgccagaaggaagatcctatctactctgtggagaatggattggaacaaaaaaagaccatgcaggaatcaactgtagaaggccaggccagaagacaccatcagatcttctgggatggaattacagagctgccatgtggaaacaagcacgacactgagagggacccacgcatgtgaatggagacccagctgggagaaggaagagatcctgaagggaacactgtcaatattgattcggtccccatgcctcccagtctaacggtcaccttggaacatctctgtccatcactttgaggggcaagcatcctttgctcgagtgtctatctcaggaactgacatgggacaacaacatggaaacaggaaaggtctcagccacagagaaatcccccggggcattgggctgctccttgccatggcccttatgaatgtgcttctttacctctgcctcaaccagtttttcatttcccctcgttctactgaggatgcta

SEQ ID NO: 2499 - DNA, 580 bp, Cricetulus griseus
  misc_feature (282)..(300): n is a, c, g, or t
gcagcttctaaaattctcaaagcctggaccaaaccatggagctgcctaagtatttgcgttatctcactggcttcttagcagtttagacttatttatatgatctgcatataccccctccctgtcagagttatacctccatagagcctcaaggtctgtgaaacacgacaccgtgtttcaagcagtgtctcagcttcaaaatcctgttagtagaaactattgtatataatggagtttgttttgagacagctgggcgtttgtgctgttattttcttgttcttttcnnnnnnnnnnnnnnnnnnnctttgttcttttcaaagatggaaaggcagactgttgtagacagggccatggttgtaggtgtagggcattgcagcaagggtttcttgggcaaggggtttcttgggattaagtgcagctccctagagataggatttaattcttaggtttttaatccatgtacattttagtcagtttaatttttaatccctttagattctttagagctattctgttttaacaattgtcattcctaaatgtttatacaactcttttgaaaacattgtataactaatgtttatta

SEQ ID NO: 2500 - DNA, 552 bp, Cricetulus griseus
  misc_feature (457)..(457): n is a, c, g, or t
tcgcgatcccacgcgtccgcaaaaagctgatatgtaggttactttacactttttgtgtatcttaatctttgtgagtttgtatttgtaatactgctaatacagtagtactcttgaatggaataactagtaaagatataaagctctgattttgaggtaatatgttaaagcagttgtatatccatgacccattttcccctgtatgaggttcaaggcagggaaattttgttcttatgagtagttatttatgccatacagcgtctaatttttaaagcttaagctctccatccaggtcagtaagctttctaaattctgagtagaggatggtctttagactagttgcaatcagaaaaacatgctatgtgagggagaaatggaataagaggcagatctcctttctacttcctactatcaccctcctttcagattttttttttaatttatttattatgtatacagncttctgcctgcatgccagcagagggcaccaaatctcattcaaggtgggtatgggccaccatgtggttgctgggaattgaactcaggaccgctggg

SEQ ID NO: 2501 - DNA, 577 bp, Cricetulus griseus
cacgacgttctttctgtcttcatttctcaagcagttcaagaccaagcgttattttcctaccaaggtacgatcaacaatcagtgactttgctgtgtttctcacaatagtaataatggttgcaattgactaccttgtaggaattccatctcctaaacttaacgttcctgaaaagtttgagcctactgatccaagtaggggctggatcataagccccctgggagataacccttggtggacattactaattgcagctgttccagctctcctttgtaccattctcatctttatggatcaacagattacagctgtaatcatcaatagaaaagaacacaaactcaagaaaggagctggctatcaccttgacttgctcatggttggtgtcatgttgggagtctgctctatcatgggcctgccatggtttgtggctgcgacagtgttgtctataagtcatgtcaacagcttaaaagtagagtccgaatgttctgctccaggggaacagcccaagtttctggggattcgtgaacagcgggttacagggctgatgatttttatcctgatgggcctctctgtgttcatg

SEQ ID NO: 2502 - DNA, 513 bp, Cricetulus griseus
cacacagggggaaagccaagtgtggtggcacttgtcactccagactcagacacagagagctcctgcctctgcatcccaagtgctcagattaaagatgttaggcacaacgcctagtccatgtgctttgtctttttgagtccctggctgacctgggattcattatgtggaccaggctggcctcggactcctatagatctactttcctctgcctccccagtgctgggattcaagacatgcaccaccacacccagcccatctgggaattttagagaaaaaagtttagccagtttctattggctgccctcttggggcacagtgtctggttcaacccagaacccagggatgaattctcacatggtttccaacacctgctgggatctgcagttccctagagagtggcaacagggaccttcctttcttcggtggcaacctactatgtaacaaagctttgtgaataggccctatgggccacgggaccaaacacccatggacaccactctaccatgccatgga

SEQ ID NO: 2503 - DNA, 418 bp, Cricetulus griseus
  misc_feature (6)..(36): n is a, c, g, or t
  misc_feature (221)..(247): n is a, c, g, or t
gacagnnnnnnnnnnnnnnnnnnnnnnnnnnnnnnngcgagacagagacagagagaaacgggaggtgggcagggcccttttaaaagggaacatagtgaatatgcacaggtggtgctcttagtggctgcaactgagggcgtatcctgtcagaatcccaaggacaggcaagtatagatgcccaaatactaacattttgcccaagacagtgccgagtgcatcannnnnnnnnnnnnnnnnnnnnnnnnnntcattgtttgaaaagaagggacagagttgtataagccatacatttgtgtttgtctattaatcagcataaaagttatattgctgtaacaaatagaccaatattcccaatgtttaatacaacattttatatttctcacataagctgcaatgatagcatgggtctgcttgttga

SEQ ID NO: 2504 - DNA, 467 bp, Cricetulus griseus
  misc_feature (94)..(94): n is a, c, g, or t
tgattttcacaggctgcacatcctcctattcttgaagttgcttcatacatattcacttgagtattgtctagcaattctaggtgattcctgcacnctctagagaaaaagtgttttatgacaacatgatgctttgggttcagagatgaccggtctgcgtcttcatttttactgtttaaccaagcaaaacctcatagtttttcaaaaactttcttcacatgattatgtgtgtaattggctttagtaataaattacgaaacacctcaatatgttgctatactctcatatcttaataacattaaattactagggtgggttttcccctagtcctatgatcttttgtaaactattcattttttaaaaaaatgttgttaggtcctttaaaacacaatcttgtattatgtttgtttcatgtatgaataggtaggttatatatatcttatatctcagatgatggatttttgatatat

SEQ ID NO: 2505 - DNA, 523 bp, Cricetulus griseus
  misc_feature (228)..(247): n is a, c, g, or t
agtgctgctgcttgcatacaagcccatggaagggaactttgaagagattgcccgagactttaatcccaactggatgagtgcagtggaaatcttggatgatgacaatttcctgggagctgaaaatgcctttaacttgtttgtatgtcagaaggacagtgctgccaccactgatgaggagcggcagcacctacaggaggttggtctcttccacctgggcgagtttgtcannnnnnnnnnnnnnnnnnnnctagttatgcagaatctgggcgagacttcaacccctacacaggggtcggtgctttttggcacggtcaacggcatgatagggctggtgacctcactgtcagagagctggtataacctcctgttggacatgcagaaccgactcaataaggtcatcaaaagtgtgggcaagatcgagcactccttctggagatcctttcacactgagcgaaagacagaaccagccacaggcttcatcgatggtgacctgatagaaagtttcctagatatcagccgcccc

SEQ ID NO: 2506 - DNA, 579 bp, Cricetulus griseus
gctgataatattttataagcatgtgcttgttgcttatgaaaataattcctaaaatgggtttggggaacacaggcctgtgaacatttgggaaccataagctttctcaggagggcctacgtgtgtgtggcgcatgcctttaatcctagcacttcagagacagaggtaggtggatctcttgagttcaaggccagtttactcacaagcctggactatgtagagcattgtttctcaacctttgtaattctgggaccctttattacatacagttcttcatgttttggtgactcccaaccataaaattattgctacttcattactgtaattttgctgctgttatgaattgtaatacaaatatctttgttttccagtggtcttaggcgactactgtgaaaggattccttgaccccaaagggtagggaacctcatgttgagaaccactgatatagagagaccctttctcaagaaagctctttcttgtaaatctagttactacaagagcttgaaagataagaaggaaccttgaagggtatgctgattggttttcatctacttactttgtatttctgtcatttgagtgtc

SEQ ID NO: 2507 - DNA, 579 bp, Cricetulus griseus; identical to SEQ ID NO: 2506

SEQ ID NO: 2508 - DNA, 600 bp, Cricetulus griseus
  misc_feature (555)..(555): n is a, c, g, or t
agagcagcgggagctgcgcaagtacacctatgccctactgcgtgtgcgcctgcccgatggctgcttgctgcaggggaccttctatgcccgggagcggctgcctgtgctcttccagtttgtgcgcgaagcattgcagaatgactggctgccctttgagctgagggcctcaggtggacagaggctggtggaggacgaggccctggccctgaacgagtgtggactggtaccctctgccctgctgaccttctcctgggatgcttcagtgttggaggacatgagggctgcaggagccgagccagccacatgtgtgttgaggcctgagctgcttgcagccatcgagcagctctcctgaataaaagcaggctcggcccagcatgcgctgtgtcataccgtcccccaaacccattccttaccctgagtccccaccaaatagaagggacactagtagcagtagagttgggaacagggtcccatctcaagaactgagtcacctgggctgcagggacaggtctgccccttcctgaagagtgtggagcctctgggagcccagcacangtggcagagcgggtctgcagcatgggcacaggcctcacagactat

SEQ ID NO: 2509 - DNA, 356 bp, Cricetulus griseus
aaagccgaggacttcgccagccctgcaccccgagcagaaggcagaccggtattttgtgttatacaaaccgccccctaaagacaacattcccgccctagtggaggagtacctggaacgcgccaccttcatagccaatgacctcgactggctcctggccttgcctcacgataaattctggtgccaggttgtttttgatgagactctgcagaagtgcctggattcctacctacgctatgtaccccgaaagtttgatgagtgggtggccccgacccctgaggttgctgacatgcagaagcacctacaccgaagcattttcctcaccttccttcgaatgtccactcataaggaatccaaag

SEQ ID NO: 2510 - DNA, 556 bp, Cricetulus griseus
ctttggaggagccaggtggagacccaggctcagctgcagaggcctttgcccacaactgcgacgacagtgcctccatctcttccttctccctcggtggggcagccagtagtgcctccctacgaggcacacggggtctaagccctgagcaggaagagacggcttctctggtgtccactggcactctggtccctgagggcatctacctaccccctcctgggtaccagcttattccagataaccagtgggagcagcttcaggtagaggggcggcagctgcagaaggacctggaaagtgtcagccgtgagcgggatgagctgcaagagggactgagacggagcaatgaggactgtgccaagcaaatgcaggtgctcctagcccaggtccagaactcagagcagctacttcgaactctacaagggactttgagccaggcgcaagaacgtgtgcagatgcagatggcagaactggccacttctcacaaatgcctgcacaacgaggttaaaagactaaatgaagaaaatcaagggctccgggctgagcagctgccatcctccac

SEQ ID NO: 2511 - DNA, 539 bp, Cricetulus griseus
  misc_feature (448)..(464): n is a, c, g, or t
acgatccgtgtccccaaggcgggagaccgggtccacaaagacgagtgcgctttctccttcgacacgccggagtctgagggtggcctctacatctgcatgaacacattcctgggctttggaaaacagtatgtggagaggcatttcaacaaaacaggccagcgggtctaccttcatctccggaggacccggcgactgaaagaagaggacactagtgcaggcactggggatccacctcgtaagaagcccacccggctggcaattggtgttgaaggtgggtttgacctcaccgaggagaagtttgaatatgaggaggatgtgaagattgtcattttaccagattacctggagatcgcccgggatgggttaggggggcttcctgacattgtcagagatcgggtgaccagtgccgtagaagccctactctcagctgattcagcttcccgaaagnnnnnnnnnnnnnnnnnggatggggaagtccgtcaggtgtctaagcacgccttcaacctcaaacagttggagaaccctgctcggatccctcc

SEQ ID NO: 2512 - DNA, 552 bp, Cricetulus griseus
attaagtcttagaacggggcttctattttcttgctgttgtgcaggatgtttgttatctggctcatttatagaattgcatgcctatcttttccaaaagtctaatcattaggcccaatctgtcatttctagaccattttctaagttaacggccatctggcaaatgcccatatatttaatattgcttgaagccctaaatgccaaagcgaaagctcatatttatcagctaaaaggcatgtgtgggcctcaactgcagtcctctcccttgaccacactgctttaagcatacagagaacatctgagaaatgtcagcaattttcctacatcacacaatagcagattaactactaacttcttgccagtagggcttcccaccagaagactgcaaaggtaatcctaatttaaaggtaatgacaacatcaaaattcttggctttagttcctagcatctttggaaccagatgggtcttgattcaaatgtctgaagataattttatagggtagaaaatgtactgatgcatgctgtgtctgttgcccctcccatttgccctctact

SEQ ID NO: 2513 - DNA, 567 bp, Cricetulus griseus
  misc_feature (19)..(36): n is a, c, g, or t
aaccagcaagctggtgggnnnnnnnnnnnnnnnnnntccttctggtcaccctgggagccttcatctttggccaaaccacagccaatgccatctttgttgacctcttggcatgaacactgccttccagaaaacatgtcaccaagaaccatctctcagagctgtgaagctaccccaagtcccacatcctgttccagctggtgacatcaggacacatttttccatggacagtcatgggacagaatcagcctcaaatctgtggacagctccccacccagctgccttcctgctccccaaccttggcattgtcatagatggtgacaggaggtcccacgtcataggagcttccccctcacccaggtctcaacttcagtcctttgggacctgttaatggagagtgtcagtgagtcacagaagagagagaccattctgacttccctctggaaaaacaaagtcttatacatagtgctggcatccaccacagagcttgtcaggcctgtgctttcagtaccttggggtttagtgcctgcccatgtctctcagaagccaatgatgacttctcctgggacc

SEQ ID NO: 2514 - DNA, 521 bp, Cricetulus griseus
aaatgctcaggtgtagaagtaagtagaacgatacacagcggccagagtagcttaattcatgtgtaggctgacctgactctgcccccacagatacctggaagaggtgggctacacagataccatcctggacatgaggtccaagcgtgtgcgttcccttctgggtcgctccgtggagctcaatggggccactgagcctatcgaggggccacccagggcttcaccaggccccggaggacttagcggtggcgagtctctgctggtaaaacagatcgaggaacagatcaagaggtgagcccccgagcaggcatgatgttcttcctccctgcagctgttctgccggccctgctagattgtgtggtaggctccaccattgctaggcttcccctgtaggttgtcacacggcctttgttcctagctgaggatagccctcgggtggtttgattgcagcgggaaacaggtgaggaggcatatctactcttgtcttggggctcattttgttcatcttcccatgggtagttggt

SEQ ID NO: 2515 - DNA, 539 bp, Cricetulus griseus
  misc_feature (198)..(221): n is a, c, g, or t
  misc_feature (244)..(264): n is a, c, g, or t
aagcaaaatagttaaaaacaatgtatagttctttctgggtctctatacaataagcctctgtaggtcacatagcattcatcagaggttaataatctagccaaaactaaccctgaaactgagtggtggtacagattttaagtaatcccatctctttaagagctgaagctgggctgggcagtggtgatgcacgcctttagnnnnnnnnnnnnnnnnnnnnnnnnaggcagatggatctctgagtttnnnnnnnnnnnnnnnnnnnnntcaagttccaggacagaggcagggctacacatagaagtctcaaacaaaagagacgaaagcaggaggatcaggagttcaatattaaattgaggggaaacttgctcttttccagtctcaggctctgaggaactgcccattactttgtagacattgtcaattctaagaaccacacaaatataaccagtccagaaatagcatcaagaaacccccttataaagatacagtctaaagggggttgactccaaatacctgatgggcatgttactttgtcaaga

SEQ ID NO: 2516 - DNA, 522 bp, Cricetulus griseus
ttaggtaatggggaagcggagactaacagtggatcctgggggcatggagtggagcacagcagagcgcagcagcatagccccttgtgaggtctgctgagaaggctggaaagataggttgtgcctaggaagccttaaacagcaaacaggaagttcacgttttactctgctgctaagcatgactcctttggggagttggattctgatttgttgtggcagtagagtgaaataagaattcctttaggaaggtcactgaggcaactttatggagactagattgaagagtaagaaactcaggaagacttcaatggatgttaaaataactaagaaactgtgtgggtgagttgggctagccagtggcagcactgcagtaggcggctgcagctccatgctgagaggacaggagtttagacctgtctcaggtagaatatttagtcatttaaccagaagtggtattttttacatgcaatgcatgcagtgaatcagtgaggaaacacaggtggaaaagctcgcatttgcttgccg

SEQ ID NO: 2517 - DNA, 501 bp, Cricetulus griseus
  misc_feature (46)..(88): n is a, c, g, or t
tggaacagaattttggtacaaaatttttgagaataataataacatnnnnnnnnnnnnnnnnnnnnnnnnnnnnnnnnnnnnnnnnnnntgatttgagctcattttaaaatcaccaaagacttaaatgagaaaatctggttacccaaatggagggcacacatggacagcatatgaagcacatggacagtgctcagaactgttagtcatcagagaagtacaaatgtttgactcactagctactgtagtaccctaatgaggatgatggaaatgaacaatattggaaacctggttggtaaggaaacggaatcagagctattgcattgctattgggagaaagtggcattagtttgatgtaaataaaaggatcacgaatgcttgtgttctcagaagatattttttcctgaggggtattgtgtcttccaaaaatgatacataatatacatttaaattcagactttgtctttagaaagtcaaaagcagaatgtatgctcatttgagagc

SEQ ID NO: 2518 - DNA, 570 bp, Cricetulus griseus
agcgacgccgatggaccgccgcgccgagttcgggcgctggaaggcgcatagcctgggcaaggcggacctcagccggaaaggcagcgtggacgaggacgccgtgcgggtggtgcagctcctgaacgcgcaggaagagttcttcaccaccagctcctgcgccggccgaatcctcctcctggacgcgagcacaagcgattctgggattcagaaacagcactgctgctggctcctggtgacacacaaaccttgtgtgaaagatgatgtgatggcagctctgaagggcgcaaccagcaatgctgtcctgaagtttgaaccatttatcctccatgtacaatgccagacactgcaggacgcacagaccctgcactcagcggccgttgcttctggcttcaggaactctggcatcaccgtggggaagcgaggaaagaccatgctggctgtccggagtacacatggattagaagtcccattaagccatcagggaaaactgatggtgacggaggaatatattgagttcctgttaactatagcaaaccagaaaatggaggaaaacaagaaaagaattgaaag

SEQ ID NO: 2519 - DNA, 570 bp, Cricetulus griseus; identical to SEQ ID NO: 2518

SEQ ID NO: 2520 - DNA, 474 bp, Cricetulus griseus
  misc_feature (439)..(457): n is a, c, g, or t
acaatcccaccgcatgcacacaccatagcaaaataaaaaatttaaaaaaagaaaagcagtcaggactgctgagactggaggattgctgcaagtaaaaggccagtcaggaccacaaagtgagtaccaggctagcctgggggtacagaataaggccttgttccacaccctccaccacaaagtagttgacatgacatatgaagtcatcatttgatgtgatctcagctatacgtaggtaaatagagctatttaccactgctaagcatgatgaatggtaaagctatgggtaatttctaatgactttcctttaaaatttttgtttattattatgtggcatggtgtgtgtggggtggtgtagggtgggtgggtgctcctgccacaatgcaagtggggacagctccatgcagttggttctctcctcccacctttatgctcacttcannnnnnnnnnnnnnnnnnnttctctgtgagttcgag

SEQ ID NO: 2521 - DNA, 558 bp, Cricetulus griseus
atcatatcataaagtcaagaagcttattgtagataaatctgagaagttcaatgcaaggtgaagagagagaggaaaataattactataaaaacctttatagtcttaatatgtgattctaggaaggaggaaagaacagtttagtccagttagcttcaaataataaaattgtgcatctgttctccttcccataacttctgtattctaaatggacatggtagcttagtgttatattgaaaaaaaagctaaaagggattaataatctatccatattgaagatataaatgagatttattattctatacttatgttactacttatgataagatatattatttatttagtcataattatatacaatatgatgtatgttccactatacccatgaaataaggaataaaagcaaaggactggaagaatcattcaaggaaatcagcttaaagcctgaagccatgtttattttgctgtgctcctaggaacactgcacacaggacagcatgcacagaacagacttgagaggtatttgctagtaaactaaatgcacaaagcaccaactgtagt

SEQ ID NO: 2522 - DNA, 452 bp, Cricetulus griseus
aggaaagagtgctggaggaaccacagacctctgagtggggtttatgtgacccacctggtggcacaccctgcctgcactgcctgggcaggacagctttgcctgtgcccagcttggatctgccattagggctgctgcctcaggagctgtcccctcgtgtggtactgaagctgaaatcaaggatgggcttctgagcctgggagcctgtctccaaaacctgcaaaccagttagttgagtgttatcccaggtaccaagcacctgtgggccacagctctcatccctgggcctcctcaagttgctagaagggataccgcctgaagagaggctgccatgcaggtttgttctttctcagagcttgcagctttgtgaagatgtcaatgggctgacaagctgcctcactgctgtaccctgtaccacatatagcctgaccaagggaggaaggagggccctccag

SEQ ID NO: 2523 - DNA, 435 bp, Cricetulus griseus
tgaaaacaggcagccttctgctgaagggaaaacctctgtagacagcctcataatgtaggaagaacacctgatgggtcagttcccctcactgtacatcagccacccaaggagatgtgctctagagtgacacactcagccccaggctctgcacagtcattctgactcagtggggcaagagtgctgctccaacatggcagatctggggaaagctcccccagcaggcttctgacacagtcaaaagccggttaaaagtcatggtcttcaacagccaaagcccctcagctttgccagtccatctcccatctgtgctggtgacagggaggtagggttgattgaggactgagatcaagattgtaatatctgccaaaaaacagaacaggataacacttaggatgtaaacaaaagaatccttcaccttggcatacgggataaaag

SEQ ID NO: 2524 - DNA, 381 bp, Cricetulus griseus
ttccctaccgctgcttagttggtgagtttgtaagtgatgcccttctcgtccccgacaagtgcaagtttctccaccaggagcggatggatgtttgtgagacacatcttcactggcacacagtcgccaaagagacgtgcagtgagaagagtaccaacttacatgactacggcatgctgctgccctgcggcattgacaagttccgaggggtggagtttgtgtgctgcccgttggctgaggaaagcgacaacatcgattcggctgatgcagaggaggatgactccgatgtctggtggggtggagcagacacagactacaccgatggcggtgaggacaaagtggtagaagtagcataggaggaggaagtggctgatgttgaggaag

SEQ ID NO: 2525 - DNA, 559 bp, Cricetulus griseus
tgacagtgtggcgtcagatgaagacacagacgtggaaaccagagcaagcaaggcacaccggcagaagcttcaaacactccagtgtgagaattcaagcctcaggaagcaggcgacaaccagtgcctgtcaggtacagactggccctgactacccagacacttcgagccactcgtccttaaagcgccggccatctgcccggggcagtaggcctatgtccatgtatgagactggatcaggtcagaaaccgtacctccctatgggggaagctaaccgccctgaggaggccaggacgagacttcaacccttccctgctcatattgggaggagtgcacttgtggcctcctcttcgtctctgccttccttcccctccacactttcctggtccagggacgaaagcgcccgaagggcatccaggctggagaagcagaacagcacaccagagagtgactatgacaacactccctatggcactgagccagatgacacagtgtcaaaccggaaggggcggcaaaggagtatggtgtggcaaggtgatggctcattgccagacacaacagag

SEQ ID NO: 2526 - DNA, 528 bp, Cricetulus griseus
  misc_feature (53)..(72): n is a, c, g, or t
gccaacctgtacagttttgaccctgtatcagaatttttttaaaaaaatacaannnnnnnnnnnnnnnnnnnnagctcagtgataagactcttgcttcatatgtgacaggctttgttcaataccacaaaaagaggaggggggtttaaaaattaagactcaattttatttggagagtaatgtcagagaagaggagaaacctaaaagatctatgaatattcagatttgacagcactgtaactattctgtaaaaatgaaaaagagaaaaatagaaaccctatgtaaaatctaaaatgaaaaaataaaaggcagatacataggatgaaggacattagaacaaaatgttgctgtactcggacttttctgttccgcctgccagctcccaaataaccacacagagacttcttattgattatgaaagcttagccagttggggcttgtttctacctcttataacttaaattagcccatatcttttaatctatgttcttacgtgtgactctgttacctttactttttaaagccaatgct

SEQ ID NO: 2527 - DNA, 526 bp, Cricetulus griseus
catgacatcatctccatcaagctgttccagctcatggtagaacgcacgcctgaggaggaaagtattgactggaccaagatcgaacctggggtcaacttcctcaggtcccctaaagacaacgtggatgaccccactggaaatttccgaagcggtcccctgacggggtggagagtgttcctgctgttgctgtgtgcactcctgggcatcattgtctgtgctgtggtgggcgccgtggtgtttcagaagcgccaggagcggaacaaacgcttctactgagtggccagtctggctggaagggcctgaccttgggccagagctcttaaatgaactttttttctactgggattgtaaaatcaaccaaccaaccttatttcttaactgtttcaaagaaataattaaagtattttcatacatttatgcttctggcccagctgagacagctggcaggactggggctcagggctcccctacagctggaggctcttgccccatctcgaggcatgctcctgggagcaggggagtctgt

SEQ ID NO: 2528 - DNA, 445 bp, Cricetulus griseus
  misc_feature (8)..(26): n is a, c, g, or t
  misc_feature (73)..(89): n is a, c, g, or t
  misc_feature (91)..(120): n is a, c, g, or t
gttttccnnnnnnnnnnnnnnnnnnngctttggaggctgtcctggaactagctcttatagaccaggctggtcnnnnnnnnnnnnnnnnnannnnnnnnnnnnnnnnnnnnnnnnnnnnnntaaaggcatgcgccaccacccccggccaaaatttttttagatatatactttgtggccttttgcaaggatgagttagccctgctttgctgaggaggaacaatatgcagttttgttaccctgtgaattcgccgagagggaatagtgtgtgtgggagatgagactagaggtgtggtagactctggatagacagtgtaacgttcctttgtttcatcccaacaccaaaatcacctggcccttatgagacagagggctggctacagatgtgctgggtctgtgggctgtagacagcacctgaaaggagagacaggaaatactcaactccccc

SEQ ID NO: 2529 - DNA, 537 bp, Cricetulus griseus
gcgagggagaggacttttagcccatcaaaacctgcaaaatctttacatacacagaagaatagacagttcttcaatgaaccagaagaaaatttctggatgatcatggttgttcggaatcctatcatcgaaaagcaaagtaaagatggcgagccaattgtggaataccaagaggaggaactgttggacaaggtgtacagttcagtgctgcagcagtgctatagcatgtataagctttttaatgggacgtttctgaaagccatggaagatggaggtgtcaagcttctaaaagaaagattacagaagttcttccatcggtatttgcagaccctacatttgcagtcatgtgacctacttgatatttttggtggaatcagcttcttcccattggataaaatgacttacttgaaaatccagtcctttattaacagaatggaagaaagcctaagtgtagtcaaatataccgcgttcctctacaacgaccaactcatctggagtggattagaacaagatgacatgaggattttgtacaaatatctc

SEQ ID NO: 2530 - DNA, 495 bp, Cricetulus griseus
tttcaagctgaagacagagacgacatgctatcatggatcaagactatccaggaaagtagcaaccttaacgaagaggacactggagttaccaacagagatctaattagtcgaagaatcaaagaatataacagtctgatgagcaaaacagaacagttgccaaaaacacctcgccagagtcttagcatcaggcaaactttgctcggtgccaaatcagagccaaagactcaaagcccacattctccaaaggaggagtcagagaggaagcttctcagtaaagatgataccagtccacccaaagacaaaggcacttggagaagaggcattccaagtattgtgaggaagacatttgagaagaagccagctgccacagggacctttggagttaggctggatgactgcccgcctgcccacaccaaccggtatattccattaatcgttgacatatgttgcaagttagttgaagaaaggggtcttgaatatacaggtatttacaga

SEQ ID NO: 2531 - DNA, 531 bp, Cricetulus griseus
  misc_feature (390)..(405): n is a, c, g, or t
gtgagcagctcttgacaaatgttctggaaactctccgtggtgatggaaatgttctaatagcagtggacacagccggcagggttctggagcttgctcaacttcttgatcagatttggagaactaaagatgcaggccttggtgtttattcactggccctcctgaataacgtcagctataacgtggtggagttttctaagtcacaggtagaatggatgagtgataaattgatgagatgttttgaagacaagagaaataatccatttcagtttcgccatctctctctgtgccatggtctttctgacttggctcgagttccaagccccaaagttgtacttgccagccagcctgacctggagtgtggattctcaagggacctctttattcagtggnnnnnnnnnnnnnnnnactcaatcattttaacttatagaacaactcctgggactttagctcgtttcttaattgataatccttctgagaaagttacagaaatagagctgacgaaacgcgtgaagcttgaagggaaagaactcg

SEQ ID NO: 2532 - DNA, 547 bp, Cricetulus griseus
aggttctggccatgttcacagtgctaaatacaggaagccaagaactacggcttcacctggcccaaagatgcctgctaccacctagtttgggccagaactggctacttcctggactggtcctttgggttttggcccttggctccagtgagctctgcagtaaaccctgcagttgaaagctaagctaatgtaatgtgaactaatagtttgccatgccaaaaagcacttcagaaagcagagtatgttactgggaaggcaagatcctacttagaaaactcacagctcctctggacgacatgatggccccatatattccacaggctgtgaattggcttcttccatctgctgagctgggatgaggcaacacctactttaagaaaccactgaaatcttgtgctgtctaatgcatgccttgagtgtgtttgttgtttaaagactcttcatggtggaaggctgctggtggtgtcatgtgcccaggtagcctgaacacccattccccgtgtgtacttgtgggctatgagatgcccctcttgattggcctttggtccca

SEQ ID NO: 2533 - DNA, 557 bp, Cricetulus griseus
ttgacgacattgtggtgctgggcataaacctcagcaagtttaacaagctcacacagtttttcatatgtgttgctggagtttttgtattttacctaatttatggatacttacaggtaaaaagtagtcctttgtttatcatagtattagttatcttagcacttaatgtccatgttggttttgactacttgttttcaccatgatatttttatttacaggctaacggttgactcaaagcttgagatttttgtagaacaatagtctcttaaaaagactactaagagtaaaggtcagaccaacgaagttaaatattttaagttggaaaggaaggctatcttgtaaaattcaagttatgaaagtaaacttataaatatttaataaaacaggtgattgcagctgtgtgttcatatctttaaagacttaattcacttattttttatttgtatgagtgttttgcttgcatatatggaagtgtaccacatgtgtgcttgttgccccacgaagccagaggaagtagggcattggatcccctggaattggaggaggtagggcattggatc

SEQ ID NO: 2534 - DNA, 142 bp, Cricetulus griseus
tatctttcccaccaatatctttggtttcctttttcttgaaaattatgttacgattctgtcatttctttgcaagtgactggtctttcttctttaattgcattataggtcttttttttctgttattaattggtatcacataact

SEQ ID NO: 2535 - DNA, 343 bp, Cricetulus griseus
tgccgcgcgtcctggtgttggtaggaaactgcgagaggaattcagtcattgaagggggcgcggcaccactgagcgatcttcgcggccccctgcagcagccatggcgaaaggccgagtcgccgagcgaacgcagacgggggcgttgcactcgacctcggcggggcaccgggcaacggggacgcgtggttcctccactcctggcagcagagaccacctgaagggtgagtagacctgcgggccggagctgaggctactccaaaggccggaggggcgggtaccccagcaggtcgtccggaaaaacggacctttcagctcccaaggaccgcagcaggagagtggtgta

SEQ ID NO: 2536 - DNA, 288 bp, Cricetulus griseus
  misc_feature (131)..(148): n is a, c, g, or t
taaacagcaagggatcctgtttcacaggctgttttatttgtgttaagggaagaaccctgggcaggggattggcggttacacattcgtttaagaagtcaggctactgtaaaaattaaaggtgaattcccaannnnnnnnnnnnnnnnnncttcgtcagggaagagggaaaaaaaagtttccttctaaaaaagattgggaatttagagggacttccattggctttaattcagtattttcccagctaaaatcattggaattcagttttatttccttcctttccttccgttg

SEQ ID NO: 2537 - DNA, 377 bp, Cricetulus griseus
aaaacctgaacaggctttcctctttctgctcagctgcaactaatgcaaactcaagagttgttatagtattgagatgtaaatgataataaaggaattattttaaggaatattagaaatgctagaatgtgctttacagtgcatttgtggaaatatcttctactttcatagtcacctaagaaatgactggtttctaatattaaaagatattgctctttatatatgaatgttttgtctagttctcattgcatcacaaaatgtcatttttttcctgtggaagtattctatctgaagctatataaatatgtaaccactctgctgtgtcttaatccaattggaaaagacatttttgttttgtttttatagtaacactgtgagac

SEQ ID NO: 2538 - DNA, 580 bp, Cricetulus griseus
aaattgaggagtgggtggcagctggagttgctaggtactgacccttgacctcggggtgctcccccatctctcaggcgtgatggctacgggcgcggatgtacgggacattctagaactcggtggcccagagggagatgcagcttctggggaccatcagcaagaaggatatcatcaacccggacaagaaaaagtccaagaaatcctcggagacactgaccttcaagaggcctgaaggcatgcatcgggaggtctatgccctgctttactctgacaagaaggatgcacccccactactgcccagtgatactggtcaggggtatcgcacagtaaaggctaaattgggatccaagaaggttcggccttggaaatggatgccatttaccaacccagctcgaaaggatggcgctatgtttttccactggcgacgagcagcagaggagggcaaggactacccttttgccaagttcaataagacggtgcaggtgcccgtgtattcagagcaggagtaccaactctaccttcacgatgacgcatggactaaggcagagactgaccacctcttcgacctcagccgccgatt

SEQ ID NO: 2539 - DNA, 580 bp, Cricetulus griseus
acagaagcgagaatcttgacaaccccatccagacagtgtcgctcggccagtctctcttcttccacttcccaccgctgctccgagacggcgagaactatgttgtgcttctggactccacgctctccagatcccagtatgactacgtcctgccgcaagtctctttcactgcagtgggctaccacaagcacatcactctggttttcagtcccacgagaaagctacctgagcaagacattgcacaaggttcctacatcgccctgcccctgacattgctgctcctgttggcaggctacaaccatgacaagctcattcctttgctgctgcaactgacgagtcgtcttcagggagtcagagccctcggccaggtggcctctgatagcagtggcccagaggacatgaagagacagaccaagaaacagaagaccagacgcacgtgaggaagaaaggctcgtcccctgcagatggcacaaccagggctgccacctgcctgggacaaaagcacatactcactcacttcaggcaggccctgggccctgtgacccttcttttggtgtcctgcctgtctgtcctctcctgtgta

SEQ ID NO: 2540 - DNA, 487 bp, Cricetulus griseus
attcatgcccattatcatgggctacaaagtagttttgtagagggtcacaggcatacagcccaatactttccatccaaggtttcatttcttacagcttccactttaactggtcaagctacctccacagaccttgaacatttcattgtgttaaatgaacaacctgctagaatccagagtgtttgtggaactggcctgagaatgggggaggggagagtagaggatttcggactggtctgtttttattcatttttgtatttgtaaatcaaaatacctcctcctgggattgctggagactggaaagagggacctttttttgtaaaggcagaagaatagctctgtggatcacaagttcttgctgccaagtccagtgacctgcgtttgaatcctgggaaccacaaggtagaaggagaaactgattcccactcacattgtcctatgacctccacgcacagcatggcatgcatgcacctgcaaacagacacacaaa

SEQ ID NO: 2541 - DNA, 545 bp, Cricetulus griseus
gcatcgggacaccgcgcgttcctacgtgggcgctctggatcccgcggcgtcttccggcggccttgaggtcgccactctggccgctctggctcgcctggcgctgggtgggcggcacagctgcgcccacatgaaccattggcattgtggccgcaatggtcgcggtcggggccgagacttcgccagccgtgccgcacccaagaagaaggtcagcaaccacatcccggaaagatggaaagactatcttccagttggacagcggatgcctgggactcgtttcattgctttcaaagttcctttgcaaaagaaatacgaagcaaagcttatgccagaagaatgtttttctcctttggatctttttaataaaattcaagaacaaaatgaagagcttggattgataattgatttaacatatacgcagcgctattataaagcagaggatttgccagaaactatttcttacataaaaattcttacagttggccatcaggtacccaacagcaacactatttttaaattcaaaagtgcagttaaagagtttttaaaga

SEQ ID NO: 2542 - DNA, 485 bp, Cricetulus griseus
atctactcttaaaaagcaactactaattttaaatattttacattggattgaacttttgtatattgtatacaaatgttgtatattgatacaaatttgaggttaatttttctaaaacatactgtacatacacttttaatattcaatgtattgtatctatacagctcatttaacaatgtaatacaaattctagtccttgaaagttattatcaaccatataggacaataaggaactgtagtttagtaattagtcaactataacagtcggacttgtagtcactttagatatgtttacaagtgtcaaactaatatattctaaagacaggtcatcttcagacacttcagcaatctactgaatatagcatttaacatgttttaataatataggttctttttttatgacaatgagacatgctgctcctggcagcaccaatctatgttagagaaaatgataggcatcaaagaaactccacatggagtttaatttc

SEQ ID NO: 2543 - DNA, 285 bp, Cricetulus griseus
accttaggtggctcaaatgatccctctgaatgcaaaagtattgattgggtgctgggttaatgggcttcataaaccagggtcattttatttctgggtgaaactctctcttgctcttttgaccatctctcagagggaggagtagacagtcaactactattttgttcttttgacttgagtcttgagacttttcacagtcatgatgttaatcagaatggcgttcgagccctctgaagctggttagatgctgcagtgatgtccttgtgtgactgctgtgacatcttcagt

SEQ ID NO: 2544 - DNA, 452 bp, Cricetulus griseus
aagctattcaatgctataccgaggctattagtttgtgtcctactgagaagaatgtagacctttctacattttatcagaacagagctgctgcctttgaacagttgcaaaagtggaaagaggtggcacaggattgtacaaaggctgttgaacttaatcccaaatatgtgaaagctctctttagacgtgcaaaagcccatgagaagctggacaataagaaggaatgtttggaagatgtcactgctgtgtgtatattagaaggcttccaaaatgagcagagcatgctgttagctgataaagttcttaaacttctcgggaaagagaacgccaaagaaaaatacaagaaccgtgaacctctgatgccatcgccacaatttattaagtcttacttcagttctttcacggatgatatcatttctcaaccaatgcttaaaggagagaagtctgatgaagat

SEQ ID NO: 2545 - DNA, 410 bp, Cricetulus griseus
  misc_feature (128)..(156): n is a, c, g, or t
agtgaggatatctggaagaaatttgagctgctgcccaccccgcccctgtcccccagccgccgctcggggctctgctctccatcctatgtgacggtcgctgcgtccttctccccgagggaggacgacgnnnnnnnnnnnnnnnnnnnnnnnnnnnnntggcaacttctccaccgcggatcaactggagatggtgaccgagctgctgggaggagacatggtgagtcagagcttcatctgcgaccctgacgacgagaccttcatcaagaacatcatcatccaagattgtatgtggagcggcttctcggccgccgccaagctggtctccgagaagctggcttcctaccaggctgcgcgcaaagacagcgccagcccgagccccgcccgcgggcacggaggctgctcctccacct

SEQ ID NO: 2546 - DNA, 324 bp, Cricetulus griseus
ctgcctgccagcctggagtctctgatcacctaagctgctgcagataccatttgcttctctccttcctggaaagcttccctttatgttttattttgaccccagatgttcagatgttttgcagtgtctgggacttgtgccccgtgttctttgttctgcttctttgcccccttccctcttcatggagtgattatgttgacaataatgtgtaatgcgcgttcttttcactggtttatctacagaaatttctctgggctttttttcggtgtttgattcaacactgcgcttaagtggggggatgttccattgaataaaagagcagtgtgg

SEQ ID NO: 2547 - DNA, 579 bp, Cricetulus griseus
ctttctaagatcagttctaaaactaggtattgcttttggaatgagtggtaaactccaatttttaaagagtgaaaaagacatggtagattgaattaatcactgttaaggcattagtgaaaagtataatatgctttaataatatgcaaaagagaagtgacagaaaagttagcaagttaactagggcagggggacgactcaccaggtgaggttcttgctgcacaaccttgaaaatctaggcttgaggatctcagttcagattcctggaacctgctgaaaaaacaagttagacatggcagtgaatgtttgtgactccgaactggctgggtggacatagacaggtagatcctaggaggtggttgaccatacaggctagccgaaactgccagcttcaggtttagtgagagatgctatctcaaaaaatatgatgagctgggcatgatgtcatactcctttaattgtagctcttgggaggggatcctagcctgatctacattgcaagttccagtgtagccagggctatacagtgataccttatcccaagcaaaaccaaatgtggtggagagtgacagaggacgacac

SEQ ID NO: 2548 - DNA, 600 bp, Cricetulus griseus
  misc_feature (346)..(364): n is a, c, g, or t
gataacctccaatggcactgagtcaccacccttatctaccctccaatgtcactgctcctgggtgccaagtctttggtctcagactacatgataggactacccactttcctagagccttcttctttcagtctccatagttgtatgaggtacattctatagtaaatctcctcaacaagcatatctttagcatatacgtgtgtgtgacctgtccattatctttccccggagaaccctgagtggcagaacaaggagccgtggctcatggtcgtcaggtactctgggcttgttcactgccctaaaggagcaatcagagatactctaggtgatgatgtatgctttattagannnnnnnnnnnnnnnnnnntgcagaagaaatgagcagtcattagatagctctctcctagatggctattatctccttactttaaagaatgccttcagttgagtggaatgtcagctaccctttaatttcttcctgtttcttggctctcagcatccttctgctccagcgcttctatactgatctttctgctttggtctttctgccacaccaggactcagagatgccctggtacccattgctgaagggctgtggttgtc

SEQ ID NO: 2549 - DNA, 600 bp, Cricetulus griseus
  misc_feature (560)..(560): n is a, c, g, or t
acaggcttttctagacttcaaagaataaagtcttgggtgaggtccattggtatagaaaggaactttgagccacccacacaaaattcacttggagggaaatcttgtcaaggacacttcgaggcagttgtgggtcacctgtgtctatcaacagaagggataccgtccctgaggaggggccccaggcccttgtcacctgtttgtcccatatacccatttctttgcttcacaggttttaaactggttttttgcatactgctatatatttctgtctctctctgtttatctcgcccccctcccctcccccctcctctttgcccagcattcttttgaattccttcatccttttctgtcccccatatctatgcaccccccccaggcaaagcagttctctgaatatcacatcacacaaggaacaaactcgaaacacacacgaaccagcctcagctgacacttggttactcaagcgaacaagagtcgttggcacgaaagtgggaacccaccaaaccaaccagccaaccaaacaggaaaattccataaaggaagaatgtactttgtctttntacattttggtatataagccatcagcatttagtgaaatta

SEQ ID NO: 2550 - DNA, 273 bp, Cricetulus griseus
  misc_feature (128)..(140): n is a, c, g, or t
  misc_feature (142)..(196): n is a, c, g, or t
  misc_feature (199)..(218): n is a, c, g, or t
  misc_feature (221)..(236): n is a, c, g, or t
  misc_feature (248)..(265): n is a, c, g, or t
atttcatctggatttgattacttaattcaaagaccatattttagctggccatataaccaagaagctatcagccagaaaacttgaaagttataagcatttcttgaaaataagattttcaaatgtagccnnnnnnnnnnnnngnnnnnnnnnnnnnnnnnnnnnnnnnnnnnnnnnnnnnnnnnnnnnnnnnnnnnnncgnnnnnnnnnnnnnnnnnnnncannnnnnnnnnnnnnnntccaaaacaatnnnnnnnnnnnnnnnnnngaaaaacc

SEQ ID NO: 2551 - DNA, 498 bp, Cricetulus griseus
  misc_feature (452)..(452): n is a, c, g, or t
cattaacattgtccgaaaacggttgaaccggcctctgactctctcagagaagattgtatatggacatctggatgacccagccaaccaggagattgagcggggaaagacatacctgcgtctacgggccgaccgggtggccatgcaggatgcaacagctcagatggctatgctacagttcattagcagtgggctgcccaaggtagcggtgccatcaactatccactgtgaccatctgattgaggcccagctagggggtgagaaagacctgcgcagggccaaggacataaaccaggaagtgtataatttcctggcaactgcaggtgccaagtatggtgtgggcttctggaggccgggatctggaatcattcaccagatcatcctagaaaattatgcataccctggagttcttctgattggcactgactcccacacccccaatggtggtggcctangaggcatctgcattggagtagggggtgctgatgctgtggatgtcat

SEQ ID NO: 2552 - DNA, 533 bp, Cricetulus griseus
ccccttggccccggcgggggtcccctgcgccttctcgccggacggccaggcctacttcgccttagcctctagtgacggtcacttgcgggtgtgggagacagccaacaaccggctgcaccaggagtacgtgccttccgcgcacctcagcggtacctgcacctgcctggcctgggcgccagcgcggctgcaggccaaggaaagtcatcaaaggaaaaaaaggaaatcagaagttataggaacgagtgaccaggttgatttgttggctcttggcacagcagttggtagcattttattgtatagcacagtaaaaggagaattacacagtaaattaataagtggtgggcatgaaaacagagtcaattgcatacagtggcatcaagacaatgactgcatatatagttgttcagatgataagtatattgtggagtggagtatacagacatgcaaagtaaagtgcaaatggaaaggagacaatagcagtgtcagttccctgtgtatcagcccagatggaaagatgttactttcagctggtc

SEQ ID NO: 2553 - DNA, 491 bp, Cricetulus griseus
tagcagttaatgcatgcaggattatgggagcttgctccttaatccagcagttattagagcctggcagaaaagggaagctctccgactgggtatagcggtatatacctgttatcccagcacacaagaggtagagggaaagaggaccaggagtttaaggctatcctgggctacatagcatgtctaaggccaacttgggctatatgtaaccctgactcaaaaacaaaaacaacaacaaaaaaggacattagagaaattagacttgctccagtattcttaggatgtttttattcatccctatcgcctctccccttactattcagtgcttacgtaccttcaacactgcccataatccaaacctggacttttaactttggtaaacttttacaagcactgcagaaaaatctttagaggcctgtgtaggtaagccccagcagaggaattctatttgaagttcattcttactttcatatgggttggcccaaccatgtgtt

SEQ ID NO: 2554 - DNA, 579 bp, Cricetulus griseus
  misc_feature (248)..(274): n is a, c, g, or t
  misc_feature (359)..(377): n is a, c, g, or t
agggaggctctggcagagagtgaccgcgcagcagagggcctaggggttgcgattgaagaggaggggcacgacggagtccgcattgggggaagttccccactcttgagtcatcccagcccagtgtggatgaactattcctacagcagcctgtgtctgagcagtgaggagtcagagagcagcggggaggatgaggagttctgggctgagctgcagaatcttcggcagaagcacttatcggaagtggaggnnnnnnnnnnnnnnnnnnnnnnnnnnnttgaggacttgtacagccggcttgggaagcagcccccacctggtatcgtagccccagctgccatgttgtcctgccgccagcgccnnnnnnnnnnnnnnnnnnnccccacttcccggcgcaacagcctgcagcgctctgatctccctggccctggtgagatgacagccacccagctttcatctttcccttgagatttgttccctattggcaagatcttttcaggccctggtggtctacccagtctggggtactggcccccctcctggctgccccttccttcacttagtactctccctccctcatcc

SEQ ID NO: 2555 - DNA, 536 bp, Cricetulus griseus
  misc_feature (479)..(479): n is a, c, g, or t
tagaagactggtttgtttcatgtgtgtaagatagggtgcattacatttgacaaagttagagatgggggtgaaggcaggacaggttaaaccctgtgctttgtaggtgaaggtgaggtgcattcgggggttttacttgcttctaaatttgaaggcagggggaggcacgggcaactcaacacagagaagtggcgggcgctcgcagtggcactctgtaaagagcacttaggcagtggtgtgcaacagttggcagaggccattatcaggccattaaagtcatctgcctgagagctgaagacaagctgcacttagcctgtggcatgctgaattcaagagctgtgtgtgcaccacccttgccagaactcatcagctgggaggatggagaagagcgtggggaacgaccctgcaccaggcaccgtggcacatggtgccagccttgtgtgggcagcagactggggcaagagtagaggggcctcttgcantattgggaagtgaggatggtgagtggagggtgaagctgggtggtcctgtctttctag

SEQ ID NO: 2556 - DNA, 373 bp, Cricetulus griseus
  misc_feature (99)..(99): n is a, c, g, or t
  misc_feature (350)..(368): n is a, c, g, or t
atagaactgaaatgactagaggtagaactgtaaagtgcaatatgataaaatatcctaagttgtatcaatgatcaaaatgtatatacatcaagatagttntatatttgtgcgtaaatatcgtaaacagaagaccctaagcagtcaacatacaataatctaacaatttaagttatctgtagctaacagttgctaaagttagttcactagaaaataggttaattacctatattccatcttaaccatacctttcccatccatatccttaaacttatctaaaagtctgagagtctgctcatcacattccacagcccccaaccctttctgaactcatcttatttttctatccattnnnnnnnnnnnnnnnnnnnatcca

SEQ ID NO: 2557 - DNA, 487 bp, Cricetulus griseus
  misc_feature (51)..(77): n is a, c, g, or t
tcaaggccatcctcagctacatagcctcattgaggccaacctgggctacannnnnnnnnnnnnnnnnnnnnnnnnnnacaaagtaattatggcagcatgatggctgagtgaaaggagagaacttattctacaaggtgaccattgaccttcacatatgtgcatgtgtgcatacaaaaaataaataaatgcataagaataaaaattaaaaggaaagaaaatcagaaaatccaagaagtatttccaaaatcatttgtgaataaaggagtcgagccagaattcaaacccacatctttcagaggccatactcattagcttccaagggcatgactctcatagataaaaggagagcatgtcagttttcagggacaggaaatgtccaagcttttaaaaatgttcaatatgtgctggaaagacggctcagtagttaagagtgagttctgctcttccagaggacctgagctctgtttccagcaccatgtgcgatggg

SEQ ID NO: 2558 - DNA, 348 bp, Cricetulus griseus
  misc_feature (101)..(118): n is a, c, g, or t
tatttatttatctcctacaaaaaggagaatttcattatttgacttttgctgtttgaaggcttttgccaaatgcttaacagtctgtaggacttgatttcccnnnnnnnnnnnnnnnnnnttgctctgaaaacaagggtctatgtaactaaaaggggtttgtttttgtttaagtcattcaaaggggaaatcttctcttgtccattgttaaaagaaaggtttcaatcaaaggagagttctcctcattctaaaatatacaaacagttctttgaaatggatgccaaatcaaactctaaaagggacgttttttttgcaaaagttttgagttaattctgtgtgcagggcttgagt

SEQ ID NO: 2559 - DNA, 254 bp, Cricetulus griseus
  misc_feature (161)..(161): n is a, c, g, or t
  misc_feature (201)..(249): n is a, c, g, or t
ctgactgaaaccagctgtggccaggaccacagaacatctgggtccatatcctgacctatttactcccttgctactctaggccaggggtactcagtgttgttttaactccattacactcagttaggtgtgtgtgtgtgtttgtgtgtatgtgcatgctgtangtgagagagagagtgagtctgtgtgcatgctgtaggtatnnnnnnnnnnnnnnnnnnnnnnnnnnnnnnnnnnnnnnnnnnnnnnnnntatgc

SEQ ID NO: 2560 - DNA, 538 bp, Cricetulus griseus
  misc_feature (66)..(86): n is a, c, g, or t
ttgagacaaggtttttgtaaccctggctggcctggaattcacagaactccatctgcctccaactcnnnnnnnnnnnnnnnnnnnnngtgtgtgtcaccactacctggcaaaatttctctttttattatgttattggaactagaaaaggatatggctttttcttctcaaaaactgttttaagttataagttgactccagatcactttgtggtaaggtgtaagtagtttccttgcaaagaagtaataactctggagtgacttttttattttcaagttagaattattcagtttagtgagtattctaatattcttcttagtgttgtctaaggtctgcagaaagaacatccattttatgctgtcagttacaaagttgtatgcagtaagtcttcttctatcccaacagccagctcccaagtaatgacatggagatttataattaattataaagcctatagcttaggcttgttcctaactaactcttgtaacttaaattaacccatttcattaatctacagtctatcgtgtggcgttacctttct

SEQ ID NO: 2561 - DNA, 483 bp, Cricetulus griseus
agttggcttcaatcccaaaaaggacattcattttatgccctgctcagggctgacgggagcaaatctcaaagagcaatcagatttctgcccttggtacattggattaccatttattccatatctggataatttgccaaacgggaatagatcagttgatggaccaatcaggctgccaattgtcgataagtacaaggatatggggactgtggtcctgggaaagctggaatctggatctatttgtaaaggccagcagcttgtaatgatgccaaacaagcacaacgtggaagttcttggaatactttctgatgatgtagaaacggattctgtagctccaggtgagaacctcaaaatccgactgaaaggaattgaagaagaggagattcttccaggattcatcctttgtgatcttactaatctttgtcattctggacgcacatttgatgcccagatagtgattatagagcacaaatccatcatctgccc

SEQ ID NO: 2562 - DNA, 543 bp, Cricetulus griseus
  misc_feature (17)..(43): n is a, c, g, or t
aaacccagggccagatnnnnnnnnnnnnnnnnnnnnnnnnnnnaaaaaagctaacaacaaatttccctaaattattccataaaatggaaaatgaaggaacatttctgaagtctttctaaaaagctattattacattgacaccaaaaccagacaaagacacaacaagaaagaaactgtaggtcagtatgtgcaaaaattctcaattaaaaaaagaaaaacctgcaaacaggacagattttaagttgaaggttttgtggctgggttgatgtcgcagtctcactgctgggagccttgcccagctatataaagcagtcaattccagctctctatcccccattactaggagagttcactaagggcactccaggagtaaagtggtgtagaactttgtgggagggaccaaccaatgattggtccaacttgaggcccacaccgcaagagggagtcgtgcctgacactgcctggatagccaggaaccagaggctagacaacccatagacccaggatagaaacaacacacaactgacaaattttttttttaaa

SEQ ID NO: 2563 - DNA, 475 bp, Cricetulus griseus
  misc_feature (105)..(207): n is a, c, g, or t
tggcggaggcaatggcgacaccgataccagctccgggagtcagtggctccggcatggacacgcgactggagcaggagaccgctcagtggctgcgctgggaccggnnnnnnnnnnnnnnnnnnnnnnnnnnnnnnnnnnnnnnnnnnnnnnnnnnnnnnnnnnnnnnnnnnnnnnnnnnnnnnnnnnnnnnnnnnnnnnnnnnnnnnnttcgagctcctatgggagctgggatttcgagaatgaatgacttgaccatcatccataccacacagggattttgcaggtacttggaaaagcagttcagtgacctgaagcagaggggcgtggtgatcagcttcgatgctagagctcatcctgccagtggaggcagcagcaggaggtttgcccggcttgctgcgactgcatttatcagccaaggggttcctgtgcatctcttctctgatataacccccaccccatttgtgccctacacagt

SEQ ID NO: 2564 - DNA, 501 bp, Cricetulus griseus
taaaatgcagaagaaaacgttatccctcgtgagaggacattgcaactgttagcagaaatcctgaaaaccagcaaccaggaggtgccctttgacgttcctgagttgtggtttgaagatgacagctcgtccctgagtgcttcatcaccccctgcagtagaaaccatcactgagaagatgttgttggatacctgcaataggcgcaagaacaaagacgcatataatatcttcctcaaagctcaacgacaaaacattgtatttagcagtaaaacttacagcacattgataagcttgctgctgaggagagacagttttacagaagcaatgcaagtgaaagattttgctgagacccacatcaagggcttcacactgaacgatgctgccaacagcctcctcatcatagcgcaagttaggcgggattatttgaaagtggctctggaaactctaaaagcagccttggccctgcagcatgccccctctcaagtagcgatcacccgcctcatt

SEQ ID NO: 2565 - DNA, 173 bp, Cricetulus griseus
taacacaggggaatcacatgctcctccctccccttcatcctcatcaaaatgaggtgtctctcctctcccatgcagggtaaagcaggagattgtcaccaaagttacatcaagctccattggcccttggaatgaagagctggagaaccgacccccagcagcacaaataggcccct

SEQ ID NO: 2566 - DNA, 244 bp, Cricetulus griseus
  misc_feature (40)..(58): n is a, c, g, or t
tacctgtactagaaataacagcatctaaagtgaagacttnnnnnnnnnnnnnnnnnnntagcgactcctaaattatccttaggactctgcattaactttataatgtccttgctattaaaaaagcatatttgtcacaaaaatttagttcccggtttacaactgaacatgtttgggggttgcttaaataaatgtaatccctgtaaacatctttttgatctgggattttgtttttattttaaaaggg

SEQ ID NO: 2567 - DNA, 566 bp, Cricetulus griseus
gaactgactcctttgacacccgggtgtgagtcaccactctgattctctgttatttccctgattgacataagggagatatggtctgttcccagagctgagtctgccaggggttcagctgagtggatgacaatggaaaaggaacccaatctatagagactgtgatacgtgcagagggtgtgagaaaggatgagttggggggtgttgtacaccctataatgcattgtcaggttttcatttccctcagctcacttctgaacaatgaggatgctgggagaacctttgtctgagggtagtttatgtttgggaatacttggaatttttccagagtctcatcttcttattctacccacacatacatgtacaaggttgctaatatcaggaattgtaggtgataggggtacatactggaacccctggctctctgcatgtagctcagaaccacgctaaccactggcccaagtctgcaacattgtcttgagtgactgctgtctggatggcataagatcccagttgcttccccctttcacccatcagccacagttccccaaggatgctctcaggaaaga

SEQ ID NO: 2568 - DNA, 506 bp, Cricetulus griseus
  misc_feature (157)..(157): n is a, c, g, or t
aactgcacattagagttagctactctaggtgaggacatgtatccaaggaaaggtttttatataatatgtctttgtgatgaattactaagaaagggtcagagctttcagtgtgaagatccttttgagtgctttgtaacattgttcaatcaaggcttantctaaagtttaaaattctgtttccttaaactatcagttttctgaacctttgtcacactgactagcttatgctcttggtttgagagatgggttcagttccgagtttgatctggtaactgtgtgaatttggagagtgcttacctagtatgcataagactttgggctccatctccagcactgcattaacccagcatgattatactcccatcacttggatggaggtaggaatttcaggagttcggggttattcagctatataaccatttccaaaccaaccaggactacagaacgccctatctcaaataaataaaaaacgcatttaccaagtagttcacttaattaaaaattaa

SEQ ID NO: 2569 - DNA, 330 bp, Cricetulus griseus
  misc_feature (259)..(278): n is a, c, g, or t
cctcttctgcataattcttgtagttgctttttacaagtataagtgcccttcaccttccctcttcccattctctctgttgacgaccttaggcctaagtcttgttagaaaaagcctgaactggaagaaaagcctacctgtagctttttttgggtgaccaatcagcttccaggccatcaccatgaccttgacctatggtgaatcttgcttgttctccaccacacatgggctataacagccactgctgcccctcttcaaccannnnnnnnnnnnnnnnnnnncccgtgagagcacacgtgagattcattgctatccttttgtagaaagtactgt

SEQ ID NO: 2570 - DNA, 580 bp, Cricetulus griseus
cgctggctagcgtgttgcagcggccgatgccggtgaaccagcatgggttttttggattcggaggtcgtgcagatctgctggacctgggtccggggagtcctggtgatgggctgagcctggccgcgcccagctggggtgtcccagaggagccgagaatcgaaatgcttcatggaaccaccacactggccttcaagtttcgtcatggagtcattgttgcagctgattcccgggccacagcgggagcttatattgcctcccagacggtgaagaaagtaatagaaatcaacccttaccttctgggcaccatggctgggggtgcagcggattgcagcttctgggagcggttgctggctcgacaatgtcgaatctatgagcttcgaaataaggagcgcatctctgtcgcagcggcctccaagcttcttgctaacatggtgtatcagtacaaaggcatggggctgtccatgggcaccatgatctgtggctgggataagagaggccctggcctctactatgtagacagtgaggggaaccgcatctctggaacagccttctcggtgggttctggctccgtgtatgctta

SEQ ID NO: 2571 - DNA, 520 bp, Cricetulus griseus
aggtgtcaaaaatggagagaaaatcagctgaaatcgggaccccacagcttctttaaggttattaaggccacaaagccgaaaaaatgagaagaaaagtgtgcattgaagtcaactcatctaaaaggcattttgttgaagaattttaatactgcttcttgaaccagattgagttgcctgaggagagcagtttacagcctcatcatcttatcctgttagttcaaaaaggataaatactacaaaaatactctgtcagatgtatagcaaaacaatacaaatacaaaaatctaataaaatcccaacaccaggcatgagaaaccctcttatgagtagttggtcagggttgtctaagagactccccaaacattacaggctattctattgctattgtcccccagaggtgatgataagtttatattgctgaagataccatgtacttcagacatgagattcagaggcttgagctttaactgacctgacaatcttctacccaagtattgattatctttcatgatcacagaag

SEQ ID NO: 2572 - DNA, 513 bp, Cricetulus griseus
tatatacttagtaatttataaaaccattgttgtaccacaggcatttaaactacactagtcttgcatttggtgaagaaaaatttgtttagggaaactttttatatatgttttaggtcacattgtattggttatattccttacaaacttgagaaaagtttgacaaactattctgagtcatgcattatggcagaagcaacccttcaatattaagttactaagttatttatcttttgtactagctctcaggtggcgatagtttattaaggtatgtctgtctgatctcattatatattggattgtacctctaatactgtggaacttttttggctattgagactctttggcatgagtacttaagaggaacttgaggcagaaaaacagaggagtctctcagatggcccacttttttgctcttgcgccctcatgtttaccagattctctttctttaaccactgacctcggaaaagatacatatgtagatttattaactctaaattgaactggagttagaat

SEQ ID NO: 2573 - DNA, 526 bp, Cricetulus griseus
agccatctttgcattgttcccgggtcctcctcctcctccgcggcggactccggcagctctctcgccagagtcctcgagctccagttctcgcctccctcgctgcagcgcatcaccggcgtgccccaccatgtcagacgcggccgtggacaccagctccgagatcaccaccaaggacttgaaggagaagaaggaagttgtggaggagacagagaatggaagagacgcacctgccaatggaaatgctaaagaggatggagatgaagatgaggaagctgaggctcctacgggcaagcgggtagctgaagatgatgaggatgatgatgttgacaccaagaagcagaagaccgatgaggatgactagacagcagaaaggaaaagctaaacttaaggccaccgtgacctattcaccctccacttcccgtctcagaatttaaacgtggtcaccttcgagtagaggagcaggccccgcccttagcgggcagtgccacccacagatgacatgcgctctccaccaccccaccaaaac

SEQ ID NO: 2574 - DNA, 533 bp, Cricetulus griseus
cggcgcggatgtggcgaggctgctgaacgcaggttccgcggtatggcggggacggcgctgaagaggctgatggccgagtataagcaattaaccctgaatcctccagaaggaattgtggcaggccccatgaatgaagagaatttttttgaatgggaggcattgatcatgggccctgaagacacttgctttgagtttggtgtttttcctgccatcctgagtttcccacttgactaccccttgagtcctcccaagatgagattcacctgcgagatgttccatcccaacatctatcctgacgggagagtctgcatctccatcttgcatgccccaggcgatgatcccatgggctatgagagcagtgccgagcggtggagccctgtgcagagcgtcgagaagatcctgctttcggtggtgagcatgctggcagagcccaatgatgagagtggagcgaatgtggatgcttccaagatgtggcgggatgaccgtgagcagttctacaaaatcgccaagcagatcgtacagaagtctctggg

SEQ ID NO: 2575 - DNA, 345 bp, Cricetulus griseus
tcacagacatctctagacccaaggacttgtgccccaggaggagccgaggctaatgggtgcccgcctcagccctgaggccaacgctgaggtgccccgtgaggcccgcgaggcccttagtttccacggggatgccactggcacacaggtgcatctggatgaccagaggagcacagcgcataggctatccacgtttcatgatggcattgtgttcagccagcgtccagtgtggcccggtgagcgtgtagcgctgcgcgtgctgcgacaagaagacggctggtgcggtggcctccgcgtgggcttcacgcgcctggaccctgcaaatgtggccgcatcctgcctgccgcc

SEQ ID NO: 2576 - DNA, 221 bp, Cricetulus griseus
gtaactgctcttagctctgagagcaatcgccgccgctttcccggaacttgagtggatacaatcaagtggtatttaaaatctttctggaactaaagacatgaggctgaagatatctctcctaaaagaaccaaagcatcaagaattagtgagctgtgtaagttggacaacggcttgagagctggactcatgcagcgatgatcaccagatagtgaaggggaact

SEQ ID NO: 2577 - DNA, 555 bp, Cricetulus griseus
tgctggagatatgttgtcttctgttcccagctggcagctggctacacctggaggagacatggagcagcaagatgatgaatccctggagtccccgcaggcctgtgtggagaactttgttctaccccaagagatgatcgtcgaagtggagggagaagacgctgggtccctggacaccatgccccagctctagcaatcaactcgccaggatatttgccaaggaagctgccaagtcacctagcctggagtatgcagtatgataaaaagaaaactctgcctcaggacggaaagcaagagccagagcctgagattgttcctctgagctcagcatctctctgtggtgcatgaaggctcctgctctatcatatgcagacacatgatggtaccaactgattaaaacctcggggctggagacaagccccagtgattatgagcactgactgctcttcccgagaacccaagttcaattcccagcacccacatatcagctcacaagagtcagtaactccaatctaggacatctgatgctctctccctgcctctgcaggcacggtacat

SEQ ID NO: 2578 - DNA, 580 bp, Cricetulus griseus
ccatcaacgtgggacgtgctggagcagccagcctggatgtcatccaggaggtggaatacgtgaaggaggaagccaagatggtgtacctgctcgagtgcttgcagaagacacccccacctgtgctcatctttgcagagaagaaagcagatgtggatgccattcacgaataccttctgctcaagggggttgaggctgtggccattcatgggggcaaagaccaggaagagcggaccaaagccattgaggcatttcgggaaggcaagaaggatgtcttagtggccacagatgtggcctccaaaggcctggactttcctgccatccagcatgtcatcaattatgacatgcctgaagaaatcgagaactatgtgcaccgaattggccgcaccgggcgttcaggaaacacggggattgctaccaccttcatcaacaaggcctgtgatgagtcagtgctcatggacctcaaagccttattgctggaggccaagcagaaggtaccgcctgttctccaagtgctgcactgtggggatgagtccatgctggacattggaggagaacgtggctgtgccttctgtggaggcct

SEQ ID NO: 2579 - DNA, 578 bp, Cricetulus griseus
ttttcacttttgaaggtttaaccccgatcccagtgttgaaagactagaggctgaagggggtgagggaacttctgccccaggattttactgagaccagcttgggggcatacgaggcacaaggaatccagcttcgtgtcctaaaagccatccacaggtttcctacagatcgtcactgtacacaatctgggtccttttgtcccggtggcagcccttagggctgttctggacagcaagggaaccccagacagatttgccagtagcagcatccagcatgggctgtttgcgggctatgttgactttgagctgcacggattccacctgggtcccattgagctcagcaacggcctgatctgcaaactccatcttttcataggtgacgaaggcacagtttctgggtgggtccatggagaggtcaatgatgtttccaaagggagagaaggcccctcggaggagggtgggcgtcatgtcctctccatacacataaagtgtgttccccttccgaggggccctcctttcggggaatgagtctgacctgcggaaagggccctcgcgctctcggtcccgttcgcggtctttgt

SEQ ID NO: 2580 - DNA, 566 bp, Cricetulus griseus
atatgacacgtgtgccaacagtgagtcactgggctggctggggccttctctacactttgtgtgcactgcattccacaggaagagcattgcttctgctgggcaacatcacctatttgtggctatgctagtttttagactaaatgccttctctttttcaaatactaattccttatagtccagatactaacagttataattaccgttacatttatgttttgcctctataatccactggaattggaagctcaaagtgaggcaaatatctggtttaatttttccaaatgcctgtttcacacacacacacactgttatgaaatagacagcttatttctcatccccttagtttaaaaaaaaacactcaatgaaaatttactttctactatctaccagacatggtgttaaatgtagattatgttggttttgagcaatgaggacatggatgcattaaaaatgaactataaatgattaaccaacattaattgtgcatgtatatcactacatgaatacaacttacaaaagaaaaataaatagctagctttaaaagttcaaatactctattcatcgtg

SEQ ID NO: 2581 - DNA, 558 bp, Cricetulus griseus
aaaaaaagaagacctggtttatctgacgtcagactctcctaatgtgttgaaggacttatatgagtcaaaggcttatgtgattggagggttggtggaccacaaccatcacaagggactcacatttaagcaagcgtccagtcatggaattgagcatgcccagctccctcttgcagactttgtgaagatgaacagtcgaaaagtcctggcagttaaccatgtgtttgaaattatcctggagttcttggaaacaagagactggcaagaggcattttttacaatcttaccccaacggaaaggagctgttcctgcacacaaagcctatgaaaactcttctcaggaccagcagccccggccagaaggatgggacagttccagcgagggagagaactgcaggaatgaccccgcctcaccacataaagaagagcagggtccgcagagcagcccggtgtcctcagtgagttctgtcccacagtgaccaaccttcctagctgcccttccaagagaacctagagagcgtggcacttcacaggatactcagactacaagaaagttgattct

SEQ ID NO: 2582 - DNA, 578 bp, Cricetulus griseus
accagctgtgacagcctctccctgtcgtccacattccctccacgcacccctgcttggcttcactgtcttctggtctcggtgctactgaaactgcccccagaacttgaattctgattgaccctttctccctactgccctccagggagcccaagttcctgagctagctggaaactgggttcctctcgtgaccaagtacagctagtggcccaaagtgtgctgtccctggagggtgatactctgcagccaggcccttgtgagccacagacaccaggtgctgtatggaagctcagcacgtcttatgttaactcccgaggtgactcccccacccagacactgctcttctgccatgtgttcactgtcagtgctgttctggggctgctcttgaaaatgatgtgtgtcttacgtactggatactcctgaggcacactgggtggctgtcctccttgggctgggctcctctctaatgcttcaatgtagctggtatctgtcctcactgttcaagggttgagtgcctaccttcagttacttgccgaggtgtacattctagtgtggtgtatactggtgatactggtgggtgt

SEQ ID NO: 2583 - DNA, 600 bp, Cricetulus griseus
  misc_feature (411)..(456): n is a, c, g, or t
gtcgacccacgcgtccaggagacctgagttcagatctctagaacccatataaagctgagtgcagcagacagcatctataatcccagtgcctctacagcaaaatggagtggaaataggagaatccctaaaggatcacaggcctgctagtgtggcatgtgcagcagtaaacaacagaaagacctgtctcaaacaagatggaagaaaagaaccaccagcctaagttgtcctctgacctttacatacacaccatggcattcataaacatgtatgcatgtacacacatcacaatacacacaaagtattttcagttgcctaaacatacataataaagtggcaagtaattgaggaagacccttggggttgatctctggtctccacacacacatacaaaggaacacatgtgtgcatgannnnnnnnnnnnnnnnnnnnnnnnnnnnnnnnnnnnnnnnnnnnnnggtgttcacatccacaaaagaagcaaggagcctttgtggaagggatgggtgtgtcttgtcttgatgtgattatgggagtttcacagatatgtgcaagtgtccaagaacatcagattacacatattcatatgtgtagattgtgca

SEQ ID NO: 2584 - DNA, 280 bp, Cricetulus griseus
atctaaataagcctctggaagtgccaggctgccactgtcagctagatttgccaagtcatatacgcacatccagtccctaagtgcctatttggttgcttttgcattgtggggacacatggcacgcatgtggcattccctgctgtgcttcagggacccttcatttcactgttgagcaatacctggctttggttgcaggttctgtagcctaacacatgccattgccaactttggtcagactcacaaagatagaagggccagcatgtgatagcatacctgtgtc

SEQ ID NO: 2585 - DNA, 578 bp, Cricetulus griseus
  misc_feature (535)..(535): n is a, c, g, or t
aaaagccttatcagtgtggtgaatgtggaaaacgcttcaatcaaagctcaagccttataattcaccagagaacccacacaggagaaaaaccttaccagtgtgaagagtgtgggagaagctttaataacagttctcatttcagtgcacatcggaggacacacacaggagagagaccccatgtgtgtcctgactgtggtaagagttttagtaagagttctgacttacgtgcacatcacagaacccacacaggagagaaaccttatgagtgccacgattgtggcaagtgcttcagtaagagctctgcccttaataaacaccgagagatccacacacaggaaaagctgctgtcacagtcaatgtctaagtaagctcctgcggaaagacatcagtaaaagtattgtttgacagtcccctcctgttctgtgctcagctggcttaggaggcacttcttgggatttttgccattgtttgttcctatgcttcccaaacgtagccgagtcagatgtcagtggttttaagataaaaagtagctttntgtctaaactgatggtaatgacgtcttccaactcggggcctgt

SEQ ID NO: 2586 - DNA, 579 bp, Cricetulus griseus
  misc_feature (443)..(457): n is a, c, g, or t
cgttcagactggacagggtggtccctggttcccactatgtagctctgactggaatgctgtcagcttctatcaccgttggtgttacgtatccctgatcacctggtggagcctctaaagagaagaattactacactcatggctggcattttacgctcagtatttcagaagcctccaggcagactgcagactgtgaataaaggtgtggagtctctcattggtacagattggattcgtcacaaatttaccagatcaagaattccagataaagtgtttcagcctagccctgaagatcatgaaaaatatggtggggacccccagcatcctcataaactgcacattgtcacaagaataaaaagtacaaaaaggcgtccatactgggaaaaagatacaatcaagatgcttggactacagaaggcacatagccctcaaattcacaagaacannnnnnnnnnnnnnnaaaagttgaaagtggttaaacacttgatacgaatccagcccctgaagctgccacaaggacttcccacagaagagaccatgtctagcacgtgcctcaagagcaatggggaattggtggtacag

SEQ ID NO: 2587 - DNA, 556 bp, Cricetulus griseus
gttttccggttttttgggcgcggaaagcatgaggcgcgctttctgaggccgggagtcaactgcgatgagtggagaaagcgcctaagcgacgggtggatcccgaaggggatggattttgagcatcaggcgttcgtggtaaactctgtcgtttttgtttttttttaagggcaatgtctaatgtccagattaggtctctgccacccggggcagcggcttgagatcctcggtcctcgttcctgaagctctgcacccggtccaggagcgcccgactgtctctccaaacttcgttctcctttgtagccggcagataaaggtctaaactgagataagtcggcttaaattagcttcagcaaaccggcagggaaaacaaacaaacgaaaaagtccagtgccttggtgccgttttcctctcctcccagaaacattcgactctgaaccgagtggttcatggaacgaaaagagcactcctgtgagctgccaagaagtcacttgagtgcttctttcctgttcctcctggaatattcgcacacctgcaacagggacagaaatcatgacgc

SEQ ID NO: 2588 - DNA, 368 bp, Cricetulus griseus
  misc_feature (51)..(65): n is a, c, g, or t
cccttacccacctaaacttattttgatgcctcgtttttcaaagaggggggnnnnnnnnnnnnnnnttaaccggtacctcaaaaaaaaaatccctgaattttccccccccccccctcctgttggtttttttttcccctttcccccttccccaaggaaaaggtttttttttttttaggggccctggaattgaaaccaccccaaaaaccccgtggccccaactttgggtgtttaaaaccttttttccccgttttagaccttttttccaaaaatccccctcgtggggaaaattgtgggaaccaatccctgtttaaaaaaaaaccaaaaacccaacccaaaccacccccctcccgggaaaagggagggaaaaa

SEQ ID NO: 2589 - DNA, 569 bp, Cricetulus griseus
ttacagaaagaactccagacttgtgatcaagtgtctcttaatacctcacaaagtgagtccagtgatttggctggccgaatgaagcggaagaaactcttgaaggagtattatagtacagagtctgagccgttgacaaatggtggtcagagaccggcatcagaaacctttctacagttttcctcttcgtcttcagatgcagatgttcatgtcctggtgcgtgttcataaacatgtcagcatgcagatcaatcactaccagtatctgctgctgcttttcatacacgagtcgctcgttctgctttcggacaccctgcggaaggatgtggaagctgtgactggcagccctgcttctcagacttccatttgcattggggttttacttaggagtgcagagctcgccctgctgctgcatcctgtggaccactcgagcactctgcgctctcctgcttctgaaagtgtgagcccgctgcttcctgactacctaccctcagaaaatggggggtttttgtcttcaaagaggaaacaaggtgggagtagtatacatcgaattagaaatgctactcttaatca

SEQ ID NO: 2590 - DNA, 579 bp, Cricetulus griseus
agtgaaaggatgtttgaatttagcctctagtggcaattatctagtcaactaatgcctacatggctgagcccccataaaacccctaagtgatgatgttccttgatagtctgtggaagtgctagaacggtgcagccctgccctcatccttagcccatgtcctatatatcctttctgttttgctgtcctaagttaaagactttctaatatattggtggtagtgttactggaattttctgtcataaagcttgactctgggtctcaagacttgctctaaccccacattaagagaaaaaggatatttatacatgtaagtttatgggaatgtgaattcatttacagtttggccaaacctggtgaaacaggtattcacaattttcctctgccttgcccatagcagtgctttaagttataaaaaacggggaaatctatagatttggttatggattgtggttagttttcttagacgaagacttttgaggtggatgttgtttcctgtatgggccacattacagtacaaagacactttcttgagtttggtaagttctagcaaattactggcccctggtgggtatgttgtac

SEQ ID NO: 2591 - DNA, 579 bp, Cricetulus griseus
tttattagaaggggcaaatgcttatcattgtgaaaaatgcaataaaaaggttgataccgtaaagcgtttgctcattaaaaagttacctcctgttcttgctatccaactaaaacgattcgattatgactgggaaagagaatgtgcaatcaagttcaatgattactttgaatttccccgagagttagacatggaaccttacacagttgcaggtgttgctaagctggagggggataatgtaaacccagaaagtcaactgatacaacagaatgagcagtctgaagagaaagcaggaagcacaaaatacagacttgtgggtgtgcttgtgcacagtggtcaagcaagtggaggacattactattcttacatcattcagaggaatggaggagatggtgaaaagaatcgctggtataaatttgatgatggagatgtaacagagtgcaaaatggacgacgatgaagaaatgaaaaaccagtgttttggtggcgagtatatgggagaagtattcgatcacatgatgaagcgcatgtcatacaggcgccaaaaaaggtggtggaatgcttatatacttttctatgaacg

SEQ ID NO: 2592 - DNA, 579 bp, Cricetulus griseus
  misc_feature (397)..(421): n is a, c, g, or t
gacaatcaccctcatgcaaaattagtgtaaatcacaaaataccctataactggaggcactatgatgcaaggcttcatgttctaagatgggctttctatccgtggagacccacacggaaagcttgagtgttgtcgattctatgcaatgcaagattgatagacctctgttctgtccatggcacacatatcacatctgttctgaggtgatggtgatgaggtgttaagggatgctctgttgatctctcactcagtaacactacaaatgtcaaatacaagaactgacacaactttgccttaaagagcaccagactgggattggtcgcattgtgttaataaggaacacttaaagtgttcattgatgtttacgattttaatatttctgaaagccgttacagtgnnnnnnnnnnnnnnnnnnnnnnnnncttttaaattttttggtttttttaaacaaagaaatattttaaataaatcctatttcaacacagaaattgttgaaaactgtctcatagcaaaagataaaaatcatatttaagttttttgttttgtggccagtatagggaatggaagtgtcttgttaccc

SEQ ID NO: 2593 - DNA, 579 bp, Cricetulus griseus
  misc_feature (563)..(563): n is a, c, g, or t
attgtttttctataaatttagggtggtttttgaaaaatgacataagagagatatctgtcttagaagtgtgttatactgtacatttttgtttcctcatttatttgctttgagacatggtttgcctgtgtagaccatacatggcctcagactcatgtatgagcctccttcctcagcctccaaagtgctgggattgcaggtgtgtagtactgggtctaccgtgtactgcattttgaaaaccagaatattccagcatcagtttgcctattcttagaataagcagtcttttaaaaaattttttattacctgtttttggagtagaaatagttgtaaactgatactgtgttcagttcaaattctgtctctgccaataactaaccagtttcctgaagtggttttccctgtcctgctgaagctccctcatctgtgcagtgtgcagatggtctcttaagcaccttctcgtttcagagtgctgggtttttcgactttagtttttaatagattttggtgtaacacactagataggtatatgatttagatatttttatttcatctctacatatganaatgaaagtgaaaacc

SEQ ID NO: 2594 - DNA, 349 bp, Cricetulus griseus
aggcggaaactgagaactcttttcatctaaaaatatcttttaaaagaaaatctgtctgatgttggttaatatttacctcaattttattttaaacagaacatttggttatagtttcaaaagcttggtcttgatgccctgtatcacatgactatactgtgaggctgtgttggtcattttataacaatcctctaatcttaataggcattattaatgcactagacttaaaagtactaattctgccttttaagatcattggaaatattccccctaaaacttttacaaagttttccatgaattaaatcgattacacattcaaaatgatcatacgctcttgcaaggacagattttg

SEQ ID NO: 2595 - DNA, 576 bp, Cricetulus griseus
  misc_feature (271)..(292): n is a, c, g, or t
gaaagacagagatacagagtcagagagagacagagactgagagacagagaatttagtaactgcaggactgggtgggtagatatgcgcatgtgtagccagaagccaactctgtggtttctaatgctctccgtccacagttccatggcttctggagatgaaaaaggaagcatgctcttgcttacaaagattagtttctgagttccaagatgagtgatatatccttacacaaaggttcaccaagtaccaagtacgtatgaggtttaaactaacnnnnnnnnnnnnnnnnnnnnnncacacttacgttctgtggtgaaaagcaaaacgatggggtagaatgaaaagcaagaggcctcatctttgaggctggttctgtctccatacttccattctccacagcactaaaatccagtttgccatcatctttacttcctatggcttttagtccttgtgaaagaatgtcacgtaaatcctgataaacaggtttctcagtgtagtccagtaatttcacagtttgcatgtacttagcaatttcacctaaaacaataacacaatcattgtattactctaattcacaaa

SEQ ID NO: 2596 - DNA, 576 bp, Cricetulus griseus; identical to SEQ ID NO: 2595
  misc_feature (271)..(292): n is a, c, g, or t

SEQ ID NO: 2597 - DNA, 578 bp, Cricetulus griseus
  misc_feature (289)..(335): n is a, c, g, or t
ccccaggagaggagcagcggcgctgggaggaggcccggctaggtgctgcatccctcaagttcggggccagggacgccgccgcccaggagcccaagtaccagctggtgctggaggaggacgagaccatcgagttcgtccgagccgctcagctgcagggagacgaggagccgtcgtcagttccacccccatcagcccaggcccagcagaaggagtccatccaggctgtccgccgcagcctgcccgtgttccccttccgagaggagctcctggccgccatcgccagccaccnnnnnnnnnnnnnnnnnnnnnnnnnnnnnnnnnnnnnnnnnnnnnnnatcccgcagtacctcttcgaggagggctacacaaagaagggtatgaagattgcttgtacccagccccgaagagtggcggccatgagcgtggctgccagagtggcccgggagatgggtgtgaagcttgggaatgaggttggctacagcatccgctttgaggactgcacatcagagcgaaccgttctccgctacatgacggatgggatgctgctacgggagttcctctctgaacccgaccttgca

SEQ ID NO: 2598 - DNA, 554 bp, Cricetulus griseus
cggtcgctgcacacttccaccgttgccttgcgagcttttgaccccgaggtcggagtctctgcggacagaatgaggcatttaaagagaacttactgtcctgactgggatgaaagagattgggattatggaacgtggaggaacagcagcagtcataaaagaaagaagagatcacatagcagtattcgagaacataagcgatgcaaatataatcactccaaaacgactgatagctattatctgggaagcagatccatacatgagagagagtatcatagtcgacgctacattgacgaatacaggaatgatgacatgggatatgagccaggctattattactatggagaacatgaaagcagatatcagaaccatagtagcaagtcctctggtagaagtggaagaagtagctacaaaagtaaccacaggactcaccaccgcacttcacatcatcgttcacttgggaagagtcaccgaaggaaaagaaccaggagtgtagaggatgatgaggagggtcacctgatctgtcagagtggagacgtactaagtgcaagatatga

SEQ ID NO: 2599 - DNA, 555 bp, Cricetulus griseus
  misc_feature (460)..(460): n is a, c, g, or t
cctgtcccagcctaaagtgagaccaactcaagccaggcatggggtgatggtaccacagggaagacccaacaggtagcactgtcctccgggtccccgccatgtgggattcctatctctgagaagtaccagccagttagcagtggcctagaatgtgaagtgagagccagcctcatgtgcagcaaaagagaatttcatttcagttgttcaattaagtttcattttttggttgcctggggaaaactaaagaaaggttttcttacttttgtccctcgctctggttcccaccccactagcgaaaaactgagcaattccacattgttgaaatggctaggttgtgtttgtattggctgaattaagcctctataattatatatttcctctcttttgtctgttagtgcttcaatattaatgtgggacagaaatttcatttaatgaggacatgattttcccattgtcttanggttgtttaaaccacagctcatctccattcaagattccccatgttgtagccctcaactctgaactgacactgaattctgttctcacaagccgtgc

SEQ ID NO: 2600 - DNA, 568 bp, Cricetulus griseus
gaatgaagtatggaggacaagacttttgggcagatttgaatgccatgactgtatttgaaacaactgaatttgaccaactacgaaggctgtgtacaccaccctgtagtaatacaaacgctatttacaacacatattggaaattcttctgtagagaccactttggatggagagagtatcctgagtctgttgttcgattaattgaagaagccaactctcggggtctgaaagaagttagatttatgatgtggaacaaccattacattctccacaactcattcttccggagagaaataaaacggagaccccttttccgatcctgtttcatactgatcccatatttacagacacttggtggggttcccactcaggcttctctgcctcttgaagcaacttcatcacaaatcatctgcccagatggagtaacttcagcaaacttttaccctgaaacatgggtttatatgcatccatctcaggacttcatccaagtgcctgtttctgcagaggataaaagttatcgaatcatttacaatctttttcatagaactgtacctgaatttaaatatagaat

SEQ ID NO: 2601 - DNA, 578 bp, Cricetulus griseus
gactcctccgctgtggggtttgattacaaggagagattggccaagcacgagtcccagcaagactatgccaaaggatttggcgggaagtatggggtacagaaggatcgaatggacaagaatgcatccacctttgaagatgtggcccaagtgccctctgcgtaccagaagactgtccccattgaggctgtgaccagcaaaaccagtgatatccgagctaactttgaaaatctggcaaaggagagagagcaggaggacaggcggaaggcataagcagagagagctcagcggatggccaaggagaggcaggagcaggaggaggctcgaaggaagctggaagagcaagccatatccaataagcagacgccccctgcatctcctagttctcagccagctgaagacagaccaccctccagccccatctacgaggatgcagcgccgttcaaggcggagccaagctaccgaagtcctgttggtggaagtgagcctgatcctgtgtacagcacagaggctgcaggtgtccttgaagccagcagccagcaaaacttagcttacacctcagaacctgtctacgataccac

SEQ ID NO: 2602 - DNA, 427 bp, Cricetulus griseus
ccactcctcaggctctgccacgcttgctgtgtggggagtggaaagacctgagaaagtccttgtgctgggatctgatcagggaaagaatgcccttcaacatgaccttgggacccgggcagccagggggagattttaccacaaaaccaccaggcactaagtaagtgcttagcttagtgcagggtggctctggtcctgatagcacctgatgctctttcccttagaattggggtgacccacgaggcagacagggcacatcaaaccaccattgccttgaacacacctaaagtaaggcccatgtactttgccatatcctccaagtcttctactctaaggacagttaaattatgtgggcctgagaaactgacaagcttactattgggaacctgttcagaaaaccttgcccattctttaagtcaaataaagacta

SEQ ID NO: 2603 - DNA, 578 bp, Cricetulus griseus
  misc_feature (570)..(570): n is a, c, g, or t
tatttggcactggacattcagcaccatctgccagtccagcatttggtgctaacccgaccccaacatttggacaaagtcaaggtgccagccaacctaaccctccaagctttggctctatatcatcttcaacatcgttgttttctgctggttcccagcctgcaccaccacctacttttggggcagtgtcaagcagcagccaacctcctgtgtttgggcagcagcctagtcagtctgcatttggctctgggacagctcctaattccagttctgttttccaatttggcagcagcaccacaaatttcaacttcacaaacaataatccgtcaggagtgttcacatttggtgcaaatcccagcacgccagcagcctcagcccaaccctcaggttcagggggctttcaattcagccagtctccagcatcatttacagtggggtcaaatgggaaaaatatgttctcttcttccggaacttcagtttctggtcgcaagataaagactgctgtcagacgcaggaaataaaggtcacgaaggtgttatacccaacagttttatcaacggctggtgcctgctntcagatac

SEQ ID NO: 2604 - DNA, 580 bp, Cricetulus griseus
ctgtatagaccaacttgttttcttgcttcagtggtggttctgttgctcagctgcagtgagccagttcaattttgcaaaggtgcagtacctctccttttcaaggggttggtttttgtcttttgtttgttttctttttttcttcttatttggctgaattgcagtaactagccttgcctttctattctgtagaaatgacagggtcttcacaatccttcaacagtggctactaagctataattagctgaatagaaagaatgtggaagtggtctgaggcatatagagtatatgccaagaacactaccatatatggagtcagctttggttaccagagaaattttcttagtcattagaccatataacagtaatatatcatatgtaaatctttagatatcaatttgagaatcctccaaaaaaaggagcaaagaatgcataagctatgtgttggcaaaagtaatttatattaaaattttgacctgcctttgtaagattaagtggtaaatgtcatagaggtgggtttttaatgtctaaccaatctctaaagtttatttctcctacaaggggtggttcatggcctctcttc

SEQ ID NO: 2605 - DNA, 568 bp, Cricetulus griseus
  misc_feature (408)..(408): n is a, c, g, or t
gactacaacacaaagctcactgtgaggctgtatacctggaggtcattgaagcctttgtgctctcttatgacttcaagtgctgtgattaaagcaggggaggccacgattctctacaaggagccagtacctgagctgctaaagagatgtcagggatgcacgagagaaacctgtgtggtttccttccacctttcaactgacagtgacctcttcagcccaaccaactaccatttcctgtcctccccgaaggatgccaaagggctggtcaaggccaacatcactgtcagcatctcaaagaagggtggtttgtttgtttttaatctgaagacttctgctgtggctctttttgtttggttggatgtaggaagcatcccaagaagatttagtgataatggctttctcatgactcanaagatgcattctgtactgttttatccttggaagctcaccagcaagagtaagctgcaggaggctttgagtgtgacctccctgacagatatctactgatgggacacgtgtggattgtatttcatcggacactgagaatgaagcctttctaaagcatggctgc

SEQ ID NO: 2606 - DNA, 267 bp, Cricetulus griseus
  misc_feature (139)..(159): n is a, c, g, or t
  misc_feature (237)..(237): n is a, c, g, or t
  misc_feature (243)..(245): n is a, c, g, or t
cttgaaggagaagaaggaagttgtggaggagacagagaatggaagagacgcacctgccaatggaaatgctaatgaggaaaatggggagcaggaggctgacaatgaggtagatgaagaagaggaagaaggtggggaggannnnnnnnnnnnnnnnnnnnngcgacggtgaggaagaggatggagatgaagatgaggaagctgaggctcctacgggcaagcgggtagctgaagatgatngaggannngatgatgttgacaccaagatgc

SEQ ID NO: 2607 - DNA, 580 bp, Cricetulus griseus
  misc_feature (96)..(111): n is a, c, g, or t
gaacctgcagcaaatgcaagcgaaggtgaggaaactggagttagatattttacctttacaagaagccaatgctgagctaagtgagaaaagtggtannnnnnnnnnnnnnnngaagctcctagaagaggatgtcaagcgttggaaagcacggaaccagcatctggtaaatcagcagaaagatccagatacagaagaataccgaaagcttctttctgagaaagaaattcacacaaagagaattcagcagctaaatgaagaagttggacgacttaaggctgaaattgcaagatcaaatgcatccttgactaacaaccaaaatttaatccagagtctaaaagaagatttaagcaaagtacgaaatgaaaaggaaaacattcagaaagatttagatgccaaaataattgacatacaagaaaaagtcaaaacgatcactcaagtcaagaaaattggacgcaggtacaagactcagtatgaagaacttaaagcccagcaggataaggccatggagagttccattcagtcttctggagaccatcaggagcagcacatctctgtccaggaaatgcaggagctcaaagat

SEQ ID NO: 2608 - DNA, 469 bp, Cricetulus griseus
actgcgtgatagtgtgacataatccctagaagtagccaaagttacctcactgtatgctcagctatgtctgcgattggcagaagatgcaccaaactttgatggcccagcagcagagggtcaaccaggacagaagcaaagcacaacattcagacgcctcttgatttccaaattgcaagatgaatttggaaaccgaaccagaaatgttgatgtctatgataagcgtgaaaatcccctcctccctgaggaggaggaacaaagagccattgctaagatcaagatgttggggaacatcaaattcattggagaacttggcaagcttgatcttattcatgaatctatccttcataagtgcatcaaaacacttttggaaaagaagaagagagtccaactcaaagatatgggagaggatttggagtgcctctgtcagataatgaggacagtgggacctcgattagaccatgaacgagcc

SEQ ID NO: 2609 - DNA, 523 bp, Cricetulus griseus
tgcaaaagcaacaaatgctcttaaaccctgagccatctctctctagcctcatatgctggaagcatttgataactgtcaggtttgaaagagatcctcagaaccaagtgtagagagcagtgtgaaactgctaaaattgtagcagactatctctatgtatgtttgcagctcaggaaactaggacagggattatgagaaggaaaaagtaatcttaagggagatacaaggtagtgatggattacaagtaaaaggaaagcagaaaggaagactcaggcacccaacccaagaactactgctgcctgtagcagcagtttaaatggtggtgcacacagcaaagggcttcatcacctttgggggactgtgtggtgccccccagagtgaataaggaggttctacagtcctggggaaaaaaatgaaaggaggcagaaagggaaccagctggaggagggaacaattgagaacaaagtatgcggatacacatacaaagatgctgtgatgaaacccagtgctttcatcttagtaaaag

SEQ ID NO: 2610 - DNA, 385 bp, Cricetulus griseus
attctggccttgctgcctatccagggacactttaagtgacctacagcttacgaaacatttgcaaatgctttccatgtgcttcattcactgacaagatggtcaagacgatttgatttctatttctctcccaacaatgttcgtgcgtttaaaccaaaggtaaagccaaagcactttttcccgtgagttttcctataaagacctattgtgcggccacgaagagggtcatatcgatatataggaaactgggggctcgtttctcggggtaaatagagagaaagagaaactatactgttgctttatcaacttcccattgggccataagggaagctacgactactctaaggggagattagcattagatccgagtggggtagattatgccttt

SEQ ID NO: 2611 - DNA, 579 bp, Cricetulus griseus
caccaaaaaaaaagaaacagactaatgagatggctcagtgggtgaaagcacatgccattaaatgtagggaactgagtttagttgcatggcatgtgaccctccatcccatcaaaaattttaattaaaaaaaaggtggtggggctggagaaatggctcaaaggttaagagcgctggctgtttttccaaaagtcctgagtttaggtcccagcaaccacatggtggtttacaactttccataatgagatctggtaccctcttctggcctacaggcatatacacaggtagaatactgtatatataatcaatcaataaatcttaaaaaaaaatagaaaagccttgtcttgtggtataggaggctaaggtaggaggaacgagtttatcaccagcttgtgctgcatagcaagtccctgtcttaaagagaatcaagaggagactgagaaaagtgcgtgggtaatgggagtggacatctgaagacaacagtaagtaaaatggggtggtaggatgaaggtggtcacaaaaggccttcttgaggaaacggccatgtaaagatacgagcctgtacaaagactaaggcagatg

SEQ ID NO: 2612 - DNA, 554 bp, Cricetulus griseus
atcctctgaaagaacagcagctgctcttaagcactgagccatctcactggccccatcattttatagcttttacatgtacaggcctgaactgtagtttttagccactgttggggggtccagatagtctccattattatcccattctgtagtctttcaccaagcccaggccctagtgtgtcatgtgtcttagacttttttgaacccagtagcatgaacaaatacattttctctgaaacagcatttgtttccctgccttctgaacagtaaaatgaatgttattttctttctttgcagacatgtttccttcactaacatttatcccttgtcctagtcttatcctcctatagggattagtgactcttaggacagtgcttagtgttccaaataacagtacttgtccattatcttcttactgaatgagtgtgacaatttgacaattcttatttgcctggtcctggtctcagctctggagatacagtgattgaagcacacaaacctttgttgattcttccctgcatttgagtgtgagccagtatatctggcacaattcgagg

SEQ ID NO: 2613 - DNA, 579 bp, Cricetulus griseus
  misc_feature (551)..(551): n is a, c, g, or t
  misc_feature (571)..(571): n is a, c, g, or t
agactttatgggaagggtgggtggcagtagtgaacaaatgtcactctgtcccttataaaaccagtaaaagggagtattggagtttgaatgttggcagcaggtcatcaggcagggtgcaccttccacagaggagtacaaggtatgcccagccaacattctggagtcggttgagggaaggggatgtattaattggcagcacattgcctggcactcactccacagagtggcaggtttgatggcactagttaaggccactcataccccctaagaaatgatgttggggatgggcagctgtgctgggctgtctgtctccctgcctggggccacatggtgtccacatacagagcgtaatggatgggagtcaggaccagagtcacctcttataatgccagcagctgttagactctgatgtctacaaatgacaaggaaagttgtgttttcactttctgggaactcctataagccctggctcaaggactttgcattgtgtgtcatgtacatctttttaagtgttctttgctgttctggaattgtcgttggtttttccttanctcatagatcatagacacangaatatta

SEQ ID NO: 2614 - DNA, 579 bp, Cricetulus griseus
atagttgaagaaaaatggcaagagatcatgtcctcagaccaggtggaattacttaaaatttaaagcctgaaaattccaattttggcggggggtggatggaaaaggaacccaattttcttatggacagatatttttaacataatggcacaaagtcttagaatattattatgtgccccatgttccctgttcttcgtttctgcattttcttcacttgcagacagacttggctctcgatgaacttttatcacaaattgaaatatatttttttcaactgccagtcaaggctgagaggctcaaccacctcaacattggatacatcacttgccaatgtacataccttgttatatgcagacatgtatttcttacgtacactgtacttctctgtgcaattgtaaacagaaattgcaatatggatgtttctttgtattataaatttttcccgctcttaatgaaaaattactgtttaattgacatactcaggataacagagaatggtggtgttcagtggtccatgattctgtaatgcttcacacaggcagttttgaaatgagaatcattttcccttttcttatgatggag

SEQ ID NO: 2615 - DNA, 578 bp, Cricetulus griseus
ttcttcagtcttccccacaaaactcgggactgatttattcatttacagtgtattatcagattccattacatcttttcttattgattattatgataaaacatggcacaaacgttatcattttagtcattctaagtgtacagttcagtggcgtttagtctccttattgtacaagtatcatcaccaccatgctcacaattttttcaccttctcaaattgaaactcggtcctcatcaaccacggactgctcttcattacattcccattctttgaatctgggaattctagggactttatataaatggaattgtatgatgtttgtcattttatgaccatcttacttgacttggaggcagcacagtgtgctgacacttcagccacagtatagcatatgtccaaatttccctgtttttaaagctgaatagtgcttccttgtatagatgtattatatttcgttccactgatggttgactgatagacattgagattcttgtcagcttttggatattgtgtataattctaccatgcatgtgtgttatatattaacaaatacctgtgtcagctctgggctttaattcttt

SEQ ID NO: 2616 - DNA, 566 bp, Cricetulus griseus
  misc_feature (508)..(508): n is a, c, g, or t
ctgttccagtgtgtggcggccgtgttcattgctcagctgaatggggtgtccctggacttcgtgaagatcattaccatcctggtcacagctaccgcatccagcgtgggcgccgcaggcatccctgccggcggggtcctcacgcttgccatcatcttggaagccgtcagcctccctgtcaaagacatctccttgatcttggctgtggactggctagtggacaggtcctgtaccatcatcaatgtggaaggtgacgccttcggggccggactgcttcaaagttatgtggatcgaaccaagacgccgagctcggagcctgaactgatccaggtgaagaacgaaacgtctctgaatccactgcccctggccccagaggaggggaacccccttctcaagcagtaccgaggacccgccggggacgctgccgcgtgtgaaaaggagtctgtcatgtgaatagcaggaggggctttctgtgccctggtggcgtctcattggaagtggatatcatganggctggagaaactccaggggaggagtttacacagaccgggaaactaggggtccctgtc

SEQ ID NO: 2617 - DNA, 413 bp, Cricetulus griseus
  misc_feature (5)..(22): n is a, c, g, or t
ccttnnnnnnnnnnnnnnnnnncttcttctttcatttatattttttgactcttacctctatatttttgttgttaataaaccaactgccacagggcgggacacacgatggagttctaaggacagaagggactagaagaaggaggagtcgcgcgacaatggatcttactgatcccaaaggaaatgttaaacccgtattacggcgcactttgaatattcagctacgaataattacaccctccaaataaatccaaactcgcggcctgtgtaatgaagatcacctgtcttacttcaagactcattgtttactgaggctggaatggctgttaatcatggcaagctgctagactagctggttacaccaccccttttacaagatgatgcttcagaagccgataaccctgcatgacatggcc

SEQ ID NO: 2618 - DNA, 571 bp, Cricetulus griseus
agttcaggaagcttcaaatgtgtccagaataagcagcatcccacatgacctttgtcataatggcgagaaaagcaaaaagccatcaaaaatcaaaagccttttcaagaagaagtctaagtgactcaatggcatctgtgaactttatctcccaccctccactccgtttttaattttaattttaggaatgtaactccattggggctttccagagttgatgccatagaggaaatgtccttaagggcaactgtctactgtctgctgatttaacagactacgccatcaattttatcaagtctaacattactgaaaagtcatcaagaagagacagtttacagttatttccacctatttatttctgcattgatgttagtgatgtatacacagcattctgttgaaagccgctatggacttacaagctttaatggactgtaagccagcatgggcttgcaaaaatttcttgtttaccagaatatcttcttatctttccacagagctgtttccatcatggactaaataacttaaacaaagtaaaactaattgcactactgttttccagactggaaaaaatctc

SEQ ID NO: 2619 - DNA, 569 bp, Cricetulus griseus
ttagtcaggagaagaattgaggagaacaagaaaagatcagagggagccattataggtttaaagagaattctggtactagggaaatgtccagagatctacgagtttgaccccaactaacaatctaagcagtggttgagaggctgcctaaatgcccttctccgataatgagattgatgactaccttatatgtcattctagagccttcatccagtagtcgatggaagcagaggcagatacccacagctaaacactaagttgaactctggaatccagttgcagagagggaggagtgacaagcaaaggggtcagaaccagactggagaaacccacagggacagctgagttgaacaaggggttgctcatgaaccccagactgatagctgggaaaccagcataggaagaccccctgcaggaggatgtcagtttggaggtctgggcaatctatggggcctctggtagtggatcagtatttagccctagtatatgaatggactttgggagccctctccacaaggagggatactctctcagcctagacacacaggggagggtctaggtcctgctccaaa

SEQ ID NO: 2620 - DNA, 579 bp, Cricetulus griseus
tctgcccacacccagacctcactgtccccctttcccagagtggtcttctccaaagctaacccttgcccctgtacagcttgacccttcttctccaaggccaggaaagcagttgaccccttgggagctctgtactgcgggtctgggttgtgggaaggggaaagacacttcctgtgggcagagccaaagccccctagctattgccagccttcactggctacatggaatacaccaggccactgagctctccaccctgtctctgttgctcactgggacccaggggggaggccacctggctaggagtccaggagtcttgtcaggatccagaatttgtgctgggacattgaacaaatcattccatgagttttcaggcctccacctcctcatctcttcagggtggctcctaagacagagaactgaagagctgacctagtgttccagcccacaaggatgcctgcttctccgtgccattatctgggtccctcttttcaggtgagaggaggctgccaataggtctgctcctgtgcacacacaccatcccactccggtacagcaaggcccagtgcagccctgctgtgctca

SEQ ID NO: 2621 - DNA, 579 bp, Cricetulus griseus
gagtgcatgtcagctgttaacaagtggtttctagtacattcttggctttgctatatctatctagtgcctgttttgtgctttctttctgttttctttctcttccctttcacttctgccctctccctgctccttcccacatagtgtggccaggcgtggaaggtgggctgaggtgctgctccatctttctttgctttctctctttacatgccctggccatgccccaggcgtgctgtcctctgcttattctcggagcttctctccaacctgcatgtcgagttctgtgttgctgtggcttctgggaaagagctggagccactgctatgtggctggtggtgacttggtatccagctgagatgggcatgcagaattggaggcaccttgctttcaaaacaaggaaacctggctgctggtcctgacaggtgctgtgtttggggacctatcacctgcccagcagcctgttcaggcacagtaggctcctgtcaaacagtgaggccagaagggtgcaggggaatctggacattctgcactggtggtgacctgcgtgccagtggccatgtggctttgctcctgctcgctctt

SEQ ID NO: 2622 - DNA, 581 bp, Cricetulus griseus
gcctcaggacctagtcgtcacctgcaccgcgccggtcaacatcgcggttatcaagtactggggaaagcgagatgaagcactgatcctgcctatcaactcctctctgagtgttacactgcaccaggaccagttgaaaaccatcacaactgctgccattagcaaggacttcacagaagaccgcatctggctgaatggtcgagaggaggatgtggggcagccacggctccaggcctgcttgagggagattcgtcgcctggctcggaagcggaggagcacaggagatggggatgcacttcccctcagcctcagctataaggtgcatgtggcctcagagaacaacttccccactgctgcaggcttggcatcctcagcagcgggctacgcctgcctagcctataccttggcccgggtctacggggttgagggagacctctctgaagtggcccggcggggctcatgcagtgcatgccgcagcctttatgggggcttcgtggagtggcagatgggggaacaggcagatggaaaggacagcatcgcccagcagatagcaccagagtggcactggccccaactccgagtcc

SEQ ID NO: 2623 - DNA, 566 bp, Cricetulus griseus
aatttctttttaaaaccagttttcaaatgtttgtttttattaacatttgtacttaaagagcttcaatttagaattatttctaagcaaagcctgacaatgtaaagttcttgttttataaaagatgctaatctgttacagtttgtgttttcagaagttaagtttaggatgttgatagcacacacctttaagctcagggtgtagatggcacacgcctttaatcccaccattcgggaggaagaggcagatggatctttatgagttcaaggcctgcctggtccggcagatagaattctagaacaggttccaaagtcacagaaaaaccctgcctcagaaagaagttaagctactgtttaagaaatataagatagctctatatagttttaagttcagctgtattacagaagtaagacttcacctagccacctgtgtgcttcttgtatgcttaaggcaagtaattaaaacagacctctagtgcttcagagatcttcagaatatggcatttaaattgttatctttaaagtttataatgtcagacagaccgccagatccggacagtgacccatagt

SEQ ID NO: 2624 - DNA, 485 bp, Cricetulus griseus
  misc_feature (447)..(447): n is a, c, g, or t
tgtatatatactgttctccatgtactaataaaccaaattttctgctagaatagtgagctgctactcttcaaagcaagataatgaattgttaactctgggtttcatttgtagtgtaagataatgtagcaacaataactgcatattttataattaaatatttttgcacacattaacctacattctctagtagatctcctgaagtgtcatgcaggaatggtggaaatacttgtacttaatttatgggtgagatcagcagcatccttaccaaaactcacataagcacatttcatgttctctgagcatctcatatgggaaatgatttacttaaagagtttattaagagcctcttttacatccttattcctcaggctgtagatcaaaggattcaacatggggaaaaccacagtgtaaaatgttgaaacaattttgtctgtatctaaagaatanctggtgcgggggcgagagtagatgtaaagaatggaacc

SEQ ID NO: 2625 - DNA, 279 bp, Cricetulus griseus
aaggaaaagggaaagggaaagggaaattggtttgccttttgaaaccatttgtccctattttgacctattaaaaaaatttaaaaaaaaagccttaattcaacccccccccctttttttgggaaaatttaaccccccaattttcccccttttccaattttcccaaacaaaaccttaccaaatttttagggaaccttttccgggaaaaattcttcgggttttacctaaattggccttaacaaacttttttaaaactttccccccaaccccaaaaaattttcc

SEQ ID NO: 2626 - DNA, 546 bp, Cricetulus griseus
  misc_feature (452)..(469): n is a, c, g, or t
tttcagagaagaagccaacaacagaagtggatcccactcattttgaaaagcgtttcctgaagaggatacgtgacttgggagagggccactttgggaaggtcgaactctgcagatatgatcctgagggagacaacacaggggaacaggtggctgtcaagtccctgaagcctgagagtggaggtaaccacatagctgatctgaagaaggagatagagatcttacggaacctctaccatgagaacatcgtcaagtacaaaggaatctgcatggaagatggggggaatggtatcaagctcatcatggagtttctgccttcgggaagcctaaaggaatatctgccaaagaataagaacaaaattaacctcaaacagcagctaaactatgccatccagatttgtaaggggatggactatctgggttcacgacagtatgttcaccgggacttagcagcnnnnnnnnnnnnnnnnnngagtgaacaccaagtgaagattggagactttggtttaaccaaagccatcgaaactgataaggagtactacacagtca

SEQ ID NO: 2627 - DNA, 580 bp, Cricetulus griseus
caccaagtgacgtgagcgtccactccgagctcacggtccgcaggtttccatcttccgcaatctgctgtgatggctgcctcggtccctgccgccgtttccctctccccactgctgtctattctcctgggcctgctgctcctctctgctccgcctggcggcagcggcctgcacacgaagggcgcccttcccttggacacaatcactttctataaggtcatccccaaaagcaagttcgtcttggtgaagttcgacacccagtatccctatggtgagaagcaggacgagttcaagcggctggctgaaaattcggcctccagcgatgatctcttggtggcagaggtggggatctcagactacggtgacaagctgaacatggagctaagtgaaaaatataagctggacaaagagaactacccagtattctacctcttccgggatggggactttgagaaccctatcccatacagtggggcgattaaggtcggagccatccagcgctggctaaaggggcagggggtctacctgggcatgcctggttgcctgcctgcgtatgatgccctggcaggtgagttcatcaaag

SEQ ID NO: 2628 - DNA, 530 bp, Cricetulus griseus
aagaactcaggaagagcttgtactcatgctgaggagcaccaagcagggagaaacagtgtcactggtcattgcccgccaagatgggagcttcctgccccgagagctgaaaggagagcccgactgctatacactctccctggagacaagcgagcagctcactttggagatccccctaaatgattccggctcagctggcctcggggttagcttgaaagggaacaaatccagagaaactggaactgacttggggatttttatcaaatctatcatccacggaggtgctgcttttaaggatggccgtctgagaatgaatgaccaactgattgctgttaatggggaaactcttctgggcaagtccaaccatgaagccatggaaacactgaggagatcgatgtccatggaaggaaacatccggggcatgatccagctggtgataattaggaggctggagagaccactggaggagcttacagagtgtggggcactttccagaccatgttttgaaaactgtcaagaagctctgagcccct

SEQ ID NO: 2629 - DNA, 480 bp, Cricetulus griseus
ggtgagaatttctgttccagatttattcaacaggatgctgagtttctggtagatgcactgctgtcctataaatcagcattcaatatggaggctcaagctgttttctttccctttaacacatgttttcctagggtcttaaatccactgtgtgaaatggccacccattcagcaacaaggtgttcatttaaaaaggaagatagatctatggtttggaatgtgactcagtgactctagcatttgcctaacacacgggtagccatatgttaagctatgttggctctcttttaagtcagtggtggctcacacctgaaatacaagtactcagaggagactgatgcagtaggattgccagaagttctaggccggcctgagctgtggagtgaatgtgaggccagtcttaactacagtgtgagacattgcctacgaaggacaaagatgctatagtgcatgtgacatgggaattggcactatttctgacag

SEQ ID NO: 2630 - DNA, 579 bp, Cricetulus griseus
tattggtgttgtatgtgtgtgcaccactgcaggtgaaaggacaagatatggtagtacatgcttaatcccagtgcttgggaaactgagaaagattatgaattgaaagccagcctgggcttctagtaagttatagaccagcctgggttagagatagagctcagtcggtagagtacttgcctaacctgcaagaatccctaggatcagttcccagtactacataaaagcaaacagtagcatgtatctgcaatcctaggactcaggaagcagaggtaagagaatcaagagttcaaggtcaaccttagctacatagcatttcaaggcctgcagggggatactggtgttttaatattttccaattaaataaatttttaatgaatacagtttgtagaacaaagtaggttcacctcaaaacaaagtccgaagctctagcacaacctgattgataaccctccagcagcttcccctatgaaactgtacagtccagctagaaggcctattacagagcaaataagactaaactcacctttgtacagacagccctcaaacctaatctgtgcctcccagtcttggtgataacat

SEQ ID NO: 2631 - DNA, 547 bp, Cricetulus griseus
cccactcccctttaaatctatggtcaccagaaaggactatatacataagactgtttcctcttagtgatttgagtcttgacaagggtatatgtggtgcagacttgtgcacaggtgtgcacaggctgctaatacctttagacttgtggggcttgcagtgtttcatttggggggtggacaggatcttaactgtgtaacccaaactagcctcaaacttaacggcagccctcctgggtcagcctcccaaatccagcattggcttataagcatgagccaccatgtctggtagtgtggttttgcacttgaagggagtttcttagctgtccccttctgagcacatctactctctagttacagaaccaactcttagaacatagagactctcaaggctgagacagataggcatggtcacctgtgactaacttaagtcagtaggacaagctaaagctttgcctgatgtgacttcacgtcttgtgaaggcctgtggagaagatcaggatcaggagattgtgattgtgaccgggtggaatacagcttgacccaaaacaca

SEQ ID NO: 2632 - DNA, 496 bp, Cricetulus griseus
agcccctacaccccgcttcttgaggactctctcagcggacagtccgccagtgccatggcctgagcccccagatgtcacacctgtctgcacagcacacatgcgcccaggcgtgtgcaaaatcactcagggaccagggacagacccgctgctgaaggctccagctgagtcacaggcactctcttctaagtggcctgtgagccaggctgtggggattgcaactgccaccagcccctcccatggggagctggccttgcccaggccctcgacttcatgctgcccttgtcttcctccctcaggctaaaagctgtagtccccatggaagacagaactgtcactcctaggggttgggtgtgcatcagcctcttgtgccaaggccaggcaagcagttccagggcctgacgggtctgcacatgtactctggagctgggtctggtccttttcctccaatctctgctatgtcacctaaacactgaattggccactgtaagtggccaag

SEQ ID NO: 2633 - DNA, 578 bp, Cricetulus griseus
catgtaattaagttgacctccaactcaaatttctctggcctttgggtccaaattgttggggttacacatgttcactgccatgtctagcaacaggtgtgctttcccaattgaatgaaagctaattcattttactaattaattagattactaattcaataataataaattagattactaatttaatctactgagagattaaaatgaatccattgttatttctaaaataagagtaatatcccaaatcattacatttttagagaagtcacatcactatatatttaacaatcaaacactgagcatggccaacttaaacccatgattccaatatgaatttctttaatttctaatcattgtgctaaaatgaaaaaataactagaggaaaaacataaaagaaattgaaagaatatctaatatgtgtagtttaccatacaaggttcatttttagtttctttcataatgaaatacttactataaatgatggactttcagtgagttagtcttccactgtaaataaaataatcaattggtaattttcttgaagtgctcataaattaatccattattaatccattataact

SEQ ID NO: 2634 - DNA, 260 bp, Cricetulus griseus
gaaactgaggctggtgctagggctgaagcaaggataggaatggaagctgaggtaagaatggggactgaggctgtagctgatgctgaggcaaggataggagtcggggctggaactgaaacttggggagaggaagaggctgtgagtgcggatgaagtagacactggaacaggatttgaggctgaagctggcactggagctgggcttgaagttagaacttgagctggggcagaggctggaactagagcattggctgatgccag

SEQ ID NO: 2635 - DNA, 555 bp, Cricetulus griseus
atggccgcggagccgggtggaagtgctccgaggctccgggagccggctctcggggccgagacatggcccggggccccggacagctaagcgggccgcattcggacactgtcgccatgcccaagagaggaaagcggctcaagttccgggcccacgacgcctgctcgggccgagtgaccgtggccgattatgccaactcggatccggcggtggtgaggtctggacgggtcaagaaagccgtggccaacgctgttcagcaggaagtaaaatctctttgtggcttggaagcctcccaggttcctgcagaggaggctctttctggggtgggtgagccgtctgacgtcatggacagcagtgatgagatggatgctcaggaggaaagcactcatgaaagatcagtctccagaaaaaagaaaagcaagagacacaaagaggacctggatggggctggaggagaagagtatcctatggatatttggctgttgctggcttcctatatccgtcctgaggacattgtgaatttttccctgatttgtaagaatgcttggactgtcactt

SEQ ID NO: 2636 - DNA, 418 bp, Cricetulus griseus
ctctgcactgcacactgctgctcaagacgctgggtggctactcttggaccctgggtcctgctcaaaccccactggacccaccccagtcctcagacactttgatctctgtggaccctgcagaggatgaagcccagcagactgcagcccaagtcgcaggggtcctgggtggcctgcttacacccctcttcctccgtggcgtgctggcctacctcatttggtggacggctgcctgccatctgctctccagcctctttggcctctatttccaccagcacctggcagcttcctaatgtgatgccactaggtgctggcatctgattcctgtccaccagggctgggactgtcccctgtgtatgtacttcaaaccctagatgacctagggataagggtggggactccccaccctctctcacctcag

SEQ ID NO: 2637 - DNA, 483 bp, Cricetulus griseus
ccccttttctcctttttttcttttcccaaacccctttcactttcttccatgtcttctttctcttgactctaaagactttttctctattgttactcttatttttattatcaatttttatttaaattaaaaacaattttattttacactccaagttccatctccctcccctcctcatattcccccatcatcctctcatcctaccctcatctactcctcagagaggatgaggcctccccaagggagatcatcaaagtctgtcatatcatttggggcagggctgaagccttcccccgtgtgtctaggctgagagagtattcctctatggggaatgggctccaaaagcccattcatgcactagggataaatactggttccactgccagaggcctcatattctgccccattcccccagatgacaccggcgttcaaggggcctggttcggtcttacgctagttccctacctgttggtctgtgtatgtgcg

SEQ ID NO: 2638 - DNA, 425 bp, Cricetulus griseus
ttggccagtagacaagtctgttgtgcattctcttgattaaagactgatgtaggtaggctgatctcatgggatgtgattccacccgtgggtaggtggtcctgagtgattaaaaaaaaaagtgggctgagaaagccagtagtagcattcctccacggcccctacttcaaatcctgcctcaaagttcctgtcttgagtttctgctctaacttcctttggtgaatgactgttaatgtgaagtgtaagtagaaataaaccctttcctcctcaagttgcttttggttatggtgctttatcacagcattggaaacccaaactaagacagaaattggtattagattatatggtgtgctgctgtgacaaacctggctttgtgtttcagggaggattgtggtagcatttggactttgggccaggaaagccattaa

SEQ ID NO: 2639 - DNA, 425 bp, Cricetulus griseus; identical to SEQ ID NO: 2638

SEQ ID NO: 2640 - DNA, 494 bp, Cricetulus griseus
catgaatggcaagcctgccaagagcaaggccagtgatgagcagcgaccaaaggaggccccagctccggctccggctccggctccggctccggctccagctccggctccagctgcagtcccagcagatgccttggctccagttccagcttcagtagaggccccagtggaggacccagttctatcttcagcggaagctccagtggaggctccagcagaggctccagctccagcagaggctccagctccagcagaggctccagctccagcagaggctccagctccagcagaggctccagcagaggctccagctccagtggaggctcaggcagaggctctggcacaagctgaggcccctgccccatacccaagcaagcgcctgatccagtccacatctgaggagaatcagatcccctctcatttgccagtctgcccgtcactccagcacattgccagtcttcaggggcgtgccatcatcgagctcttccacaacagca

SEQ ID NO: 2641 - DNA, 243 bp, Cricetulus griseus
gctcaattcctccgagtgtgagaggcaaagtatggagcttggccattggcaacgagttgaacatcacccacgagctctttgacatctgtcttgctcgggccaaggagcggtggcggtcccttagcacgggaggctcagaagtggagaatgaagatgctgggttttcatcagcagacagataggccagtctggagcttattaaactggacatttctagaacatttcctaatctctgcattttcc

SEQ ID NO: 2642 - DNA, 527 bp, Cricetulus griseus
  misc_feature (50)..(119): n is a, c, g, or t
  misc_feature (148)..(165): n is a, c, g, or t
  misc_feature (176)..(194): n is a, c, g, or t
  misc_feature (318)..(350): n is a, c, g, or t
aacagttcagcatgagtgggatacatatacatacatatacatgtatatannnnnnnnnnnnnnnnnnnnnnnnnnnnnnnnnnnnnnnnnnnnnnnnnnnnnnnnnnnnnnnnnnnnnnggcacttgctctggagaccaggctggccnnnnnnnnnnnnnnnnnngcctgccgatnnnnnnnnnnnnnnnnnnncgccaccaacgcccagcctatgagtgggttattgcatgtgaactgctcttgctttcatcaggaggctcatagtgagccaggccccaggtacctagctcctcagctcactaattttttatttttnnnnnnnnnnnnnnnnnnnnnnnnnnnnnnnnnagccttggctagtgtggaactctatgtagatcatgctgaccttgaattcagagatccttcctatttctgcctcttgagtactgagattaaaggcatgcaatatgcaccctgatccctttcaatttaaccctttgctttggtgatacaagttatacccacacagatccacctagtttc

SEQ ID NO: 2643 - DNA, 565 bp, Cricetulus griseus
gtgaggagaggcggaggtggtgaggaggaggtctgctgctgtggggcactttgtagagttggtaattttttagttgttctcgatccaaagcttctctctgacatcgaataccgtctgcttctcctgtcattactctcattttctggggactgggaaataggcagtggggtatgaacttcgggggtgttactccgctcttcaagaagtgcctggatctcctcagaggcctgagaatctgaggtggtatcgatactgggactgctagatcgggaggagtccgaagacatctgagaggagtgctgggaagctgcactggacttttcagaagatccacaggatgtggcactgaatcgactgtttggtgtggattctagtcgagcaattttaattggagggtcataatcctcatcctctatgaaccgtcggggggttttgatgatcctcgaggagatggcgctgaccacaggcatgatgaactgccggatatttttgacctgtgtcttcaccttcctcccttgcagctgtgctgcttctttctcgattttcttctgtgcccccttctttg

SEQ ID NO: 2644 - DNA, 579 bp, Cricetulus griseus
  misc_feature (559)..(559): n is a, c, g, or t
tttgtaagcttctcagaagttttcagcagtcatgtgggaaagatatccaggttggagtaattggtttcccaaatgtggggaaaagcagcatcattaatagcttaaaacaagaacggatatgtactgttggagttcctatgggacttacaaggagcatgcagattgtcccgttggacaagcagatcacagtcatagatagtccatgcttcattatctcaccatgtaactcctctgctgcacttgctttacggagtccagtaagcattgaagtactaagaccattggaggctgccagtgccattctatcccaggctgatagtcaacaggtggtattaaaatacactgtcccggggtataaggattctctggatttttttactaaacttgctcagaaaagaggtctgcaccaaaaaggtggaagcccaaatattgaaagtgctgctaaactgctatggtctgagtggacaggtgcctcattaggttactactgtcaccctcctgcatcctggaatcctccacattttaatgagaatattgcagcaaacatgaagaaaggctntaatctagaagaactagaaa

SEQ ID NO: 2645 - DNA, 580 bp, Cricetulus griseus
ccggtgaggcttactcgtggcttcacacgcttgcttcccggtcttatggccggtctgactctgtttgtgggccgcctgccgccctcggctcgcagtgagcagctggaagagctgttcagtcaggtcggtccggtgaagcagtgcttcgtggtgaccgagaaagggagcaaagcatgccgaggctttggctacgtcactttctccatgctggaagatgttcagagggcgctcaaggagatcactacttttgaaggttgcaagatcaacgtgactgttgccaagaagaaactaaagaacaagtccaaggaaaagaggaaaaatgaaaattcagagtccccaaagaaggagccaaagcctaaaaaagccaaggtagcagataagaaagccagattaattatccggaacctcagctttaagtgttcagaagatgacttgaaaacagcatttactccctatggaactgttctggaagtgaatatcccaaggaagccagatggaaagatgcgtggttttgcttttgttcagctcaaaaaccttcttgaagcaggaaaagctctcaaaggcatgaacatgaaagaga

SEQ ID NO: 2646 - DNA, 464 bp, Cricetulus griseus
aaactacctcaaactcactgaaatctgcctgcctctgcccctgcccctgcccagacccaagtactgggactaaacaaatttcattatataaagaggattttagttaattttatctgacttatattttaaagattagtcaacatttagcatatactataccatctagtctgattcttaaatttttttttttattatcacttttttgttgttgttacttttttgaaatagggtctccctaatattaactctgcctggcttggaatttgctttgtagcccatgctggtcttgaactcttagggatctgcctttctgtgtttcctgagtcctgggattaaaggtgcatgcaccatgcccagcccgattgttgtatttattttgggtatatatgtgtagctcacatactacgatgtgtatgtggaggtcaaaggacaacttggggaaattgtttctttccttctgccga

SEQ ID NO: 2647 - DNA, 493 bp, Cricetulus griseus
ccctcccaataaacacagtgggagacttctatggatgctccaaagaagcccacagcttccaagctctcctcaaactgaagagctgccaggacttgaacatacactctgtccaaaagcacaggagaaatcatgggcttcggggcatggggcctgtggatgagggtgcagcttcccgtctaaggcagggttccagcagggctgagatcactgtccacagcagtgacctcttcagccatacacaattcctccacttcccactgcctggctcttgctttttgaggtcattctttagatgccctacgtgaatctgaatttaaagtgagattcgaatagcctgactgagggttgagccaccctagaggatctcagtggcagtgttcagggcaagagaactgtaagactggggaaatgggactgacactccagggaagaggtgaggtttccactagggtagaatttgaatggtaataggattgttttatgtgtgtatgtg

SEQ ID NO: 2648 - DNA, 258 bp, Cricetulus griseus
  misc_feature (237)..(255): n is a, c, g, or t
tttccctggatatcctgtgagtatttctatcaaaatactaaaatcatttttatcttttgtctgttttcagtcctgttgtcttgccttacagcaagtggaggagaggtctgagacattgagtccagctttttggccagggagaaagtttattgaacaaaggaagaatctcttccactcttaaaacattgtcagtatgactaagatccacaatgctaggctttgtgtgtgactagttannnnnnnnnnnnnnnnnnnatc

SEQ ID NO: 2649 - DNA, 490 bp, Cricetulus griseus
  misc_feature (173)..(232): n is a, c, g, or t
aagaaaaacattgtttgaggattcctttcaacagataatgagcttcagcccgcaagatctgagaagacgtttgtgggtgattttcccaggagaagaaggtttagattatggaggtgtagcaagagaatggttctttcttttgtcacatgaagtgttgaacccaatgtattgcnnnnnnnnnnnnnnnnnnnnnnnnnnnnnnnnnnnnnnnnnnnnnnnnnnnnnnnnnnnnaatccagaccacctgaaatatttccgctttattggcagatttattgccatggctctattccatggaaaatttatagataccgggttttctttaccattctataagcgtatcttgaacaaaccagttggacttaaggatttggaatctattgatccagaattttacaattctctcatctgggttaaagaaaacaatattgaagaatgtggtttggaaatgtacttctctgttgataaagaaattctgggtgaaattaat

SEQ ID NO: 2650 - DNA, 251 bp, Cricetulus griseus
gtttgactttgaagaaatgaagcgcaagaagaatgacatttatggagaagactaacagcagtacatattatgtaattaggacaaacttaaaatttggcaaataatgtatattatatgaaatcaatattgcaagcccgcttttatgatcaaaatggagattgaagagtgctataccagtaaatactccttcccttcacttttctaatatcatgtattaacttgttttcatggaatggctagtcagaattggt

SEQ ID NO: 2651 - DNA, 430 bp, Cricetulus griseus
  misc_feature (333)..(350): n is a, c, g, or t
ttggtctagttttgcgtcttatttgcttcataattgtatgtgctgtctttagtttcatttttcctgtctccttctcttgtattttctgtgttctgtgtttactggttttagttttgctatctgtgccacagacagccattgccattgccaccactgcttgctttagctgctttgatggccagggctcagaatttatctctgagctttctggtcactggattcagtttagcagggattcaaatgtcttttgggtgtggataatattaaaattgttttatattgttctactatgttgaaaagctggctctggagttgggttatggctcttcattnnnnnnnnnnnnnnnnnnttatttaaaagtttcctctctgtcccatgctaggtgatccacgtgattttgtgacagggaaatgagagcgaagcaaaaca

SEQ ID NO: 2652 - DNA, 364 bp, Cricetulus griseus
  misc_feature (311)..(351): n is a, c, g, or t
aatcttcaaactaacacagtagcccaagaagaacagatttcattttttgcagcacagaactcaatttctccacttcagtcaacatcaaacaccgagcagcaagctgcttttcaacagcagcctccaatctcacacatcccaacccctattctttcccaggaacaggcacaatctactcagcaaggtttatttcagcctcaggtggcccttggctcccttccatctaattcaatatctcaaaaccagcaaggagcaattttccaaacacagcactcaatagttggcatgcagagtaactctccatcccaggnnnnnnnnnnnnnnnnnnnnnnnnnnnnnnnnnnnnnnnnnagcattttattca

SEQ ID NO: 2653 - DNA, 522 bp, Cricetulus griseus
gacgtgaccaaaggccgcaagttctacgggccggaggggccatacggggtctttgccggaagagatgcatccaggggccttgccacattttgcctggataaagaagcactgaaggatgagtatgacgacctttctgacctcactgctgcccagcaagagaccctgagtgactgggaatctcagttcactttcaagtatcatcatgtgggtaagctgctgaaggaaggggaggagccgactgtgtactcagatgatgaagacccaaaagatgagaatgctcggaaaaatgattaaagcattcagtggacgcatatctatttttgtattttgcaaaatcatttgtaacattcgagtctgtctgtctttaaaacatagtgatttcaatatttagaaaagttttgaacttgctgtaattttttgttaattaatatcactagtgacactggtaaaattgtcttagaatgcatgatacgtttgtgtcacaaatccaagaagtgaactgcagtgctgccatgcaactgt

SEQ ID NO: 2654 - DNA, 298 bp, Cricetulus griseus
tgcagtgataactgacatgtgacagtgaggcaaaggatagtttattaaagacagatggaaaccatgtgtattgcatgcctgtaattcaagcctagggaggtaaggcagactatgctacatcataagatctgactcaaaaatactgggaaaagatgcactggataattcaaaatttctccattgtctatcatagtaaacagctctatgtatttcggtaaaaattttattatacagtctgataatttagctaatgatgatcttgaataattgcttgtaagtctttatcttcaaatcacgt

SEQ ID NO: 2655 - DNA, 538 bp, Cricetulus griseus
gaacatagctggggctcaagttcaaatgagcattcttttcctctgctttttttcttgactgaaggcaaatgttatttgtgagacatggcctatggcagacagggatgattctggcctcaagaaaaagggtctctggccttctggaagcctgctgtgcttttgtcccacagctttctgccccttgtttcttactagtttcttgaattgttcttgtggacttttcctcagggattcattggcctgcaggtcctaattgcccgcttcccattggagaactggctcacttgctatctggtgatgctacattggtgagcagatcatgcttcagtaactctgacctgggcaccctggacctggtcatgttctactgccagacctttccctgggggcttgaacacagaatggggaggtggacactcatgtcacagatcctaccacatttctgctttgtagctcctttctcctgggacttatgtggccagacttaaagctcctctgatcatccagctccctcccactggtactcccaatcaaagaa

SEQ ID NO: 2656 - DNA, 433 bp, Cricetulus griseus
gggtgaggatgagggtgcgcgtgcgggtgcgggtgcgggtgcgggtaagagtggagctgctgcggctgaggcttgggctgcggttgtggctgaatctgtggttgaggctggatctgcggttgaggctggatctgcggctgggactggggctgcggctggggctggggctggggctggggctggggctggggctggatctgctgcgtctgcggaggctgctgctggaccaggtgctgctgcttctgccgcgtagatttgactgccagtatggcctgacgatttttgtattgcaccatctgcaacgtgatctccgagttccagccctggtcctgggggcaccgaaagtcgatctctttgcccttcgccatcaccactgtgaagtacatgtacttgcccttgcgctccacacaatctacagtcttcatattggaaa

SEQ ID NO: 2657 - DNA, 541 bp, Cricetulus griseus
gaagcaacagctacaacagaggaaccaaggataaatcttacccagctcctagaagaagaagtggaattctgcacagatcttattaattcctatccaggacatgaaaccctttggtgtcataggcggcatgctttctaccttcaacatcacttaaatggcaagtgtcctcccaacgtgacgcacctgtcacctgcagactgctctggcggcactttgaatgacttgcacctgattccagcaagcccccaactgtctcaggcaatggaagtggatggactgaatgactccagcaaacaaggctattcccaggaaaccaagcgcttgaagcggaccccacctccagaccctgtaggcctagagatggagcacaggtttattgatcaagtgctatccacttgtcggaatgtagagcaagccaggtatgccaatgcatacaggaaatggctggtgactttgagtcagtaagaggggtggattcatcctaagaaattccccttttagtgcaatattgctttcctttctcaatgccatagttgcatga

SEQ ID NO: 2658 - DNA, 306 bp, Cricetulus griseus
tatgtttgaggctggcctggtctatacaaagaaaccaggtctcaaaaaaaaaggaagattgatagttaaacttatgcccataattgcattgtataagtgcactaaacattccagttaaaagacaaaaatcagatccagatcttgcatatcccccattgttcctcatattccttttgaggcagtgtctctccctggaccaagggctctccccccccccccttggctaggctggaaactaaaaaaccctaaaaatccttttgtatttgcctcacccccatccttgcccttggagctgacattacaggc

SEQ ID NO: 2659 - DNA, 409 bp, Cricetulus griseus
  misc_feature (371)..(394): n is a, c, g, or t
tccgccctgagcactcacacaagcactttctcagcactgctgctgcgggcagtgtttggacagcatcacctgcatgatgtttctgcatcattccctaagtctggtttcatattaagtgttgccatctagtgacacccacagtcacttcacaggcccaccatcatgctctcacagaactcaacttgtatcctcagtaataaaatcagccacaaaaggagaaaacagccagcagggttgcttaaagaagaaatgcactgttttttcttttctttttttttttgaaacaaaatctcactcactttgtagccctacctggctggaactcactatgtaaagcaaactggcttgaactcaaaaatccccctgccttnnnnnnnnnnnnnnnnnnnnnnnntgccaccaaacccta

SEQ ID NO: 2660 - DNA, 491 bp, Cricetulus griseus
  misc_feature (434)..(477): n is a, c, g, or t
agcaaatcagctagcatctgcaatacaatgcagagcagagctctggaggttaggaccctgagaaattctctaatagaatcagttctccactcccaacaagtaaactagtttataattgtttcaaagaagaagttagtatatcatccccttgtattcatccttgtctattaaaatataacaccacataaaaggtcagcgatcagattcatttttgaagctacatgttaaaatttattctgtggtcaggcttcagtaatactatgtaactacaactacatctactagttattatctctctgtcaatctccatctgaatattatatcacaacaagagtgtcatctaaactttccggtttccagaaaaaatgtttaaatgcaaatagtgtttacatttaataacaaaacataagaatcctttttggagattttatgtnnnnnnnnnnnnnnnnnnnnnnnnnnnnnnnnnnnnnnnnnnnnatgtgcgtgtatat

SEQ ID NO: 2661 - DNA, 529 bp, Cricetulus griseus
  misc_feature (16)..(16): n is a, c, g, or t
  misc_feature (348)..(363): n is a, c, g, or t
aggcgctccctggaanacatggtacctgctccagtgccgcgtgcggcccgggaaccctgggctgctggcgcctgcgcagagtcctctgtcccagggaaaggctcgggcaaaaggcggttgagattggcagagtgaaatattactgctgagggaacgtagcagggcacacgtctctctgtgtgtctgggtgcctcgtttctccaccacctacttacttcctggttgcagcttctctccttttgggacttttgcacccgaagctccagatttgctaccctgcagtgttgcggaaccttcaggagtggcatcggtgcactgcagagaccctaccctccttgctaccttacnnnnnnnnnnnnnnnnggctgattccttacacacattctctctgctcttcccatgcaaatcagacctcggttgcctcagcgtcctacccttctgcagggctgcagcccggccaccccaaaaccttattgcttggtgcctggaatcctgattttcagccgcggggtccacttgtctccctcag

SEQ ID NO: 2662 - DNA, 491 bp, Cricetulus griseus
tctcccctgatgaacgggcataccaacggcagctggtcatgaccatgggtgtggctgacacccagctcttcttctatccacagctcctgccaatacacacattagatgtgaaaagcacagggatgccggctgctgtccgctgctccgagtcccgactctccgaagaaggaatgttcctactggctaatggtctgaacatgttcttatggctcggagtgagtagcccaccagatctgattcaaggaatatttaatgtgccatcatttgcacatatcaacacagacatgacatcactgcccgaggtgggaagtccaccctctcaacaactccgaatgataatgaacaatatccagcacaagaagccatactcaatgaagctcatcatcgtgaagcagcgagagcagcaggagatggttttccgacagttcctggtggaagataaaggactctatggaggatcatcttacgtggatttcctctgctgtgtccac

SEQ ID NO: 2663 - DNA, 579 bp, Cricetulus griseus
atcttccatgactgcttctcttcctgccttccatggcagtgtcctcaggagatgggcaagaagattggagcagctttctcacaggtctgcaatttggtttttctccaagtacatcatgacaccttcgtcctcctgaactggagaggggaagaaatgaaaggcatcccatatccaccatttccccaatccctagccctaccctggacatcatgagctgttatttgtcttggaaggaggggttctgggctctgggctggatagcagagaagagggaatgcgccctttgtttgcttctctcctgcttgtcctttttccaggacataatggaactgtcagaagagtttctagaaagttaggattacgcagatagttgagtcctaatctatcaaatcattgttgcctctcataccaaaatgttcttacctacagtgtcccttctccctttcctgctttgcagtccccgtggactctgggcactgtgcattgtcttctttgctctctgttgaggaccttccacctgtcatggtcccctcagtatctagcaatgtttcttgcaagaagttagttttgctaacttgg

SEQ ID NO: 2664 - DNA, 256 bp, Cricetulus griseus
  misc_feature (111)..(141): n is a, c, g, or t
agtgctgaaatgtcaccttgggccttgtgaatgctaggcaaaggcaaactattgaaccactaaccatttccttggtctaaagctctaaaagcactcaaaagggattaaaannnnnnnnnnnnnnnnnnnnnnnnnnnnnnngtagccacggtggggatttaatttggcatgggtatgtgatggtttctatggcacaggcctggcacctgcaaacattttttccaaaaaagggacaaaagcaagctcttttattctt

SEQ ID NO: 2665 - DNA, 562 bp, Cricetulus griseus
ggactttgctgctgaggttgtgcaccctggagacctaaagaattctgttgaagttgccctgaacaagttgctggaccccattcgagaaaaatttaataccccagccctgaagaagctggccagtgctgcctacccagatcctccaaaacagaagcccactgtcaaaggccctgccaagaattcagaaccagaggaaactcatcccgtcccggctggatatccgtgtaggcaaaatcgtcagcgtggagaagcacccagatgcagatagcctgtatgtggagaaaattgacgtcggggaagctgaacccaggactgtggtgagcggcctcgtacagtttgtgcccaaggaagaactacaggacaggctggtggtcgtgctgtgcaatctaaaaccccagaagatgagaggagtgctctcccaaggcatgctactgtgtgcttccatagaaggggtgagccgccaggttgaacctctggaccctcccgaaggctctgctcctggcgagcgagtatttgtaaagggctatgagaagggccaaccagacgaggagctcaagcctaa

SEQ ID NO: 2666 - DNA, 535 bp, Cricetulus griseus
ctgtcgcctcagaggcccggaactcgcgggcttgtgcgaaccggaaggatgcggattctccagaggaggagatgaaggagccgccaggagacgacgcggagctggtggccgaggcggaggccgtggctgccggctggatgctcgacttcctctgcctctctttgtgccgagccttccgcgacggccgctccgaggacttccgccggactcgagatagcgcggaagctattattcatgagctacccagtcttacagcttatcaattgagaactgtatatatttgtcagtttttgacaagaattgcagcaggaaaatctcttgatgcacagtttgaaagtgatgaacgtattacccctttggaatcagccctgatgatttgggattcaattgaaaaggaacatgacaaacttaataaagaaatacgggatttaattaaaattcaggctgtggctgtttgtatggaaagtggcagctttaaggaagcagaagaagtgtttgaaagaatattttgtgatccggaatctcacacgtcttt

SEQ ID NO: 2667 - DNA, 475 bp, Cricetulus griseus
tgcccgtgcccaccccgaccccacgtgtcatgcccaacagggcctttgttgctttgagcccgaggtcatgccttgacctcaagcaagagctgtagccagcccttgcagtgcagaccagaccacgggcaacggcaggggccgtccccacgagggcagcccctccgcacagttctagatgcgtatgcacagtatttattccttcctgcgctcctagtggtcgtgactttcgcagcagcagctcccctggcttcccacgggtgagacctccctgtggacccgagaaccacccgctgttcccgcagctgtcctccgcaatgccaaacgcaaggttccagagagcacttgctctccaagtttcctgagccgttcttttgaccccgggcctgggcactggggagcaggtgtgcctacccaggcccgactgcgtgcctcccaagggatcatggcaccttgagcacatcctagtttcctgaga

SEQ ID NO: 2668 - DNA, 517 bp, Cricetulus griseus
caaggctattgatcacaatgtttgtcaatcatttcatacattgatgttatagccctttggtgagctgataaggcacctgggcataggggccatgtctttatcttctgtcttcccatacagtgcatgggtctggtaagaaagttaatgttaggtacttaattatctagtatagtttcattttaagtttagcacaggcaaacaacttgttttggatctttttaaattcaaatcaaatttaatttgccaattaccttaaattcacacagagttcccattcatccgtgacctagttcctcctattattgatatcttatctcaaagaactacatttgtcttaaagtaagaagctaacatcagtgcactactatcaactcaaccccacttttgcctttaatgccatttttctgttcctgtttagaattatatttagtcatcatgtctccttagtttcctctggtctgtgattgtgtctcaaaccatttccccacgatcttggcaaggttgaagcacactggtc

SEQ ID NO: 2669 - DNA, 562 bp, Cricetulus griseus
  misc_feature (107)..(126): n is a, c, g, or t
  misc_feature (177)..(205): n is a, c, g, or t
tacacccacccacacatacctgtcagcacattgggctggatgggaaatgatatcatccagaactatcatttttgttttgtttctatatttgttagtttgtttctccnnnnnnnnnnnnnnnnnnnnacagccctagctgtcctggaacttgctagaccgggctggccttgagctcgnnnnnnnnnnnnnnnnnnnnnnnnnnnnngtgggactggaggcgtgagtcaccactgcccagctgaactattgtttttttcacatgtattttggcagtcaaaatttctttacatgatttgattaccagttttgcatgtaagaggcagaactctacctttaatgagaggttttacaaagtaaagaagttgtgtttgatgaaacagcttttaaatgcgctttcatttacataatgtataagccaattcttttacattctaggttcttccttaactgaagatgaccttatttttcttagaaatacgctaccagtaaagccacatataataagcaaaacatgcctggtaaaactaagtgaaattcaaattaaccccattcatggtgtgct

SEQ ID NO: 2670 - DNA, 562 bp, Cricetulus griseus; identical to SEQ ID NO: 2669
  misc_feature (107)..(126): n is a, c, g, or t
  misc_feature (177)..(205): n is a, c, g, or t

SEQ ID NO: 2671 - DNA, 459 bp, Cricetulus griseus
  misc_feature (5)..(49): n is a, c, g, or t
  misc_feature (78)..(100): n is a, c, g, or t
  misc_feature (102)..(129): n is a, c, g, or t
  misc_feature (324)..(358): n is a, c, g, or t
ccgcnnnnnnnnnnnnnnnnnnnnnnnnnnnnnnnnnnnnnnnnnnnnncagagtgagtgtcaggacaggctccaaannnnnnnnnnnnnnnnnnnnnnngnnnnnnnnnnnnnnnnnnnnnnnnnnnngttatttcccactcagaaggcataaggtgtgcgccaccaccacttggcgatttattttattttcatttatgtgtatacctgtgtgaatctatatgtatgcaaacatgcctgtgtgtgcccttggagaccaaaacggggcatcagatcccctggagctggagtttcaggcaactgtgagctgtctagtgagtgtgnnnnnnnnnnnnnnnnnnnnnnnnnnnnnnnnnnngagtgctcttacctgccaaacctaacaactctatggctcacaaggttcagttaagctcattagaggcctaaggacaagctcctgcttcgacgcaaggagta

SEQ ID NO: 2672 - DNA, 533 bp, Cricetulus griseus
aaagttgtctattagcatattgaaattttagtttcctctatacttctttagtcctaaggtagagtattaagagttcattcatgaggctttatgtttgatggctctcctagataatcacatttaagaaaacaatggattataattttcaattaacaaatgagttaatgaatgtttctttgttgtgtagttatttgatttactattggcagtacaaatgtaacaaatcaacatttataggaaataagaaataataatcttttctaattgcaatcactgtgtgtgtgtgtgtctttgattctattttcattctagatcctctaaaggtccaccatgatgatggcctggcagatctgctctttgcctctagtggacccccaaatgcttcagcatttatagggcaaagtgatcctctgggtgacaattacggtatggcttcaactaggatcattatgtcattgtacagagatgcatacaataaatgacaattgattaagagaaaaatacaataaaaattttgaggaaagttctatata

SEQ ID NO: 2673 - DNA, 444 bp, Cricetulus griseus
  misc_feature (363)..(405): n is a, c, g, or t
cttcccagtggccccagctaatggttattaacatgttaggaagtctgatatgactctcttcttgctcttgccaatacattactagaaaaatagatgccttttacaaaagcaatccttggtttttaatttttttttttaatgtttgtattttggatctggatagggtttcttaaaagtctaatgaaatttggggattttagagagaacatgcaaataaatttgaaaattgacattatgactgaaggtagagcaaggagctaaccattttgagtttgggggatgtagtaataatgttttttaaaaaaactaattagtgctgggcattggtggtgcacgcctttaatcccaccactcgggaggcgnnnnnnnnnnnnnnnnnnnnnnnnnnnnnnnnnnnnnnnnnnncagagcgagtgtcaggataggctccaaagctacatagag

SEQ ID NO: 2674 - DNA, 566 bp, Cricetulus griseus
catcgcgccgcgcgcttgctctgcgcttccccggagtgaggcttctcggctcgccggctcccgtcgcaggtccccggcagcgatggcgctcaaggactacgcgatcgagaaagaaaaagttagaaaattcctgcaagagttttattatgatgatgaactcggaaagaagcagttcaagtatggaacccagttggttcatctggctcatcgggaacaagtggcattgtacgtggacctagatgatgttgctgaagatgaccctgagctggtcgactcaatttgtgagaatgccaaacgctactcaaagctgtttgctgatgttgtacaagagcttctgcctgagtacaaggagaaggaggtggtgaataaagatgttctggatgtttacattgagcaccgactgatgatggagcagcggagcagagaccctggggcagtccggaaccctcaaaatcaatatccttctgagctgatgcgtagatttgagttgtatttccaaggcccaagtagcagcaagcctcgagtgatccgagaagtgcgggctgattctgtggggaaattggtga

SEQ ID NO: 2675 - DNA, 558 bp, Cricetulus griseus
  misc_feature (182)..(202): n is a, c, g, or t
acattcggactcgaatctatgaatcaaagtactggaaagaggaatgctttggacttacggctgaacttgtagtcgacaaagccatggagttaagaaacgctatgtgctggaggaagcggaacagctggagcctcgagttagtgctttggaagaagatatggatgatgtggagtctagtgaannnnnnnnnnnnnnnnnnnnnaagctggaaagagtgccatcacctgatcaccgaagaagaagctaccgagacttggacaagccacgacgctcccctgcactacgctacaggaggagtcggagtcggtctcccaggaggcgaagtagatcccccaaaagaagaagcccttctccccgccgagaaaggcataggagcaagagtccacgacgccatcgaagcaggtcccgagacagaagacacagatcccgctctaaatccccaggtcaccaccgtagtcacagacataggagtcactcaaagtctcctgaaaggtctaagaaaagccacaagaagagccggagaggaaatgagtaatggattgatttatattttagtcc

SEQ ID NO: 2676 - DNA, 508 bp, Cricetulus griseus
agctcctctggtcgaccctgcgaatggttttggcggtggcttcatgcccagagctatggaggtgtcctcctcaacttcctgggagctgcccctggtggctgtgtgccaggtaacatcaacaccaaacaagcaagagaactttaaaacatgtgctgagctggttctagaggcggccagactgggtgcttgcctggcttttctgcctgaggcatttgacttcattgcacgaaatcctgccgagacattacagctgtctgaaccactggatggggaccttctgggacgatatagccagcttgccagggaatgtggaatctggctgtccttgggtggtttccatgagcgtggccaagactgggagcagactcagaaaatctacaattgtcatgtgcttctgaacaacaagggactagtagtggccacttacaggaagacacatctatgcgatgtagagatcccaagtcaagggcctatgcgggaaagcaactctaccatgcctggaaccatt

SEQ ID NO: 2677 - DNA, 429 bp, Cricetulus griseus
caaggagagatgctaactgcacccttgccactgccaaagcaatagaggcagaagcatcccctctttgccacccagcccagctttgaccctggcattaaccagactttttccaggaaaactgggttctggcaaggagtggcattgtttcttccaatctgctgattttcttgtctgcacctaaaacacagcagtatgctcccatgaccctctgccattccattggtcttcaggacccaggattctggggctgaaatgttgaagaaacgccagtgacttattccagagtgcctcagttaggggaacttctgtaaagaaccctgggtgttgagcaaaaaccttattaatattattaatgacctataattagaagcttcctgcctcttttttttctttttggttgctcctgtggaaatactaaaattactaagt

SEQ ID NO: 2678 - DNA, 84 bp, Cricetulus griseus
ctgccttaagcctgtgagtcatcactagctccctttacaaagtagaccgccactgccctccctcccatgtcactttcctctttg

SEQ ID NO: 2679 - DNA, 577 bp, Cricetulus griseus
  misc_feature (31)..(46): n is a, c, g, or t
  misc_feature (309)..(321): n is a, c, g, or t
  misc_feature (323)..(337): n is a, c, g, or t
aattgcatctgaaagttagtattttaagttnnnnnnnnnnnnnnnnatgttgttcagccccatgaattttttgggattggattctttttaggtattacggatgttggtgaggtgccttattgatgaatgggtatggactttttttaatcgaagctgatgcatgttctagttttctgttttcttctgtttatctgcagttgagtggagtcttggagggttgtcagaattgtctgctcacagtaggtagctacagtaacaggctagaagagacacgcattatggaacagatttcaattcgcacatatttgnnnnnnnnnnnnncnnnnnnnnnnnnnnngactaatttggttatttgccatttctggggattaaactttaaaaaatgttcttcttttctgtatctgatgttctgtgtgctattagtgacgcagccaacacgaacggttgtcatgtgtaacacaactttcgatcaccgcgaaaacagcgtcctgggaaagcgtccatgcttgatatcgtttggttcatgaacattaagtttccagtacaggtgacccatagctcaaagtgttaaataatt

SEQ ID NO: 2680 - DNA, 538 bp, Cricetulus griseus
tattcaactattgcatccctggtgtcaagtcaatgttggatcctgtcgatttatgctgggacggtgttacctggttacaggagaagtacagaaggctctggaatgtttctgtcaggcagcatctgaagtgggcaaagaagaattcttagatcgcttgatccgctcagaggatggggagattgtgtccactcccaagctgcagtattatgataaggttttacgtctactcgatgttgttggactgcctgaactggttattcagctggctacatcagcgattactgaagccggtgatgactggaaaagtcaggctactttaagaacatgcattttcaagcatcatttggacttgggtcacaatagccaagcatatgaagccttaacccatattcctgattccagcaggcagttagactgtttgcgacagctggtggtagttctttgtgaacgctcccaactgcaggatcttgtagagtttccctatgtgaatctgcataatgaggttgtgggaataattgaatcacgtgctagggctgtg

SEQ ID NO: 2681 - DNA, 567 bp, Cricetulus griseus
aacagtgaggtggtggccatcaagaaaatgtcctatagtgggaagcagtcaaatgagaaatggcaggacatcatcaaggaggtgcggttcttacagaagctacgacatcccaatactattcagtaccggggctgttacctgagggagcacacagcttggctggtgatggagtattgcctgggctcagcttctgatcttctagaagtgcacaagaagccccttcaggaggtagagattgcagctgtgactcatggggcacttcagggcctggcatatctacactcgcacaacatgatccatagggatgtgaaggctggaaacatcttgctgtctgaaccaggcttggtaaaattgggggactttggctccgcatctatcatggcacctgctaactcctttgtgggcactccatactggatggctccagaggtgatcctagccatggatgaggggcaatacgatggcaaagtagatgtctggtccttggggataacctgtattgagctggcggagcggaagccaccactgtttaacatgaatgcaatgagtgccttataccacattgca

SEQ ID NO: 2682 - DNA, 567 bp, Cricetulus griseus; identical to SEQ ID NO: 2681

SEQ ID NO: 2683 - DNA, 432 bp, Cricetulus griseus
gaggagactggtttgaataactaagcaattagaaaagatgttatcctactagaatgggaaggtcctgaaagaccttgttgtaccaggcctcacaggaaactcaggaatttctggaaacagcttttttgagagctatggagcattcacagaactcaagtcaaagttcaaactaacaatcagaacaaaaaaatgtaaagtactgatagacaaatgtgaatgctggccttggcttcgagtgtcaagggaatgaggctatgtatggtacagttacctttgaactatgcaactgacaacataagcctgctttatagcagctgttaactagcttgctacaaggaaaagtcagcaaattgtaggtttataccctaaaactcccagcagtgcaactgcaagctgggacatctccaatttaacaaatgagaaatagtaaca

SEQ ID NO: 2684 - DNA, 575 bp, Cricetulus griseus
ttttcttagctgctcttctctccagaagcttctgccggttcccccagctctgggtactcggctctgcgtcgtgccgccatgatgggccaccgtccagtgctcgtgctcagtcagaatacaaagcgtgaatctggaagaaaagttcaatctggaaatatcaatgctgctaagacaattgcagacatcatccggacatgtttgggacctaagtctatgatgaagatgcttttggacccaatgggaggcattgtgatgaccaatgatggcaatgccattcttcgagagattcaagtccaacatccagcagccaagtccatgattgaaattagcagaacccaggatgaagaagttggagatgggaccacatcagtaattattcttgcgggagaaatgctgtctgtggctgagcactttctagagcagcagatgcacccaacagtggtgattggtgcttaccgcatggcactggatgatatgatcagcactctgaagaaaatcagtacacctgttgatgtcaataaccgtgatatgatgctgaacatcatcaatagctctattactacaaaagtcatcag

SEQ ID NO: 2685 - DNA, 536 bp, Cricetulus griseus
tgcatctggtggcgttggggccccggatcccggctggggtcgggtatgtctgctcatcggaagcacgtgtttactgaaaaagtgctgaagagactttttcctaatgtttcaagtggacaagataaagggacacctcagactcctgctttggagacaccgcccaagaatgtgaccccagaggcagtagagcacacccatggtcacaagctggcagatggtgacattaagatccagcctgaacgtcggctctacactgtgagtttgcctcctccagggtatgttcctagtttgccagaacctaccagctgcgtgaattctgaaaatgcttccagtggtggtgacacagaagagccagatcttcatgaccaaccaaaaaggagaagagttagaaggcacaaatccaagaaaaatattaaaaaccctaatgatgttgtgataaagcaagcagaactagagacacagccaggtcttttacaagagaaaatgcatgcagatacccccacaatgagcaaaaacaaaagaaagaagctgaaaaa

SEQ ID NO: 2686 - DNA, 482 bp, Cricetulus griseus
  misc_feature (13)..(103): n is a, c, g, or t
atggttgaacccnnnnnnnnnnnnnnnnnnnnnnnnnnnnnnnnnnnnnnnnnnnnnnnnnnnnnnnnnnnnnnnnnnnnnnnnnnnnnnnnnnnnnnnnnnntttaaatctaagaagtgttttctataattcttcaagtgtcaacttttaatacatgaattaaatccagttaagcttagcagtctccctgcaaggtcaactccagtatatgcacggactgaggaggtgacaagatactcctgtgttccttccagtcagcccttggattacttggaatttccacctggaaggttgcttctccacagtgatttcacattacaggaaggttttccttctttgtttctcagacctggtcctgtagacgggaaggagcctggacacagtgacccaacacattcacaaaggccctgcaggaccaccatggcttatgatgactccatgaagaaagaagattgctttgatggtgatcacagctttgaag

SEQ ID NO: 2687 - DNA, 472 bp, Cricetulus griseus
ttgacacatcctttgtgaggaagtcacggaccatccttgagacagagcaagagacctcccaaagtccctataaccttgcatataagtataattttgagtattcagtggttttcaacttggtactgtggattatgatcggcttggccttggctgtgattatcacctcttacaacatttggaatatggatcctggatatgatagcatcatttacaggatgacaaaccagaaaattcgaatggattgagtttgccttatgctacccttagcaggtttgggaactggttgttctgttagagtatatcttttagtatagtttaaagtagacagtatagtataccttaaatttattttaaagaaaacatagatttttgttctctattttgtgtgtgcctgtggtttctttagagtgattcatagtgtggacataaattgatatagattccataatatgcttaaatgttgttgacatag

SEQ ID NO: 2688 - DNA, 552 bp, Cricetulus griseus
aatcgggacgcacaacggcaccttccactgcgatgaggctctggcctgcgcgttgctccgcctcctgccagagtacaaggatgcagagattgtgcggactcgggaccccgaaaaactggcttcttgtgacatcgtggtggatgtgggtggcgagtacaaccctctgagacaccgttacgatcatcaccagaggacttttacagaaactatgagttccctgtgccctgggaagccatggcagaccaagttgagcagtgcgggacttgtctatctgcattttgggcataagctactggcccagttgctgggcactagtgaagaggacagcattgtggataccctctatgacaagatgtacgagaactttgtggaagaggtagatgccgtggacaatgggatttctcagtgggaagaaggggagcctcgatatgcactgaccactacactgagtgcccgggtttctcgacttaatcccacctggaaccaacccaaccaagatactgaggcagggttcaggcgtgcgatggacttggtgcaagaagagtttttaca

SEQ ID NO: 2689 - DNA, 419 bp, Cricetulus griseus
tgatgtggacaatgagctcttggactatgaagacgacgaggtggagacagcagcaggtggagatgggacggaagctcctgccaagaaagacgtgaagggctcctacgtctccatccacagctccggctttcgagacttcctgctcaagccagagttgctccgggccatcgtggactgtggctttgagcatccatcagaggtccagcatgaatgcatcccacaggccattctggggatggatgtcctgtgccaggccaagtcaggcatggggaagacagcagtgtttgtcctggccacactgcagcagctggagccaatcactgggcaggtgtctgtgctggtgatgtgtcacactagggagttggcttttcagatcagcaaggaatacgagcgcttctcaaagtacatgccgaatgtca

SEQ ID NO: 2690 - DNA, 580 bp, Cricetulus griseus
  misc_feature (177)..(191): n is a, c, g, or t
ggatggggctactgaacctcccctccgtgcttgggctgaaagattaccccacccatctgtatgcatgtgtgcagaacctgagcctgagttacgacagtatcaccccaaaatagttcccatcctatagatactagactcttctctgagccagcttttctgtggccacaagattgcatnnnnnnnnnnnnnnngaaaggacatatattgagctcctggagaaagtttagtaagacatggggacaggtgcaaccagaaacagccacctttgtgtttcagaacagcccccaagacagcgcctcacagaaagctgcatggctgcacctagtggcgcacgccttcattcccagcatttggggcaggccaccagatacaaccttgtctacagaggtccatgctgcatagtgaatccatgttttaaatacaacaaaaaaagaactgcatagtggccaggacatgcagactgctgggagcttgtgtatctggctgtcactggcagtctgggcagactcctgcactctccagtctattgcagtacttgctgaagcagcagattctgcagtctctccagttagataagtct

SEQ ID NO: 2691 - DNA, 478 bp, Cricetulus griseus
agtggcggctttctccgtctctgaggtgcggcggcgcgctattcggctttcttctgactttcccgcagatttcagaatgtctaccatcttgacttccacttttaaaaacctttctactacatcaaaatgggccctcagattttctgtaagacctctgagctgttcttcccagctacgatctgccccagctgtccagaccaagtccaagaagaccttagcaaaacccaatattaagaatattgtggtggtggaaggcgtccgcattccatttctgctgtctggcacttcctataaagacttaatgccacacgacttggctagaggggcactttcgggtttgttgcatcggtccaatgttccaaaaaatgttgttgattatatcatctttggtacagctattcaggaagtaaaaacaagcaatgtggctagagaggctgcccttggtgctggcttctctgacaagactcctgctcacact

SEQ ID NO: 2692 - DNA, 586 bp, Cricetulus griseus
gaagaatctggcctaacccctttaggagagtgggtaagacatctctcccatttcctccccatttatcccctaaaacaagacaatcagggtatggcttgagaaggatctttatttatttctcagcctgcccttggggagttgagggcgccctgtcttccttttgggacatgggttgaagagctagcttgttttgttttattattcctggccatatctgagtccagggagcacttgtatgatttaatggtttgggagtcgtagccagagaagaatcacactgttaaaataggaattgctacctccccagccttctcagtcagcttgttcttttctcaagtaagcttttggccaaggaagaatcttccttttcttgtttttccccctgagaagccattcctttgtctccaagttccctgggggcctgcctattacctcccaatggagggttttttggggtggtggtccccgtctgggggactcctccagccagtactccagggctctctgtctcccatcctcttccattttgatagtataatctatttttaaatggggcttttcaataggggagaggaaagcatctctt

SEQ ID NO: 2693 - DNA, 263 bp, Cricetulus griseus
  misc_feature (41)..(58): n is a, c, g, or t
  misc_feature (99)..(165): n is a, c, g, or t
tatgcatctggatgctaaaaataaagtggaatggtctcttnnnnnnnnnnnnnnnnnnaaaaaaagcaatgaaaaaaaatccatgacaatgttccttgnnnnnnnnnnnnnnnnnnnnnnnnnnnnnnnnnnnnnnnnnnnnnnnnnnnnnnnnnnnnnnnnnnnaaccgaacccccccttcccaaagggggattttcctttcccaaactagaaaaaggacccaaatcctcaaaaaaaaaagggttttgggcccctttaaaaa

SEQ ID NO: 2694 - DNA, 537 bp, Cricetulus griseus
  misc_feature (419)..(453): n is a, c, g, or t
aaaaccagaagtaaagatttcagaaaagaaaaaaatagcagaaaagataaaagagaaagaacggcagcagaagaaaaggcaagaagaaattagaaagaggttagaagagcctgaagaacctaaagtgctaacacctgaagagcaattagcagataaactccgtttaaagaagctacaggaagaatcagaccttgaattagcaaaagaaacttttggtgttaataatacaggttatggaatagatgctatgaacccatcttcaagagatgacttcacagaatttggaaaattactaaaagataaaattacgcaatatgaaaaatcactatattatgccagttttttggaagccttagttcgagatgtctgtatttcattggaaattgatgacttgaaaaagattaccaattcattgactnnnnnnnnnnnnnnnnnnnnnnnnnnnnnnnnnnnaaacaaagccaaaaagaagaagaaaggtgtggttcctggagggggattaaaggccaccatgaaagacgatctggctgattatgg

SEQ ID NO: 2695 - DNA, 544 bp, Cricetulus griseus
gggcggtcggcgcagcccagggactgacttcagccgggcagtcggggcttcttggcaggtgatggcgccccccgtggcctgaaagtccagcgccctcggcaagcggcagacaggcctctctccgtgtgtctttgtcaagtctccgggctactttgaacatgctggtgcggctagccaagctgtcctgccctgtgtatcagtgcttccatgccttaaaaattaagaaaaaatgcctacctctgtgtgctacaagatggtcttcaacttctgttgtacctcaaattactacccactacactgttcatccccgggaaaaagacaaaagatgggaaggagtgaatatggagagatttgcagaagaagcagatgtggtaatagttggcgctggccctgcagggctctctgcagctattcgtctaaagcagctggctactgaacaaggaaaagacatccgtgtgtgtctggtggagaaagctgctcagataggagctcacacgctctcaggggcttgccttgatccagctgcttttaaagagcttttccc

SEQ ID NO: 2696 - DNA, 430 bp, Cricetulus griseus
  misc_feature (66)..(98): n is a, c, g, or t
aactctgcccatgttagaggtgaagcctccagaaaggccttcaagtagatgtagagacccaccgannnnnnnnnnnnnnnnnnnnnnnnnnnnnnnnnacaaaaaacggtctcgaacgaggtcccgctcccccaagtaccactcgtcttccaagcccaggtctagatcccactcaaaagccaagcactctctgcccagtgcctaccggacagtgcggcgttcgaggtgggtgtgcaggcgctcatgccctcctgctcatgtctgccctacatgctgaacttcctcctggccccctgtagagctagcagatggtttaaaatgagtatagtgttcagtgggctggtgaacacactagggtgtgtgtgtgtctgtgtctgtgtgtctgtgtaggtttaaaatgagcaacgttcactaggctggtgaacacact

SEQ ID NO: 2697 - DNA, 408 bp, Cricetulus griseus
gcacttgttcttagaaagaacccaggttaaattcttagcagctacacgatggctcacaaccatcaataactcaagttcccaggggatccagtgcagcagtctggtctccacagacaccaggcatgtgatgcatatctatgtatgtagacaaaacactcgcacacatcaataaacctaaaaatccagttaataaaatccatgttcaagaaaaaatgtgactgtggactggagatatagctcatttggtagagcttccctagaatgctagaatacctagatttagtcccagcaacaattggatttggttctgcatgcctataatcatgtttgaggtcttctttggctttgtaagaagtccaaggccaggctgggatatatgatatcctgtcagaaaggcagactatgtcc

SEQ ID NO: 2698 - DNA, 579 bp, Cricetulus griseus
tttacagtccttgatcaccaggtatttattatgtatttgtaaaatacaaggtgtggggctaaatgaagaccagaagttttagcactaatggggctgtgaggtggacaataagagaccctagtgggaaaggaaaagtagctcagaagcatttgtttagaacttatatcatgtttattaaagacaatagtagagaaggctgtgggagctaggggacagcattggcatgcatggcacgggctgtccagccttgttcccagcctgcctgcaggttgactctgagaacttgtgaacttacaaggtctaacttgactgctgagcaagagctgcttatgatttctaataaaataatgatgttggagcggctgagagtcctttctgttttaggccctgtgttcaacacagaatgcatcatgagaataataaaaatgtatagggtcaaaggtccatggggaaaaagggaggggtatatttcccaagactcaaggacaggattgtaatgttgtaaggattacaattgagaactggaggtttcaaaaagtcagtgcactaaaaagcatgttacctttcccatcctacctg

SEQ ID NO: 2699 - DNA, 544 bp, Cricetulus griseus
cggcgcgggttcgtcttcagggcacgtggagtggctgtcgcgccccgcggggcgggagatcgcgagatggacacccctccgctctcagactcggacgcggagtcggaagagtccctggtctcagaccgggagttgcaggatgcattttcccgaggactcctgaagccaggcctcaacgttgtgctagagaggccgaagaaggcggtgaatgacgtgaatggcctgaaacagtgtttggctgaattcagacgggatctggagtgggttgaaaggctcgatgtgaccctgggtccagtgccagaagtcagtgaaactcagccaaccccccagaacaaggaccagaagaaaggtgttaatccagaagacgacttccagagggaaatgagtttctaccgccaggcccaggctgcagtgcttgcagtattaccccggctccatcagctccaagtccccaccaagcgacccacagattattttgcagaaatggccaagtctgaccagcagatgcaaaagattcgacagaagctgcagactaaacaggctg

SEQ ID NO: 2700 - DNA, 546 bp, Cricetulus griseus
accagactggactgaactcacagagatccatagtgagcccctgcctctcaccaaggaaaccctcctcaaagtaaccttcaggttgacacaggtgggtggggctacaaaggccaattactcactctcacatgtagtcttgtgtctagttttatcaaaatattaacattaggatctgagatggttcagcttgctatcaagccaggtgacctgacttccatacctggaacccactttctggaagaagacaacagagccccccaagatgtcatatgattcccccatgcacacatacacccccatccatcaacaataaatgttaaaaataaaaatattcagggctgtagagatggctcagtggttaagagcattggctgttcttccagaggacccaggttcaattcccaccagttccagggcatctgacaccctcacatagacatacatgcagtgccataaaataaataaataaattgtcactgtatttgaagggattttcttgttagttttttattacatttatgtcttcgtatgtgtatgaacatgctt

SEQ ID NO: 2701 - DNA, 570 bp, Cricetulus griseus
  misc_feature (75)..(112): n is a, c, g, or t
aagctatgtgctgaggaaatcaaagctgtctcctatattgaatgctcagccttgactcagaaaaacctcaaagannnnnnnnnnnnnnnnnnnnnnnnnnnnnnnnnnnnnncagactcccagcaacagccaaagaagtctaaaagcaggaccccagataaggtgcgggacctgtccaaatcctggtggagaaagtattgctgcctggcctgacccttgcaaacagttggtgtttaagctgcaacaactctttacgacatgtgggtgtggtcataggacaagccctcaaagcaacccctttctgtccttaatttcctgtctgtgaggttagggttgagatccatatgcaaaataagttaaagatatttggaagttaagattttttttcataactatggaaccttagaatggtagaactctggattaatttgtatctcatacgaaaagggctcttcaaagctaggtgccagcatgaagttctgctgcatcatacaggacaaaggagaccgtgaccctctcctgattaagggctactgagtgctcattgaatgacacatgcacaccagactt

SEQ ID NO: 2702 - DNA, 389 bp, Cricetulus griseus
  misc_feature (53)..(67): n is a, c, g, or t
gtctttctatctgggtactttctgtccttccatctataaaataacactatgannnnnnnnnnnnnnncctatgcaagctctttatctttgccttcccagcctccaaaaatatgagccaaatttttctgttcattacacactaggcagtttcatgtattctgttataggagcacaaaatggacaaaggttggatcaacactgagagacaccacaaaatagattctgaaatgaatgctgggtattgaaatttcacagttttttcataaaacattgcctatgggataatgagaaatgtaggattggacaagcagagaagtttcacaggcatatagtcatgaatagaccacaggggattccacaaaaaaatcggggtcgggaatgaccccctc

SEQ ID NO: 2703 - DNA, 444 bp, Cricetulus griseus
attgttcaccgagccatcctggggtcagtggagagaatgattgccatcctcacagaaaactatgggggcaaatggcctttctggctctctcctcgccaggtgatggtagtgcctgtgggtccaacatgtgatgaatatgcccaaaagggtcggcaacaattccatgatgctaaattcatggtggacattgacctggatccaggctgcaccttgaataagaagatcagaaatgcacagttagcacagtataacttcatcctggttgttggggaaaaagagaaagccagtggcactgtgaacatccgcaccatggacaataaggtccacggggagagaactgttgaggaaactgtggagcgactgcagcagctcaagcaatcccgcagcaagcaggcagaagaggaattttaacaggaacatggccggcactggctcagcctaaag

SEQ ID NO: 2704 - DNA, 302 bp, Cricetulus griseus
  misc_feature (117)..(139): n is a, c, g, or t
tatccaggcagtattttatcactgcaggattaagggtatgttcacgtttatgatgtgaggtgcctcgaattccaggggaagccagcctatgatctctttggctgaacactccaagannnnnnnnnnnnnnnnnnnnnnncctgttacgggtaacagattggtgaccacatgtgctgactgcaagctgacagtctttgacagcagctctttatcttcccagattccttttcttactaccattaggcgtaacactatcactgggagatggctaacgaggttccaagctgtgtgggaccctaaac

SEQ ID NO: 2705 - DNA, 580 bp, Cricetulus griseus
  misc_feature (343)..(343): n is a, c, g, or t
aggtgtatgtagtgtaggtaacacagaccagacagcgcttggcctataaagtgcttatgggctgtattacctgctaccccagcggctcttcctaaccctattgtgtcattattcccaggtcaggattcagatgcggccagcacaggtgccctaatgtttaggctatcttgagcaggtcaaatctgatggtgttttgtcctgggatgtttgtgaggaacctaaggacaagttacaaagtccgtttgcattttccctcttgctctcctgacacacaggctgatgacagtagtttgccatttgtcatgctacatgcaagccctgctaagcacacaccatccactgngattttttttctctctctctcttcagaaggaaaacccactgatgctagcggagtcttaggggtttattcactgtcctgtcccatttgaaatcttacactacacaaaatgggggaacccctggccttggcaatgcttacagtaaaaattagaacaaatttgaagagacttgttgttcgtggtcctccatcaacttcaaactctgttctcaatgtaaccatctccaaatttagacagca

SEQ ID NO: 2706 - DNA, 505 bp, Cricetulus griseus
ccggtccctggcgggcgtcggccttcagggctctggtcctgggacaagatgccaacgaagtagtgacccgggaggagcagatctaagccgacggacctgttaccatgtcccatcaacctccgagctgcctgactgagaagggtgacagcctctgtgagaccccaggaaatgaaccccctaataaggttcaccccagcctggacacattcactcctgaggagatgctgcagcaaatgaaggaactcctggttgagaaccaccagctgaaagaagccatgaagctaaacaatcaagccatgaaagggagatatgaggagctttcagcctgggcagagaagcagaaggaagaacgacagttgtttgacacacagaacaaagaagctaagaagctcctgatgaccttgagttatgaaaatgagaaactgaaggtggagcttggaaaactaagagagaagtcagaaaggccatttgaaggctccatatgtggctccaggcctcccatgga

SEQ ID NO: 2707 - DNA, 485 bp, Cricetulus griseus
  misc_feature (359)..(425): n is a, c, g, or t
agaaattgttcagtggtgtctttgtccttgtcacccctcaaatgtgaagctgctgcgcacagtggagccttatgtgacatggggatttccaaatctgaagtctgttcgggagctcatcttgaaacgaggccaggcaaagattaacaataagactgtccctctgacagacaacacagtgattgaggagcacctgggtgagtgtggctgctgggggtcacttgcggtaaaaagtggggggttgtgattggggatccagggtatgttcttgggttttacagtcccagcttcatcgtgtgagtgcttgctgtatactggctaaatctacaccttttgtttctcagggagatttggtgtcattnnnnnnnnnnnnnnnnnnnnnnnnnnnnnnnnnnnnnnnnnnnnnnnnnnnnnnnnnnnnnnnnnnntgtgccctttccagctctctgtggcccgtcatgccaccaagaatagagtgggcttcctca

SEQ ID NO: 2708 - DNA, 538 bp, Cricetulus griseus
tttttgggtctctctatgtagctctgactaggctggaatttgctacgtagaccaggttgattggaaactcacagagatcctcttccttctgcctcctgagtggggggattataagcctgtgccaccatacttaggttcagattggatttttattttttatcattattttttaagattttatatatttattatgtatacaggcgtctgcctacacaccagagggcacaagatcttattcaagctggttgtgaaccactatgtgggtgccgtgaattaaactcaggacctctggaagaacagtcagtgctcttaaccgctgagccatctctccaaccccagattggatttttataagtaaaaattatctgtactaatttatcacaaaaataacttttatttggtaaacaaaaaattttataagtaaatgaagaacttgctaaactcaagcaaaacaatgataagaccccccatacaccgggtttcacattatccagagtgtaccagatacaaacactgctctggttcttgccccatgccg

SEQ ID NO: 2709 - DNA, 504 bp, Cricetulus griseus
attgctgctgtcgaaaattgatctacggtaacttacaacaactgtacttttgttggattagcaaaccgtgtgtttaaacaatcccgtatgttgggcaacagttcaaaaaagctcagagaagcattgcccaaacttagttctctgactccgtgcattcataaggccgggcttcaaaatcataacacccaccccaactcagcaggcacgtgcctattctgcagacatgcatgggaaactattggcccgtcttagaaagagcaagcccatcaagagttaagactgactttgtgtcctatttatattaagtgatgtcccaacagggaagaggtggagccagcgtgagatctccaagtcccaatttgagtgtgggacgtgcttcgagatgcttcctggcagtcatggctcaccttcacaaagacagtcttgtggcatccagaggcaggcatacagcctggggtgcttgggcctgagaggcagttattgacagtgatgtgcagactcctg

SEQ ID NO: 2710 - DNA, 538 bp, Cricetulus griseus
catccagtgtgggagataccacggctgtgtctgtgcagaccacagaccagagcctgcaggccggaggccagttctatgtcatgatgacaccccaggatgtacttcagacagggacacagaggacaattgcaccccggacacacccctattctccaaaaatcgatggaaccaggactcctcgagatgagagaagaagagctcagcacaatgaagtggagcggagacggagggacaagattaacaactggattgtccagctttcaaaaatcattccagattgtcacgcagacaacagcaagacaggagcgagtaaagggggcatcctgtccaaggcctgtgactatatccgggaactacgccagaccaaccagcgactgcaggagaccttcaaggaggccgagcggctgcagatggacaatgagctcctgaggcagcagatcgaggagctgaagaatgagaacgccctgcttcgagcccagctgcagcagcacaacctggaaatggtgggcgagagcacccggcagtgacgcccccggcc

SEQ ID NO: 2711 - DNA, 461 bp, Cricetulus griseus
tggctcgttctgcgcaacctcacaccccagattgacggttctacactgcggacgctgtgtttgcagcatgggcctctcatcacattccacctgaatctgacccaaggcaatgctgtggtccgttacagctccaaggaagaagccgccaaggcccagaagtctctgcacatgtgtgtactggggaacaccaccatcttggctgagttcgctggtgaagaagaagtgaatcggttcctggcccaaggccaagccttgccacccacctccagctggcaacccagcagtgggggcagccagcccaggctgggctcctcgggcagcacccatggcctggtgcgcagcgacactgcccactggagcaccccgtgtctgagtggcaaaagcagcagtgagctgctgtggggtggggtgccccagtactccagcagtctgtggggcccgcccagtgctgatgatgccag

SEQ ID NO: 2712 - DNA, 546 bp, Cricetulus griseus
ctatgtttgtggtggaagcttaggcaacaatgtttctgggagagtgcttagttcctgtgaagtctatgatcctgccacagagacatggactgagctgtgttcaatgattgagcccaggaagaatcatggactggtgtttgtaaaggacaagatatttgctgtgggcggccagaatggtttaggtggtctggacaatgtggaatattacgacattaaattaaatgagtggaagatggtgtccccgatgccgtggaggggtgtaacggtgaagtgtgcagcagttggctctatcatctatgtgctggcaggttttcaaggtgtaggtagattagggcacatccttgaatataacacagaaacggacaaatggattgccaattccaaagtccgtgctttcccagtcacaagttgtctaatttgtgttgttgatacttgtggagcaaatgaagagacccttgaaacatgattgagtggacctgactcatctgagactcaaaaatctggccaccaatggtttgttccattagtttggttgtgaagttctgg

SEQ ID NO: 2713 - DNA, 532 bp, Cricetulus griseus
tctgttttgtgaaacctactagttcaatgacgattaaaacaggaaagcatgtggatgcaaatgaggaaaatctaccttccttatctacatgactggaaacatccacggtcagagttgctggagcttattcagatcatgattgtgatatttggagaggagcctccagtattctcccgtcccactatttctgcatcctacccaccatacacagcaacagggccaccaaatacttgtcatgttagtggagcttttggaaatatcctgagaccccatgtctgcatatacaggttcctaccaaagactggcatttgggcttccatctgtgggtagaaatcaaagtgtggatgttctggatcccagagtggaagagaagatgccaaatagagctagaagttttaaattatgcatgccatggaaaagccttattaccacctggaaaccagatgtaatttgaaagatagcctgaggtctccctgtgactccaggaccagtgatgtagagaataattgcagtcagctagctcattcctttg

SEQ ID NO: 2714 - DNA, 472 bp, Cricetulus griseus
agggaggccaggatatgagaaaggaacctgagccctcagcttggcctgaggtgtgcccatctgtgcaccccagggtaaagactccgaagattcagtcttcccttaggttgggccaaacctgagggacatgggccaaggcagggcaggggcaagtagaaggggtaaggtccctccagaaacaggcccaccaggccctttcgagccttcccaggcctccaagggtggcaggagccagctttacctcacccactgtgacccactgcttccctgtcagcctgggaccaggttctgcagatctagcacagctctggcttgctccatgagtcaagagagccaagctttgacttcctcttcctggactcaaggcttttccctggctttcttcctttacccctgcagtagctactggtgctggcacaagttgaccgggcccacccatgggtgtctgcctcccgtcgactttccattaagg

SEQ ID NO: 2715 - DNA, 393 bp, Cricetulus griseus
  misc_feature (243)..(299): n is a, c, g, or t
tgtggcgccacaggcctttgtgtttggacagaacttgagggacagagtgaagttaatgaatgagaatgccgatgtggcaggtgtagacagcgctgcatatcccagctcatagacgcccaccgcaaccaactactttctgcagtacatcagctccggtgcagacaactcgacccacagtgctgacacctccaacaagtttgtgtttggccagaacatgagcgagcgcgtcttgagcccccccannnnnnnnnnnnnnnnnnnnnnnnnnnnnnnnnnnnnnnnnnnnnnnnnnnnnnnnnctgagccatcgtcccaggaggctgcccccaagaaagagtcactggccgagtcagccgctgcctacaccaaggctacagcctggacatgtttgct

SEQ ID NO: 2716 - DNA, 467 bp, Cricetulus griseus
agccagtacaggcacctcactgtgagcatgccttctgcaacgcctgcatcacccattggttctctcagcatcagacgtgcccggtagaccgtagggttgtcacggttgcccacctactcccagtacctcggatcatgcggaacatgttgtcaaagctacagattgcctgtgacaacgctgtgtttggctgcactgctgttggccggcttgacaacctcatgtcccacctgagtgactgtgagcacaacccgaaccggcctgtgacctgtgaccagggctgtggcctggagatgcccaaggatgagctgccaaatcacaattgcattaagcacctgcgctctgtggtgcatcagcagcagactcgaatcgcagaactggagaagacgtgcgctgaacacaagcaccagctggccgaacagaagcgagacatccagctgttgaaggcttatatgcgtgcgatccgaagt

SEQ ID NO: 2717 - DNA, 555 bp, Cricetulus griseus
tcccaataagaagatgaaacgaaacttaaggaaaattctggacagtaaagcaatagaccttatgaatgcactaatgagattaaatcagatcaggcctgggcttcagtataagcttttgtcacagtctggcccagtccacgccccagtcttcacaatgtctgtagatgtggatggcacaacatatgaagcctcaggaccatccaagaaaacagcaaagcttcacgtagcagtgaaggttttacaggcaatgggatacccaacaggttttgatgcagatattgaatgtatgagctccgatgaaaaatcagataatgaaagcaaaaatgaaacagtgtcttcaaactcaagcaataatactggaaattctacaactgagacctccagtaccttagaggtaagaactcagggtcccatcctcacagcaagtggcaaaaaccctgtaatggagctcaatgaaaaaaggagaggtctcaagtatgaactcatctcagagactggtggaagtcatgacaagcgctttgtaatggaggtagaagtagatggacagaaatttag

SEQ ID NO: 2718 - DNA, 478 bp, Cricetulus griseus
ttggagggtgctgtgactgagcgacctgtcctgggctgtgtcccagtgtcatcgcggccctcaacagtctctgcgacctgaaggcggaggccagacacaggcaggctgggtggaggtggtggcctcagaagccccaggcccggttgcagcctcgggtgcagcttatttttaagacacaatgaaagccttctatgctttctgtgttgtgcttttggtgtttgggagtgtctctgaagccaagtttgatgatttcgaggatgaggaagacatagtagagtatgatgataatgatttcgctgagtttgaggatgtcatggaagattctgttacggaatctcctcagcgagtgataactactgaagatgatgaagatgagaccactgtggagttggaagggcaggatgaaaaccaagaatgcgattctgaagatgcagatacccaggagggagatactgaaagtgagccgtatgatgatgaa

SEQ ID NO: 2719 - DNA, 478 bp, Cricetulus griseus
aatgtgacaatataaaagtgacttgtgccacttttgggcagtaacagtgaaaaacgctcctatatccattccaatctttctcagcgtctccatgattcctgttgatgtccgaagaagcctttatctccatagaatggacattcccaccacctgctccatcctttaaacagcttttcccctgaggattttggcaatccttatgaacaatatcaagaaaaataatggaaggatacttatgcggtgaatttgacttttaaactaaatgcaattttaagggctagaaatgttattcagtggtagagagattgcctagcatgcatgaggccctatgttcaattcgcaagtaggggtttaattactatagcagtgtttctactatttggatcttgtgttaaaatttatagataatatttttagcgaattatgtttgtaagaacaaactccaattccacaaggaatgtgatgatggctctatccc

SEQ ID NO: 2720 - DNA, 555 bp, Cricetulus griseus
tcatgagcaaattggctggtgaatctgagagcaaccttcgtaaagcctttgaggaagctgaaaagaatgctcctgctataatcttcattgatgagcttgatgccattgcgcccaaaagagagaaaactcacggggaagtagagcgtcgtatcgtgtctcagttgttgacccttatggatggcctgaagcagagagcacatgtgatagttatggcagcaaccaatagacccaatagcattgacccggccctacggcgatttggtcgctttgacagagaggtagatattggaatccctgatgctacaggacgcttggaaattcttcagatccataccaagaacatgaaactggcagatgatgtggacttggaacaggtagccaatgagactcatggccatgtaggtgctgatttggcagccctgtgttcagaggctgctctgcaggccatccggaaaaaaatggaccttattgatcttgaggatgagaccattgatgcagaggtcatgaattccttggcagttactatggatgatttccggtgggccttgagtcaaa

SEQ ID NO: 2721 - DNA, 578 bp, Cricetulus griseus
ttctccgctgaagcagaactgtatgtgggactcaggtccctggcttggagccatttctggcttaggctgtctgcccttctcctctccccctggaggggagtctacagtgcctgtggatctgggaggcatgctcaagagtgcagcagccatctcggtgcacctggtgtggccgctctggggaaggaaggctggagcctcactcacccggtgtttgcaccagactctcaccatggccaaacagctgcaggctcgaaggctgaatgggatcgatcacaacccctgggtggagtttgtcagactgtccaaagagtatgatgtcgtgaacttgggccagggctttcccgacttctcacctccagacttcgccgtgcaagcttttcagcaggccaccagtggggacttcatgctcaaccagtacaccatggcatttggttacccaccactgacaaagatcctggcaagtttctttggcaagctgctgggacaggagttggacccactcaagaacgtgctagtgacagtgggtgcctacggggccctgttcacagctttccaggccctcgtggatgaaggtgacg

SEQ ID NO: 2722 - DNA, 181 bp, Cricetulus griseus
gggacccttgttgaaaaatttgccctttaatttttattaaaaaaggggccttttaaattttttaattaaaaatccccaaagggaaaaaatttattaacaaatcccgagggccctaagtaggggcctttccccctccccaaagtttggtggggtttaaaaaaaaaaggggttttaaccccta

SEQ ID NO: 2723 - DNA, 531 bp, Cricetulus griseus
ggcttggattgatccccctcactagtgatgacattgtggacaagctgcagtactcccgggactgcacgtgcgaagagttctgccctgaatgttctgtggaattcacccttgacgtgaggtgcaatgaagatcagactcgtcatgttacctctcgagatctcatctccaacagcccccgggttattccggtgacatcccggaaccgggataatgaccccaatgactacgtggagcaggatgacatccttattgtcaagctgaggaagggccaggagctgagacttcgagcctatgccaagaagggctttggcaaggagcatgccaagtggaaccccactgcaggggtagcttttgaatatgatccagacaacgcacttaggcacacggtgtatcccaagcctgaggaatggccaaagagtgagtactccgaactggatgaggacgagtcacaggctccctatgaccccaacggcaagccagagaggttttactacaatgtggagtcctgtggctcactgcgccctgaaacca

SEQ ID NO: 2724 - DNA, 467 bp, Cricetulus griseus
taacaaggacacaaaggtgcccaatgcttgcctgttcaccatcaacaaagaagaccacactctggggaacatcatcaaatcgtaagtcccaggccagaggcctcgagtgtcaccagagctctgtaggctgagcacatgccctgggacggttccttccgtctctccgcagcttgctggcactttaacctgtcactgacaggtctgttcacatgcggcttgcttttgttggctttttgatgtaggggttcatgtagtgtagactggactcaaactgactcaccttaccatggttgccgggatcctggccacgtaacacgtaacacatcagcttcctgttggctcattcatgtagtgtataagtttgcagttgcctcttggtcttttggccaagatcaagttcaggggactccagcaaagcaggttttcattttagtgggcatcaagatgctaagaggtgatgggtatgg

SEQ ID NO: 2725 - DNA, 523 bp, Cricetulus griseus
atatctggacatgtttcctatcacttcaaaaaacaagtcctggaaacatggcgattcaagcaagtcctgggtcccgcttgtaggtctgcaagtcacaagtcctgcttgggtccagctgtattctctgtttcttagattttcatcaggctgacctccaggtgtcagtcagctagggactcctcccagaggccacccacagtttctccccacaaaatcttctcaaggccaacaggaaagtctctgcagcttggttgaatctcccttacctctccatggttcactctggacctccttttatgtggtccacctagttagatcagactcatggaagatacgcagcctttaacgtccagctggttaacagtcgcaggcactgattactctcgagtaaacaaagtagggtttaatttattacctacaacaggcaccgtgactgcaggtaatggtgtgaaggagttctacggggcagttcagcagggtgacagagaggaggtcttgtgaaagggacatctgggctgagacc

SEQ ID NO: 2726 - DNA, 471 bp, Cricetulus griseus
  misc_feature (43)..(62): n is a, c, g, or t
agataaaaagagcaagaaagaaactgtaaaagagaaagacatnnnnnnnnnnnnnnnnnnnngaggtgaaaaggaagagtccaaaaaggaggaaacaccaggaactccaaaaaagaaggaaactaagaaaaaattcaaacttgagccacatgatgatcaagtttttctggatggaaatgaggtttatgtgtggatctatgacccagttcacattaaaacatttgtcatgggattaattcttgttattgcagtaatagcagccaccctcttccctctctggccagcagaaatgagagtaggtgtatattacctcagtgtgggcgcatgctgttttgtagccagcattcttctccttgctattgctcgctgtattctgttcctcatcatctggctgataactggaagaaggcacctcttctggttcttgccaaacctgactgctgatgtgggcttcatcgactccttcaagcc

SEQ ID NO: 2727 - DNA, 581 bp, Cricetulus griseus
  misc_feature (34)..(69): n is a, c, g, or t
gcacatggattataagtacttgcgctggcaggtnnnnnnnnnnnnnnnnnnnnnnnnnnnnnnnnnnnnggatcggaacaccattgaaatgcaagctatcacagccctggcccacctccgagctgcagttctgtatgtgatggatttgtctgagcagtgtggacatgggttgaaggagcaattagaactcttccagaatatcagacctctgtttatcaacaagcctcttattgttgtagcaaacaaatgtgatgtgaagagaataactgagctttctgaagaagatcagaaaatatttaccgacttgcaggctgaaggattccctgtcatcgagaccagcaccctgactgaggaaggtgtcattcaggttaaaacagaggcttgtgataggcttttggctcatcgagtcgaaacaaaaatgaaaggaaataaagtgaatgaggttctgaacagattgcatttagctgtgccaaacaagagagatgataaggagcgaccccctttcatcccagaaggagtggtagctcgaaggaaaagaatggagattgtagagcccaggaagaagagggaacgagatcttg

SEQ ID NO: 2728 - DNA, 578 bp, Cricetulus griseus
  misc_feature (177)..(235): n is a, c, g, or t
acctcctgcctaagcgaacccagcaccttcctggacaccctgggtggtaccggaagctctgccctcggctagatgaccctgcatggactccaggccccagcctcctcagcctgcaaatgcgggtcactcctaagctgatggcactgacctgggatggttttcctctgcactactcannnnnnnnnnnnnnnnnnnnnnnnnnnnnnnnnnnnnnnnnnnnnnnnnnnnnnnnnnnagcgagccccactgtagagtcaacagggctagcctgcccctacagagccatcgaggccctgtacaggaagcactgtcttgaacaggggaagcagcagttgaagacccaggagacagaggtggctgaggagttcttagtcaccgacaatagttccatgtggcaaacggcagaagaactgggctgcttagacgtggaagctgaggccaagatggagaactcattactgggtcagcccctagctctgcctgctgcttgtgtcccccaaaccagccagcccacttaccaccatggcaatggaccttataatgatgtggatatccctggttgctggtttttcaagctg

SEQ ID NO: 2729 - DNA, 543 bp, Cricetulus griseus
  misc_feature (222)..(222): n is a, c, g, or t
acctggcccttggagaccattcgtcaagccaggtggatggagagagaaagaaaaggctagagaagagagttggggtccacctcgagaatcaagaccatcagaagaacgtgactgggatagagacaaagagagggatagagacagtcaagatcgagaggaggacaaggaccctgaaagagacagggaccgagacagagatggggaccgggaggatcgcttcanaagacccagggatgaaggtggctggagaagaggaccagcagaagaatcttcaagctggagagattcaagtcgccgtgatgatagagacagggatgaccgacgtcgggaaagagatgatcgacgtgatctgagagacctgagagaaagaagggatttaagagatgatagagaccggagaggacctcccctcagatcagagcgagaagaagcaagctcttggagacgagctgatgacaggaaagatgaccggactgaagatcgggatttacctcgtcgtgttcctcccccagttctttcaagagagagagagagagaacgaga

SEQ ID NO: 2730 - DNA, 493 bp, Cricetulus griseus
cgttcacgctgttcctcctgctagtgcctctgggctgcattcatgctgcttttatttttgtgatgactatgtacacccagctttataatcggctctcctttgggtggaacaccgtcaagattgacatgagtgcagcccggagagatcctctcccaatcattccattcggattggctgcatttgctgcaaccttgtttgccttgggattagcactggggacaaccatagctgttgggatgttgtttttcatacagataaaaattattctcagaaacaaaacttccattgaatcatggattgaagagaaggctaaagatcgaattcaatattaccaactagatgaagtcttcgtttttccttatgatttgggaagtaaatggaagaattttaagcaggtatttacatggtcaggagtccctgaaggagatggactggagtggccaacaagaaaagactgccacccatatagcctaacaagagaacagttgaaaca

SEQ ID NO: 2731 - DNA, 578 bp, Cricetulus griseus
ctgcctcctcctagaccacatgtccgatgctgttgactggctgctttggagacagagtgcatacagtccccgacgggggcggggaccattctgtgtgcactgcaatcatgtgacaatttccttctgcactttgtaacccaagtcagctatacactaacttgtaaatatgcaaatatgcaatcctgggtaaggtgggttataaatcacatgcttcccctcggactgtatttcctcgttgttccagtgtgtaatgtgcctacactgggaggcgtggttcttctggtgtgaagaatgggagagaagaagggtgtgctgtctcctgagtactttaaatgtctacactacgaggcagacgctccgatgggaaaagagggcccggtgcttcgagttccgtttcagagaaaaatctacaaaactgaagacttttttgaaaaagaagacatgacaacggcttcttctttatttacgaggctttcccagctgtagcatcttgaggtttggagtgtctctgccccaaagcaaagctcctctctccacagccaacacggagttggctctcgggtcctgtagtgagagac

SEQ ID NO: 2732 - DNA, 521 bp, Cricetulus griseus
caccaaagcttgaggagagaggtggtgggggtggaattgggggtgggggcagacccatcaggggaagggctgaaggaggacggttaaagtagggcaacacgctggggggcttatccacacgagcagatgagggtacaaggttctcagagggagttgcccgtccatcagcagaatcactagaatctctggagtgggcccgtggaggtattcgtttccgagcctgcgcctcaaattgtgataagttctgccgggtggctggtctcacatccactttttctccattaagaacttttcctggcaagagttccagcaatttgtggacagaattttcagaggctaccaccacctcagcataccctttagactggccatttgcacggttctctgcaaattttaactccaccacatcatagactcctatagagcgaataacctggatcagctgctggtctgtagtccaccaggagaagctgcctacatagacagctgctcgtctactccgcaggccactgtatgtatac

SEQ ID NO: 2733 - DNA, 580 bp, Cricetulus griseus
gatgaagtgtcatctctgattagaacctctgtaatgagtaagcagtatggtaatgaagcctttctggccaagctcattgctcaggcatgtgtatctatttttcctgattcgggaaatttcaatgttgataacatcagagtatgtaagattctgggctctggtatctattcatcttcagtattgcatggcatggtttttaagaaggaaaccgaaggtgatgtaacatctgtcaaagatgcaaaaatagcagtgtactcctgtccctttgatggcatgataacagagactaaggggacggtgctgataaagactgctgaagagctgatgaacttcagtaagggagaggagagtctcatggacgcacaagtgaaagctattgccagcacgggtgcaaatgtcatagtaaccgggggcaaagtggcagacatggctcttcattatgctaacaagtacaatatcatgttggttaggctgaactcaaagtgggatctcagaagactctgtaaaactgttggtgccacagctcttcctagattgactcctcctgtccttgaagaaatgggacattgtgatagtgttt

SEQ ID NO: 2734 - DNA, 503 bp, Cricetulus griseus
gcatgcccttaaaatattccaacattatgatttcccagtttggttttccatatttcaaccatgtaagcaaaatatgaacaggaaacaaacgaaaacaaacccgaaacactgctaggcttttgagtggcttctccatgctgtgctttttgttttttaagaaacaccatgaattttgatctagtccataagcctctacaatagaaaaaacagaacatgccgtacttctagtatataaaacgcatgaacttcaaaagccaagaagcctgtcttacccatacaggcttgtttgtgaagagcttttgtccaaggttgtaacccttgctcatgatattattgtttacatctccagactttcagtccaatttgagccctggcatttgccttaaggacctacagcaaactgtttccaggaccagagactcaaaagtaacagcttccagcttttcagtgaaggttgattgtttttatttgaagcctgaaatgcttcttcaagtaatgcctgc

SEQ ID NO: 2735 - DNA, 523 bp, Cricetulus griseus
ccttgggtacatcacaccattcattgcctcttgtaaccagccaagcagacaccctccagtctgtgccatgcaattgaggaagggaaacatcacctcaccttaaataatgacagtctgtcatttattcccactctaaagtttagggagtttgttatagtccttaacttcctgactgcatttgtactgtattataaaaaaattatcctgtccacaaaataaaacataccctgatcaaagcagagtatactggcatggcatatctttgctattcaccgtggtgtccttcgccacagcatctaacctagagctcacagaacaggtctgccacttttaaagatagatgcctttgatcagagttcaactcaccaacggtatttggtgtttgaaatcagctctataactatttaagtccctagacattatttgatcatcttcaaaaaataatttcctgtgttttctttgatttgcctcaataaattaggatgatccacaccttaacactaccaaatctgacctttactgc

SEQ ID NO: 2736 - DNA, 549 bp, Cricetulus griseus
  misc_feature (109)..(123): n is a, c, g, or t
ttcaagctcttcaggcagtgattctgacagtgaggttgaaaaaaaggtaagttttactgtaccaagtactttcattgtaccaaatttgtagtgcatgaattcctttatnnnnnnnnnnnnnnnttttgaagtgaaaggcttgttagtctttttagataggttttgctatgtatccttgactactccaaccacctcagatttcccctagggctgggattatgcgccaatgttaggttcagaatgtaagggtggatagatggcagatggactgccagagtggagtatgagcttctaaacttacttgcagggttaaatcagccgtaagaggttgcctctgtgctgtacttcgttctgcctggagtcccagtgcattccaggaaagtgctcacacctgaactctgaccccagccccctttttactttgatttttgacagggggtcaccaagctgtccgagctgaccttagaatcttaaccaaatgcattatccacatgagtggcttagactaaacaggccttctattgagcactgctagtaacctaaagtcac

SEQ ID NO: 2737 - DNA, 498 bp, Cricetulus griseus
  misc_feature (464)..(464): n is a, c, g, or t
tctggatttcctcagtgtccattgttgtctcccttttcatttctgattttgttaattagcatgctctctctctctgccttttggttagtttggatagaggtttctgtaacattctttgtacattctgtaatgcatttatttggttgattgctagttatttataggtctgcctttttcttgtagactgtgatttccacatagagatgagctgttttctgtttttcagctctgctatctaagttagcatttggaaaggaacaaatattcagaatttagaggatacttttcctaacaagaaaacaatttaaattctcagtacttcttcattgagtattgagattattttattaataaatgtgactcttgagagtaagacattccttgtggttcatacttaccagttactcaagagttacccaccagggtcattgctgcacacactttcattaacccatcattgtggntttcttgcataggtgtatatcttttattcattca

SEQ ID NO: 2738 - DNA, 497 bp, Cricetulus griseus
  misc_feature (4)..(18): n is a, c, g, or t
agcnnnnnnnnnnnnnnnaacagccaccaggagcagatgctggcccagtacatggagagcttcactcagggctccattgaggcccacaagaggggctcccgcttctggattcaggacaaaggccctattgtagagagttacattggcttcattgagagctaccgtgacccctttggctcccgaggagagtttgaaggcttcgtggccatggtgaacaaagccatgagtgccaagtttgagcggctggtggcaagtgctgagcagctgctcaaggagctaccctggcctcctgcctttgagaaggataagttcctcacccctgacttcacctccctggatgtcctcacctttgctggctctggcatccctgccggcatcaacatccccaactacgatgacctgagacagacggaaggctttaagaatgtgtctctcgggaatgtgctggccgtggcctatgccacaaagcgggagaaactcacgttcttggaggaaga

SEQ ID NO: 2739 - DNA, 372 bp, Cricetulus griseus
gtactctgcaggctgcgtcgtcaccatctctggacgcatgaccttcacgagcaacaagtccatggagattgaggtcctggtggatgctgaccctgtggtggacaactcacagaagcgataccgggccgccagtgccttcttcacctatgtatccctgaaccaggagggcaagccgctgcctgtacctcagcttgtggtgagtgtcctaaaccatgggctgcccttaggtctaatgaagtcttgagaagaagcaccctgtaagctgtaagctataggctggacagatgggtcagacctctgagctcgtcaccatggctggcacactgtctggagctcctggcaatgtgctcatgtgctggagtgatgtcttag

SEQ ID NO: 2740 - DNA, 507 bp, Cricetulus griseus
ccatctcctatcaccccctccctccttcctctctcccccattttttctctcgtgcaccccctttttcttctgtttcttgtattctaagctgtttcattgcacagacactgaatcatacagtcaagtggtgtgttcacagacctagaaaattgcatctatcagctcttcctctccattggtgatgaggattacttccatctgttttcggatttacaaagacctatagtatggcaaactgagtaagagcagagagctgaggaaatcctccacaagtgccatttcaagcagagtaaacaagagtgtgtattataactgccttacagggccaggaatccccaagaaagggctgttgattggccccagagctcttattcagggttagaaactttgttttctatgttgacgtgcttactgtgttatcacactactactaaacagacgctgccccaggtgttggttgtatgaacataattgtaccacataattggattttttaataatgagcag

SEQ ID NO: 2741 - DNA, 536 bp, Cricetulus griseus
tcaaaagtggttcatctgattcctattggttataggtccaccacacccgaacccactttgtttgtaaatggaaagagcttttctggcctcctgaacactggtgcaaatgtgtctgttattactgccagtcagtggctttcagtgtgaccagagatgcaagggattggtcaaactcagagtcctaagcaaagtagtaatgaactttcctaaaaagatgaccatgaagaaatgttttggccatacattgttgcccacttgcctgtaaatttgtgggtccaaatgttatgaaccaaattggagtgtgtttgtatagccccattgcagttgttactaaacaaatgtttcaacgaggaggactgttatctgatcaggggttaggaagaaacaatgatggctgagtatcacctttgcttccttaagaaaggtctaatagagctggattagggtatttttaagagtggccattgagtagcctgtacttcatgcagatcctataactgatgatcctgtgtggatgaattaatggccccccacag

SEQ ID NO: 2742 - DNA, 598 bp, Cricetulus griseus
attgcctcctgatgcacttatcattgaatacagagggaagtttatgctgagagaacagtttgaagcaaatggatatttctttaaaaggccatacccttttgttttattctactctaagtttcatgggctagaaatgtgtgttgatgcgaggacttttgggaatgaggctcgattcatcaggcgctcttgtacacccaatgcagagtaaatacaaagtggactgtgcgtgcctcaaggaaaatcccgagtgccctgttctgaaacggagttcagagtctacagaaaacatcaacagtggttatgagaccagaaggaaaaaagggaaaaaggagaaagatgtttcaaaagaaaaagatatacaaaatcagaatattactttggattgcgaaggaacaaacaacaaaataaagagtccagaaacaaaacagagaaagctttctccactgagactatcagtatcaaataatcaggaaccagattttattgatgatatggaagaaaaaactcctgttagcaatgaagtagaaatggaatctgaggagcaaattgcagaaagataaaggaagatgacaagagaagaaagaaaaatggaagcaat

SEQ ID NO: 2743 - DNA, 523 bp, Cricetulus griseus
  misc_feature (222)..(240): n is a, c, g, or t
  misc_feature (463)..(478): n is a, c, g, or t
ggtcaagtcttacaaatctgacttctcttcctgaagcgggtttgcgaactttcctgttgggtaactttgaattcttgatctggttagccttaaccggggctaaccacagagtcctctcagccttgcgaccccggggtcgccactgtcccatgttgtccagagcagcaagggactccccatgtatctgtgactgacttgaatttctgatcctcttgcccgcannnnnnnnnnnnnnnnnnntcaggtctctggagcacccatccatctggagccatggtccatgccttcctcatccacaccttgagggccccgaatttggaagatacaggcctttgccgagtgctctactcctgtgtctttggtgctgagaagtcacccgatgatccacggccacatggtgcagaaagggacaggctcttccgcaaggaacagattttggcggtggccagacaggtggagtcannnnnnnnnnnnnnnnagcaagcatctggatgtccctccacagacctgcagcctcagttct

SEQ ID NO: 2744 - DNA, 556 bp, Cricetulus griseus
ctgaaattgatgcgttggtgagaagcaataggccccttgaagtggcccatccatttctgcccatatttgccttcctgctctgctcaggagttggcatccaagcagtccaggaagggcatgggtggggccccacaggcccttctcttgagtctcattctgcatgacagtgatgacaggcattgtactgggtggggagagttggggacagggactagaaaggcagggatgactgagtctgttgctgctctaggaccccagcagctgcagacatctgcttcaccaaggagctgcactcccatttcttcagcttgggcaaatgtgtgcctgtgtgtcgaggagatggtgtctaccagaaagggatggacttcattttggagaaacttaaccatggggactgggtacacatctttccagaagggaaagtaaacatgagttctgagttcctgcgcttcaagtggggaattgggcggctgattgctgagtgtcatctaaaccccatcatcctgccactatggcatgttggaatgaatgatgtcctccctaatagcccacccta

SEQ ID NO: 2745 - DNA, 473 bp, Cricetulus griseus
aggacatgaccacaggtacagagtctgaaaccaaggccttcatggctgtgtgcattgagacagccaagcgctacaatctggatgactaccggactcctgtgttcatctttgagaggctgtgcagcatcatctaccccgaggagaatgaagtcaccgagttctttgtgaccctggagaaggatccccagcaagaggactttctacagggcaggatgcccggaaacccgtatagcagcaatgagccaggcattgggcctcttatgagggacataaagaacaagatttgccaggactgtgacctggtggctcttctggaggatgacagtgggatggagctgttagtgaacaataaaattatcagcctggaccttcctgtggccgaggtttacaagaaggtctggtgtaccacgaatgagggagagcccatgaggattgtttatcgaatgcgggggctactgggtgatgccactgag

SEQ ID NO: 2746 - DNA, 553 bp, Cricetulus griseus
gcagcagagatgctcaagtccacggatcctcgattccagagatccaggtcggagccttcaccagacgtcccggacagcccgtccagctgctcccccaacaagaacaggagggcccaggaggagtgggccaagaacgaaggcttgatgcctcggagtctgtccttttcaggcccacggtacagccgtagccggacgccaccctctgcggccagcagcaggtacagcatgcggaaccgcatccagagcagcccgatgactgtcatctccgagggagagggagagcctgctgagccagcggacaacaaaacacacagggccccggactctgccaggggatgctctctggacaggctggaggggaaaaaagtggacccagacagcctgctgtgtagggaggagcccacttctgtggatggcatgggaagggcagagggcaaaggtctctcggagcactgtgggggtagtgaagagttagggtcagaacctgcctctcttgagtgaggttggagggaatgcatcactcggaagtctatgtggccttttcctggcttgt

SEQ ID NO: 2747 - DNA, 559 bp, Cricetulus griseus
  misc_feature (39)..(53): n is a, c, g, or t
gtggaagaagcattggtttgtgctgacggattccagccnnnnnnnnnnnnnnnactccaccgccgaggaggcagatgaactggatggtgagatcgacctgcgctcctgcacagacgtcaccgagtatgcagtacagcgcaactatggcttccagatccataccaaagatgccgtttataccttgtcggcaatgacctcgggcatccggaggaactggattgaggctctcaggaagactgtgcgtccaacttcagccccagatgtcaccaagctctcagactgcaataaggaaaacacgctgcatggctgtggcacacagaagggctccctgaagataggggagcagcggacaggctctgaggttatcggccggggtggccctcgcagagtggatggatctcggcagtcactggactacgtggagctctctccattaaccccaagctccccgcagcgcgtgcgcactctgacccgctccacttctgagcgtccacccaaacaggaggatctagagcgggacctggcgcaacgctctgaggaaaggcgcaagtggtttgag

SEQ ID NO: 2748 - DNA, 496 bp, Cricetulus griseus
gtccacccttcatcccagtacatggtcctggactgaagggacagggaagctgggagcaacaacatggcagcttctgcttcgagacacaggatggaatctaggctgcctcaatgaggcactgaagcctattgggtagggaggggccacagggccggataacgattgagtgtgaatatggggtgagggacaagagaggctatgtctaccagtagccccacctgtactgaggaccccaagtcccagtgtccttccccattccaaaccttgtgctggaggagagagtatacttgccactttgttctcaagtaggaaaattctaggcccttcatagggatccacctgggctagtcattccctgcccccctcccccaatcaggctccacatacagacaacaggctttgagtgcacaaggtttccagcaaggtctgatggtataaacttaggctcaccatcaaaaccccttctgcctgtacttcttggctctagcctcacccc

SEQ ID NO: 2749 - DNA, 521 bp, Cricetulus griseus
ctttgacttggtaaatgggtagatgctgcaggggagtaaattttagaccatcaagagatctctgcaaagaagagcaaaggattggagaaacttgttatttattcatagtaaagacaataaaggagacttaagacatcctgtgaaacaacaggatgtctggtgtcaccagcgccagcaccagtgacagaagaactagaccaggtgagagtctgcagattaagaagtgaatgccattggtttattgcagccagcagtttatatacaaccataacaagaggaaatggaaaagtaccacctgctagcagaacattcccatgccctatcgtaagcaaggaaatcacaacccctgcccaaggccaacgaagcaggaaggggatgggggcaaggcacaatgtttcaaaacaggaagtaacaaaaggtcagcacaggcctaaaggtcaggtctgtacccaacagtaaggattcacaacaggatgttgatgctagtggggggaggccaggaaaactggaggtacctgtgg

SEQ ID NO: 2750 - DNA, 579 bp, Cricetulus griseus
tttccccgtacctagtctgcagttatggcgtcgctcaccgtgaaggcctatcttctgggcaaggaggaggcggcccgagagatccgccgcttcagcttctgctttagcccggagccggaggcggaggccgaggccgcggcgggtcctgggccgtgcgagaggctgctgtgtcgggtggcctcgctgttccccgccctgcggcctgggggcttccaggcgcactaccgcgatgaggatggggacttggttgccttttccagtgatgaggaactgacaatggccatgtcctatgtgaaagatgacatcttccgcatctacattaaagagaagaaggagtgccggcgggaccatcgcccaccgtgtgctcaggaggcatcccgaagcatggtgcaccccaatgtgatttgtgatggttgcaacgggcctgtggtgggaactcgctacaagtgcagtgtgtgcccagactacgacctgtgcagtgtctgcgaggggaagggcctacacagggagcacagcaagctcatctttcctaacccctttggccacctctctgatggcttctctcatggccgctggctt

SEQ ID NO: 2751 - DNA, 418 bp, Cricetulus griseus
cgacagagcctgctggctcagagacactcctggatgccgtgctgaggaccctctacgacctgggagagacagaaggtgaaacagagcctaaaaggatcagaaagaagagagaaaaaaagagaggcgaggagacaatagcagatgagacagcagagccccttcccctgcctgaatgtcctgcaagaagccaaaagaagaatgcttccagctttttcaaggaactcaaagcagagctgcactctgctcctgctgtcccttcagctcccccttcaggaccagaagtccctgctactactgcagtatcgctctctcccctgaagaacagcggcaagctagtagaagtggtcgcgtttcaaagcagaagtaaaaaaagaaaaccaaagtcagatcaagatgagcacacaaagaataaaacaaa

SEQ ID NO: 2752 - DNA, 505 bp, Cricetulus griseus
gctctccatggccggcaacagcagatgagaagaatggaagtctacaatgaatttcttcgaaaaagggctgcagtgctgtttgctactgatattgccgccaggggattggattttccagctgtgaattgggttcttcagtttgattgtccagaggatgctaacacatatattcacagagctggtagaactgccagatacaaagaggatggcgaagctttattaattttactaccttcagaagaacaaggcatggtgcagcagcttctccagaagaaagtacctgtgaaggagatcaaaatcaatccagaaaaacttattgatgttcagaaaaaattagaatcgtttttagcccaagaccaagatttaaaagaaagagctcaaaggtgttttgtctcctatatacgttcagtatatcttatgaaggataaagaagtatttaatgtgagcaagttacctattactgaatatgcactgtctcttggtcttgctgtggcaccacggataa

SEQ ID NO: 2753 - DNA, 573 bp, Cricetulus griseus
ttctgtaatcaaaaagcaataacttaaaagtcactctttgtaatattgtaggtcagaattatacaggttttaccaaattgttacatttattctccatgctgccagcacttgtaactgtggaaccaaattaacttctgcccaaatggaagtatacatatatctgtatagttacatgcccctttacatgttcaacacttaagcacataaatattagtgtgattgtatgtttggagtttgcagtatagcataaaggacaagtagaatcgcacgttaagattacctaccaaagcaactacatgtggcttggagccagtcagtcaactgaggaatcaatttcacaaggattccttcatttgccacagccccaaatgaagccccaatcatcagatcatagaaaggcacaactaaactaactagccctcaactggtcatctaaatgagtgaaaccacatactccttcaagtgctggccacgtgtttggagtaaagggagatgtagcaaaccacaatatcacagcctcatgttaataaagacacccctttgagccccgctgctggcatgcaaaatttccag

SEQ ID NO: 2754 - DNA, 579 bp, Cricetulus griseus
aatgaagctgcgctaccccatcaacgaggaagcactagagaagattgggacagaacccgattatggggcactctatgagggccgcaatcctggcttctatgtggaggcaaaccctatgccgactttcaagtgtgtagtaaaagccctgtttgactacaaggcccagagagaggatgagctgacctttaccaagagtgccatcatacagaatgtggaaaagcaagatggtggctggtggcgaggggactatggtgggaagaagcagctgtggttcccctcaaactatgtggaagagatgatcaacccagtcatcctatagccagagagggagcacctggatgagaacagcccactgggggacttgctacggggggtcttagatgtgccagcctgtcagattgccattcgtcctgagggcaagaacaaccggctcttcgtcttctccatcagcttggcatcggtggctcactggtccctagatgttgccgccgactcacaagaggaactgcatgactgggtgaaaaagatcccggaagtggcccagactgcagatgccaagcttactgaggggaagatgat

SEQ ID NO: 2755 - DNA, 404 bp, Cricetulus griseus
  misc_feature (139)..(166): n is a, c, g, or t
tccaccaacaaggagggactccaataaggcctctgataaggttttggggaccgagtttctctgtattggattggagcctgcctgggatcccctgctgtagaccaggctggatttgaactcacagagatctacctgccannnnnnnnnnnnnnnnnnnnnnnnnnnnatgggtgtgttccaccaatgcccggctctggacttaagttttctgcattttgataagtatggatctatctgcagtcttctacacaccagaatccagttatgccagcaacatttgttgaagaacatttctttgaagctttcatcactgagctcatccttcagattcatactcagtatgttcaggggactcggccaagatctctctgcccttgctgatccagattcacaatgttcaagca

SEQ ID NO: 2756 - DNA, 402 bp, Cricetulus griseus
agtgaaggcagtgaaggtgatgaagaagatgaaaagatgtcagatgagaaagattcagggaaaacattggataaaaagccaagcaaagaagttagctcagactctgaatctgactctgatgacgaccgaacaaaagaagagcgggcttatgacaaagcaaaacggagaattgagaaacgacgacttgaacatagtaaaaatgtaaatgcagaaaagttaagagctcctatcatctgtgtgcttggacatgtagatacagggaaaacaaaaattctagataagctgcgtcacacacatgtccaagatggtgaagcaggtggtattacacagcagattggtgccacaaatgttcctcttgaagctattaatgaacaaactaagatgattaaaaattttgacaga

SEQ ID NO: 2757 - DNA, 490 bp, Cricetulus griseus
agctgaacatcacggcagccaaggaaattgaagttggtggtggccggaaagccattataatttttgtaccagttcctcagttgaaatcgttccagaaaatccaagtacgactggttcgtgaattggagaaaaagttcagtgggaagcacgtagtcttcattgctcagaggaggattctgcccaagccaactcggaaaagccgcacgaaaaacaagcaaaagcgccccagaagtcgcaccctcactgcagtgcacgatgccattcttgaggacttggtcttcccaagtgagattgtgggcaagaggatccgtgtgaaactggatggcagccggctcataaaggttcacttagacaaagcacagcagaacaatgtagagcacaaggtggaaactttttctggtgtgtataagaagctcacgggcaaggatgtcaattttgaattcccagagtttcagttgtaaagtaaatgactgaataaatgtcattcata

SEQ ID NO: 2758 - DNA, 526 bp, Cricetulus griseus
  misc_feature (465)..(465): n is a, c, g, or t
tgggtgaaggatgaaggtggcgacagctgctcaggttgctccgtgcgcttctccctcacagagagacggcaccattgcaggaactgtgggcagctcttctgtcagaagtgcagtcgatttcagtcagaaatcaagcgcttgaaaatctcatccccagtgagagtctgtcagaactgttactacagcttacagcatgagagagggacagaagatgggcctcgaaactgccgagactgagggagaccacggatggcccagggagctctttgggtcctgccacggcttcgaaggcattgaagcagtctctatttaccacacacctcttcacgctgagtgtttgaagtgttgagttcaaagggatcattggatcacgggttccaggccagtgactggcaggcactatgcagtgaccagcacaagaagaaagcaaggtggttcctgagggtgtttcagaacctgggtctnccatagtgtagccatctccaagagcaaactccgtgcgccccaactgtctttcttgcatctc

SEQ ID NO: 2759 - DNA, 570 bp, Cricetulus griseus
  misc_feature (10)..(28): n is a, c, g, or t
  misc_feature (203)..(215): n is a, c, g, or t
atcattgccnnnnnnnnnnnnnnnnnnntcttggggagctcccatttcctgggagcaggccgacccctttgcatctttaaaaaaagtgggccaagattccatagtgctgctgatttgtatcacggtgtttctctcctacctaccggaggcaggccagtactccagcttcttcttatacctcagacagataatgaaattttccnnnnnnnnnnnnncagcctttatagcagtccttggcattctgtccattattgcacagaccatagtcttgagtttactcatgagatcaattggaaataagaataccatcttattgggtctgggatttcaaatattgcagctggcatggtatggctttggttcagaaccttggatgatgtgggctgctggggcagtcgcagccatgtctagcattacctttccagctgttagtgcccttggttcacgaactgctgatgctgatcaacagggtgttgttcaaagaatgataacaggaatccgaggattgtgcaatggtctgggaccagccctttatgggttcattttctacatattccatgtggaacttaa

SEQ ID NO: 2760 - DNA, 116 bp, Cricetulus griseus
attcatgtatgggggcatctgtctgtgtcttaagtgtataaaggagtgtgtatgtgcatgtgcccccttccgttgtgtgcctacattgggtaataaagggggttgatcccttggag

SEQ ID NO: 2761 - DNA, 470 bp, Cricetulus griseus
  misc_feature (280)..(280): n is a, c, g, or t
aaaacaatttgagtggcttattgatgtttttttttctttaaaaataaaattttctcttacagcaattctggggtcagaagccatggagtcagcattatcaccaaggatattattgaatacccaaataaaacgaactgatacatatttctccaaaaccttcacaagaagtcgactgttttctttagtaggctaactttttaaacattccacaagaggaagtgcctgcgggttccttttttagaagctttgtgggttgatttttttttcttttcttttttgnacatttttaattgcagttttaaagtgaatcgtaagagaacctcagcattgtgcacgataagagaatgtgtcagtatttcagggttctacattttatctgtaaaatgtgacttttttttatcacaacaaaagtaaaatgttgctttgtacctggtgtcttttattaagcatttactcccccatttctcaca

SEQ ID NO: 2762 - DNA, 600 bp, Cricetulus griseus
  misc_feature (108)..(146): n is a, c, g, or t
gaaggagcctcctctcaatttttaaagttttgaaaaaatgatttgacttctgtatagtaccatttagagatatgaaaatatagtctaatgaggtaaagaaggaaaggnnnnnnnnnnnnnnnnnnnnnnnnnnnnnnnnnnnnnnnaaagaagccccaattatactgtaacccacttttcaaacatggggttcatgagtgcattatcctacaactggagcaatgactctagccttgctgtgtaatcaccatatgtacataatggagaggactacatcacagttacagtagggccaagcttgggatgctgtgtgtgctgctaatgtctggtgaaacagttttggaaatccttggagaaagggtatcctgaaagtctccttttataatcttagacttggaatttctgtctctttttgttactttactgcaggctctcaactctctgaggtcctcaaggtttagaatgtaactgctagaagttgtgctgcccttcaacaaagttttttttatgtcataatgaactatgaaagaaactacttcagtctgctgatcagggtacctttagtgtggggtgctaattcctttgcaaaatttctgaaat

SEQ ID NO: 2763 - DNA, 581 bp, Cricetulus griseus
  misc_feature (61)..(87): n is a, c, g, or t
gaaagcccagatagaagaagagaaaaaaatgcagagaaagaaaagcagcagagaaatcagnnnnnnnnnnnnnnnnnnnnnnnnnnnggaaatcggaggccccaaagaagaacttatcccagagaaattggccaaggttgagactccattggaagaagctattaagtttttaacaccgttgaagaatttggtgaagaacaagatagaaactcatctttttgcctttgagatttactttaagaaagaaaagtttcttttgatgctacaatcagtaaagcgggcatttgctattgattctagtcatccctggcttcatgaatgcatgattcgactctttaattctgtgtgtgaaagtaaagacttacctgaaacagttagaacagtattaaaacaagaaatgaatcgtctttttggagcaacaaatccaaagaattttaatgaaacttttctgaaaaggaattctgattcattgccacacagattatcagctgccaaaatggtatattatttagattcttctagtcagaaacgagcaatagagctggcaacaacacttgatggatccctcaacaacagaaacc

SEQ ID NO: 2764 - DNA, 488 bp, Cricetulus griseus
  misc_feature (14)..(41): n is a, c, g, or t
tggcctgcggccgnnnnnnnnnnnnnnnnnnnnnnnnnnnngccgcagctgtagatacagttaatgccacacccatgtcagggtcaaaagaatgagtttggaggagccaaagaagatgaccagagaggactggaggaaaaagaaggagctagaagaacagagaaaattgggcaatgcacctgcagaagttgatgaagagggaaaagacatcaaccctcatattcctcaatacatttcttcggttccgtggtacattgatccctcaaaaagacccacgttaaaacatcagagaccacagccagagaaacagaagcaattcagttcctctggggaatggtacaagagaggtgtgaaggagaattctataactaccaagtaccgcaaaggggcatgtgaaaattgtggggccatgacacacaaaaagaaagagtgctttgagcggccaaggcgggttggagctaaatttacaagcactaacatcgctccag

SEQ ID NO: 2765 - DNA, 259 bp, Cricetulus griseus
gccatctgcgcatgtgtgcacgccttcagggctaccctagctgctggtccaacacctttatgggctcgccctacaggtttgctatttgggggcagtggccgcaattgtgtgggtagcacgccccaagtgacagtcgcatggaggaatgcgactccgaagacttctccacgtccgacgaggatgaagactacttgccagaaagtggagagtacagtgaaaatgatgtcaatgaattagtgaaggaagatgaagtggatgg

SEQ ID NO: 2766 - DNA, 291 bp, Cricetulus griseus
  misc_feature (17)..(32): n is a, c, g, or t
ccacccgtatcactagnnnnnnnnnnnnnnnnacgacatgttttagaagccacctatggtattaacattataaagcctggagaagatgaagacccctaccgacctccaacctcagaagagctgttgacggcttatggatgcatgcgagggtgcatgacagcacatggacaaccagaccagcctcgatccgcacgttacatcctgaaggactatgtcaaagggaaactgttgtactgccacccccctcctggaagagatcctgtggcgttccagcatcaacaccaacaactt

SEQ ID NO: 2767 - DNA, 535 bp, Cricetulus griseus
  misc_feature (10)..(28): n is a, c, g, or t
tggccccacnnnnnnnnnnnnnnnnnnnctgaagcggttgggcaacactgatgggctgcccagggtgcagctgtcttctcctgggcagctcttcacagcactggagagagactcggtccagctgtgtacgtgggttggggaactcttcctggaactacacaatggcacctacactacccatgcccagctcaagaagaggaatcgggaatgtgagcaaatccttcatgacgtggagatgctgagcagcctggccctagcccgcagtgcccacttcctatacccagcagcccagttgcagcacctctggagactcctactcctcaaccagtttcatgatgtgttgactggaagctgcattcagctggtggcagaagatgccatgaactactatgaagacatccattcccatggcaatacgctgctcaatgctgcagccgcagccttatgtgctggggagccaggtcctaagggcctcctcgttatcaacacgctgccctggaagcgcactgaagtgttggcactgcccaagcctggt

SEQ ID NO: 2768 - DNA, 217 bp, Cricetulus griseus
tgcctagttgtaaaattgccgccagtttgggctctgtatcccccattactaggagatttcagttggtgtccctctcatagattccagggagtttccactgcactaagtttctacatctttcccccgccatgccttccagttctgtcatctctcccagttctctctctctctctgtctctctgtctctctctctctctccctccctcccctccctttt

SEQ ID NO: 2769 - DNA, 524 bp, Cricetulus griseus
gcaggtcttgtctatgagtatacattgggcgaagagaagttcacctttattgagaaatgtaacaatccccgttctgtcacattactggttaaaggaccaaacaagcacacactgactcaaatcaaagatgcaataagagatggcttgagggccgtcaaaaatgctatcgatgatggctgtgttgtcccaggcgctggtgcaatagaagtggcaatggcagaagctctgattaaatacaagcccagcgtgaaaggcagggctcatctgggagtccaggcatttgcagatgccttgctcattattcccaaggttcttgcacagaactctggttttgaccttcaagaaacattagttaaagttcaagctgaacattcagaatcgggtcaacttgtcggtgtggacttgaacacaggtgagccaatggtggcagcagagatgggtgtgtgggataactactgtgtcaagaagcagctgcttcactcctgtactgtgatcgccaccaacattctcctggttgatgagat

SEQ ID NO: 2770 - DNA, 451 bp, Cricetulus griseus
tcatggaacacttgactgggttccttctgtgttcactgtggaaaacctcaggagaccactgcaatgagcagtgttagcacttaaacccctttaaaaatttttcaaaccaatgtgtgaatctctgtcatcctcaggccctaactgctgggagagacttcatacttgtttttgcccatttcctaacaggttgtctggaggtcatgggtatttactgaggtcagtcagagcccaatgacagtgacgctttccagagagttgtgcctgccttctgccctcagccattactgctggtgttttactaaaagctaatcagttctcctacttttcatctgtgtgggtttttgttggtttgttttttaaatccccgttattctggatgtgttttcccccttcctagacaaggcccctctgtcgaagagtctcttgctggtccccagtgccctgtcccttc

SEQ ID NO: 2771 - DNA, 535 bp, Cricetulus griseus
cctgctctgacgtgtcagcgtgctgtgaagtagagtctgaggtcatgatgagtgactatgagagtggcgatgatggccactttgaagaagtgacaattcctccactagattcccaacagcatacagaagtgtgacactcagactcctccccaaagtgcctggactttaaagaacctagagagggtatcaatgatctccgcattgttctttgcagcagtcttatgcgcttctcagtgagctgcagtgggcatggctgcacggaatcacacgcctcttgacatgctagccatttccagttcctaaccgactgtacctgaggggttctcatcgcctgtgccatttctgagcatcttttcgtatttagatgtgtctctgttaaaataatgaaaccgaaatcagtcctgtcatcctgttagcatgattcatgtatttatatagattcgattttattttaattttgctttttttgtgtgtgtaaattttctgtacagatttgattttttttttcctttcatagttttaactatgttttcag

SEQ ID NO: 2772 - DNA, 584 bp, Cricetulus griseus
  misc_feature (5)..(79): n is a, c, g, or t
  misc_feature (85)..(154): n is a, c, g, or t
  misc_feature (165)..(221): n is a, c, g, or t
  misc_feature (246)..(300): n is a, c, g, or t
  misc_feature (325)..(464): n is a, c, g, or t
  misc_feature (489)..(510): n is a, c, g, or t
cgctnnnnnnnnnnnnnnnnnnnnnnnnnnnnnnnnnnnnnnnnnnnnnnnnnnnnnnnnnnnnnnnnnnnnnnnnnnntatgtnnnnnnnnnnnnnnnnnnnnnnnnnnnnnnnnnnnnnnnnnnnnnnnnnnnnnnnnnnnnnnnnnnnnnntagtgtcaaannnnnnnnnnnnnnnnnnnnnnnnnnnnnnnnnnnnnnnnnnnnnnnnnnnnnnnnnatcccatctctcatactcctacctnnnnnnnnnnnnnnnnnnnnnnnnnnnnnnnnnnnnnnnnnnnnnnnnnnnnnnnttcttaatcaatactttagctatannnnnnnnnnnnnnnnnnnnnnnnnnnnnnnnnnnnnnnnnnnnnnnnnnnnnnnnnnnnnnnnnnnnnnnnnnnnnnnnnnnnnnnnnnnnnnnnnnnnnnnnnnnnnnnnnnnnnnnnnnnnnnnnnnnnnnnnnnnnaaagaaaccgactacaacaaaaaannnnnnnnnnnnnnnnnnnnnnttctacaaactcttctaatcccaacattttcagcaaacgagcttatactattttatattttatttgaagccaca

SEQ ID NO: 2773 - DNA, 463 bp, Cricetulus griseus
  misc_feature (255)..(279): n is a, c, g, or t
ttatggagactaaaaaagcaaaagaaagtgaagacaaggaaaaccttcccaaaaggacatcttctggtggcttcaaatttactttctcccattcccccagtgctgctaatggaacaaacagtgcaaatagtaagtctgtggtggctcagacaacatcagcaagttctaatgggtcatcttccaaaactacaaacttggctgcatcagtgacagccactaagggaagtttggttggcttagtggactatccagatnnnnnnnnnnnnnnnnnnnnnnnnnaatcatctcccaggaaaagacctcgccttggctcatagatacttgctggggcactcccaacacatggtcttactaaagtgctgcagctactcactgagctcaagtctgaatcggaaagctttctcatggaacttaacacacatggagtagcagagactcagttatcaggtagaaaagtgtagtt

SEQ ID NO: 2774 - DNA, 551 bp, Cricetulus griseus
gattgatctggtggctctggaaatcattctgaccactgcttcagccaccataggagtggcaagatcccatctgccaggtgaagggcagaccactgacttttgacctgtacctgctggtccttctgacttatagagctttcttgctagctggaggccttgtgctcccagccatctgacctcctccacgtttctgcaggcccagcatgggtgaattcaatgagaagaaggcaacatgtggcacagtctgcctcaagtacctgctgttcacctacaactgctgcttctggctggccggcttggccgtcatggcagtgggcatttggacattggtactcaagagtgactacattagtctgctggcttcaaacacctatctagccacagcctacatcttattggtggctggtggcgttgtcatggtgaccggagtcctgggctgctgtgccactttcaaggagcgacggaacctgttacgcttgtacttcatcctgctcctcatcatcttcctcctggagatcattgctggcatcctggcctatgtctactaccag

SEQ ID NO: 2775 - DNA, 475 bp, Cricetulus griseus
cactctgaagatcttcccgatgaagtaagggagcgatgggagacattctgcacgagctccttaggagagacgaacaagaggaacacggtagatctagtaggtttcacaaggttacatctctgggggttttggttctctcagccattgcctatttacttggaaaaatgttcaagaccgtctgttaggcccagtgaatgtgcaccacagataagcttatgactctgtacattaagaggacagtattcacagcattcttgatttgtcagtcacctcctagtgaccttgcatgacaaaaaggtactaaaaaagccacccaggtccactccagtccatatcagtgtcttgtctcacctgggtcctgctccctaagtacctctggaccatcctctgccttactcttgttctgtggctttgtacattggacctcatgtcactctgagtgcttagaatcccagactcctgtggatttttccca

SEQ ID NO: 2776 - DNA, 543 bp, Cricetulus griseus
gagtcaggattctcgatccagatacaatggccccgacgggatggagcctgaaggcgtcatcgagagtaactggaatgagattgtggatagctttgatgacatgaatctctcagaatccctcctccgtggtatttatgcctatggttttgagaagccctctgccatccagcagcgagccattcttccttgtatcaagggttatgatgtgattgctcaagcccagtctgggactgggaaaacagctacatttgccatatcaattctgcagcagattgagttagatcttaaggccactcaggctttggttctggcccccactcgtgagttggctcatcagattcaaaaggtggtcatggcattaggagactacatgggtgcctcttgtcatgcctgtattggaggcactaatgtgcgtgctgaggtgcagaagttgcagatggaagctccccatatcatcgtgggcacccctggccgggtgtttgatatgcttaaccggagatacctgtcccccaaatacatcaagatgtttgtactggatgaagc

SEQ ID NO: 2777 - DNA, 542 bp, Cricetulus griseus
cagctggtgtagctcggctgtgcaggcggttctgtcatgtgactccgtacacctttaagaaacaacctctgcaccaatatgtgcgaagaccacctttcctgatgtgtgcacccttgtttaacccagtgcgattcatgtttattcaaacacaagacaccccaaatcccaacagcttaaagtttataccaggaaagccagttcttgagacgaggaccatggacttccccacgccagccgcagctttccgctcccctctggccaggcagttattcaggattgaaggagtaaaaagtgtcttctttgggccagatttcatcacagtcacaaaggaaaatgaagaattagactggaatttactgaaaccagatatttatgcaacaattatggacttctttgcgtctggcttacctctagtgactgaggaaacacccccaggagaagcaggttctgaggaagatgatgaggtggtggcaatgattaaagaactgttggacactaggatacggcctactgtgcaggaggatggtggtgacgtgatctac

SEQ ID NO: 2778 - DNA, 477 bp, Cricetulus griseus
tggcccgctggtttgtcggcagagctggtcggcgggcgatcctccaggacggccatggcagagccacagcccgcgcccagcggcctcacggatgaggccgccatcagctgctgctccgacccggaccccagcaccaaggactttctaatgcagcaaacgatgctgagaattaaggatcctaagaagtccctggatttttatacgagggttcttggactgacgctacttcaaaagtttgattttccttcgatgaaattttccctctatttcttggcttacgaggataagaatgacatccctaaagacaagagtgaaagaacagcctggacgttctccaggaaagccacccttgagtggacacacaactggggcactgaagatgatgagacccaaagttaccacaacagcaactcataccctaggggatttggtcacattgggattgctgtccctgatgtctacagtgcctgtaaacga

SEQ ID NO: 2779 - DNA, 378 bp, Cricetulus griseus
  misc_feature (5)..(29): n is a, c, g, or t
ccttnnnnnnnnnnnnnnnnnnnnnnnnnaccaccactgactggcttcttttcatcttttgaataaaacattacataagcctcattctgatgttcacactggctcctaaggactacacctttcttaactgtgtggaacttggggagggattatgggatacacagctgtccttcctgtaactttgggtgggaactaaaagttcaaatacaaaagacaagaattgtcaagagcaatgaatagaacagtgtgagtttattacaaaccttgtgatcacagctcatcatgtattccttattcctttcaggctttgaaccacaaacatattgggatcgaatgcaccttttccaggaagccattgcacacaggtttgtccattag

SEQ ID NO: 2780 - DNA, 500 bp, Cricetulus griseus
gccgctcgctgcaaggctgtggccgaggattggctgttgaggggctcatagcactttctccggggaactgtggctgcgttccaggtggctcggccaggatcccggctgcgttctgcccgcctcgggcagccaaggcaaccatagcaccggtgatggggaccccagcctctgtggtgagcgagccacccctatggcaggcttcaactgagtcccggggacgaaagcaggcctctgccaacatattccatgatgcagagttggtgcagatccagggcctgttccagcgcattggggaccagcttgctgaagagcgatcccagatcatctgggaatgtgcaggggatcaccgtgtagctgaggccctaagaaggctgcgcaggaaaaggcccccgaggcagaaccactgtggccggctgagagcaccagagcttggttctacagcagctgacccacaggacagcaccactgacatggcttccggcgagcagtttgggaactcc

SEQ ID NO: 2781 - DNA, 528 bp, Cricetulus griseus
agggcggtcgcggcggtcgctagggcagcagtggcaggtgacagcgggtgtcggcctccggcagcggaatgttggctaccagggtgcttagcctaattggcaagagagctatttccacctctgtgtgtgttcgagcacaagggagtgttgtgaagagtgaagactatagtcttcctgcttatatggatcggcgtgactaccccttgcctgatgtagcccatgtcaggctgctgtctgccagccagaaggccctgaaagagaaggagaaggcagactggagcagcttgtctagggatgagaaagtccaattgtaccgcatccagtttaatgagagctttgctgagatgaacaggagcaccaacgagtggaagacagttgtgggcctggccatgttcttcatcggctttactgcacttgttctcatttgggagaagcactatgtgtatggccccatccctcatacctttgatcgtgactgggtggccatgcagaccaagaggatgctggacatgaaggccaaccccattc

SEQ ID NO: 2782 - DNA, 491 bp, Cricetulus griseus
gaatccaaatggactaccgacactacaaatgactatgcagtaattcagcactgccccatgtggtgaattgcaagttgtgtagcactagcagcggacatgattccatgtggggaggaatggatgtagccatcttatcaggcatcttgaaaaggtgtgttcatcaaagagctgcttttcagctacctttaacaattgacacgagtgggattcgaagtactgcttgcaactggaaaggcaggtcaaccacttggcaaagaaatggaacaatggatggacacagcagaggataagacaaccttctatttcaaacttctagactctacatcccttaagcagttcactggtactgtctaaagtcaagaatgggttagataaccttgttctaggagtgccaaacacaatacctacaaagagatgatcccagtgcgtgaccgagtgtactgaaaaaatattgaaaggggtatgaaagattcaaatctatagagaaaacg

SEQ ID NO: 2783 - DNA, 349 bp, Cricetulus griseus
  misc_feature (300)..(339): n is a, c, g, or t
gtgttggttcagtttctagcagaccaagtactcccacactaggcacaccaactccacaaaccatgtctgtctcaactaaagtaggcactccaatgtccctcacaggacaaaggtttacagtacagatgcctgcttctcagtcccctgctgtgaaagcttcaattcccgcaacatcagcagttcagaatgttctgattaatccatcactaattgggtccaaaaacattcttattactactaatatggtatcccaaaatacagccaatgagtcagcaaatgccctgaaaagaaaacgtgaannnnnnnnnnnnnnnnnnnnnnnnnnnnnnnnnnnnnnnntatgataatt

SEQ ID NO: 2784 - DNA, 552 bp, Cricetulus griseus
tgaaagctccacttctcaggagcaaagtaacctgcacacaagccagtgctcagttgatgcagttcttcctggaaagcacttggatgtgaaaattaaccagaagggctttaggaagaggaaagccaagggaaaaaaacatttccattccaggagactcacccataagaaataagcagaagaactatgaggggcagcaagtcagagatgacagcaattccagggtacatggttctatacaaaaccacgaacagggttctgagaagagtgaagctagggacagcaaagatgccattatacttctagaacctgcaaaaattaaccaaaaagccactggctctgaaaggggtaaagtcagggacaatagcaatgccaggacactggatgcaaatgtaaagattcacaagaaagttcctagacaggataaaagtggggaaagcagcaatgccctggcacaaggttcatctataccgaatcacctgatgggggctgaggtaggaagatccagggacaggaactgttccttgacacaggcttcacctgtaagaattctcc

SEQ ID NO: 2785 - DNA, 418 bp, Cricetulus griseus
aacactgctttgaattggatgaatgaatttgagaagtggcaggagggattaaatgacaatgaaaagcttgaggtctctgatttagcaaccgagaaacttcctcacgagagaacttatatgctacagaggtggcaagaatatggaggccttatgatcatagggcctgagatgtatagaaatcttgctcaaagaaagaatgtgaagagtcggaaacttaaagaaatatttaataaagctttagttgatccaggccctgattttgttgcttgtgatgaaggccatattctaaaaaatgaagcatctgctgtttcaaaagctatgaactctatacgatctaggatgaggattattttaacaggaacaccacttcaaaataacctgattgagtatcattgcatggttaactttatcaaggaaa

SEQ ID NO: 2786 - DNA, 457 bp, Cricetulus griseus
  misc_feature (152)..(170): n is a, c, g, or t
  misc_feature (273)..(298): n is a, c, g, or t
taaggaaactctgaaccaggagtcatggaaaccaaacccaagctctactactttcacggcagaggcaggatggagtcaatccgatggctgctggctgcagcaggagtggagttcgaagaagaatttcttgagacaagagaacaatatgagannnnnnnnnnnnnnnnnnncctgctttttgaccaagtacctttggttgagattgatggaatgccgctgacacagtcaagagccatcctcagctaccttgctgccaagtacaacttgtacggnnnnnnnnnnnnnnnnnnnnnnnnnnttgacatgtatgctgatggcaccctggacctgatgctaatgatcgcccaggctccatttaaaccccctaaggaaaaagaggagagctatgctttagtagtgaagagagctaagactcgttacttccctgtctttgaaaagattttgaaagaccacggag

SEQ ID NO: 2787 - DNA, 522 bp, Cricetulus griseus
  misc_feature (255)..(298): n is a, c, g, or t
gactctgcctcagaatgttaggaacaggcatgcatcaccacatccgtctaaagttgtgcctcagctttaaattagatgtcatatattggtccaggaaggctattttgactttcttagaaccctgacgtgggcttagttttttcaagtggaaatcataatttattttggttttggtaatatgtggatctgcttttgtaaacagagaaaagttgcacagactgatgttggctgaatgtttattattttccaagggannnnnnnnnnnnnnnnnnnnnnnnnnnnnnnnnnnnnnnnnnnnagtcatgacagaactttaaattccttttaaacgttttattcgcagaagtgttagaggaagctcttgtaggaaatgacagtgaaggcccactgtgtgaattgctttttttcttcctgactgcaatcttccaggcgatggctgaagaagaagaggatgtagccaaagagcagataactgatgctgacaccaaaggtcagagttcaacatcattgctgattaaacta

SEQ ID NO: 2788 - DNA, 497 bp, Cricetulus griseus
atcctgtgagtcccctgatgtcctggacagacaccagaccatggaggtgtcttgctaagcagatgctcccctggaccatgcaagtccctcctccttgaaatgaccactccataatagaacatttcatcctgcccgctggcctccactttcaccccatgcatggccacagaacctttctctaatagcctggatttaccattctctccacacacccctttttgtatataccaagaaccacacccatgccattactgtaacattccaacatcttgatccgatctgatctccatatcttctcttgccagcctttccctattctccctcaaatatgtatctgatgagactctttgattcctaactccatgtgtgtgcgagcacgcgtgtctgtgtctgtgtgtgcatagttctgtgattttagacatgctttcttgtagcgcttctacaaagggatttttttgcattctcagtggcgtttttaagggaaatatgcagagcag

SEQ ID NO: 2789 - DNA, 467 bp, Cricetulus griseus
ctactgacagcaagcgacagaagccttctatccattcaaggcagctgatttctaagccactaagctcatctgttagcaataataaaagaatagttagtacaaaaggaaagtcggttacagaatataaaaatgaggaatatcaaagatctgaaaggaacaagcgtctagatgctgatcgaaaaattcgtctgtcaagtagttcttctagagaaccttacaagactcaaccagaaaaagcttgtctacggaaaagggattctgaaagaagggccaagtctcctacaccagatggttctgagagaattgggcttgaagttgatagacgtgcaagcagatccagccaatcctcaaaggaagaggttaactctgaagaatatggctctgaccacgagacagggagcagtggttcttctgatgaacagggcaacaacactgacaatgaggaggaaggtgtggaagaagatgta

SEQ ID NO: 2790 - DNA, 424 bp, Cricetulus griseus
attgaccctcccggggaagtgaggacacaagttaaccaagcttctctttaaccctccttttaaactgaccgtcacggccttttgctgtaccatagccactctggagcgttagtgtgctgccccttcttaccgctgaccatgtccttaacattcacaaacagttgtcctttccttgactctgccatgttcttcccaatgagtatttcacatgatggtagactctcagtgtcctgtcagctctttgttcccagtcaccaagatggttgttcctctggaagactgatgatgtgacatctcatctcaacataaaatgcttgtgttaccatgtcttggccataggtggttacatccctctctgtgatgttttcaaaggctaaaggatttatttgatatatatccttaacttcttcagttgtctgcttgc

SEQ ID NO: 2791 - DNA, 351 bp, Cricetulus griseus
gcgagtccgcggcttccggctggagacgatgatgcaagaagtaagccccagtgcgtctcttattgacagaaccatcaagatgagaaaagaaacagaaactaggaaagtggttttagcctggggactcctaaatgtatccatggctggaatgatatatactgaaatgactggaaagttaattagtacatattataatgtgacatactggcctctgtggtatattgaacttgccctggcatctctcttcagtcttaatgccttatttgatttttggagatacttcaaatatacggtagcaccaacaagtctggtggttagccccggacagcaggcactgttagggctgaagac

SEQ ID NO: 2792 - DNA, 440 bp, Cricetulus griseus
  misc_feature (4)..(18): n is a, c, g, or t
actnnnnnnnnnnnnnnntctttcttgatgctgttcccatcagaccactgaagaggacacttcccgttccctagtgaaagatcaccttttccagcaagagacagttgttaccagtgagccttatagaagctcagacataagacctttaccctttgaagatctgaatgccagaagagtctacttgcaaagcccagggaaccaggtaagaaaatgcatactattcatatgtatagcatatttagagaacctggtatgctacagaaaaacacaaagctctgtaaaagggcacagggatgtggaggatgagttttgtagacagggagggaatgtcttagttcagggtgttgtaatacaacatgaactgggtagctcaaacagcaggatttttgtttgtttgtgttatcctacagctctagcagttagactggctgtggtaaggg

SEQ ID NO: 2793 - DNA, 473 bp, Cricetulus griseus
tgtcacaacaagattattgatttcccatttaagtggaattcgtcattatgaaaaggacatgaaaaaagtgaaagaagagaaagcttataaaaccatgaagatgatgaaaggggtaatgccatctgaccaagagaaagaactgaaagaaaagggaggcaaaaatcatgagaagagtgactcccctaaagcaaaagccgagcaggagaatgaagtcaggtgtcggcactcaaagccaggcaagaaaaagaatgattttgaccaaggcgaattatatttgaaagaaaaatttgaaaattcaattgaatccctaagattatttaaaaatgatcctttattctttaaacctggtagtcagtttttgtattcaacatttggctataccctgctggcagccatagtagaaagagcttcaggatataaatatttggactatatgcagaagattttccatgacttggacatgctgacaactg

SEQ ID NO: 2794 - DNA, 152 bp, Cricetulus griseus
ccccacttcaggcaatgccagccctgtaattccatccttgccactttacccagacccagtgaggctcatccggtttggaaccaaatgtcctgaatgtcacaagcagatgcgagactatatggtcctggctgcacatttccagaggacaacag

SEQ ID NO: 2795 - DNA, 517 bp, Cricetulus griseus
ttatgctttgttaaaagaactcttaattcagatctttagtacaccacggtatcatccaaagagtcaaccattcgtggaccatgtgtttacattcaccattctggataacaggatatggtttcggaacttccagattatagaagaagatgctgctctagtggaaataggacctcgatttgtcttaaatcttataaagatttttcagggaagctttggaggaccaactttatatgaaaatcctcattaccagtctccaaacatgcatcggcgtattgtaaggtccatcacagctgcaaaatacagagagaaacagcaagtcaaagatgttcagaaaatgaggaagaaagaaccaaagactattcttccacatgaccccactgcagatgtctttgatataccagcagaggaaaaaccagtagaaatacagtgggtgaaaccagagcctaaagtagatctcacagcaagaaagaggaggatttacaaaaggcatcggaaactgcagcagaagatgaacaga

SEQ ID NO: 2796 - DNA, 545 bp, Cricetulus griseus
tcgcccagccagcaccatagaagacccttccttgcacacctgcaagcctgcagaggcctccctggagcaggcaatgccataccctgctcagaagactcagttaagaagccatctgggatatccaaggtgatgcagggacaggacttcacctacagagacatcaacagcagccctgccgttacccacaacagcttggcgtcactgcatctccttggccacagcttttaggaaaataccacctagtccccccccaacccccagtgcctcgccagcatgagaacttgtctcttcaggtctggaacagagactcagcaggtttgagaaggagaacccagaaggaccacatggtaacccccaaaccagagtgaaagttgtgatgagtctgaaggcaaattcctcccacatccactcagccagagccatcgtgaagactttggcgttcctggtcccctcaccacagtcccgataggcaacccctgcgggatcctacctctggctgacagcttcttggtattaatgatcttggctgcatattcatggccggt

SEQ ID NO: 2797 - DNA, 578 bp, Cricetulus griseus
agggcgaccgggtaccccaccgcgctcagcgccgccgagggctcggtgccaggtccggtagcagcacgccggggctcttcctcctcggagagggcggtgccggtggtctccggcctcagcagccccggggtagcttcaccctgtctgtgttctgcagcgggttaaggaaagccgccctgtggggcactagcgaggaggccatcgctatggtgacggagcaggaagtggaggccatagggaagaccctggtggaccccaagcagccgctgcaggcccgcttccgggccctgttcactctgcggggactcggtggcccgcacgctattgcctggatcagccgaggcttcgaggacagttctgccctgttgaagcacgagctggcttactgcctgggccagatgcaggactcgcgcgccatcccagtgctggtgggtgtgctgtgcgacaggaaccaagagcccatggtgcgccatgaggctggggaagcactaggggccatcggtaacccggaagttctagaccttctgaagcagtattctaccgaccctgtggttgaggtggccgagacatgtcagttg

SEQ ID NO: 2798 - DNA, 600 bp, Cricetulus griseus
gattcaaagtagtatgtaagattatagagcttatggagggtgtcgctgatgattttaagtctaaaaccctcaggcgggttgttactctacagacaaaaagtcctgaagggcgctttcctgatctgagcgcagagctgaaccgatgggatacagcttttgaccatgagaaggctcggaagacaggactcatcactcccaaggcgggctttgatcctgattatgaccaagcacttgctgacatcaaagagaatgaacagagcctcctagaatacttggataaacagcgcagtcgcattggctgcaggaccatagtctactggggaattggtaggaaccggtaccagttggagatcccagagaattttgctacccgtaacctcccggaagaatatgaattaaaatctactaaaaagggctgtaaacgatactggaccaaaacaattgagaagaaattatctaatcttataaatgctgaagaacgtagggacatgtctttgaaagactgcatgaggcggctgttctataactttgctaaaaattacaaggactggcagtctgctatagagtgcattgcagtgttggatgtcttactgtgcctgg

SEQ ID NO: 2799 - DNA, 430 bp, Cricetulus griseus
  misc_feature (86)..(103): n is a, c, g, or t
agaaccatccatatgctgagacatctaccagggacccagttttgctatagagagtaaatggacactggtgtaatcccttacaaatnnnnnnnnnnnnnnnnnnttctgaatgatgtaatatttaaagttatactatgcttgtttgaacatggtattacacttatcaaaaatcttggcagtttaagatttattaaagtgtattatgtgcaagcattccgtagtttaataaaactattgtttgttctttaatgttaaaaacactgatccttaaaatatgattttttttattttcatagatcatttatttcaaaatggatgaaatgaatggcctttcaggcttagggacatagttcataagtagagtagttgccaaggatgtgtgaggctaaatatttgatccctgaaacttaagaaaacaacaaagatcttc

SEQ ID NO: 2800 - DNA, 506 bp, Cricetulus griseus
ccctgcactgcaatctgaatgagcataaccaccacctcatcaatgacttcactatcaagcagatgaggcaaggagcattccttgtgaacgcagccagaggtggtctggtagatgagaaagccctagctcaagccctcaaagagggaaggatacgaggagcagctcttgatgtgcacgagtctgagcccttcagctttgctcagggcccattgaaagatgcaccaaatctcatctgcacgccgcacacagcctggtacagtgaacaagcatcactagagatgagggaagcagctgccactgagatccgccgagcaatcacaggtcgcatcccagaaagcttgcgaaactgtgtcaacaaagaattcttcgttacttcagctccgtggtcagtcatcgaccagcaagcaattcatcccgagctcaatggtgccacatacaggtatcccccaggcattgttggggtggctccaggagggcttcctgcagctatggaagggatcatccca

SEQ ID NO: 2801 - DNA, 339 bp, Cricetulus griseus
ggtgctggacctggatttgtttcgtgtggataaaggaggggacccagccctcattcgagagacgcaggagaagcgcttcaaggacccggggctggtggaccagctggtgaaggcggacagtgagtggcgacgatgcaggttccgggcagacaacttgaacaagctgaagaacttatgcagcaagactattggtgagaaaatcaagaaaaaagagccagtgggagatgacgagttcatcccataggacgtgttgaatttcgatgaccttactgcagacacgttatctgccctgaaagtctcacaaattaaaaaagtccgactcctcatcgatgaagccat

SEQ ID NO: 2802 - DNA, 198 bp, Cricetulus griseus
cctggactggtgttgtggtgtttgcccagtactatgtaggagaaagtggaggctcccaggaagagagctggttctcctttcattcccagtcctgaaagatgatgcaattaaagctgtgcctccagtactcataagacggagttcctggttcacctgccataggattggagtcacttcctgacacctgtgtaacatgta

SEQ ID NO: 2803 - DNA, 433 bp, Cricetulus griseus
  misc_feature (122)..(122): n is a, c, g, or t
cacctggccacggagtacgtgttctcggacttcttgctaaaggagcccaccgagcccaaattcaaggggctgcggctggagctagcggtggacaagatggtcacatgcatcgcctttggtcnttctctgctgctcatctcgctggccttcgctcaggagatctccatcggtacacagataagctgcttctccccaagttctttctcctggcgacaggctgcctttgtggattcatactgctgggctgctgtgcagcagaagagctccctgcaaaacgagtctggaaacctcccactgtggctgcacaagttcttcccctacatcctgctgctgtttgccatactcctgtacctgcccacgctgttctggcgcttcgcagcagctccgcatctctgctcagacctgaagtttatcatggaggaacttgacaaag

SEQ ID NO: 2804 - DNA, 322 bp, Cricetulus griseus
gctctggacttcttggagtactgcctccaaacttgcccaacaactgtggacttgtaggactacagccaccaaatgttacaaatcctgctggacttatgggaacacagccaccgattggacctcaaaacttacctcccttaactatcccaactcaaagggtgcctgcattgccgatgttagacatccgtccaggactgataccacaggctcctggaccaagattccctttactacagcctggaatacccccccagcggggtatcccttccccagcggtacttgatgcatctcttcatccgccaccccgtggacctttccctcc

SEQ ID NO: 2805 - DNA, 342 bp, Cricetulus griseus
  misc_feature (23)..(45): n is a, c, g, or t
tccctgatttataacatgaacannnnnnnnnnnnnnnnnnnnnnnaaggaaagaaagaattcggccttctttctcttctaatcttattccacggatctgattcaggccatgtcacaacacaaggctacataaaaacctcaagtggaggtcccagggtctgggggggtttaaatagggggtgatggaatgtttcggtaagggacccttttcttcaaatcctctcaaaggggaatttctaacagttccaacttaatgggctaacagctttgggggccttgcctctttcctaatctttagggcatgggagcccagcctccctaaccctaaaaccctgaaaatgga

SEQ ID NO: 2806 - DNA, 527 bp, Cricetulus griseus
agcctgcgagggagggtggcatccactccccaagtccggtgccccgatgcccagcgccaacgccagccgcaagggtcaggagaagccgcgggagatcgtggacgcggcggaagattatgctaaagaaagatatggggtgtcctctatgatacaatcccaagaaaaaccagacagagttttggtccgagttaaagacttgacagtacaaaaggctgatgatgttgtttgggtccgtgcaagagttcatacaagcagagcaaaagggaagcagtgcttcttagttctgaggcagcagcagtttaatgtccaggctcttgtggcggtgggagaccatgcaagcaagcagatggttaaatttgctgccaacatcaacaaagaaagtattattgatgtggaaggcattgtgagaaaagtaaatcagaaaattggaagctgtgcacagcaagatgttgagttacatgtccagaagatttatgtgatcagtttggctgaacctcgacttcccttgcagctggatgatgccgttc

SEQ ID NO: 2807 - DNA, 528 bp, Cricetulus griseus
  misc_feature (309)..(325): n is a, c, g, or t
tacaggaattggattcaagcaatggggccctgctgcccttctatgacccagacaccagtgtggtctatgtctgtggcaagggtgactccagcatccggtactttgaaatcacagatgaggctccctacatccacttcctgaatacattcaccagcaaagaaccccaaaggggtatgggtagcatgcctaagaggggcttggaggtcagcaagtgtgaaattgcccggttctacaaactccatgaacgcaagtgtgaacccatagtcatgaccgtgccaagaaagtccgacctcttccaggatgatcttnnnnnnnnnnnnnnnnnacctgaggctgctcttgaggcagaggattgggtgagcgggcaggatgctgatccgatcctgatctcactacgggaagcatatatgcccagtaaacaacgggatctgaaggtcagccggcgaaatgtgctatcggacagtcggcctgccagttccagccgccctggagcctccacagctaccacaatttctgatgttttcagtg

SEQ ID NO: 2808 - DNA, 399 bp, Cricetulus griseus
  misc_feature (203)..(228): n is a, c, g, or t
ctctcttcttcatggagctgtccttcggccagtttgcaagccaggggtgcctgggggtctggaggatcagccccatgttcaaaggagtgggctatggcatgatggtggtgtccacatacatcggcatctactacaatgtggtcatctgcatcgccttctactacttcttctcgtccatgacgcacgtgctgccctgggcttannnnnnnnnnnnnnnnnnnnnnnnnnactgtgccggtgtgctggatgcttccaacctcaccaatggctcccagtccactgccctgtctggcaacctctctcacctgttcaaccacaccctgcacaggaccatccccagcgaggagtactggaggctgtatgtgctgaagctgtctgatgacattggaaacttcggag

SEQ ID NO: 2809 - DNA, 359 bp, Cricetulus griseus
cttcattgctgtagtttggattaactcccctcccgcctaccccttatcccaaactgcatttataatttgtgactgaggatcatttgtttgttaatgtactgtgcctttaactttagacaactttttattttgatgtcctgttggctcagtaatgctcaagataccaattgtttttgacaaaataaatttactgaacttgggctaaaatcaaaccttggcacacaggtgtgatacaacttaacaggaatcatcgattcatccataaatataaagaaaagtggtagcctgcattaaggctttgatacttgcagattggggaaaaacaaacaacaaacgtcttgaagcatattaatggaatt

SEQ ID NO: 2810 - DNA, 421 bp, Cricetulus griseus
  misc_feature (63)..(101): n is a, c, g, or t
  misc_feature (148)..(170): n is a, c, g, or t
tgacactttccaccaaagatgtcctagtcctcttacataagtggagcctcattgaaagagacnnnnnnnnnnnnnnnnnnnnnnnnnnnnnnnnnnnnnnncaccaagacaaggacctaatgaaaatgctcaaggataagaacaagcnnnnnnnnnnnnnnnnnnnnnnnggcccacgaggccgaaagaagaggcctggagaagtggaagagactgctgagcctgagctggaagcatctagtttggagacgtgcaagaacctcctaaagtccacactgactcactggggtccagttgtccccatccctgaacccactcaagagtctgtgggccaggctacccccagaagtgaaacactgggctctacgcatgctgctctttccttggtggccaactgggtgctgcggtcattggctgagtg

SEQ ID NO: 2811 - DNA, 457 bp, Cricetulus griseus
gaagtgtaaaggaataagctgaaggctgacacttttgcagggaaaacagagctggtgggacatggccaagcaaagttcaggcagtctctctagccttccattcttggagggcatggaccccacctactctgtggctgctgaattggctccatttagttgcagtggtaggaaacggtagtctggcttgactgggccacttctacaatgtaagcaagtgacaggttctccatgacatcgttgttttaaagtttcccacaaatacttatacttactaaagtggaaccattgggaagtctttccagtattccattccaggatgcttttgttcatttctctcttgtcttttaaaataagaaacttgagatgactttgatcatcagcgacttgtcccccaggctgataatgcctggcttgaaaatagaagatgggctctcaaaccatacaaacttacagcaag

SEQ ID NO: 2812 - DNA, 357 bp, Cricetulus griseus
acctttattcagccaaacatgaggttaagacaactgggagttgcaaaaaaatttggtgtgttgtctgacaactttaaaggcaaaagaattgttctcatagatgattcaattgtgatatgtcattactatctcacccatcataaaactcctcaaagaatccggggcaaaagaggtgcacattcgagttgcttcaccaccaataaaatatccttgcttcatgggaataaatatacccacaaaagaagagctgatagccaataagccagaatttgaacatcttgcagaatacctcggagcaaacagtgttatatacttgtcagtggaaggactggtctcatctgtgcaacaagagatcaa

SEQ ID NO: 2813 - DNA, 182 bp, Cricetulus griseus
  misc_feature (143)..(169): n is a, c, g, or t
gggacaccctgcagctggcgttcatcgacctcagacaagtaagatgtattgactccttccacttactgttctcttgccttattagtttatttttaatggtaccacaatgcttgtttgccctgaaaacccatctttggaagatnnnnnnnnnnnnnnnnnnnnnnnnnnnggggggggccttt

SEQ ID NO: 2814 - DNA, 323 bp, Cricetulus griseus
ccacccctctaagctttccaaacctcttcactcacctactttctcttcaaatacaacaagctcttagaactttgggtgtttgaagagaaacacacatcttaggacttttgcatctggtttgccttctgcccgggtatttcctcctggagttctgtcccattgtctcattttactatcttcataatcagaattactttctggacttgccgtctaggtatgtgctgacagatctgtgaccagttccactccaatagtatataaattggatgtggagggcacagggaccttgtctttcttagccctgacggggagggcatataaga

SEQ ID NO: 2815 - DNA, 528 bp, Cricetulus griseus
aagagggcaagatgaatggggaagactaagttctctttgcaaatggagtgcttgtagaatgtacactgaaatgccttataaaagcaaacaaatccacaaagtggtcaggactccacccacttcacagttctcactcagtgaaacaggaatacagaaacggcacacaaaatacagaactgggcagataaagcctacctgtttaactaaggcatagagggacggaatttctattttattcatttcaccattctggcccttgaaaattggtaagactgtcaccaggatataaaacctgcattgagacagcacaagtatgaaaaagcaaaagcatcccccaaaccaaaacaaacaaaaaaaccaaaactctgtgtaaaagtcctttggtgccgactgtctcttctggacaagtctgcaggatgcccctggaggtaaacccagttaagtaggcagcaaaactccttcccacttgctctaagcatctttctacccaacagcctggcacctgccactgaccctgtttctacccag

SEQ ID NO: 2816 - DNA, 291 bp, Cricetulus griseus
aaagccacagtagaaaccctgtctcggaaaaaaaaatcataggccctaaccaaaccacaaaggttttatttgtaaaatatgctgacagagtgaatcatgaagtcacttctgagaagcccatgtatgctgtattactaaataaaccaaagaaatgatagcaatgctaacgtatggtgaaaagaccaaagaccttggtgagcttcgagctcattggcagtcatttggttcagctgcatcgtggaaagaacacagtcacacctatagattaggacaagtctctctctctctctc

SEQ ID NO: 2817 - DNA, 355 bp, Cricetulus griseus
caagatgagagaggagcatggaacagagagcttttttcagcacttcctcccccagcacttccaactggagctggcccagcgggatgaggacgcgaatgtcaacatctatagggccagacacagggaagtgagacctgccggacatcaccccttctgttgacctcagcccccgtctcagtggaggaatggcctgtctccagacccataaacatcaggacaaaagaaaaggatggattgtctgtcttctttctccccctctagcaatttgttcccctagatattcctgggaaggctctgttaaaaaattagcagagccctagaagcattgagtttaaagcccaacacttgtcttcag

SEQ ID NO: 2818 - DNA, 294 bp, Cricetulus griseus
gaggaagctgcccctttgcagaactgtactgtaaccatttctcctttataaatattattttcacatggctgattgtatacagggcttgtaataattttaacactgtgctgtgaaagagcttaggattctccaccagaggcgacttgagaagcacccgagagtggagtgttctttctgtgactttacttcttcctacgtacattaagtctattcgttctgtttcagcctcctgtataagaagtaccgtattttctgcccatcatactttgtaataaaacttgaacatgtatagac

SEQ ID NO: 2819 - DNA, 495 bp, Cricetulus griseus
ggtgtctgctgaagtggaaggagcctgggccttagggtcagatagccgtggttttgtataacatctgtgggtttctgtcagaggctgctggttgtaaagcaactttgtattttttctaagtccattttctcactggtaaatgtcactacaaggatcatgtattgtgattgatacatacactttaaatatataatttcctttctggccagtcataaatggcagggatagacttaaaaccacattattggattcctggtttttaaaggcatttgcttttttaaacatgacagctttctctgctgcatgccagacatatttaccacatgtgaccaaggctctgtagaaagtcacacagcactcagaatctatgaattgagacatggaagcctatttattgtcctgaaagaaattcaccattcacttttacacagcaatcattcatagagtatgctcatagctctcaaaacctcatagacgtgtatatacttgctcact

SEQ ID NO: 2820 - DNA, 360 bp, Cricetulus griseus
  misc_feature (58)..(73): n is a, c, g, or t
  misc_feature (75)..(88): n is a, c, g, or t
aactttgaagtaaggccagggcagaggcagtatactgcctctctgagttcaaggtcannnnnnnnnnnnnnnntnnnnnnnnnnnnnngcagagctacacacgagaaaccctgtcttttttcttttaaaaatttaaaaaaagaaaaaaaaacttttaaataaactttttctcacattataatactttgggccaggtgcatagctcattgatggagcacatgtacaaggcatgaagttcgggttcaattcccttcactgtgaaaagtatgtgtgtgtatgataaatgagaaaaaaaacctaaggtgttgactaagggaccatattctctaaacagtgtgatcaattaaacatggggaatgt

SEQ ID NO: 2821 - DNA, 313 bp, Cricetulus griseus
caagttctctgtcatggaggcaatgtcactgtctctggtctcggagctcagggaacaccccagggtcccgaatccaacagaaaatgggcctcccctcagtgactggggctgggctggacgcccctttgcatgacctcatgaagcacatttgtgcttgatagtaggaatttttttttttaaagcaatctggagaaagagtcttctatacctgtcttataggttttatgagaacttcactaagatggacaggataaaggttcatgtttgccgttttatacttctatatttgaagtttataataaaattctatttg

SEQ ID NO: 2822 - DNA, 578 bp, Cricetulus griseus
  misc_feature (468)..(494): n is a, c, g, or t
ttctatagaggaggggtttacaaagagaagctctgggggttcctcagagaggaagctaagaagccctgacacatggagccaggggcagggttattgtagatttacaggtgaaaggtgagagtatctagaacagatcaatacaaatgaggagaaatgggcaaaagccaactatattttggagatagaactggtcagatgtgattagatataatacacaaggcaaagaaagcaattaaggattgctgctgaatttctactttgtttagctagctgatcattgatgttaattaatgatacagggaaacctgttaagacagtgaatcttgggataggaggaatcagaaattcattttgaccctgttaattctatgattcctgagtaggaaggtgccaagtataatgtttaccatgaatccagatagaagacgtctttgctcaagatgaagattagatgtcactttgtcatannnnnnnnnnnnnnnnnnnnnnnnnnnctgttattaagtatgtagaaaccatggggttttctgatgctctttatctctgagagcagtaggccttctgtttcctggaagtct

SEQ ID NO: 2823 - DNA, 579 bp, Cricetulus griseus
ggcccgagtgcagtttggagcaaataaggtacttttcttcagaactccacagacatgcagagatgtcccaatgctagtggaggtcacgtgtcaggcatatttctgtcttgattatagttttaaattttagttatttttatgtctatgagtgttttgcctggatgtatgtgtctgtggaccgtatgtgtgcctggtgccctcaaaggccagaagagggcatgagataaactacagttagagacagttgtgagtcaccatgtgggccattggaattgaactcgggtcctctccaaggacagatgctcttaactgatgagccatctctccatcccctgtctcaattctttttgaggtactttaattttcatgctttagaaaagtgaaggtaggaaacacagatgtgtaagagaatatgctcattgcagtcacttaaccccacttagtctttgatattcccagaaacgtttagtttgagctcactgttaatgaaaggaaaaccttgctgtactttgaggtttctccaaactgaggtcatgttagtatcactaattttcagtcagaatatacatgctggactgt

SEQ ID NO: 2824 - DNA, 600 bp, Cricetulus griseus
tcgacccagcgtccgctaatcttgtcccaatcatcagaagcattagagatcaactcctgagggaaattttccttgtttgaatagagtattggtgatacaggacttgagctggtgcacttccttgggcgtcttgatgggaaagccaaacagtagtatagaacagggtggacccacacatcaagcattgctctcttccttttcttggttcacgttaagggtcagggtcacagttctaggaagtcctccccccagcacacacataatcatagttgattacaccactgcctaaagcaccttatcttccctttgcttcctgttgaggctcttgcccagccacttctccttattctatctcaatttcagtatttgtttactcttgatcatttataatacaatctcctttggtgatcctattacatgcaagataacaccatataatcatttaataattttttctataaaattctctacaaaatcttagagtgcatagaaggaaacttttttgcaagtaacagatgtatcttttcattcctgtgttcccaggacctagttcaatgcctcatccataggatgaattctttttaaattaaattgtaaata

SEQ ID NO: 2825 - DNA, 581 bp, Cricetulus griseus
cagcagccctgcctcttcacagttctctgtgtgtagtgaagatcaagaagcaattcaggctcagaaaatatggaagaaagccattatgcttgtatggagggctgcagcaaatcatatatatgctaatgtgttcctgcaacctgttacagatgacatagcacctggctaccatagcattgtgcagagacctatggatttgtcaacaattaagaaaaacattgaaaatggactgatccgaagcacagccgagtttcagcgtgacattatgctgatgtttcagaatgctgttatgtataatagctcagaccatgatgtgtatcacatggcagtagagatgcagagagatgtcctggaacagatccagcaattcttggccacacagttgattatgcaaacatctgagtctggaatcagtgctaaaagtcttcgggggagagattctacccgaaaacaagatgcttcagagaaggacagtgtccccatgggctctcctgccttccttctctctctctttgatgggggaaccaggggacgccgctgtgccattgaagcagatatgaaaatgaagaagtgaagcctca

SEQ ID NO: 2826 - DNA, 581 bp, Cricetulus griseus
tgtggttccgagtttgagctgctggtgcgacagtctgcgcgatgcccaaggccaaggggaagactcggaggcagaagttcggttacaacgtcaaccgaaagcgtctgaaccgcaatgctcgtcggaaggctgctccgcggatcgagtgctcccacatccgacatgcctgggaccacaccagatccgtgcggcagaacctggcggagatggggttggccgtggaccccaacaaggcggttcccctccgtaagaggaaggtaaaggccatggaggtagacatggaggagagacccaaggaccttgtgcggaagccctatgtgctgaatgacctggaggcagaagccagcctcccagagaagaaaggaaataccttgtctcgggacctcattgaatatgttcattacatggtggcaaaccatggggaggactataaggctatggcccgggatgagaagaattactatcaagatacaccaaagcagattcggaataagatcaatgtctataagcgcttttacccatcagagtggcaaaccttcatggattctttgcaaaataagaagatggaggttgactgagtg

SEQ ID NO: 2827 - DNA, 567 bp, Cricetulus griseus
tcagaaggagtaggtgctgagatagtgaagcatcgccaaatggaagcaagtggctcgtttacaatctcccctaccatggctaccatgaaatggggctgtaagagtgtccctggaacctcctgctgatactgccactttgtatttctatgccaggaatcatggcaaagtgctgaggaacctgtactccatggaagtaatatgctcatgaacattcagtcaaggaaaaaaaaggcaattaatatgtgtcatgggtgtgtttataaactaagtactgctaagtttagcatgtcagcaggtttcttttatgtcttaggctaacttagagaaaactaaagaaaagtcttggctatagggaatgtagactcggggggccaagtgtccctgccagatccttgaagcatttttactccagctcctaagaatactatcgcatgctatttgagtgcttttgttcctggagctctgtcagtgacagggaaactctagatgtttgtgatgaggcaacaacatagccaggaaggctgagttttcacccagatgtggcatcggagatgagccaggttaata

SEQ ID NO: 2828 - DNA, 579 bp, Cricetulus griseus
  misc_feature (292)..(306): n is a, c, g, or t
ccctcctgttatcagtaaggattgggacaacgaatactgcagcaatgagtgtgtggtaaaacactgcagggatgtattcttggcctgggtggcctctagaaatccaaactctgtggtgtttgtgaagtagcctttctgtttctccaagcctggaagattcatctgccagacacaagtccaagagcctgtatttgaaacacaagctgggcttcttctggtagtgcctgacctttacacccatagtccttcatgtccccatcttttctttcttcagcagaggccagactatagnnnnnnnnnnnnnnntactgtaatttggaattgtttttcactctcgactacaagcaaaattaccaggttatagcacaggaaagggtaaagggaatatggaagcaaaccatagtgggttattagaagaaatgtgtccggtaaattatcataggacttgcttcagatgttattggaaaactccttagctccgtccctacgaggaaacaccactgcgatattaagcttagggctacagctcattggtaaagtgccattgggtttattcccaatttatagaggaatgaatat

SEQ ID NO: 2829 - DNA, 510 bp, Cricetulus griseus
cagcatcagactcttaagtctacagcatatgcattatgggaagatacagtgtagtattcaaagtgtttagtttgccatttcaataaagtttaaaaactagccaggtttttacagtccaagaacttagaattgaaatagtgtaggaaagggactcagactggtttctgcctgttggatgattagatggtgtttattgtagaatgttactggaaagtggtgtgtctttaacaatacacattgaggttatttcctccttgacatctttttccagttggtcaaggttgcagattcagaggataaaaaaaatttcattaagaatgaattcatgtttactggtaacttattttttaaaaagtgatctgccaaagaaccaagaacttcagatactaatgaaattgtggggggaaagatttttaaaagaatgttactcacttttcactttctagttgatagaacctatcctatataatagacattcaagcaaagtgcatatattaagaaaaatgtgga

SEQ ID NO: 2830 - DNA, 569 bp, Cricetulus griseus
gtcatacaaacttacttttccccagaaaatagttcctgagggacaggtgggagactgtgtgagcaaatgtgtgtcatggctgtcctgaggaaagaggatagcctttacatacagattaaagttcaagaatgcttttctgtacaggcaggaagctttaggagctagatgtctctctgcttactcttgtgaccatggaacaaaggtttctgattcacacagaaaggtggttaatctgggaagactgataaacaaggaaagttcaggcctcccccaccctgagaattgtcagggcagccatcacagaaggtcgttatttctatcatcacttctgtgagttacacatttgtgtgcgtgtgttctgcatgtgtaggtgtatgtgaggagccatcttatttattctttgtgggatgggaaaatatttagttaaaatacactggcaaatcccactgccaacagacgagggaaatgcaggttgtcactgctcacccctaaggtgtcttcttagcttatagagcccacccaaggagcatactagccaaacaggacattcaaacaaaatctgcataatc

SEQ ID NO: 2831 - DNA, 422 bp, Cricetulus griseus
tcatccaactgtgcctggacctgaccacgacagtccagaaggattgccttgtagcagaaatggaggataaagttttaaatgtggtcaaggttttgaatggcatctgtgacaaaacaatgcgctcaacttcggatcctgttatgagccagtgtgcatgcctggaggaagttcacttaccgaatgttagacctggggaaggcctgggcatgtacatcaagtcaacctatgatggattgcatgtgattactggaaccacggaaaattctcctgcagacaggtctcagaagattcacgctggtgatgaagtcattcaagttaatcggcagactgtggttgggtggcatttgaaaaatctggtgagaaagttgagagagaatcctacgggtgtggtgctgctactgaagaataagcccacggtcttt

SEQ ID NO: 2832 - DNA, 580 bp, Cricetulus griseus
aaatatacagtgtggtgaaggttgactgaagaagcccagtgtgtccagttaaaacagaaataaactaaatcttcatcaacaaagacctgttttgtgactaccttgaattttctcagacttattggcctagtaatccttcagaaacagcatacttaagaacacctcttcccatgcgcctgtacccacaagatgtatttcaacactaaagcgtttgtattgtgattggattaagtatgtattcagttgttctcagtgaagggcaaatttaaatattatgtgcatttgtaaatatgatagctataaacttttcaatacttctaatggcagattagaggaggccataatactcctgagagactggacagttgattgtaaataggattttctaggctcggtaggtggaaagaattatttttctttgaaggaaataactttttatcatggtaattttgaaggatgattcctatgacatgttcactgggggaatgtggcttttaaaatcttgtatcggttgtaattgttcatatcttcttactcttctgtgttgacttcattattcccatggtatcggccttttaaa

SEQ ID NO: 2833 - DNA, 580 bp, Cricetulus griseus
cagcccgcctggggtcagcccacgcggagcccaggacatctggggctgtacagccaccatgcccagtgaaactctctgggaaattgcaaaagctgaagtggaaaaaaggaaaagtcacggaagtgaaggagatggagctgaaattggagaaaaatctgttttcttccttggcagtaaaaatgggggaaagacgactattattctaaggtgtcttgacagggacgagccagcaaagccaaccttagctttggaatacacatacggaagaagaacaaagggacataacacaccaaaagacattgctcacttttgggaactgggtggaggaacctctctattggacctcataagcataccaatcacatatgataccttgaggacattttctgttgttcttgttttggatctttccaaacctaatgatctttggcccaccatggaaaatctgttgcaagcgacaaaaagccacatagacaaagtgataatgaagctggggaagacaaattccaaagcggcctctgagatgaggcagaagatgtggagtgtcatgcagaaggaccatccggatcgtgagttaatc

SEQ ID NO: 2834 - DNA, 579 bp, Cricetulus griseus
aattaccctatgactaaaatacactgttcattttactgacctgtgtagcttcgtctcttttaataagtcatatgtccaaaacaagaaaaaccatagtccactttttgcaagtttccccactgtgcacattgctgaagctgcttaggaagggaggtggcgacttggccagcgttcttgacctccattgcatggccctcgaagtagtgtagattgttgccagcacagaggccaatgaacaacaaatgtctttcttaatacagttgttgtcctttgatctgagtagagattgtttgcaatggaaaacaatttgctttaaacttcttgtttttgtaaggtggatttagttttaagcttctgtcccctgagaactacattcatagacaagtcgctttttccagacatagcatataactcttctgaggtaattacttttgtaaggaagctgttcataacataagttattattattattgaacgcacgtggatgtgaaggatttttattgaaaaaccaaatggtttttcctttttctgtcgaatgaacccaatgatttgtctcctgggttatgtgactgtgaacac

SEQ ID NO: 2835 - DNA, 580 bp, Cricetulus griseus
  misc_feature (442)..(460): n is a, c, g, or t
tatgtccttagttacgagtttacacatcggcacagtcttgttattttgtctccctgtgattcatcttaggctgccatgaaaagggaggatgagccaggctctggagtggtatgattcagacaaggagttcagctgcttttagtctgttgcctcacttgctagacgggggaatccgagcacacacctcctggaggttgagctagtgggagactgggatagtagtaggatcctgagtccatggccagcctgggctacaaagtgaattccaggccaagtcagtctaggctacatcatgagaccctattttaaaaaaagagaaggaagagctcaggctggtggtacagcccagtaatcctagttacttgggagtctgaggcaggactatagagatcctgtctcaatgtctcaaagaaagcaagaggggggttggtggcagggtgannnnnnnnnnnnnnnnnnngcactcaagatgcatatgcacgtggatatctgtgatttcgaggccagcctgttctacagattgagttccaggacagacagaactacatagagaaaccctgtcttatataaaaatttaaat

SEQ ID NO: 2836 - DNA, 579 bp, Cricetulus griseus
cacagggtaaaagctctctcgtacctcccctgcttccagttcctgccagttccagtgtgggaccctttccagttgtactggctctgtctgagcatggactccctcctctagcagtttttctctctccaccctcttgtggactgtgtccacccccagggccaggtcctgggatggtccctccaactgaggcggctgcagcagctgcagcggctgctgcggctgctgccctttgtgctttgaccaactgggcttttgctttgatgtctgccagagttctggctcctgttctgtaaggactagtgatggagattggaaaacgagccctgggagagacctgcgatgtagaaaacagcatcggggagattctggagactgggatcttgataggtggtacttttcgcacttggaccctgtcccctctattaataaaaggctgctgagagacctgaaatggctgctggtgctggtgattctcattgatacctggtcttctctcacatctggtagtgggctcttcttggataagagatgatttccctttgatactttctgggatctgatcaacaagatttgcaggag

SEQ ID NO: 2837 - DNA, 172 bp, Cricetulus griseus
  misc_feature (97)..(151): n is a, c, g, or t
taccagtgttcttatatcactcaaggcaggcctggggcctgttagaccaaacacttcactacaggagactataggaaactttttaaggagagagatnnnnnnnnnnnnnnnnnnnnnnnnnnnnnnnnnnnnnnnnnnnnnnnnnnnnnnncgtgcctgtgttctctgtggg

SEQ ID NO: 2838 - DNA, 580 bp, Cricetulus griseus
ttttcttctgacaatgaattcctttgggtaccctctgagcccagtgctgtgctcacacaagaagccatataataaaaactaaaaaacgttgacattgtccaaatagcaaaaacatatccacagtttgctttataccacactataataatcagtctctttatgattctgcagtccctctgcttgtaatatcacctgggagatggagctcttagcaaacaggaaaagcatttttttagacccctcctccccaaccccccaaaaaaatccctctgtcttttcaaatggaacaagtcaaaagcaaggcaaatagaattgtattttttttctttctttgtgatttgattaatcagtatctacagagtattgagacaaaagacagtactaaatggtatatatactattgcttcagttttggctattttatgacctttcttttgtctacagtctaatttctttcagtgtagctggaattatgtgagttaatgacctctttaatgtagaacacaacttgcattataagacttgttagctcaaaaggaacaggcttggacagtgtggcaattttattttatttttttgg

SEQ ID NO: 2839 - DNA, 580 bp, Cricetulus griseus
  misc_feature (9)..(27): n is a, c, g, or t
  misc_feature (187)..(201): n is a, c, g, or t
ggaactgcnnnnnnnnnnnnnnnnnnnatcttggctctgactggatggggttaccgggttatagctttgcagtatccagtttattgggaccatcttgaattctgtgatggattcagaaaacttttagaccacttacagttggataaagtccatctgtttggggcgtctttgggaggttttttggctnnnnnnnnnnnnnnntacactcacaagtctccaagagtccactccctcatcctctgcaatgccttcagtgacacatctatcttcaaccaaacgtggactgcaaacagcttttggctgatgccagcatttatgctcaagaaaatagttcttgggaacttttcctctggcccagtcgacccaatgatggcagatgccattgacttcatggtggacaggctagagagtttgggtcaaagtgaactggcttcaagactaactctgaattgtcaaaattcatatgtggaacctcataaaattcgggacatccctgtaaccatcatggatgtgtttgaccagagtgcattgtcaacggaagccaaggaagaaatgtacaaactgtaccctaatgcccgga

SEQ ID NO: 2840 - DNA, 579 bp, Cricetulus griseus
aaattacaaaagaactttcttgcacttgcttgtcgccaaataaaagaaagacccattgattcccctccccctttcttcagcttttctcccttgatattcctcctttctttcctcttaaagtttgtaatactttcaaggactcttaaaaatgatcatgtttggattgtttcagttctcttatttttgtgaggtggttgggttgaaggaaagagaaaataggtctgtatagtttcacagttaagatgtcctctcaaattgggtatcagatgatttcaattttttttaacatcctgctttcacattgaagggcagagcctacaatattgtttatttcaaaaaaagccacagcaatatcttattctctaattcatagacaagcttagtgtatttgtggtactttgagttttaaagactatctgtgggatgttaatccctgacattgccttcactctacctttagtcctttgagtactcccaggagttggaccattgctatccttgtgagataatactaagctgatttagggttttaaagcagtttttcttctatctgctgattgctggggctggttgcgtagt

SEQ ID NO: 2841 - DNA, 567 bp, Cricetulus griseus
  misc_feature (65)..(82): n is a, c, g, or t
tttgcttaggtagtctttccagaagggagtaaactgtgtttttttagttttagcttttgttctgnnnnnnnnnnnnnnnnnntccttgtttgttttaagtagaacgactttgcttcattttctttgcttgtaagaaaatagatgtatttcagttgaatgtatgttatcaagcattatgtcattgtgggccttttacacctaccttttcatacaagcttaaatcctacattgtgggactgaagtgctcttaagattcctgtttattttcactgtgtaatatgcaaagcaaaagggaacttatttattgagtgggtaatggctcaaaagtggagcccacattcttatttgattatgttggtttcaccctttagacctcatcaaatggctgtctgatagcactcttactaaaccattttcccttttttatattaataattaggctttgaaataagtattttattcttacaaaatggaaagcttaccatctctgaagttgtcattcaggtggccttgtttagtcaaaacgccttgttaaaaataaacaagctttaaaatcatttttatttt

SEQ ID NO: 2842 - DNA, 579 bp, Cricetulus griseus
cttcagcaataagtggaacttacctgtttattttcagataaggtcagtcactgcaccatatcctgcccttctaaatagactttttcatggttgagggttagtcttgctatgtggctcaagctggccttaaaatcatgatcctctagcctcagcctcccaattactgggattataagtgcctgtcaccacactcagttaactggcatttgctagttaattaaaattttaaaattattattaaggcttttaaatgttttggggggggcgatattactccaatcagcagttctctaagggtggcagaattaaagtgaagatgtttatatatcatggatgatgaactatcaagaaagtgtgagttttctggtagtgggagagaaaagggacttggaataagctggactccaggccttgcatcattgccacagtcctctggctttgtgatgaaaagcactgaaggtgctagatggcagtccctctgtccttttcagtcactatctgcctccagtcctgggcctgtgtttggctctgtgtccccctttcagcttgtgaagagcaagtggctatttactctcccct

SEQ ID NO: 2843 - DNA, 175 bp, Cricetulus griseus
caaagacattacagataccctggtggctatcaatatccccaatggggcccatcatttagatctccgagccagcactgcctttgatccttccactgtgctgttatctcgatcactggaagttaaacacatgaagaaatggatcgcagatttctataaaaatgccaaaccttaaaaa

SEQ ID NO: 2844 - DNA, 418 bp, Cricetulus griseus
tgatgtttgtttccactgcaaccgtgtcatagaaggtgatggtatgtatctgtggatgggtgggaccactttggtataagaacacttgggaggtatgaaaaatgaaagaagctgattgctgtttgctcttggtatgcttctcaagtgctttacacagagagatgggctaacgaggcagcacatctgctgtaagctgtgttccgagttgctaggacttattacatgggctaaccatgcaggacatattggcaacaacgtaaggaaagcagctgtgtttgctaatggtcactaaccagccctgccagaaattccctgccagagttctaaacagcactgttgacatcatgtcatggctctcatcatacatcacctaatcatgaattgctttgtggaatgctgcatagagtaacaaggttat

SEQ ID NO: 2845 - DNA, 188 bp, Cricetulus griseus
gaacagctacaacccctgtgagggaccacaaaacatagcgaggcaagtggcagccagtgacaagtgggtgtatgcttccttggaaagttcaaatcccccccatcctgattcaccccagggtgtgaactcagaccccacccatgcttgtctcacgtccagagctctgtgggcttcccttatgatgcccc

SEQ ID NO: 2846 - DNA, 368 bp, Cricetulus griseus
  misc_feature (193)..(193): n is a, c, g, or t
  misc_feature (198)..(198): n is a, c, g, or t
gcaatgaagagggaagacatatacactttagatgaagagttacccaagagggtaaaggcccgcttttccacagcctctgatatgcgattcgaagacacattttatggggcagatgtaatccaaggggagagaaagaggcaaagagtactgagctccaggctgaaaaacgagtatgtggatgaccctgtgtatncgctnacctttcttgaagagttctttccagaagaagtgtcagaagagacaatagttgataacctgctgcaaccaaagagcagctcagaaagaaggaagacaaagggaaagtcttggtgtatgcactgggacatgtgatgggggtgggtggctttctctggcattggtaacagaca

SEQ ID NO: 2847 - DNA, 486 bp, Cricetulus griseus
cgactgaggcggcggtatggaggagggtgagagtacgttgggggtgctgtccggcttcgtgctcggcgcgctcaccttccagcatctcaacaccgactcagacacggaagggttccttctgggtgaaataaaaggtgaagccaagaatagcattactgattcacaaatggataatgttaaagttgtttatacaattgacattcagaaatatattccatgttaccggctttttagcttttataattcttcaggtgaagtaaacgaacatgcactgaagaaaattctttcaaatgccaaaaagactgtggtgggttggtacaaattccgccgtcactcagatcagatcatgacatttagagagcagttgctgcacagaaacttacagactcatctttcaagcccaaaacttgtttttctgctgttaacaccaagtataacaacagaaagctgctccactctctgcctggaacatgccctgcataaacc

SEQ ID NO: 2848 - DNA, 579 bp, Cricetulus griseus
caagttcaagatccaggtatctccgtttttacagcagatgttcatgcccctgcttcatgccatttttgaagtactgctgcgaccagcagaagacaatgaccagtcggctgccttggagaagcaaatgctaaggaggagttactttgccttcctgcaaacggtcacgggcagtgggatgagcgaagtgattgcaaatcagggtgcagagaatgtagaacgggtgctagttactgttatccaaggagctgttgagtatccggatccaattgcacagaaaacatgttttatcatcctctcaaagctggtagagctctggggaggcgaagatggaccggcgggattcgctgacttcatttacaagcacattgtccctgcgtgtttcctagcgcctctaaagcagacctttgacctggccgatgcacagacagagctggcactttctgaatgtgctgcgactctgaagacaatccatcttaaacggggccctgagtgtgttcagtatcttcaacataagttcctgccctccttacaggttgctccagaaatatattatgattcctgttaatcactttcagcagt

SEQ ID NO: 2849 - DNA, 439 bp, Cricetulus griseus
  misc_feature (276)..(302): n is a, c, g, or t
  misc_feature (402)..(419): n is a, c, g, or t
gccgccgcagaacctactcggacacagactcctctaatgatgttccccccgaagacccagagagacctcttcactgttcaggaaacacacttaatggagatttggcatcagcaaccattcctgaagaaagcagacttctggccaagacacaatctgaatctgaagaacctcttccatctttctcctgaggaaacggacacaccccgcctcctctgagtgttgctatgcaaaagctgctgtaattaaactctttctggggtagcttcccctctcctnnnnnnnnnnnnnnnnnnnnnnnnnnnttgtaaacaaacaacccacatacttttgaagtgtattttatctttctatagtttacttgcaagagtattttcctaataacttcacagtatggatgtgcannnnnnnnnnnnnnnnnncaaatgagggggtaacattt

SEQ ID NO: 2850 - DNA, 579 bp, Cricetulus griseus
agaggtaagttaaagaagactgtgacacttgagacccaggttctctttaaagtcctgttccagcattcctccatgtgattaacagccgggcctctgggttcctaggcaatgatcttccagttgagcaaccatttacttgacacaaattgtacctttctgttttcctacagtcaggttggtggtctacagggacacacactttgccacccaaccagaggtttcttgcagagattcctgatcactagtttattgcattagtaaactcagagatcaagaaagcagctggaatttaagggaaataaaacctgcactgcaccaaagctgtggggccctgtgtttcctctattgggtgatgatgttagcatcacttcccagcccatgtgtgactaaagtgcttggttttagccacagacaactacttaaatgtcacatcttggctgagcaaagttgggacaagggtttaacctgacataggagcaatgtgcaatccctaattcactgcacagtattataattgcaggacatttgtattttaaaactggatttggggaacattcatttgctccagcacttctagca

SEQ ID NO: 2851 - DNA, 579 bp, Cricetulus griseus
ggctgtgtcggtcgggcctgagccgagcagctgcgcgacatcatggatacgtccgggaagcaggcggaggcaatggcgctgctggctgaagcggagcgcaaggtgaagaactcacagtccttcttctccggcctcttcgggggctcatccaaaatagaagaagcgtgtgagatgtatgccagagcggcgaacatgttcaagatggccaagaactggagcgctgccgggaacgctttctgccaggctgcccagctgcacctacagctccagagcaagcatgatgcagctacctgcttcgtggacgcaggcaacgctttcaagaaagccgacccacaagaggccattaactgtctgatgagagcaatcgagatctatacagacatgggcagattcacgattgcagccaagcaccacatctccatcgctgagatctatgagacagaactggtggacgtggagaaggccatcgcccactatgagcagtctgcagactactacaaaggcgaagagtccaacagctcatccaacaagtgtctgctgaaggtggctggctacgccgcacagctggagcagtaccag

SEQ ID NO: 2852 - DNA, 463 bp, Cricetulus griseus
  misc_feature (50)..(62): n is a, c, g, or t
  misc_feature (65)..(79): n is a, c, g, or t
gcacacacctttaatctcatggtgttgatggcacacgactttaagttgannnnnnnnnnnnnatnnnnnnnnnnnnnnnccactcgggagtaagaggcagatggatctttatgagtccaaagcctgcctggtccggcagatcgaattccaggacaggctccaaagtcacataaaaaccctgcctcaaaaagaagttaatctactgtttaatgaatataaggctatctctattcagtttttaagttcagctgtgtctgttcaaacattctacttacctataaccatttacagactaattcatttacataattttgaccttatctagccatttgcatgtttaatgtgtgccccatatatttaactattacccacttttacacttccaatggtttcaaaaatccttaaaaaatttgcctaaaaagttggtatcttctttagtacacttattttcacgacacaactg

SEQ ID NO: 2853 - DNA, 579 bp, Cricetulus griseus
  misc_feature (232)..(246): n is a, c, g, or t
ggtaaggccatagctggaggctggccaggaacttgaaatgctaacatgttggatgcaggttccataaaggaggcctgaggctaaattcgacttgagtatattttatttgccctacacagcagttaaaaatttttaatcagctttctgcattaaattgttcacgtaaaattgtgcttgatcagcttctcccgagaagccaggagctctggcttcctgggcccacattctgaannnnnnnnnnnnnnnctgggggctgggtaatgaaacaccctgagtcagtcccacccccaccccaagttctccagatctggaggccaagacttcactgttaatatccattgtcaatttgattgggtttagactcaccatggaaacacagctcccggtgtgtctctatgagagcatttccagaaaagttcaacttgaagctgtaagaagaatcctgaatggagggtgggggcagcattgagggcgtcctgggatgaataaaagggaggtgtgctgaggtgtgattcctgactgatccgaatgtcaccatctgcttcacaccccctgtggccataacttctccgccatgat

SEQ ID NO: 2854 - DNA, 570 bp, Cricetulus griseus
tgtatcctgtcagggataatgtcagtgaatggaaagaaggttcttcacatggatcagaacccgtactatggaggagaaagcgcatctataacaccactggaagatttatacaaaagatttaagttaccaggacaaccaccagcatcaatggggagaggaagagactggaatgttgacttaattcccaagttccttatggccaatggtcagttggtgaagatgttactttacacagaggtcactcgctatatggatttcaaagtgattgaagggagctttgtctacaagggagggaaaatctacaaggttccttccactgaagcagaagcactggcatctagtttaatgggactgtttgaaaaacgccgcttcaggaagttcctagtttatgtcgccaactttgatgaaaaagatcctagaacttttgagggcattgaccctaagaagacctccatgagagatttgtataagaagtttgatttgggccaagatgttgtagacttcactggccattctcttgcactgtacagaacagatgagtaagtagactaatgaatccattggtggctc

SEQ ID NO: 2855 - DNA, 578 bp, Cricetulus griseus
  misc_feature (26)..(26): n is a, c, g, or t
ttatatttcatacttttttatacttntgagggaaaaaaagtcaaagaaatactgtagtattggagggaaaaaatatgatcaagaaaaagatgaattcaataagcagcctcatgggacttggccacacactctgggttccagttatctcgagctgctccaccctccctagcccaccaacggttctctctgcaaatgctttggatctaggaagctagtctcctgggttagccgatgtctgccctgctttctggttactcacattctgtttcttgcttcaaaagaaaagacaagactgttggaccagtattgcaattctgtagagtcatttcttattaaaacaataatgtgattacccaaattggcatatttaaggcctaatgccattctaataaaggcaaaaatttctttctactacttgtttcaggctctttgatctctttataagttaactaatatgtctattttcttcagattctgcagtagctctttaaaaagcacagcgggtggatagcaagctgacttttttatgtgctctgtacaaataattgtgaacttttaatatgttgagtgctttcatt

SEQ ID NO: 2856 - DNA, 303 bp, Cricetulus griseus
tttctgaagaaccaatttatattgtcactgagtttatgtcaaaagggagtttgttagatttccttaaagaaggagatggaaagtatttgaagcttccacagctggttgatatggctgctcagattgctgatggtatggcatatatagaaagaatgaactatattcatcgagatctccgtatctgctaatattcttgtaggagaaaatcttgtatgcaaaatagcagattttggcttcccaagattaattgaatacaatgaatacacagcacgacaaggtgctaaatttccaatcaagtggaca

SEQ ID NO: 2857 - DNA, 577 bp, Cricetulus griseus
gaagctgctgctgggccccaatgggccagcggtggcggcctccatcgacctaaccagcgaagaggaggaaggccagagtctatggtcttcgatcttaagcgaagtgtccacccgtgccatgtccaagctgccgtccggcaagaacattctggtgttcggagaagatggctctggtaaaacaactctcatgagcaaactacaatgagcagagcacggcaaaaaaggaagaggcttggagtatctttacctcagcgttcatgatgaggaccgagatgatcacacacgatgcaatgtgtggattttagatggagacctctaccacaaaggcctgctgaaatttgcagtttcagctgaatctttgccggagacgctggtcatttttgtcgtagacatgtctagaccttggactgtaatggaatctctacagaagtgggctattgttttacgtgagcacatcgacatgatgaatattccaccatacgaaatgagggatctggaacgataatttatgaaagattttcaagattatatccagcctgaagattggtgtcagggttccccacatataagagggcct

SEQ ID NO: 2858 - DNA, 300 bp, Cricetulus griseus
  misc_feature (150)..(150): n is a, c, g, or t
ggtcgtaccccactgccgtccggcccacgccgtgccgcgtccaaagccacagtataaaccccttgtctcgggaaaaaaaaaatcatatggcccttaaccataaccacaaaagggtttttatcttgtgaaaatatggctgaacaggagtgnaattcatgaaatgtcacttctggaaaagccccatgttatgcctgttattacctaaatgaaacccaaagtaaatgtatagccattgtctaaccgtttgggtggaaaagcaccataagaaccctctgggtgagcctttcgagccctcatatg

SEQ ID NO: 2859 - DNA, 578 bp, Cricetulus griseus
ttcctcctcactttcatcctgtcattcatgagatttgctgaaatcattattgggatatttgcattttgcacagtgactggtgtgctagctcttgacaataggaaagcactgaactgttagaattgggtctctgaatgctcaggtgggtgtctcaccagcatctcttctgtgcatttgctgttgagctgtctttagccataatgagcaccttgactaagagaagcaaaggtttcctgggttatttatcagtagtgtggaaatcatgttttcatgtggccagtgaaagcaaagatatttctcttcagtttgtattctttggaagacaggaaacatctgtgtacatcccttgactgtttgtaggatcacattgtctttatgatactgaactttacagctgctatacttttttacaaatgaatatcaaattataataggaatataggttgttttccacatcttcattatttggacctaaagttaatttttaataagaaagtatctttactctctacattaaaatgtcagaaaacgaaaaacatactgataaataaaagtccatgggcttcagaacctggaca

SEQ ID NO: 2860 - DNA, 580 bp, Cricetulus griseus
  misc_feature (339)..(356): n is a, c, g, or t
  misc_feature (387)..(404): n is a, c, g, or t
catcgtgtccacacgtcgcgtcggtggcaggactcctgaattattccaaaactgaacaatttcaactgagctgaagtactctgccttcctagagtaccagtccagtttaggagagccagagcagatcattagccatcatggcaaaccttagctactggctgctggcactctttgtggctacgtggactgatgttggcctctgcaagaagcggccaaagcctggagggtggaacactggtggaagccgataccctgggcagggcagccctggaggcaaccgttacccacctcagggtggtggcacctgggggcaaccccatggtggtggatggggacagnnnnnnnnnnnnnnnnnnggacaacctcatggtggtggttggggtcagnnnnnnnnnnnnnnnnnnggtcaaggaggtggcacccacaatcagtggaacaagcccagtaagccaaaaaccaacatgaaacatgtggcaagtgcggctgcggctggggcggtggtggggggccttgggggctacatgctggggagcgccatgagcaggcccatgcttcattttggcaatgactgggaggaccg

SEQ ID NO: 2861 - DNA, 580 bp, Cricetulus griseus
cagcctgtcctttcttcagaacacatggcagcctttggagtatttggtctctgtcagatccatgccttcgtagattacctgcgcagcaagttgaatccacagcaatttgaagttcttttccgaagtgttatctccctggttggctttgtcctcctcacagtgggagcactcctcatgctgacaggaaaaatttctccctggacagggcgtttctactcattgctggatccttcttatgctaaaaacaacatccccatcattgcatctgtgtctgagcaccagcccacaacctggtcctcctactattttgatctgcagctcctcgtcttcatgtttccagttggcctctattactgctttagtaacctgtctgatgctcggatttttatcatcatgtatggtgtgaccagcatgtacttttcagctgtaatggtgcgtctgatgctggtgttggcacctgttatgtgcattctttctggcattggtgtctcccatgtgctgtccacatatatgaagaatctggatataagtcgcccagacaagaagagcatgaagcaacaggatttcttcttaccctatt

SEQ ID NO: 2862 - DNA, 578 bp, Cricetulus griseus
ctcaccggcgtgcatccccgtgggctcaccggcgtgcgacccggcgtggagatgccccgaagtggggtacgagcagactatcgcgccgcgccggtgcccccctacaagtcggatgcacgcacggaggcccttaacagcaagattaaagaacaaaaaattcttgtggatgaactttctaacctgaagaagaatcggaaagtatataagcagcaacagaacagcagcgtatttttacttgcagatggaacagaaatgttttccaaaagcaaaaagacattagatgaactaagaaaacaataccaagcattagaagaaaacacagagacaaccgaagtcaagacgcagtcaccctgatttcacataaccatgtgtggcatttgctgctctgtaggcttctctgatgaacacttcagtaaagaattgaaagaggatttgctgtgcaatcttagacgactgggccccaataacagcaagcagctgttaaaatctggtgttcactatcatcgtttgttttccggtcatgttctttattagaaatgtgttttgactgcccatcctgtggaagatgaaagtggcaa

SEQ ID NO: 2863 - DNA, 201 bp, Cricetulus griseus
tttatctacatcgtccggaaagatgtagctgtttactctcagattttgagaaaactcttcattgaatcccatggaatcttccttggcctgcaaagaattgaggaggaattgacctttttttttcatgaaagctcacttggttcgagtggttgataattaccgatcactctttcgggcctgtgtggtagaaatgccccacgt

SEQ ID NO: 2864 - DNA, 138 bp, Cricetulus griseus
gtcgacccagcgtccgcatttcgtaaacaactgctctcttctaccttcaaacacacatggtcagtatgaacacattctgttttccattcgattactactggataaaactggtttggaagcagttgtgcttttggggtt

SEQ ID NO: 2865 - DNA, 577 bp, Cricetulus griseus
ctggaggaggttcaggttcaagatcaaagtccaatttggttactgtagaatcactggctggaggtgctagttcagagatgcgtgcatcaaccacgggtactgtagcaggcacaggagtctgagggctgaatgtgccagaatgatttactgtgggaatagctcgtctcactagccttccccacgtggcaatattaatattcatttgaggagctctgagaaatgttttgccttgctgttttgaaaaaattttcttttgtctttggagttttggtcttctttcaataactggattaaaaaaggtaacctctgcaaacaaagtaccctgtggttccaaatagagacacatgccatgccgctggttgtctaaaaaatcttctaacctcataaattttacagcacacagagatcgccaatcacgccaataaactgaaatttccagttcacgtgacctgtctagttccagtgtaaacttctggtcccacgactgattggaaataggcttccagctagtttgaccaaccacagtgttatctagcttcaaaacagcacagacatcattggacaagtcatcgggttt

SEQ ID NO: 2866 - DNA, 578 bp, Cricetulus griseus
  misc_feature (512)..(512): n is a, c, g, or t
agctctggtggcactatccttcagcggggctattgggctgacttttcttatgctgggatgtgccttggaggactatggcgtttactggcctctgttcgtcttgatcttctacgtcatttcccccatcccctacttcattgccaaaagggtcacctatgactccgatgcgaccagcagtgcctgtcgggaactggcatatttcttcactactgggattgttgtttctgcctttggatttcctgttattcttgctcgtgtggctgtgatcaagtggggagcctgtggccttgtgctggctggcaatgctgtcatttttctcacaattcaaggctttttcctcgtctttggaagaggagatgacttcagttgggaacagtggtagccctttactctgatggaaagcattgagttttttagaatttgtactgtatgtataagtgtacacatatggtggtttcttacagattttaatatgctgagttttttatacctttatatcatgaccatcttanggaagatgttgtaaacaaaagatgaattttattcctagcaaatagatcactccattgactcagact

SEQ ID NO: 2867 - DNA, 283 bp, Cricetulus griseus
  misc_feature (62)..(79): n is a, c, g, or t
ggtggttaaaagcactagctgctctttttttgttgtttctgagacagggtttctctgcatcnnnnnnnnnnnnnnnnnnctggaaattatctgtagaccaagctagccttgaactcagagatctgccaacctctgctggcgttgacacacactaccttagcatggcatataaaaagtaaatctttattcattctattggttctggtcccctagagatccttgattaataccttgcttcaggtgggcagtgggggttcaattgggttggttaatcccacacttg

SEQ ID NO: 2868 - DNA, 579 bp, Cricetulus griseus
agggtgccgtgaagaagatccgaagcctcatgaagactcaccagctggacaaggtgttcgtggccacagacgccatcaggaaggagcaggaagaactgaggaagctgctaccagaaatggtgaggtttgagcccacgtgggaggagctggagctgtataaagacggaggcatcgccatcatcgatcaatggatctgtgcgcatgccaggttttttattggcacctcagtttccacattctcttttcggattcatgaagagagagagatcttggggttggaccccaagacaacatacaaccggttttgtggagaccaggagaaagcatgtgagcagcccacacactggaagattgcatactgagggccaccgctccaccacccaccagtcactcggtcacagggtcccagaggaggcagcacacctaaagcccgaattcctttttgttcatggctgacatcacaaatgtgtcttctgtcaggacttgagaacccatgtccccatcacacatgtgacatgtgtgccagttcagaagtgtgaggaatatttgtcagtcctgacaggccttccaaccactttg

SEQ ID NO: 2869 - DNA, 580 bp, Cricetulus griseus
  misc_feature (270)..(321): n is a, c, g, or t
  misc_feature (381)..(381): n is a, c, g, or t
  misc_feature (488)..(488): n is a, c, g, or t
gtttccaccatgcagaatcccattcctcgacgctgactctgtggctgggagaaggacctagcagacttccaggatatgctacacaccaagtaggggttgcaggtgctgtatttgatgatagcaccagaaaagtgctggtcgtacaagatggagaataaactgaaaaatatgtggaagtttccaggaggcctgtcagaacccggagaagatattggtgacacagcagtccgagaggttttcgaagagactggtgtgaagtcagaattcagnnnnnnnnnnnnnnnnnnnnnnnnnnnnnnnnnnnnnnnnnnnnnnnnnnnntcggatatgtaccttatctgccgcctgcagccacgttccttcactatcaacttctgccancaggaatgcttgaagtgtgaatggatggatctagaaaaacttgccaagactgaaaacaccacccctatcaccagcagggtggctaggctattgctgtatggacatanggaaaggtttgataaaattgacctcagtatggaggaactcccagcagtgtacacaggcctgttctacaaactctatcacaggggactgccag

SEQ ID NO: 2870 - DNA, 580 bp, Cricetulus griseus
  misc_feature (76)..(76): n is a, c, g, or t
  misc_feature (568)..(568): n is a, c, g, or t
ttggatcccagcaacataaaaaggcttgacacttgaagggtcatagttccagtttgggactgggaatgtagctcanaagtgaagtgtgtgcttagcgtgtgtgaggccctcagttcaatcgctagcaccaattggccaattacatgtggaagtatgataagtaaactgacaaagggtttcttctcagctgatatgagaagaaaatggagtttatttggtaaggcaaggccatgtaccacattatatcagtttaatataatctagactgaagaattttaattaggtgaaatgttcactgtaactactaatagtgcaggaaatataattctgagagtttttctttacttttgcatttgatatgtttaaaacaaaactaaaattaaagcagtaagctaggtacagtggcaggtacctatagtctccgctatttatgaaactgaaatagaaagatcacttgcagcccagagttctgagcacagaaaacctcatttacaaacagataagcagtgctagagatacagcccagtgtcagtgctcacctagcacctagcatgggtttgattctcancattgtattgca

SEQ ID NO: 2871 - DNA, 581 bp, Cricetulus griseus
  misc_feature (284)..(301): n is a, c, g, or t
  misc_feature (470)..(470): n is a, c, g, or t
actggagcgacgctgcagaccgacctaggactcctgacccataggaggccgcgccatgaagattctcctgttgtgcgtggggctgctgctgacctgggacaatggcatggtcctgggagagcaggaggtctccgacaatgagctcaagggaatgtccactcaagggagtgggtgcattaataaggaaattcaaaatgccgtccagggagtgaaacagataaagaccctcatagaaaaaaccaatgaggagcgcaagtcactgctcaacagtttagaggaagccnnnnnnnnnnnnnnnnnntgctctagatgacaccagggatactgaaatgaagttgaaggcattcccggaagtgtgcaatgagaccatgatggccctctgggaagagtgcaagccctgcctgaagcagacctgcatgaagttctatgcacgtgtctgcagaatcggctctggtctggttggccgccanctggaggagtttctgaaccagagttcacccttctacttctggatgaatggtgaccgcattgactccctgatggagagtgaccgacagcagagccaagtcctaaatgccatg

SEQ ID NO: 2872 - DNA, 557 bp, Cricetulus griseus
atgatttgaagtgggtattttgactccctgctttatgaggagcaacacttggggtgaagggacttgccttttgctttgaacaaacaaccctttgatggatttagggtctctcacctgtggttttgaaagcagtcacaagtgataatctacagacagctgtgtttttgttgggttttgttttttgttggtttttttctggacagtatttacaaggatttgacttatttcctaaggaaattctgggctcacatcaagtacagcagtgatcatagaggagggacagcaggggctcctgtttctgacctgtacagtattcactttaagctgattgtttctccttttgcaattgaactgaatactttttttcatgcatgttttccagaaaatagaagtgagtattaatgttattaaaaagattatttttttttattaaaggctatttatattatagaaactatcattaatatatattctttatttacataatctgtcccatagtcatgcattgttttgcaccccatattctctatcattggaaacagcatgggtagcttttc

SEQ ID NO: 2873 - DNA, 549 bp, Cricetulus griseus
gacaaaaatagaaatcccccaaatttatccacaggtttcttttttctttagctattttgttagattttttcctaaacatctgtaaccatccatgggtaatattggctcaaataacaatccaatatgctatacatatacctacatataacatgcaggtacatttcagaagttccattaatgggttctaggctggcaatgggtatttagtgtaagcttagttctaagtcttatcagcccatacttgaattcaaatgctaagaattctggaatagtcacaacaaatgaattgttactccacaatatgtgattgttgtagggtttaattatggaagacaatgatccaatctaaaaacacaaaatgcttggattaactttccctagaagaagaaatacaaatgcttcaaaattgtagaaaatgtacaatatccctaataaacaggataattgcaaatcaaaatctcattaaaatcatgaccttggtgaaaacagcgaatattggtgcagatattatgtaaatggctatgcctttttatatgtgcgttgggaggc

SEQ ID NO: 2874 - DNA, 581 bp, Cricetulus griseus
  misc_feature (177)..(227): n is a, c, g, or t
  misc_feature (565)..(565): n is a, c, g, or t
gcgtgccatggtatatgtgaccctaaataaataaacctgggaggaacaagtattacattagatgatcacaaatcatcagtgagttctgcattttcaatctataagttcattctattgaaaaaagtgtggggtggagtcaaaatggtttagcaggtgaaggtactagctgctcagccnnnnnnnnnnnnnnnnnnnnnnnnnnnnnnnnnnnnnnnnnnnnnnnnnnnactccatgaattgtcctctgacctccaaacgcgtgccatggtatatgtgaccctaaataaataaacaaaagtgaaacacatgggaagtgctagagagatggttctgaagtcaaggacacatactcctttagagaggacctgagttcagttcccagcaccaacatcaggtgggctcacaaccacctgtagtaactctagctccaggaaatctgattcctctagccggcttgggcacctgtactcacatgtgcatagcccacccatgcacagacataattttttaaagtatttaaaaatatttttaaattgggtatggtagtgtacacttttaatcctancactggcgaggaagtg

SEQ ID NO: 2875 - DNA, 577 bp, Cricetulus griseus
tgaagatggtagatttaaccacagactgaccatcctgttcagtcacttgcttttccaattcttgttcctcttcaggtgtgtacttgtaggtgaaggaaggtgggctgcacctggtctcttttcctggagatagccgtacattgacagaagacacaacccttactgggctcagtaaggtggtcggcaaagactgagaccttcttaggggatagccagcttttgcaagcaagtacctttgtttcaacagatcctttgattttattaagctacgccctactcgttgaccagacagactgcaaaccttcatttgagctctctgcaaggcggtattcactctatccacagaagagggaaacacggttttcttttcagagctcataccactgcactgagcttcaatggaagccaaggatttgagaatatgatgtgtggtatactgggcaaattcacattcactgcttctctctgcatcactgtctccactaccttccctcatgacctctccaactgctgctggagatgcagcctcctccatttcaataagctgaggctcagggtcacctggacccctcatgga

SEQ ID NO: 2876 - DNA, 568 bp, Cricetulus griseus
  misc_feature (220)..(234): n is a, c, g, or t
aggcctacattgagtttgagagcattgaggccattgtgaagacagccagccgcaccaagttcttcattgagttctattctacctgcttggaagagtacaagaagagcttcgagaatgatgctcatagcagtgacaacatcaatttcctcaaagtacagtggtcctcccgccaactgcccacgcttaagcccattctggctgatatcgagtacctacaggnnnnnnnnnnnnnnntcacagtcaagtccatggatggctatgaatcctatggggagtgtgtggttgcactcaaatccatgattggcagcacggcccagcagttcttgaccttcttgtcccaccgtggagaggagacaggcaacatccgtggttccatgaaggtgcgggtgcccacagagcgcctgggcacccgtgagcggctctatgaatggatcagcattgataaggatgagacaggagccaaaagcaaggctccttcagtgtcccgtggtagccaggaacacagatctgggagccgcaagccaacttccacagaggctccgtgtccactgtccaagatgtttgaaga

SEQ ID NO: 2877 - DNA, 577 bp, Cricetulus griseus
  misc_feature (312)..(337): n is a, c, g, or t
cactgcttaccagcttgtccatcgtgtcttgttcagcttgcttttttcagctgtgcctacccacagatgtcaacacccacactgctctgtctgggtccttccaaatcaagaaaatgccccacaggcatgccttacaggtccatctgatggtagcattttctctactgaggcttcctcttctcagatgactagctgtgtcaacttgacaaaacagtcaacacattatgtatggaagcaggtctgctatggtgctagagtggaagtcagaggatagtttatgaagttgattcccccctccccctatgtgggtcnnnnnnnnnnnnnnnnnnnnnnnnnncttggctgcaatcacctttatccactgagccatcttgccactgaggccaccatcactatcccttttcctcttcttcttctctctttattctttttaattttcattttgatagactttctcaaagaacatagatttggagagtctctatacctaaacctcctgaaacttgttgtcagttatctgatagcatattttttaaccttgcttccttccttattcattttcccatgctgacctcag

SEQ ID NO: 2878 - DNA, 546 bp, Cricetulus griseus
ggataagctgaggccctagctctcccctgtgctggtggtgcccggctgcccgccgtgatgcagtggtccttgggccggcggtgggcatggatcgccctatttctggctgttgccgcggtgctgacccaggcgggggggctgtggctgggtactcagaacttcgtcttccagcaagaagagatagcgcagcttgctcgacagtacgctggactggaccatgagctggccttctctcggctgatcgtggagctgcggaggctgcacccaggccacgtgctgccggatgaggagctgcagtgggtgtttgtgaacgccggcggctggatgggcgccatgtgtcttctgcacgcctcgctgtctgagtacgtgctgctcttcggcaccgccctgggctcccgtggccattcggagcgatattgggctgagatttctgacaccatcatctctggcactttccaccaggggagagagggcaccacgaaaagtgaagtcttctacccatgagagacagttgtacacggacctggaaaggcaacggccttggga

SEQ ID NO: 2879 - DNA, 580 bp, Cricetulus griseus
tgatacatctataacacagccacgacagctaagctctggggatgtcttgttaaatgtggaagaaatattgtaagggcctgggacccaggaaatctgctgagacatggaagctggagccaggaaccctcaaaaaatgtggttgccttagcaatacctgtgaaatgataacctcaactgaccgcacattgtgaatggatgaaatctgacatgtcccaactgatagaagagttatgatattaaagactggcaagagagggagaatcagtcttctccagatgatggtcctcttgataggttagccaatcccaagagatcagcttgtaacacataatgagcgacaaaagtgaactaagcaggttatatttataaatttgtaagtatgtacatttatatgtatacacataacaatgataattaaagaataaaaagccaggaatttgagaatgaatgggggtagctcttctggtaggttttgtgtcaagttgacacaagctagaggcttcagagaggaaggagcctcaagtagggaaatacctccatgagatccatctgtaggcatttcctgaattagaataatgga

SEQ ID NO: 2880 - DNA, 578 bp, Cricetulus griseus
  misc_feature (161)..(200): n is a, c, g, or t
ggcaagtagggttgggggaggatggtgggggtggggaggttgacagggttgggtgaagctggcaggggtggggaggctgggctttgcaatagtatcacagactgaacattcttgccgattagagtgcagcctgaggaggtgggggttgggtaccctaggannnnnnnnnnnnnnnnnnnnnnnnnnnnnnnnnnnnnnnntgccaccacagtggagaatgggtgtcctctgcctcctctgctttcccagtctttcataaggtgtcaaacggtgtaactgatttcacatctagaatcaactgtaaggcagtgtgagaaattttaacaactttaaggataagatttaaaaaataaagccaagcatggtggcggcacacacctttaatcggggaggcagaagcaggcggatctctgtgagttgaaggtcagccaggcccactgagtgaggtccatgacacccagggctacatagtgagaaactgtctcaaaaacacaaaataaatatgtgatagtatagataaatatgaaataaatgaatataaaatacaaatagtgtgtgctgtcacagagacaaacaca

SEQ ID NO: 2881 - DNA, 518 bp, Cricetulus griseus
gggctgcggctcggtgctcgaggacaacatcatcgtgtccgaggtgcagttcgtggagaacagcggcggcggctcgtcggcggtcggccagttcgtgtcgctgggacggggctggcaaaaccccaacccttagcggggggattccatgtgaacggggggaaagggagtcaccagccccgacccttcagaatggtcggggccacattcaccacctggggagccagctgcagctgaaccaacactgcctggacacagccttcaacttctttaagatggccgtgagcaagcacctgaccccagggcggaaaatgggccatgtgatcgctgcctgcctctacttggtttggcgaactgaaggcacacctcacatgcttcttgacctcaacgacctgctccaagtgaatgtgtacctgctggggaagaccttcctgctcttggcgagggagctctgcatcaacgcaccggctatagacccgtgcttgtacattccacgctttgctcatctcctggaatttggg

SEQ ID NO: 2882 - DNA, 578 bp, Cricetulus griseus
atgaagaaggttacaatgatggggaagtggatgatgaggaagatgaagaagatgctggtgaagaagaaaggagtcagaagcgaaaacgagaacccgaagatgagggcgaagaggatgactaaggggaattaacctatttggggaaatgggggtggtgatttgactgtttttacccatatcccctcccccctcctattcctgccccccgaaacttatttttttctgattgtagcgttgccgtgggaatgagaggggaaaagtgtactgggggttgccgggggtgggtgggagggggaggaataaaatactatttttactgccactctttattttcccccctcctttttccttgtgtctggttttgtccccgtaaatgcaatagcttattacgcaccaagcaagtgtttgttcttactctctggagaggatggctttgaggtctctttttggtatgtcccacatccccagagttggtcaagaggctatggctggcctccaccatgtgggtgactcacagcccaggaggcgctgaaacccgggccctgtcttcagtaactctggtctggttcatgtgggtc

SEQ ID NO: 2883 - DNA, 580 bp, Cricetulus griseus
  misc_feature (491)..(491): n is a, c, g, or t
  misc_feature (512)..(512): n is a, c, g, or t
  misc_feature (516)..(516): n is a, c, g, or t
  misc_feature (548)..(548): n is a, c, g, or t
gtatctccccccaaaactgaaactgtagccagatccttgaggtccttaatatgcagagtaagcaggcagtgacattggctgagtgagaagtctacatacaacgtagttgtcattgtgtgaccttgagcccttgaatgccacagtcagcgggggaacaggtgtgcttccctgaatgactaagtaccctgaacatgatctattgagtggaaattggaaaattctaataggctgaactccccaattagcaataacctttatgccaaggtatgtataagaaggggattattccttggaatatgatagaatgctatcaccaaaatgatgttttaatttcaaataaaagtagccttgatacctttgggttcttccccagatcttacatcagaaagggcgattcactacctaaaatcaatagtgattcacgcttaacattacaggctttgtgttcctgatgaaaggttggggaaagatcctttataaatgccttccanggggctggatagatggctcancatntaagagcccttgctgctcttctagaggaccanggttttggttcctagcacccatgttggacagc

SEQ ID NO: 2884 - DNA, 580 bp, Cricetulus griseus
  misc_feature (127)..(142): n is a, c, g, or t
taataaaaacccatagacagatattggggtgaaaactgaagatcagaaaagcaaagcagccagccagtagagagttcttacctgtaccaatgctcagacggaaagtgtgattcggtcttcagagtgnnnnnnnnnnnnnnnntgactcagactgtactgagctcctgtctcctcctgccttttattcctctatagtgttgggattaaaggcatgtcactccaagtgctgggatcacttttgtgtgagctgtttctcttttggctggatcaattttgtgtatctcagggtggccttgaactaagagattcatctgtctctgtctcccacgtgctgagattaaagatgtgtgccacctctgcctggcttttatggctaactagtgtggctagttttgtactctgaccttcatgcaagctttatttgttagatcataaacaaagtatcaccacattttctggaataaggtggattgaccattactatgggtgtagttcaaagtacaaaatatgactcggagcctttattgtgatgaacttgtatgtgatgtatggggtcatccactccttctgctccctaatg

SEQ ID NO: 2885 - DNA, 410 bp, Cricetulus griseus
  misc_feature (223)..(223): n is a, c, g, or t
tgtgccactatgtctggctcagtccagttatgcgtgccatactacgtacattcatgtggtcaacaggacactgctatgtgtcttctgaggctcagcactgttcttcataaacaaaagaaattagccaggcatggtgatgcatgcgttcaatccagagttcagaaggatgacttcgaatggttgaaagtttgaggtcagagctgagggagtgggtgtgtctcantggtagagtacttacctacaatgttccaagttctgggctcagtcaccagcacagagaaagacagggaaggaaagaagcaggggaaggagcagagtgtgggggagaaaggtgcctggctaagaaatagttttaactgttcaaagagtgtccttgggaaggaatatggaggtgttatagggtaaatact

SEQ ID NO: 2886 - DNA, 511 bp, Cricetulus griseus
gcaatgagtgtggcaaagccttccgagaaaagacaaaactcattatacatgcagagaactcacacagggagagaaaccatatgaatgttcagaatgtgggagagccttcaaccaaaaggcgcaccttagtgtgcatcaaagaacacacgcgggagagaaaccttttgaatgcaatgaatgtggcaaagctttcagagaaaaatcaacactacgtagacatcaaagaattcatacaggagaaaaaccttatgtgtgttcagaatgtggaagagcctttacccttaagctgagcctcagtgctcatcagagaattcatacaggggaaaaaacagatggatgtagtgtatgtggaaaagtcttctcccgaaaatcataccttatgttacatcagagagctcatacaagagagaaatttgaaaaatcctatgaatgcgatgaatgtgataaagcattcttccagaaatcatatctcattattcatcagagagtccacacaggggaaaaaccctac

SEQ ID NO: 2887 - DNA, 579 bp, Cricetulus griseus
tctagggctgcaaagctgttcgctcaggttcctagccggctgctttttggcgtcgggtcctcagcatggctgcctccagggttgagagctggggagctgccacaccctcgttttgctgactgttcctggagtctgtgttcttcttgtgtttgctgggctaccctagcagacatgttcgctaaggcctttcgggtcaagtccaacacggccatcaaggggtcggacaggtgagggagaaaatgcttttgcttcactgagagaggcccctacacctctaggggtgcacatggagaggaaaccccagggagccaagcagggacgtccaaaacattttgagcatgaggagaaaacttcgggccgatgtgaccgctgctttccccacccttggaacagatcaggcctctgagttgatacctgggaaggaagagctaaacgtggtgaagttgtatgctcacaaaggggacgcagtgactgtgtacatgagtggagggaaccccatcctgtgtgaactggagaaaaatttgtatccaacagtgtacacactgtggtcatatcctgatcttctgccagcctttacaa

SEQ ID NO: 2888 - DNA, 566 bp, Cricetulus griseus
agacagggatgcacacatgatcaattgctttcttgtccttggcccattctcaccactcttccctgcctgggcagtggtgtttcccacggtgggctgggtcttcccacatcccttgatttaataataccatgtgggcaaagacatccccacaggccaagccaacgtagactctcattctagatgattctgggttgtgtcaagttaacaattaaagccaatcatcgaaacttaatgatgcatttgatgctggagtatgatatagcacatatttcttactgactgtgatccaaaacattggaaaaacaacttgcctgtcatctgggcttctgagattgggttatgagtacccacacttttttttctttcaagcagagaaaggatctgtagcttcttcctcctaaagaatgctttgctacttggagaaattgatgcacaaatataacaccatgagtgaaagacgggctcagatggagtattagcagcactgtggacttgaagggagggtgctaaaaccatatgacccgttctgggtcttgcaagctgattgacagtatgtttggcaagga

SEQ ID NO: 2889 - DNA, 476 bp, Cricetulus griseus
  misc_feature (157)..(251): n is a, c, g, or t
agccgctactgctgaatccgcggaggctgaggtctggcacgaacgtgctggggaccccgagatcgtctgggtgaagcgggctgcggtgcacgggcgcaggcaggcggctctgagacccgtgaggaaccctaggagaagatgcgagccacccctctgnnnnnnnnnnnnnnnnnnnnnnnnnnnnnnnnnnnnnnnnnnnnnnnnnnnnnnnnnnnnnnnnnnnnnnnnnnnnnnnnnnnnnnnnnnnnnnncgaacctgggccaccctgcttcctgctgtccccgagtccacctcctgcctcagacttgtcacctgctgtggcccctgcaacccgactgggaccttatgtcctcttggaacaagagcaaggcagccacacctaccgggccctgcactgccccacaggcacacagtacacctgcaaggtgtacccagcctgtgaggcccgggaggtgctggcaccctatgcacggct

SEQ ID NO: 2890 - DNA, 582 bp, Cricetulus griseus
  misc_feature (11)..(11): n is a, c, g, or t
ctggggctggnaactccatatgtataccaaactagccttgaactcacttgctaggattaaaacatttaccaccacgcccagctctctgctctgtcctagaattcaagaaattgctttaacggtggggggcttaaaaagaaagccaagacagtgtgagtggacatactcacttctgggattcagagaacatttttaaaattcagatttttagcatgatacaaactaatgttctttcctctgagttgaaggagaaattaactatcaatctcttaaatccaaagctggataataagtaaaagaacctttccctttgttgggtataagacttctttctcctgctgtatcaagtgagaccattttgattggaagccatagcagctcagcaagtaaccagaatgctggcccaactccagacatgctgttttcctcaaatactaatgtgcagttgcaaaccttaatttctataatgtgttctaaaacgtgtggaccgagtagaccagctgcactacttttccttaaagcattcctagcacatggcccacagaccttggaagaaaaaaaattcctgtgtacagaccctgc

SEQ ID NO: 2891 - DNA, 191 bp, Cricetulus griseus
gtttctactttctttcctgctgtgtgagtgtagtgaagagcttgtgttcctcctagtagtggttccagaaccggttcatgttatctactaactgatcaatagatggacagaaaccccatgaggtgggagctgatcgtgtgacctggcactggacgagaaactagagggatccggggtggggttaacttggg

SEQ ID NO: 2892 - DNA, 567 bp, Cricetulus griseus
  misc_feature (208)..(236): n is a, c, g, or t
  misc_feature (259)..(278): n is a, c, g, or t
ctccttttaagaccttccttactccatccactcctgctctccatagctcattccaaatagagctgataattttttttttattttgtggggggagtgagggtgtacatgccatgccatctctgagtagagaagtcagcagacaacttccaagacgtgcttctctcaaaatgagggcatcaagctgggtggtggtgctgcatgcctttannnnnnnnnnnnnnnnnnnnnnnnnnnnncgatctcattgagtttgagtttnnnnnnnnnnnnnnnnnnnnagtgagttccaggacagcttgaacagttacacagagaaatcctgttttgggggaagaaaacgagggcatgaggcacctctgtgatccagagttgatgcttcatcctccatcctttggtggagtttctatgagagttgcttttttgcttcccatgggagcatttgtattttgcattttctgacatttcattttctcagtgagatgggagaatatgtcatttgttgggaatggaccctggaaagggaatgttggcctgagttttctctaaaactcttaaaggagaggagct

SEQ ID NO: 2893 - DNA, 579 bp, Cricetulus griseus
  misc_feature (354)..(354): n is a, c, g, or t
gctacaccacctcccggagactggaccctattccccagttgaagtgtgttggaggcacagctggttgcgatgcctacactcccaaagtgatacagtgccagaacaaaggctgggatggctatgatgtacaggtaatagcttgtactacaacaacagttttcatggagttctgttgtgtgacactattcctacagggttttgggtgacaggttacttagcaggagcagaaatgactcacagacagctgcatcatcagaagccaccccagcatgggtcacagctcatgaagtctggaagtctggagttcaccacacaacctacaggcagctgggctggtgggagagtgactcttancagtcctcactgcttatatacacttcaccaggagaggcctagctgtttctgttcagagcttaatgagtgtccctgcaggatgggttgttacctctagttacaacaatagccctcgtcttaatgagcctccctccaaggtggaggttttatctcggaggaaattcatacacagcaaactttaatacaataagctgtttattgagacatcattattttggaaaaact

SEQ ID NO: 2894 - DNA, 579 bp, Cricetulus griseus
  misc_feature (421)..(437): n is a, c, g, or t
ccggtgctggagcggagcatagccgagccggagccctggaagtggctaatccatgcttgccatgcgactgtggagggtcgccaccgccctggggcgtgggcccctcccgcgggcccctgcggtcctgggcaggcaggggaagcaggcgaaggggaaggcctaccgatggtgttcgtcaggaataattcccaatgagaaaatacgaaatattggaatctcagctcacatcgattctgggaagacgacattaacagagcgtgtgctatactacactggcaggattgctgcgatgcatgaggtgaaaggtaaagacggagttggcgctgtcatggattcaatggaactagagagacagagaggaatcactatccagtcagcagctacctataccatgtggaaagatatcaatatcaatattatnnnnnnnnnnnnnnnnntggacttcacaatagaagtggaaagggccctgcgggtgttggatggtgccatccttgttctctgtgctgttggtggagtacagtgccagaccatgactgtcaatcgtcagatgaagcgctacaacgttccgttgttaacctt

SEQ ID NO: 2895 - DNA, 568 bp, Cricetulus griseus
  misc_feature (100)..(128): n is a, c, g, or t
  misc_feature (545)..(545): n is a, c, g, or t
ttcccaggatggtcaaggcaaaggagatgatgtaattgtaattgacagtgatgatgaagatgacgatgaagaaaatgatggagaacatgaagattatgannnnnnnnnnnnnnnnnnnnnnnnnnnnngaagatgacacggggatgggagatgagggtgaagatagtaatgaaggaactggtagtgcagatggtaatgatggatatgaagctgatgatgctgagggtggtgatgggactgatccaggtacagaaacagaagaaagtatgggcggagctgaaagtaatcagagagctgctgattctcaaaacaatggcgaaggaagtacaagtgcagcagaatcatctttctctcaggaggttgctcgagaacagcagcccacatcagcatctgagagacagaccccacgagcaccccaatcaccaaggcgcccaccacatcctcttcccccacgcctgaccattcacgctccacctcaggagttgggaccaccagttcagagaattcagatgacccggaggcagtctgtagggcgtggacttcanttgactcctgggataggtggtgt

SEQ ID NO: 2896 - DNA, 446 bp, Cricetulus griseus
  misc_feature (3)..(15): n is a, c, g, or t
gannnnnnnnnnnnngtgtgagtactattgcttatttttgaaagccagaagatgactttggagaactctggttcttccaccttgcttttgagacagagtctgttttagcttctatactgactaagccagctggcttgcgggtgttctgggtgtgtcttctttgtctgctgccccttccactgtggaattgcttaaattaagatagccactacatctggcattttttacttgttggttctggtgatccaactgatcagctgtgagtggcaaatcacttctatcaattgaatcattgaactagctgtcatattgtagtttttgtgtgtgtgacacagcctagattgaccagactcaggcaatgctttttccttagctattctagtgctgggattataggtggttctagattggaacccagagcctatactaactagtaaagtgttatt

SEQ ID NO: 2897 - DNA, 582 bp, Cricetulus griseus
cagacatgaagagtccaggacgctgcagtcacacactcaaatttagccctcttcattatgccatctctatttgagcaagaaaaaaacagaattctctccatttcaattggactaaagtgatcaaagctttaagtaggaaattccaaaaaggaggtgactccatccttggtattcccagcttatcagagttggggcattgctgaggaattagccatcttaatttctgagttttatatgcaaatttgattattctgatcttaacatctatggccataaaaagtccatatgcaggtgggcctaatctgcaagaattatcatatatttataaattatcatacatttaaatatgatatatgtaaattggactttgaaatgctgtgtattactagaattatcaaggaagagcttaatagaagttccacaattgcctttttctatgaaaagaataaaagaaaaatcataatctgctttccccactcttatgtgatagcaatgattgtagtaatatttctaggtgctaagtctccctaaattctcaagcattagtatagtggagaaaatagtacagacattggtgtcagc

SEQ ID NO: 2898 - DNA, 352 bp, Cricetulus griseus
  misc_feature (152)..(202): n is a, c, g, or t
acagcaacgaatactcttcagatccccagcctcgggatgtagtgtctaaatacaaagccctggctcacaagctttatgagcatgaagtcagcttattcaaaaataaaacaaataatcaaaaaggaggctcttccacctggatgaagaggagnnnnnnnnnnnnnnnnnnnnnnnnnnnnnnnnnnnnnnnnnnnnnnnnnnnccaggatgatgctggtcacacactccagtttgtaaaaatcctgttgaaccttgttaaaaagaaaggcagcaagcagcagtgcctcatggctttggataccttcaaagagttactcattacagaccttctgccagacagtctgaagctacc

SEQ ID NO: 2899 - DNA, 566 bp, Cricetulus griseus
ggatccactacggagtcatcacgtgtgaaggttgcaagggattcttcaagaggagccagcagaacaatgcctcttactcctgcccaaggcagagaaactgtttaattgacagaaccaacaggaaccgttgccaacactgccgactgcagaagtgtcttgccctaggaatgtcaagagatgctgtaaagttcgggaggatgtccaagaagcagcgggacagcctgtacgctgaggtgcagaagcaccagcagcggctgcaggagcagcggcagcagcatattggggaggcagaggcccttgccagggtgtacagcagcagcatcagcaacggcctcagcaacctgaacactgagagcggcggcacctacgccaacgggcacgtgattgacttgccgaaatccgagggatattacaacatagattctggtcagccatcgcccgatcagtcaggactggacatgactggaatcaaacagataaagcaagaacctatctatgacctcacatccgtacccaacttgtttacctatagctctttcaacaacgggcagttagctccggggata

SEQ ID NO: 2900 - DNA, 448 bp, Cricetulus griseus
  misc_feature (15)..(34): n is a, c, g, or t
  misc_feature (241)..(268): n is a, c, g, or t
aaatctagactttcnnnnnnnnnnnnnnnnnnnngtgtgtgggatctgtgtgtcagagtgtatggtagcaggtaaattgagagcaaggagaagtggtgttggaaatttgaggtatttggtcctagtttattagatgtggggattgaggttttcagtatatggcttttgacttcagaagttgatcttgacttgaagtgttttgttgatttacaaatttgtttttactctttgacagatcttnnnnnnnnnnnnnnnnnnnnnnnnnnnncaagtcatttagttttggtaatcaagtctttatgagaacttagctcctcatatgcccatatggtattatctgtcttagtgctaggtaggaataaattattaatttttacttgtagcccccataatgagcaagatttagtgagggtatgacacttattgcatataattaacttgtaccagg

SEQ ID NO: 2901 - DNA, 578 bp, Cricetulus griseus
  misc_feature (2)..(19): n is a, c, g, or t
  misc_feature (49)..(67): n is a, c, g, or t
gnnnnnnnnnnnnnnnnnnataaagtcacaagcatccatgaaagagatnnnnnnnnnnnnnnnnnnnggatgtgtgaaatttatcagtaagtgttaagtcacgagagagacttctcagcaaataaagctgcgatctatccatttgatgtgaagaggcaaactaaagtgtttaacttggtagacagaacaaacacctgccatacactcagaccttgggttccatccctagcaccccaaaacaaaatcaatatcttggcaacatttagcttctcctgaagtgagttattgccaatggaatgctttggaaatctccattatgttcataggaatgtgccccacacactgacaggagtgtgcaaattagcaacgcttacacagaaagcctgtgaagacactggtctgactcctacgacatgtccctgacccacaaataaaaggcgggaggaggtgctaatagattctttcaaccacttataaatctcctcaaaactatttctagtcaatcattaaaggcattttgtattgaaaaattgtgatagaaatatcaacaattaaagttagaaaagaggccaagaaaa

SEQ ID NO: 2902 - DNA, 578 bp, Cricetulus griseus
ttttcaattaaatctttgatgaaacactagcaaaatggtacactctgaggagcagttacaatctgcctggagtggtgtcacctggggcagttgggctgactaaagtaagatatcatgaccgttgtgctaccagagttgtcctggtttgtgctgaacactatgccataaatagaatgagccttcttgtgttacccccaggttagaacctttgtgcccaacaaacagtacagtaaggactatcatttttaaatggaatgtgtaaacttcagctcttgttttgtatgattgttactgactttatgcaatctagctgtggtgtattacagtgccttaatcctagcaagggtatggaagcttattctagaaatgatttcagagcaacctacaacttgacactatgcaaaacacttgggaatgtgctttatcagactagggaaacaactgtatagataatacccaaggcctgcaggcctggaactctttatgtagaatgagctggccaggaactcagagatccacctgcttccaccccctcgtgctatcattaaaggtgtgcaccaccacctacttccatgggc

SEQ ID NO: 2903 - DNA, 488 bp, Cricetulus griseus
gtgggaagtcggtgccacattacgctgcgatcgagcctagtggaaacggcctaatgatcgtgtcctataagtccttcacggctgtttccattgatcagagtcttgaagaaagcatggatgaagacaggccagagaagaccaaagatcgcggtggttactggcaacaaactgatgatgatttgacagtgactgtaaggctccccgaaaactgtgctaaggaggatattcgagtacagtttttgccagagagcatcaatgttacactgaaggatgtccaggttctggaaggaaggctctactcatctgttgaccacgaaagcagtacatggacaatgaaagagaatgacggcttggagatttccttgattaaaaagaatgaggggctgacatggccagagctgttggttggtgacaaacatggagaacttctgagaaacccagcccagtgtgccgaaatagcagagcgcttgatgcacctgaccttcgac

SEQ ID NO: 2904 - DNA, 493 bp, Cricetulus griseus
caataagtcagggcatcaaagactaaagcatatgcagaactcaaagtgtaaacactcaagtgataaagctttattgaaacacacatgcatgttgaggtggaatgccaaagaacaagtatgagccaggactcttgagttacacttccattgcaggaccaatccatactgaagggatctttgaaaaacattctatacaatcaacacatatgatcttaaccaccccagctgcatgcaatccagggaccttacaggaaaagtcaattcgcagctggctccattgacaggatttctcctcgggcacagacaccatccacacacacacacacctgtgtatagacagactgctatgactgaaaaggccagtctagaagagtgactagcaggaaatgaaagctttcttggtctctcttttaaatctaaacacattattcccctgttacccataggtcaagttcagaaacaaccaaaaacaggaactgaaaaatatattagg

SEQ ID NO: 2905 - DNA, 580 bp, Cricetulus griseus
  misc_feature (523)..(523): n is a, c, g, or t
  misc_feature (552)..(570): n is a, c, g, or t
tacatcaacttagagggaacaagaaggccagaaatacattttcaaagcatatagaacaactcaaacaggaacactataagaaaaaggaggagaagaatatataagtactttaccaagggcttttaatactctcttgcctgatctagaagagattgaacatttgaattggttggaagctttgaagttaatggaaaagagagcagatttccagttatgttttgtggtgctagaaaaaacaccttgggatgaaactgaccatatagacaaaattaatgatagacggatcccatttgacctcctgagcactttagaagcagaaaaggtctatcagaaccatgtacaacatctgatatcagagaaaagaagaatagaaatgaaggagaaattcaagaagactttagaaaaaattcagttcatctcacctgggcaaccatgggaggaagttatgtgttttgttatggaggatgaagcattcaaatacatcactgaggctgatagcaaagaagtatatggtaggcatcancgagagatagttgaaaaagccaaagaagnnnnnnnnnnnnnnnnnnntgagcattct

SEQ ID NO: 2906 - DNA, 578 bp, Cricetulus griseus
caacacctccccagcactcttcatctagagagcatctaggtgtgtggacttcagggcatctgttttatccccactgatgtgtatatatcttggcaatctggcaggcacagttctctatgtcttcatcttgattgatatcagcaggaccaatgagaagctagtcccacatatgtggcaaaccttcacccactccagtcagtggggttaaaggaagcactcattcagtatcatatccctgactgtttacaggtttagcaggaattcagtcattgtctcaatcagatcagcttgtcatgatcttcacctcttgagctgcctttttcaccctcttctcaaggcaaggagcttgttgcaactttaagtcaggttcagtcctcatcttcccccaggaaaatgcaatcctcgtgcttgatggggtgtgccaacggtgcaatggcagtgactgagggcccaagaatgtcactgccatactgccaagtggcttcagatattgttgcgcctatacagggttgattcatttcctttaaaactaaagcttatttttaggcctgcttattagttgtattcctattataaca

SEQ ID NO: 2907 - DNA, 450 bp, Cricetulus griseus
  misc_feature (406)..(406): n is a, c, g, or t
gcaggggcctcatccaccttcccaatgcaatgctcagcattacgtaagaatggttttgtggtgctcaaaggccggccatgtaagatcgtcgagatgtctacttcgaagactggcaagcatggccatgccaaggtccacctggttggtgttgacatttttactgggaagaaatatgaagatatctgcccgtcaactcataatatggatgtccccaacatcaaaaggaatgacttccagctgattggcatccaggatgggtacctatccctgctccaggacagtggggaggtacgagaggaccttcgtctgcctgagggagaccttggcaaggagattgagcagaagtatgactgtggagaagagatcctgatcacggtgctgtctgccatgacagaggaggcagctngtgcaatcaaggccctggcaaaataactggctcccagggtgggg

SEQ ID NO: 2908 - DNA, 579 bp, Cricetulus griseus
actgtcttttctcagtcttctggtacattggcttcaaatccaggtacatttcagaggtctgctggtctccagggctcaaatccagcaattttcccaagagcctctgggccactaggccccaaccaacctaactttccaagggccactggccttcagggtccaagtccagctgccttcccacgatctgctggtccattaggcccgggtcaagttgctttcccaaggtcagccgctgggcaccttggctcttctccagcaggccctgtgggtatcaacccaactccttttgcaaggccaacaggaaccctgggtcttaacccagcttcctttccaaggatgaatggccctgtaaccaagactgtggtcccatttcctcgggtaggcagcctccctggttcaaatccagctgctttccccagaccagggggtccaatggctgcgatgtacccaaatggaatgttacccccttaaataccatttttcttccagggccactttgttttttaagcactgtggttctgtggtggggctgcctcttagataaaagagtatatttggagctacagtctgaagaactag

SEQ ID NO: 2909 - DNA, 81 bp, Cricetulus griseus
  misc_feature (28)..(28): n is a, c, g, or t
gcatgccccagggaggggaagctaactntggtggggagccataaaaggtgcggtggtggttttaaggtgattactgggaaa

SEQ ID NO: 2910 - DNA, 579 bp, Cricetulus griseus
tctctccgtccactaggaagagtatactgaaggagagggtcatggacttggtcactcagacggccatcctgcccctgctgtttggctgcctagggattttcagcctcttccgggtgctacagcggatccgctcaaggacttacctgaggaatgctgtggtggtggttacaggtgccacctcagggctcggcagagaatgcgccagagtcttccatgctgcaggggctaagctggtgctctgtggtcgaaatgtgacagcccttgaagcactcgtcagtgaacttgctggttctcatacctcccagggacagacacacaaaccttacatggtgaccttcgacctcacagatcctggtgctattgctgcagcagcagttgagatcctacagtgctttggctatgtggacatcctcatcaataatgctggggtcagctaccgtggtgccatccgtgataccatagtggacgtggacaggagggtgatggagataaactattttggccctgttgctctgacaaaagctctactgcgctccatgatcaagaggaagcgaggccacattgtcgccatcagcagta

SEQ ID NO: 2911 - DNA, 578 bp, Cricetulus griseus
  misc_feature (422)..(442): n is a, c, g, or t
cccataggctggcagaccatggtctcaagaccagctgcaagttatattgcaactcattatgcctatttatttacatactgcctaaagtgatttcacacaacagtgaaattttcacacaacggtggctgtgtggagtaactgtgatggagactgtatgattcacaagtcagaaatacacatttcctagatggatttcaaaaacaattcagagaacagaaacgtgtccatgaaatatcagcatgtatcaagctataaatgtgtcatttagtggcatccagaggtggtaaaactgtgaagaaaatagatggaataagaaccacagacttcgacagaatttctaaaagataggggctgggagtattgcttgaaaatgggataatgaaggagcttcaagtgatacgtaagacttaaattattcttgnnnnnnnnnnnnnnnnnnnnntggtaaattgtgcactctgtaagcctgaggacctgagtttagatccccagcaactacataaaaactgggcatggaaacacatgcctgtcatcccactgctgagagactgtggggacaggaggttccctgggagtgg

SEQ ID NO: 2912 - DNA, 535 bp, Cricetulus griseus
  misc_feature (126)..(126): n is a, c, g, or t
caaatacaggttctcggccccggagctgcaattttataccagtgctgctgctgtggccttgctgattccagcatggaccttcttcatggatgtccccgtgattggcaggagtgggaagagcttcanctacagccaggacatggggctgctgctgctgacaaatggcgccttgtttcaccttcagagtgtcactgcatatgccctcatgggaaagatctcccctgtgactttcagtgtcgccagcactgtgaagcacgccttgtctatctggctcagcatcattgtttttggcaacaaaatcaccagcctgtctgccatcggcactatccttgtcacaatgggtgtcttgctctacaacaaggccaggcagtatcagcaagagaccatgcatagtctggccacagccactagccagggcccagaggatgatacagagtcactggttcccctggactctagacaacaccactgagttccttctaatactgtgtcccccagaaaccaagcctagactgtcctcctgcactatatgcta

SEQ ID NO: 2913 - DNA, 458 bp, Cricetulus griseus
  misc_feature (29)..(53): n is a, c, g, or t
  misc_feature (78)..(95): n is a, c, g, or t
actaaagcagacacactgaaagtgaaggnnnnnnnnnnnnnnnnnnnnnnnnnagaagggccaggaagcaggaggatnnnnnnnnnnnnnnnnnnagtatgacaaaagcctctccttccaggacatgaatctgtcccggcgcctcctgaaggccattacagccatgggcttcaagcagcccaccccaatccagaaggcttgtatccctgtgggtctgctgggaaaagacatctgcgcctgtgcagccactgggacaggcaaaactgcagcttttgcgttgcctgtcttggagcgtctgatctacaagccccgccaggctgcagtcactcgagtgctggtgctggtccctaccagagagctgggcatccaggtgcactccgtcaccaagcagctggcccagttctgcatggtcactacatgcctggctgtgggtggcctggatgtgaagtctcaagaag

SEQ ID NO: 2914 - DNA, 426 bp, Cricetulus griseus
  misc_feature (13)..(44): n is a, c, g, or t
aggccggtaggannnnnnnnnnnnnnnnnnnnnnnnnnnnnnnncgccaccaacgcccagctgatgccgctatttttaagagatacttttgtttattctgtagaagaatactcagattaacctattatgtaagaaaatccaaacacgcgtggtatttgctctaaatgatagaaatgctgtaaatcctgtgcagtctatccagttagcctgagtgtaaggtttttgctattagttttacgctgtggctgtcctaatggtctcctgccatcagtctttacattctttgctttcatctttgaagcctctgtacagaaggttttttttctatccatcccttgatcttacacccctaactactgctcaatcttcataatccatctttttgaaatttagcagatgtgtgctcctacttttcttcctcatttt

SEQ ID NO: 2915 - DNA, 580 bp, Cricetulus griseus
  misc_feature (141)..(161): n is a, c, g, or t
  misc_feature (164)..(176): n is a, c, g, or t
  misc_feature (253)..(271): n is a, c, g, or t
  misc_feature (401)..(418): n is a, c, g, or t
cccaggatacaacagatgctcagcaaatcgtgcaggctagctgaatgccacattagtgttcaaggttaaaacagtacgaaggggctgccgagatggctcataggttaagagcactggctgctcttccagaggtcccgagtnnnnnnnnnnnnnnnnnnnnngtnnnnnnnnnnnnnctatagtgagatctggtccccttttctggccttctggcatgcatacagaaagaacattgtatacataataaataaannnnnnnnnnnnnnnnnnngtacgaaggtaagacgagatcccagtaaaccagctgctaaatgagtcaccattgctcgaaaagttcagtgctaaaaaagataagaaaccatgcaagaaaacaagtcaagttcacaggcggggcacggttnnnnnnnnnnnnnnnnnngactggagatgtcaaaagcatcaggttcaaagagagaacactgtccggggtgggcggggctggctgcggactgtatcatcttttgaaatataaaatccacatgtgtgcaaacatagtgatgtcctggaagctgaaattcttgttcatgataccgagtgtaat

SEQ ID NO: 2916 - DNA, 579 bp, Cricetulus griseus
tctgatgtggatgctgggagctgaactcagcagtgtactctgagctactgaagtcatctcagcagcctcggaagcagaaatctttcacatttattatcatggaggggcacatactaatgctgaccccttttctccctccaaatcatctcctttctgcctttgtgtcatacatgcattctgctgcagagaacaactttgtagagtcggctctcccttccaccttttacataggttctgggattgaactcagattgttaggcttgcacatcgagcgccttacttactgagccatcttgttggcccaagatggggttttataaagatacttaatagagacttaagcatgaggtttgagaaagagccactttctcagaaagacagacacacccaagagcatagggtgtgggttctaaggaagctccaaagacctcatagtgtggttatagactcatcatgggagacttgagagtagcaaccagatgtttttgtaaatgataaatcaattccctccatttacatacgagcatcatatgatttctgctttctaaaacttctagtaactacaaaacaatgttcatg

SEQ ID NO: 2917 - DNA, 579 bp, Cricetulus griseus
  misc_feature (286)..(337): n is a, c, g, or t
  misc_feature (339)..(352): n is a, c, g, or t
  misc_feature (384)..(403): n is a, c, g, or t
  misc_feature (406)..(439): n is a, c, g, or t
catccgtacccagtttgacgactgcactgttctgaccatcgcccaccggctgaacacaatcatggactacgacaggtgacccatggaaacccaagggggtgaggggatggaaagccatggaaagggaggtgatctgtggctgtcacctgggagtcgggaagaggcagggcaaatgaaagtatctgggcatgtatctcttagaatttgctatggcatgggagtacagaacaggggtcccaagttatgcttaagaagcagaataggcgaagtgttggtggtgcaagtnnnnnnnnnnnnnnnnnnnnnnnnnnnnnnnnnnnnnnnnnnnnnnnnnnnnannnnnnnnnnnnnncagagcgagtgccaagacaggctccaaagcannnnnnnnnnnnnnnnnnnngannnnnnnnnnnnnnnnnnnnnnnnnnnnnnnnnnaagaagcagaatatagaacagggttaattgggaagaatgacatctgcaaagacacagggtccttttggaattaccaacatgtgggggaaggtgcatcaggctccttagacattggaaactgcatggaccatctctgtgtt

SEQ ID NO: 2918 - DNA, 490 bp, Cricetulus griseus
  misc_feature (217)..(233): n is a, c, g, or t
cttgagtaacttttggaaagtataatattttaactaaaacccattaaatgttagacacactttctatattccctttactgcccgtttaccgaagagggaaatatttatgtgaacccagaaggctgatttatttattttattgtcttttttaataacttgcttttccctggtgctgggtgctttctgaggcccagacagacgccatgatttcttctgnnnnnnnnnnnnnnnnncccttggcctgcatcctcaggggcctgcttggcactttgcagcttcaaggaagactctggtaaatggaaataaatccaacctaaatgccccgcccaggagcagtgtgacttctggaggatgtaggtcagattagtgggtaagacccagcagaaacagccaaatagatgtggaaataaaaacactacttgagctggccttggtcctcttgcttgtcttgtctgtgtttgagtggttcacccggtttaacttgctggcc

SEQ ID NO: 2919 - DNA, 578 bp, Cricetulus griseus
ctttgtatagcttttggagcctgttctggtacttgctctgtagataaggctggctttctcatagacttgagacaatgctgaaaactaaatgtgagcattaagcctgtatactctccctctttgatatctttaaacattgtctccttataacaggtcttctggactggaacatacagtataactcaggatgaatgcaaacctaaaatgatgcccctgtgtttgtcacctgactgctgagataacaggcatgtaccctcctcttgtattatctgcaggtgattagagaagttgaagaattgaaagcatttgtatacagcgaactcaataatttcttcactgagtcgatttttctgtgaaaaaaagtagggaacaaaattcagtcatatttttattatgttcaatcaatcatacacttttctatgccttaaaaataaagacttttttttctgtatcaaactctaaggggttgatttaaaatggtggagaaataaggaaagatgacaatttttagacacataatgtcatggtaaaattttagacctaaattctctttaaatgattatgttgaaataaaaatg

SEQ ID NO: 2920 - DNA, 459 bp, Cricetulus griseus
gtatgtgcatgcactttgcatgttaggggtgcattgaatgtgtgtgcacatgcacatggggaaggggcgcattgaatgtgtgtgcacatgcacatggggaaggggcgcattgaatgtgtgtgcacatgtgcatgggaaggggcgcattgaatgtgtgtgcacatgcacatggggaagccagagttggtatcaggaatcatcctcagtgtgtctcttactcaatgagccaaggtctctcaatcaaacccagagctcactgatatgtccagccttgctaataggttgctctgggaacccctcatctctaccctctgacgctggaaagataggcaggcacccacacccacccagcatttacgtgggtttctttaaaaatgaagctgtcccttgtttatgtctttcaagagcgcttccatcttgtacagacactcattattcttggtccttccaaaaaaagag

SEQ ID NO: 2921 - DNA, 529 bp, Cricetulus griseus
gttttgggtgaggaaatgtgtttttaggtatgtgctgtttccagccaggagtcacaaactcagtagcctaaaggcagggaactaagaaagagtggggagtgtggtggagactgtgactaccttaaagagggcagccacaggactccaggtaggaaaagaaaaggtggggctaggaattggtatttcaaattacaatactgaagctcactgacttttaatttaaggagtaatttaatgtccaaaaccacagagcagaaatctggttgaacctgaggccaccagtttgcgaccccttgccttacagttagccttcccccaagtatatataaggttatattctttgccagggaaatgatggtgttatatataggagggagtgtgctagttcatttctacttcatctctcagagttaagctttattatgggaataacaacagataaaattaacacagccgcagataacatttatccccagtttctggtagggctcccatgcaagcctggctctccagtgagaaccacaactaa

SEQ ID NO: 2922 - DNA, 572 bp, Cricetulus griseus
gctgccatgtgggtgctgggaattgaacccaggtcctctggaaaagcagtgactgctcttaaccaccgagccatctctccagctgccttgtttatgtattttgagtctgataaagtctgtacaaaatttagcatgtctgggggatttcagtggtgacttagtgctgacttttattttttttgtgtttagattcagaaggtttgtaacaaaaaattatgggaaagatacacgcaccggaggaaagaagtttctgaagaaaaccacaaccatgcaaatgaaaggatgttatttcatggtaagttctcaccctgtcctccctgtgagattggagcttttgttgtcattgtcatcattatcttcttgctgtgtagccctggctatcctagaactcactatatagaccaggcaggcctcaaactccctgagatctgcctgccaaattcatgcatcatcactgcccagcaacttatttatgtcttcttaataaagataatatttctgtaacttttatatttgtgtacatattttcagtttcttttgtgataatgtaccttacaatgaacatttttttt

SEQ ID NO: 2923 - DNA, 572 bp, Cricetulus griseus; identical to SEQ ID NO: 2922

SEQ ID NO: 2924 - DNA, 530 bp, Cricetulus griseus
  misc_feature (499)..(499): n is a, c, g, or t
acctcgctcagtccccacagctgtataagcagatgtgcatatgtgctgattttgagaaggttttctgcattggaccagttttcagagctgaagactccaatacccatagacatctgactgaatttgttggtttggatattgaaatggcttttaattatcattaccatgaagttgtagaagaaattgctgacaccttggtgcaaatattcaaaggacttcaagaaaggtttcagactgaaattcaaactgtgaataagcagttcccatgtgagccgttcaaatttttggagccaactttaagactggagtattgtgaagctttggctatgcttagagaagcaggagtggaaatgggcgatgaggaagatctaagtacaccaaatgaaaagctgttgggtcgtttggtgaaggaaaagtatgatacagacttttatgttcttgataaatatccattggctgtaagacctttctacaccatgcctgacccaggataccctanacactccaactcttatgatatgttcatgaga

SEQ ID NO: 2925 - DNA, 527 bp, Cricetulus griseus
  misc_feature (16)..(79): n is a, c, g, or t
  misc_feature (102)..(240): n is a, c, g, or t
  misc_feature (268)..(321): n is a, c, g, or t
  misc_feature (345)..(392): n is a, c, g, or t
ctttattgtgggagcnnnnnnnnnnnnnnnnnnnnnnnnnnnnnnnnnnnnnnnnnnnnnnnnnnnnnnnnnnnnnnnnctgatgggcaaaaacaccatgannnnnnnnnnnnnnnnnnnnnnnnnnnnnnnnnnnnnnnnnnnnnnnnnnnnnnnnnnnnnnnnnnnnnnnnnnnnnnnnnnnnnnnnnnnnnnnnnnnnnnnnnnnnnnnnnnnnnnnnnnnnnnnnnnnnnnnnnnntgccggctgctgcccgtgctggtgccannnnnnnnnnnnnnnnnnnnnnnnnnnnnnnnnnnnnnnnnnnnnnnnnnnnnnaagacctctttcttccaggctttnnnnnnnnnnnnnnnnnnnnnnnnnnnnnnnnnnnnnnnnnnnnnnnnatgtgcagctgataaaaactggagacaaagtaggagccagtgaagccacactgctgaacatgctcaacatctcccccttctcctttgggctgatcatccagcaagtgtttgacaatggcagcatttacaacccag

SEQ ID NO: 2926 - DNA, 557 bp, Cricetulus griseus
agactataataatttcactttagatggtgaaattggagttaagcaattcttcactacaggacgtctcagagcttttaatgtgataagtacaagattatttatctctaagtaatagccttgtatatgaatgaaatcttttaaatcaacaagtcaagtgcctacagatttataaagaatgagagcaaactgatatatttgcaagtactaaagtgacaggctcctgtaaaataagactaatgagggttggggaggtggctcagtggttaaaccgattgctatgcaagtgtaaggacaatgttttagatccccagcacccatgtagaagtcagatgggtatagtagcccacctgtggcccacccctcaggaggcagaaatgggatctttagagcaagcgactagccagaccagctatatcaacaaactctggattcaggtagtggaatttggagaacagttgttggtatgatcaaggaagactcctaatgttaatctaagtgcacatgcacccatacacatgcaaacatcacacatgaaaaagaaaatccgaaggggcatg

SEQ ID NO: 2927 - DNA, 494 bp, Cricetulus griseus
cgacagggacaccctggggggctgtgctgtctttaccattctggatagaggactggccaaggctagccctgtccaaaagtggggagttcctgcttcggtttgtgctggtggaaaggacgttgtttgtggagggggtaggagtggtcttcttcctctctaccccaggcaaagggctggcaggcactttggcggtgctgctggctttccgccccgcctcatcctcaggccgcttattttctgcattgttactctgggtcttcttaaagtaggaatttgaggtgggaatggcagggacggcctggtcgctggagcgtcgctgcttagggttggcagaaacactgcgctgaaccttgtgggatggagatggggcactactgttggtcaaatcagctgaaggccggggcttcaaagtgatggtgtcaccttccagctcaaagctcttgtagcctaaaagcagataggtggccatcacttcgttgtacctctgtcccacc

SEQ ID NO: 2928 - DNA, 522 bp, Cricetulus griseus
acatgtgccatggcttcacatgcctatttaccagcaggagcttgtgtactcagtcacaactcatgctcacagctattcttcctttacaagtgtacaaatgtatagtctgaaagggtgttgggtgggtccccaagtctgtatcctctttggctctaagactgacttcccttgtgggttcttccaccggatacagattctccatgggtctcccttggtaagggcaatgcacaagcagtggcttgaccattatcaccaccagaggaaggcagcctgggtgtctgtgaccccatcatgttggccctttggaagctttcctttcaaggaggcttttctctgaggacttgggcacttcataaagagcacctgctggtggtacttgtgttgtgagggaggtgacctttgcacatttagccaatgcactgctacttgagagagagtctgtggcactgatggtgttaggaccaccaaggcgctgaggggactggagagtttcccattgcttgaagtatggagacagcttct

SEQ ID NO: 2929 - DNA, 502 bp, Cricetulus griseus
accttgtatgaccacttctggtgggaccgactatggctgcctgtgaacttaacctgggctgatctagaagacagagatggacgtgtctatgccaaagcctcagacctctacatcacacttcccctggccttggtctttcttgtcattcgatacttctttgagctttatgtggctacacccctggctgccctcctgaatgttaaggagaaaacccgactacgagcacctcccaatgtcaccttagaacatttctacctgaccaacggcaagcagcccaagcaggtggaggttgagcttttgtctcggcagagtgggctctctggccgccagatagaacgctggttccgccgccgccgcaaccaggacaggcccagccttctcaagaagttccgagaagccagttggagattcacattttacctgattgcctttgttgcgggcatggctgtcattgtggataaaccctggttctatgacttgaggaaagtttgggagggctatc

SEQ ID NO: 2930 - DNA, 567 bp, Cricetulus griseus
tgacttattaaatataatctgaaaatactttgaattttcatatgcctcagccccaaaagggatatgaagtatcaaatcctccccgccagactcagcgatatatggggaagaggatggagatgtattccaataacaaaaatagataatgcttctaggacagttttctaagttttcatatcatgaatatgagtagaatttcatgaaacaatttccctgaatctattgatttttcatcataaacacttctattacattttaaaatatagtgaatcttgaccaattgacctgaagttggcatgtgaggggggagggaaactgggatttcttaagacgaactataactcataaactgacactacgccacccctctctttcctaggacatcccctctgcagtctctctctagggttgaggtatactggaagaaaggccagagggtgatctggagatgtagagcactctcacagtccctccagaattgaagaatgaaaaggagaagacaggatcactggtttcgtttaggtgagagtgaggaagaggagcagactcaagatgagtctctgagcc

SEQ ID NO: 2931 - DNA, 438 bp, Cricetulus griseus
  misc_feature (382)..(382): n is a, c, g, or t
aatataatcctgaattaggtgcaagagcacctagtagcctgcccctagatggtgtggaggggagccttggcctatttccagccttcaagcccagctgtcttgtggggttttgttttgtttgaaggcattatccctttaggaccaatgtgggtacctgcttaattggggtaaacttgtctagagttggggatatgtccagccttggtcctcatgaggtccttgaccaacccatagctatagtcactgtccccagatatactgcagcacaaagacaaggttcctcctaatgccaggctactgggcagcaacagaaagtgcagcacaccatcttcagaactattggacaatacttctgagagcagcagttaaggaggggactcanacaggatatgaagttggggttccatcttggtcacccatttggctttgttttgatgt

SEQ ID NO: 2932 - DNA, 519 bp, Cricetulus griseus
taggttctgggatgggatgaatttaatggaaaaaaaattgctgatcgttatgactgtgcctaatgtagtccttttccttttcccctctcctggctggaaactgtagaactggtgttttgcttctgatgcatgggtctgtaattaaatcctgtttgaataattctgccatttacatcaagtagcacagagacactttccagctgccatgccactcctgtgcctttcctctgagaattctggtggtgctgggggagcagtcacggccctggatagtgtggtttgtacctgtctgatagagaggtattctagcacaggagcctgcttgttcccacttcagtctgagaagctcattacacaacttcgtactcagttcaagaaataatgttaactgttcttactatttaaaccatgtaagttatccaaacagcctttattatcactttagaaatgtctgtttttagtctctttgttgtatatgtatagatacataaatatatagcaaatcgatcaaaatgtgtt

SEQ ID NO: 2933 - DNA, 540 bp, Cricetulus griseus
gaagaacgaggaaaggaggatgtacacattggaagcaaaagctttggctgaagaacaaaagcgtttaaaccctgactgctggaaaaggaaaagaaccaactcgggctctcaacaacattgaacctgatgcttgtgtttgtaagtctgtatctacataagtactgactctggatggaaaagcttggaagaccttggtctcaccatttgtcctgaatttgcgtgaacataagatactgatagtattgagtcctgaagtgatttaatgagtgaggatttgctttctccattagagcattaagtaagctacaactatcaacattgtaaaccaaattgccttattttccttccaaacttcatatatgtctatcaggtaatataggcttgaaaattgataccctgtggtgctaaagtacagtagaaagacgtgtatacgtgttttcttttaaattgtaagaaggggaattaaaacatatgtaactgctctttatatcagctccttactgcttattaatctgtattgtacccatgatatcaggaagg

SEQ ID NO: 2934 - DNA, 578 bp, Cricetulus griseus
cctgtctagccgggaccatggcgtcgcgcaaggaaggcaccggccccagcgccgcctcggcgggctccgcgggctccgcggtggggaagggcaaaggcaaaggcggctcgggggactcggccgtgaagcaggtgcagatcgacggcctggtggtattaaagatcatcaaacactatcaagaggaaggacaaggaacggaggttgttcaaggagtgctcctgggtctggttgtagaagaccgactggagattaccaactgcttcccgttccctcagcacacggaagacgacgctgactttgatgaagtccagtatcagatggagatgatgcgaagcctgcgccatgtcaacatcgaccacctgcacgtgggctggtatcagtccacgtactacggctcgttcgtgacccgggcgcttctggattctcaatttagttaccagcacgccattgaagagtccgtcgttctcatttacgatcccataaaaactgcccaaggttctctctcactgaaggcatacagactgactcctaaactgatggaagtttgtaaagagaaagatttttcccccgaagcattg

SEQ ID NO: 2935 - DNA, 574 bp, Cricetulus griseus
actggttttggaggtggcccagcacttgggggagagcaccgtccgaaccattgctatggatggtactgaaggcttggttaggggccagaaagtcctggattccggggcaccaatcaaaattcccgtcggtccagagaccttgggccgaatcatgaacgtcattggagaacctattgatgagagaggcccaatcaaaaccaaacaatttgctcctattcatgctgaagctcctgagttcatagagatgagtgtggagcaggagatcctggtgactggtataaaggttgtggacctgctggccccatacgccaagggtggcaagatcggactcttcggtggggctggcgttgggaagacagtactgatcatggagttaatcaacaatgtcgctaaagcccatggtggttactctgtgtttgctggtgttggtgagaggacccgcgaaggcaatgatttgtaccatgaaatgattgagtctggtgttatcaacctaaaagatgctacctccaaggtggcgttggtatatggacagatgaatgaaccacctggtgctcgtgcccgggtagctctgact

SEQ ID NO: 2936 - DNA, 499 bp, Cricetulus griseus
cagtatgggcagtatatggcaaatgggtggcaagtgcctccctatggtgtatatgggcagccatggaaccagcaaggatttggagtagatcaatcaccttctgctgcttggatgggtggatttggtgctcagcctcctcaaggacaagctcctcctcctgtaatacctcctccaaaccaagctgggtatggaatggcaagtttcccaacacagtgagctgggactctaaacacaattgtaactcaccataggctgcagtttcctgtgacactctgaagacatgaaaagtaaacatcggaaagtgaaaatatttattttaaaaattgaaatgttggaacctttagcacagctttgcttggtgaaggacacgtgtcttctagttctgcctttttaagtttttgttcatgatggatatgaacatgatttttctttgtgtacaaaaactaaaataaagtcaataaagacaattctgactaaattttgatataataggagaaaa

SEQ ID NO: 2937 - DNA, 500 bp, Cricetulus griseus
  misc_feature (348)..(378): n is a, c, g, or t
tgcctgaactttcctgtaaacagcgcgctgacaggcggcatccccgctgggtggagaatccgcgctcctggcgcaagtggcacttcttgcttttaattagcgagaggagaggcgaataagaatcggctgctcggcaagtcggtgcaggaggctgacttctgggaggctgggggaagagctgggggaggctgctggtcggctccggctgttttctcaatgaatagcatggcggggagactgaagccagccgcagcctcctcctaacgccggcggctgggtgacggcgacagccccagccctccaggcgggacctggctctcaagacgcgctcctttaaaagccctcttnnnnnnnnnnnnnnnnnnnnnnnnnnnnnnnagagaaaggctctgcggatccaaataccgcctggcaaacggcactggggaatggtgttttctgatgacaaccccttctgttggtgacaaagcctgtcgcccgcagttggccctggaaggaag

SEQ ID NO: 2938 - DNA, 313 bp, Cricetulus griseus
  misc_feature (279)..(306): n is a, c, g, or t
ctctcacatactgccttgaacagtgtgggagtgttctggagctgttaaaacaatatcagaattttaaaaacaacttgacagctttgattcaaaaagaagagggtatcatctcccagcaggcttcctacatgggaagggacaacctgaagaagaaggtagcagagattgaaactgtcaaagaagaattcaatgaacatttagaagttgtggacaagataaatcagatttgtaaaaatctacaatatcatctaaataaaatgaaaacctttgaagagcccnnnnnnnnnnnnnnnnnnnnnnnnnnnnggggggg

SEQ ID NO: 2939 - DNA, 479 bp, Cricetulus griseus
ctcgagacggagcggatggtgctttttatccagatgaaatccaaaggccacctgtgcgagtcctatcttgggaagacaatgttgtctgtagccagccagctcgaaaccttagccgtccggatggtttagaagatcctgaggacagcagagaagatgagaatgtgcctgaccctcctgatccagccagtcagcatttacgtggtcatggagcaggtttttgctttgattccagaagctttgatgttcacaagaagtgtcccctctgtgaattgatgttccctcccaactatgatcagagcaaatttgaagaacacgttgaaagtcactggaaggtgtgcccgatgtgcagcgagcagttcccgcctgactatgaccagcaggggtttgaaaggcacgttcagacccattttgatcagaatgttctaaatttcgactagcttttattaggagttagtacaatttagcaatctaaaaaaaaa

SEQ ID NO: 2940 - DNA, 502 bp, Cricetulus griseus
tttagcagccctgtctttgggcttgtggtggacattcgatcgctcccgaagcggccttggacttgggatcaccatcgccttcctagctacgctgatcactcagtttcttgtgtataatggtgtctaccagtacacatccccagatttcctttatattcgttcttggctcccatgtatatttttctcaggaggcgtcacagtgggaaacataggacgacagttagctatgggtgttccggaaaagcctcacagtgactgaacttcagggcatggttcaaagtggaagcaggatgcggagacactggtcctgggtgtgatgaagactcttttttcctcaatgtcccatttagactgggctgacgatgataaatgactcctgaagaagtgttcacatggtctaaactagcaaatggaggcaaggactacttacctaaaagtcttaccttgctcacccaccctcacacctgtctgcactggaacattccattccaagctgtatgtg

SEQ ID NO: 2941 - DNA, 539 bp, Cricetulus griseus
accagcttcaggccatgcatgcccagtcagccgagctacagagactggccatggagcagcagtggctgcatggacacccacacatgcacggtggccacctgccaagtcaggaagactattacagtcgactgaagaaagaaggtgacaagcagttataagttatttatttgttaatgctggctgtggaaaccccagttctagggggcagaaacgggactttacatccagtaggagctgcaagagcaaagaggaatatcgtctaaagatttctctatatatttaaaacccacaactaaaaacacatctgcataatagtgttcgtttgttgagaggatttcccgagacctatttgggtctccctgcatgacagtcccccagaaacgtggtgtgtcttgggttggactgacccctataaagcttacctgcagtcttggggtttggctttggttcttttccttgatttcccagtaggtgctagagtccgcccacactcttcactgtgcgcgcagacgctgaggcacgcgggctctggaaccgtg

SEQ ID NO: 2942 - DNA, 501 bp, Cricetulus griseus
gctgcgcggcgcagcgcggcggggaggttttggtatgaacaggattcggattcacgtcttgccaacgaatcgggggaggatcaccccagtgcccagatcgcaggagcccctttcttgttcgttcactcaccgcccatgctctcaaccgcgtctggaggggcaggaattttgcatcaagcatatccttgaagacaagaatgcacccttcaaacaatgtagctatatatcgacgaagaatggaaaacggtgtcccagtgctgcccccaagcccgagaagaaagatggatatttgccaggacacaaatcaggttctcttcaaatgctgccaggggtctgaagaggtaccctgcaacaaacctgttcctgtaagcctttctgaggacccctgctgtccactgcatttccagttgcctcctcagatgtataagcccgagcaggtactgtctgtgccagacgatctggaagccggccccatggatctgtacttgagtgctgccgagc

SEQ ID NO: 2943 - DNA, 395 bp, Cricetulus griseus
gaggtaccatgcttagctttcctgcagatttaatgatcagtgttgtggggtttttgtttgtttgtttgttttggttttttttttcatagctatatagcctttaaccttactttcaggtcaaattcaaaattttacatttgctaataccttcattataatatgttaacactttgcattctattgttgaggtttctgaccttgattttaaggggatggaaaagctccttaacttttgtcttccagtgtcaggtttcatataaactggtacaaaatctttttttctgagtaaatgtgaaggaccactattgggtcttggataaactgttcaggacaaaagtgaataccctaccttattccaggtctattgatttggggaatgaatggggaggtgaaaa

SEQ ID NO: 2944 - DNA, 282 bp, Cricetulus griseus
  misc_feature (8)..(48): n is a, c, g, or t
tgcgtccnnnnnnnnnnnnnnnnnnnnnnnnnnnnnnnnnnnnnnnnncgggggggaaccccagttttttttccctttaagaagggttaatttcccccctggggtaaaaaaggaaaataatgttttccgtggaaaattttttcaccctcaaatatcctttgggataggacctacctccccccactgtttctaagctgagggagtatccctctatgtgaaataagctcccaaagcccattcctatgctaagaataagtactgatctactacaagaagccctat

SEQ ID NO: 2945 - DNA, 247 bp, Cricetulus griseus
ttgatatttgtctcatcaagacgtcaaactcgacttactgctttagagttgatagcttttctggctactgaagaagaccctaaacagtggttgaatatggatgagcaagagatggagaacatcattgggacaatacgagattccaacctgaatctgactctagcgtttgggataggaatgcatcatgctggactgcatgaaagacaccgaaaaactgtggaagagctgtttgtgaactgtaaagttc

SEQ ID NO: 2946 - DNA, 487 bp, Cricetulus griseus
gggcatgtgcctgtggaggccaaaagaaggccttctggattgttgatactctggagctggagttagttacaggtggtcttgagccacatgacatgggtgctgggaactttggttctctacaggaggacatacccataaccactgaaccatttctccagtcctctatttacttggaaatcaagtaaagggtccctatccttaccaaaggccaccagccaaatcaaacaagaagcgacacctaactcaattaattacaattctataccctagttaaggataaagtatgaagatgtgtaggaatccagccttccttcaagagctacatctggagtcttatgcactcctcttatcccccaaacacattgttgatcctgtcttctgaagttccaagattgttctgccaaccgttttggaagggaatggagatagatgaaggagcctgactggtacagtactcattttgcactttccactgacaagacaaccg

SEQ ID NO: 2947 - DNA, 579 bp, Cricetulus griseus
  misc_feature (434)..(456): n is a, c, g, or t
tcctgtttcagaaaaacaaaacaacaaaaaagagcacttcctagtctcctgtctgacttgagtcaggctcctagtaccaggtcaactcagggtggcccgcaacctcctgtgactccagttccaggggatctatgctgtctttctggcctcagtgggcactaacacacacatggtacacacatgtacataaaaatcaatcttgggatctgcccttgggtattgaaattttgaaaccatcaccgtttctcccgcttctgacaagctggtgtgacaatgcaaatgatacttctttttggcaagaacctgttggtgaatacctacatgcttactcaaagacaaccacataccaattactaaacatttaaaatatatttctaaacaaaatgggcaactcagtcatcgtaactgctgatctccagagcagagtgacccannnnnnnnnnnnnnnnnnnnnnntaccataatcaggggtgaaaaatatacaacttgtttctgaaccaaagccacaacttctatttctgcagtctaaaacatttcactgctagtatggcagccctggttgaaattatgtagttcctt

SEQ ID NO: 2948 - DNA, 517 bp, Cricetulus griseus
agcagatgcgcattttgatggttggattggatgctgctggcaagacgacaattctgtataaactgaaattaggggagatagtcaccaccattcctaccattggttttaatgtggaaacagtagagtacaagaacatttgtttcaccgtatgggatgtcggtggtcaagataaaattaggcctctctggaggcattacttccagaatacccagggtcttatttttgtggtagatagcaatgatcgtgaaagaattcaggaaggagcagctgtgctgcagaaaatgcttctggaagatgagctgcaagacgcagtgctgctgctttttgcaaacaaacaggatttgccaaatgctatggccatcagtgagatgacagataagttaggtcttcagtctctccgtaacagaacatggtatgttcaagccacttgtgctacccaaggaactggtctgtatgaaggactcgattggctgtcaaatgaactttcaaaacgctaaatgaactgggatatctaacc

SEQ ID NO: 2949 - DNA, 146 bp, Cricetulus griseus
aagtgcaatagattttcaagtgtattgtgccttgttctaaaacttttattaagtaggtgcacttgacagtattgaggtcatttgttatggtgctatttcaattagtctaggtttaggcccttgtacattttgcccataacttttta

SEQ ID NO: 2950 - DNA, 561 bp, Cricetulus griseus
  misc_feature (2)..(19): n is a, c, g, or t
  misc_feature (250)..(268): n is a, c, g, or t
gnnnnnnnnnnnnnnnnnncctagctcgcgcgtccgccgggatgagctacgaccgcgccatcaccgtcttctcgcccgacggccacctcttccaagtggagtacgcgcaggaggcggtcaagaagggctccactgcggttggtgttcgaggaaaggacattgttgttcttggtgtggaaaaaaaatcggtggccaagctacaagatgaaagaacagtacggaagatctgtgctttggacgataatgtctnnnnnnnnnnnnnnnnnnncactgccgatgcaaggatagtcatcaacagagcccgggtggagtgccagagccaccggctcaccgtggaggaccccgttactgtggagtacatcacccgatacattgccagtctgaagcagcgctatacacagagcaatgggcgcaggccatttggcatctctgccctcattgtgggatttgactttgatggcacccccagactctatcagactgacccctcatgcacataccatgcctggaaggccaatgccataggccggggcgccaagtcggtgcgtgaattcctggaga

SEQ ID NO: 2951 - DNA, 526 bp, Cricetulus griseus
taaatgctgggcaagcgctggcagcctgcctgtgattccagcactgaggaggtgaacacaggatctctggagcaaactagctaactagactaggtgagttggtgagctctaggttcaagtgagagaccctacctcagtatgtagagagcatctgaggaagacatctgacattaacctttggtctcttgaaaaccaccagaggaaaaggcacgtaatacacaagaaaataatgacaaaactaatagtggcagttggaggtggctcagtggttaaaagcacccacatcagacagctcacaaccacctgtaactccagctttaagggatccgatgtctctggccgctacaggcaatggcatatacacggatacaaaattggaaagaacatatttcttcccatcagaagaaagggatgtgagaaacgtgaattatctttaaagtggtgaaagaaaaaaacttcatatctaattaaaatgttcctcaaagccgggcgttggtgacgcacgcctttaaacccagcactcggg

SEQ ID NO: 2952 - DNA, 325 bp, Cricetulus griseus
ttttagaatgctacctttgttcttcaaaagctactgcttatacagttatttaaattcccttacaattctgggatggggtgtttaaaaaacactatttaactttctaaggaaagtgaatagccacattgttttgacaactctgtctgcatcactgtgttcaaggaaataattctaaggtttatcccctacatggattcattaattacacattggaattgaaaatgaaaactaaagttaaacttagacagtatttaatttttaatatgatgtcactaatgcaatcattactaaataaaaatgtgttttgaaaagttataaatgcatt

SEQ ID NO: 2953 - DNA, 579 bp, Cricetulus griseus
accatgcgagtgaaacttgcctcccgaatgtggaaagctacaccaaactggggaaccccacacgatctgaggatgtcttggattatggacctttcaaagacacccctgcctatagtcaggatacttttaaggtacactatgagaacaacagccctttcctgaccatcaccagtatgacccgggtcatcgaggtttctcattggggtaatattgctgtggaagagaatgtggacttgaagcacacaggtgcggtgctgaaggggcctttctcccgctatgattaccagagacagcctgatagtggcatctcctccatccgttcttttaagaccatccttcctgctgctgcccaggatgtgtattaccgggatgagattggtaatgtttccaccagccacctcctaattttggatgactccgtggaaatggaaatccggcctcgatttcctctctttggaggatggaagacacactacattgttggctacaacctcccaagctatgaatacctctacaatctgggtgaccaatatgcactgaagatgcggtttgtggaccacgtgtttgatgagcaagtga

SEQ ID NO: 2954 - DNA, 368 bp, Cricetulus griseus
ctctggctgttgaaagactgttggagcctcttgttacacaggtgacaaccctggtaaacaccaacagtaaagggccctctaataaaaagagaggtcgttctaagaaggctcatgttttggctgcatctgttgaacaggcaactgagaatttcttggaaaagggggataaaattgcaaaagagagtcagtttctcaaggaggagcttgtggctgctgtagaagatgttcgaaaacaaggagatttgatgaagagtgctgcaggggagtttgctgatgatccatgctcttctgtgaagcgaggtaacatggtccgtgcagctcgagctctgctctctgctgttacccggctgctgattctggctgacatg

SEQ ID NO: 2955 - DNA, 505 bp, Cricetulus griseus
  misc_feature (398)..(416): n is a, c, g, or t
gctactgtgttgggacacctcaatgtacaagatcccaggggtcacagctgtcagcctttgtgaaatcacaagtaaaatataaacaagatgggaaaggaacagggaggagggagtgttattgtgctggcggttaaagtcgaggccgagtcttcaatctgacggagatgatgtctgagttaggccttgaccgacaaatgcattttttttaagattctgaggtcagagatggggatgttggaggttcatgaaataagcagatgtgggcagtgccttcagtagaaactgaggggtaaagtcaaggcactgctccaggtgtcctcgaagctagaggtcatttgaaaagtggctagtttaactgagggtggtggttcacgcctttcatctcaccatcagggatnnnnnnnnnnnnnnnnnnnaaagttggggccaacctggtctacatatcaagttccaggccagccagggttacatagttaaatcccggtctcaaaagaaaagtgtgtta

SEQ ID NO: 2956 - DNA, 432 bp, Cricetulus griseus
gtttacaggacataattcaaacaaaacaagagttagctggtatagtgagacacacctgtaatgccagctgaccgagaagctgaggaaggacagtaagtttgagggtagcctgggcaacctgctagaccctgtttcagaatgaaatgtttaaaagcgcagggatgtagttcaggaagcatgcttggtttcatctctcaacacagcaaacaaaacaaaagccagtgttcatatgtgtacatatacgtgtgtgttctcatgtgtgtacatgtgtgtgtgaatgtgtgtatgcatgtaggtgcccaaggggcatataggtgcccagggggtacaggagctctggaccccctggagctgcaattatagctcttgtgagttgccctatgtgggcactgggaacctttgcatgagcactgtttgctcttaactgctaag

SEQ ID NO: 2957 - DNA, 540 bp, Cricetulus griseus
tctgtgttgtagtaaaaccaggagggtgatagagttcattggtttcgaaatataacacagctggggatgtccatgtatttcataaaaaacccgtcaggaatgttttgtaggctaggcagcctgtttagcttaattgattctgtctgtattggtcccttgttcttcaggaacttgaaaatcttgaagtaagcgtaattttaagttaagatttaacctgaacacatgaattaaaaacttgacactgtataaaaatattttaattgactttattgctttctattttgggggaaaaaaagataaggaaaaggagaaaatggaaaaggaaagtcctctacccaccaagttgatgctttgaaaaagaagagaaaaagcagttttggtgtagagtacgccagacaatgataagggcaaggggaattaaaaagaaaaaagctcatggagactaagattgagcatagtaactgctgagttctctaactgggcttctgtatttcaagtaagagaccagaagtggtcttcctagggaactggaaaagctca

SEQ ID NO: 2958 - DNA, 457 bp, Cricetulus griseus
aaactatatacaagtgcttcattttaactccctcctcttttataagaaagtggacctagaaatttgtcctgtatgttttgttttgtgtttgtcagacaaagtctttatgtaacccagcctgccttgagcatatgatcctcttggattataggcatgaaccaccatactcagcttttagaatgtttttgtttttcttgagaaaccattgttgaagaaaggtattagaacatagagaaatgacatcacgcattgtgcaacatttctttacaaactattcatgcaaatgtctaagcatcgtatgaggcattggcctagcaagaccataaagcggtaagagtttagaaataatggagagagctgtgtgaggacagtgcactgtggggtttcagggcaaacaaacctgatctttcagttctgcttttgtttttatttcaagacaatctaggtatgttaccca

SEQ ID NO: 2959 - DNA, 83 bp, Cricetulus griseus
caacagctatggtgtcagtaatcaacaccgtggacacctctcatgatgacatgattcatgatgcccatatggactattatggc

SEQ ID NO: 2960 - DNA, 472 bp, Cricetulus griseus
tgttttattttccttaattacattgtcagaactctgaaatgaaaacagtctgtgtactataactgggtgaagtttctatatgcagtctgtttcatgtcatataggctgtgcttctaggcctccaggtcagcctcctctccagaagcagttggtctgaactttggatcagaagtgatctccaggaatgctttttgctgcttcctcaaacttaagagcattagccaaaacaatgttttaagtttgtaatttgtttctaaggttggtatcgacacttgattgtggtgatcaatagcagaaaaacgttaactaaagcttgtggaagtctaagctctacatcctattgaattttactctcaaagtgagtcttgttcaagtaatcattttggatacttgcctctctgatttttttcttgttgtagtgctaagaatggaaccaggggccaggggtggtggcacatgtctttgatcccag

SEQ ID NO: 2961 - DNA, 514 bp, Cricetulus griseus
  misc_feature (191)..(209): n is a, c, g, or t
aacactaggaccagatcttgtctgaaggctcagggtcagtgcccaggggtgcacacttgtatgctcagtccatacataatcacaaaacatgatggcacagttcttcctcaaaactgcaatgttgggggtaggagtgaaacctagttcacttttacttatgtagccatggctggttgagaactcagatctannnnnnnnnnnnnnnnnnncccaagctggttaacttttgttgaggtgggatggtaatgttaccactttgttatagggctctgtgctcagcattttggcatatatccatgagtggcgtgcttgtgctttgttgggtgtggacctgaggaggtgctgtgcatttatttgccatttaacattgagaattagtttctagcaagtgagttgcttgctgcttctgttactgctggccctgacctgttcatattgggtttgcccagctttccaaagatgaaatgaggggatcacatttcagaacagtaccgtgtagccgcatgcccatgag

SEQ ID NO: 2962 - DNA, 427 bp, Cricetulus griseus
agaggggagtgtcaggatgaagggaacaggggaagatgttctgagaacatatactagaagacagcagagtgtctgtttttatcccaaagtacaaaatgaagagaattacaatatattggttattacaactttgatcctaagttgaattcatgggcctggcatttgctgtcatagtcctcttttctttgttttgaatcccatgtccttgggcgctgtgtggggtaggcccctaatgttttgacaagatgcagattcttgtctactctgagaaatccttttgaactgaagtttcatattctagaaacagatgaatgttattggcacttggtgaattatttggaatcctgagttaataacgatggaaattggggagttaataaggacttgatcttcagcagttttgagctctgctctttaatgacccgag

SEQ ID NO: 2963 - DNA, 554 bp, Cricetulus griseus
gaggcgaccaagccacctccagtcccagatatggccagtacaccataatccaagaaaactccaccaaagttacagagaggcctccctttaatcgatcaagttcccaggattctttggatgacgttttgatggaagactattggacggaactagaaaacatcaagaggtctaatgaaaatcgccaagaaagtcaagaggccgttgttgtcaaagagcctgatgagggagagctggaagaagagtggctcaaggaggctggcttgtccaatctctttggagaatctcctgatgacccccaagaaagcattgcgtttttagccacactgacccggactcaagcggcagccgttcagaaacgggtagaaacggtctcccagaccttgaggaagaaaaacaaacagcaccacattcctgacgtcagagacatatttgctcaacagagagaagcacaagaaaaatctccaggtggctcagaatcaccgtcagccagaacgaaggaaaacaaatgccaaggaaaagatgaccaggcatcaagtggggctgttgataacaag

SEQ ID NO: 2964 - DNA, 280 bp, Cricetulus griseus
tgctgctttgtttgcccccactactcctggtatgagttatctagagatgaaaggtttgtcaagtttaacataaagcactgatttaccttgctaagtaaatggaaagataaattctaactgcctactatcagatgtcagttaatcggtgtcagcccctcatttactctctctcctaaaacctttcccacccactgtctggcttctgttcctctccctccccctttcccttcctgtctatccattgagtttatgaaatggaagagttaattgcatgcactat

SEQ ID NO: 2965 - DNA, 345 bp, Cricetulus griseus
ccccagccagatagccaaaggtgaggaccctgccttgcagatttggtggcaaccaaactgcacgccccacccaatctgctgctactggcctgacacccaagccacaagggcctcctcaagggtagcccaagaaccctaactctatgctgagtgtgtgatggctcaccaaaaaggcaggggcaagtatgtagtttgtatctggtaatgtaataacatcatctgagatttgcaggtgtgctaattcatctagtccttgtggtaactctgagatcagagcctattctcctgtgctaccaatgaggcctggggaaatctcatggacctgttcaaggccaatgtcacctt

SEQ ID NO: 2966 - DNA, 522 bp, Cricetulus griseus
gtctgccttgccttgaagaagggaatgtggatttgtgggtgttccctttcccacccctgagtggccctcagggactctacctgctttccatctgtggggtgggaaggcctgagtaaaaaaggaagaatatatggcaaggtagagatgacagttctcaagtttccctattgtattttgttgttgttggtttttaaaattaatacctttgttactgattggcctccactaggtggctatgggtaagtcttgggggaaggatagaaaaggggaatggttgggcctcagggctaattgtactgaatcctgccagaaaaaagcctctgtaagggctgcagcaagggacaagtctccattagctgagcacttccttgtgggggttgggggtgtccttgactgtgataacttgaagatggcattcctaacagctcttcagtgcattgtttgtcatctgcttagacattgttagggagtggtcaagccagagatttgaggcagtaggtaatgttcacttacagatgcact

SEQ ID NO: 2967 - DNA, 304 bp, Cricetulus griseus
ctttcatgttgttctcttcatttcaggaaggcctaactccatctctttcttctctggctactctgttgaagtctctcttcatccttcttcccttcccagctaccccttggtcattttttcctgtaggtgctctgatgtagcaaacagctgtacctattggcaactcagtgcacgagactggcaaggcatgcactatgaagcatgatagcaggtctatggtctgcccaggctccccatgtccttgtctgatttccctctgagtaattttgcagggtttatctgtctattccatttctcctcattt

SEQ ID NO: 2968 - DNA, 329 bp, Cricetulus griseus
  misc_feature (213)..(231): n is a, c, g, or t
tttttttctccaggaggaaaatggcgtcggttgcagttgatccacaaccgagtgtggtgaccagggtggccaatttgcccttggtgagctctacctatgacctcgtgtcctctgcttatgtcagtacaaaggaccagtatccttatttgagatctgtgtgtgagatggcagataaaggcgtgaagaccatgacctccgtggctgtgacaagtnnnnnnnnnnnnnnnnnnnagctggagccacagattgctgttgccaatacctatgcctgcaaggggctagacaagatcgaggaaagactgcctattctgaatcagccaacaactgag

SEQ ID NO: 2969 - DNA, 427 bp, Cricetulus griseus
tgcagagtcgccagaaacatgaaattgaatctttgtataccaaactgggcaaggttccccctgctgtcattattcctccagctgctcctctgtcaggaagaaggcggagacctactaaaagcaaaagcagtaaatctagtagaagcagctcattgggcaataaaagcccacagctttcaggtaaaaagccctgggccaagttgagtcagccatcttgtgtttctgtctcctactgtgaatgtaacctgttgcacatttattaacttctattaaatttcaaaggctttccaatactcctgcttctttagctcttctaaccctggcatattttgaacctcttttgactctatagaagtaggctctctttttaatgtagtcagtactactagctacctactgttaattttcacttatggttgcttttcag

SEQ ID NO: 2970 - DNA, 540 bp, Cricetulus griseus
ctgtgagggagtcgctgctatccgaggccccggaacccgagctggagctgaagcgcaggctgcgggcgcggagtcgggagcatgtcggaaggggaatcccaaacagtagtcagcagtggctcagacccaaaggtagaatcctcctcttcggctcctggcctgacttcagtgtcgcctcctgtgacctctacaacctcagctgcttcccccgaggaggaagaagaaagtgaagatgagtctgagatcttggaagagtccccctgtggacgctggcagaagaggagagaagaggtgaatcagcgtaatgtaccaggtattgacagtgcatacctggccatggatacagaggaaggtgtggaggttgtgtggaatgaggtacagttctctgaacgcaagaactacaaactgcaggaggaaaaggtccgtgcagtgtttgataatctcattcaattggaacatcttaacatcgttaagtttcacaagtattgggctgatgttaaagagaataaagcccgggtgattttcatcacagaatacatg

SEQ ID NO: 2971 - DNA, 521 bp, Cricetulus griseus
tgcgtacgagccaggcagagggttgaaatgaagaccagccaaggaaatcacaccgttagtcaccctgcatggacatggtcaaattactatccacttgcgcttcctggtctttgtcatcatccagcatatggattttagactaacttgacgttaagatgttttgttttgtttttcctgctccctaagccttctcattgagtcaccccttctcagtactgcagaatcctcctcccaaattaattttctcctttcagcatcgtgatagggatgtgtttgtgacacattgtcattcatagcctgtgctcctttgtgatgacgtccctaaattctgtgatcacatcacgacttgtgttatgagtagagaggaatgggaccccaaaattggacactagaaattggtgggtggtgctcataactgaaaacacttagcttattgaagtgcctctatttacatgttctttagttataatatgtatttttctaacagaaatacacgtctgtaattgatgtttattatactt

SEQ ID NO: 2972 - DNA, 446 bp, Cricetulus griseus
  misc_feature (305)..(305): n is a, c, g, or t
ccttggcaaccagatttctgcatttggagttttttaaaaggatgtttcatagccacaagaatcagtgggtgtgccggggaagctgctgcccttcccggcaggagcctccacttgttttgatgcagccatagtctgaggacaagcaggccacccacctcagggtaggttcaggaagggcagacagtgggctgcatagggccatggtgtggctctctctaaaatgtctggtggtggctgtggtgggaggcagctctcagcctgggccggaatggagcaggtaggtggggctggttagaaacccttancaatcaggtgggcagggctgggtagatgctgggattcccttgaaagcctggatcaggtctaagtgcctgtcacacatgcgccatctgtcccagcccacagcttggcatagggctgtccacacctttctgctgatgaatggt

SEQ ID NO: 2973 - DNA, 549 bp, Cricetulus griseus
  misc_feature (241)..(289): n is a, c, g, or t
ctggttgctcaaatgaagcaggatccacagaatgctgacttaaagaaacagcttcatgaactccaagccaaaatcacagctttgagtgagaacagaaaagagtagttgaacagctgcggaagaacctgatagtcaagcaagagcagccggacaagttccagatacagccattgtcacagtctgaaaataaactacaaacagcacagcagcagccactacagccactacagccactgcagcnnnnnnnnnnnnnnnnnnnnnnnnnnnnnnnnnnnnnnnnnnnnnnnnncgcccaacagtcagcagcaccacccagcctgactgcatcacagactgtaactacagcttctatgattaccacaaagacactacctctcgtcttgaaagcagcaactgcgaccatgcctgcctctgttgtgggccagagacctaccattgctatggtgaccgccatcaacagtcagaaagctgtgctcagcactgatgtgcagaacacaccagtcaacctccagacgtctagtaaggtcactgggcctggggcagaggctg

SEQ ID NO: 2974 - DNA, 580 bp, Cricetulus griseus
ttacatatttaagggtcattggaatgtcagatgttaatgattggacactgaacatggtagtgacttgtgcctgtaatttcaatacttgggaggtgtaggcagatgattgctttgtgttaagtccaacctggtctgcagaataataatctgttgtaaacccataaaactggggaaaagtagggtcttaaaatatataaactaatgttatgttttgtaaatattaattggagggttttgtttggctcaaggcaaaaactaataaaatgctggttgatagtactgccccttactgcagtgccttccttccagctttgactaagaaggctcaggtttcatttcattattgtggttgatttcagagcctgttgttagcaaagtcagcagaatgtagaacggtgattgtcattgggttgacacttggctgggggtagtggcctttgttcattaccgtaactagttcaagctggactggaactcactttgcagaccagttagtctcaaatccacaacaacacttgcttcagcctcccaaatgttttgattaaaggcatgttaattgattttgtggtttctgatgact

SEQ ID NO: 2975 - DNA, 560 bp, Cricetulus griseus
gacaaaccaccacacactggaagcagaccttgtttatgatggacgacccagtcccagtccacacaggagacgtggtcacaggttccgtcgttttacaaagaaatccggtgtggagaaggcacatgtctgtctctctgagctggtctgtctcatctacgctcgatcctacatctcaaagagctggagagaaagtctttccaatctggaggtgacagttaagcactgcttgggagtcatggccatggtttgcatcttgtggaagaagaggcacctggccaccagctgtgacatccataagcacctgtcccatgctgttccctttccacctagcaggcgacatcggcccctcacagacaagcccctgggctcgccccccagtgttgttcctcttgtaggctgtgtatataggtgttcatcccgtggtgcctatcggctgccggctgccggctgccagctgccagtgttcccagctgggagtagtcgtagattcctcagacacacatttcagcctgtgcgcctgtgactgtgacgtctacatgttgggtcagtgatgtttctga

SEQ ID NO: 2976 - DNA, 539 bp, Cricetulus griseus
cctctcccttcacagcatgggatacatctgtatggagacggttcttttctagatttcctctacctttctgctcttaaactgcttctctgctctgagaagcccagctacctgccttcactgaatatacctcaggctgagattggggcgggacagcaggtcagtggatcttcggcgggaaggtgcagctgctccgcacagtgcagctgcaccacagttcgtgctcaagagctgcaggcccagactggggcactgacgctttcggctttgggggtcattctaccaacaaacagtccttggggggaaacgtcctggaaacacacagatcagaatgcatgctaatctcacagcgagcatggaggtagcggagcctgtgtgactccataaggctctaaccaacctaagttttcattgttgagaagtgaggccagggttgtactggaccaaaggctaaggcttgccactcagcattccaagcagacttgtttcctaaaagcattccttcattttgcattccaccctgggtcagcctcaaccacaaa

SEQ ID NO: 2977 - DNA, 498 bp, Cricetulus griseus
gaaatcatagatcaatatttctctggtgatgatattgatgaagatcctagcctcattcctgaagcaacacaaggaggtacttacaactttgacccaacagccaaccttcaaacaaaagaatttaatttctaaggtctattaagtgcagcaccttttattcaatacaaacaccaccagatggccaccaagcgataagacagcaagcaacagaaggctcccagctctcttgcctcttcgttttgatgcttctaaagcaagccatgtctcagtcactttgcagttgccaaaagtcactctcacatggactgtaaatgcatatgcatgatttcctaaactgttttagaattctccttaacagtctcaactaccctatttttccatgttccctggtgccacatgctacaactgcagtctccagttagaatgttccatagtggtggcaatcggctgtccactgatactgctttggaaaaaggtgcgctgtggatcaagacactg

SEQ ID NO: 2978 - DNA, 423 bp, Cricetulus griseus
  misc_feature (20)..(37): n is a, c, g, or t
  misc_feature (51)..(64): n is a, c, g, or t
  misc_feature (67)..(80): n is a, c, g, or t
gtttggtttcggtttttccnnnnnnnnnnnnnnnnnnattgttttggcacnnnnnnnnnnnnnngcnnnnnnnnnnnnnncttgaactcacagagatctgcctttgcctctgagtgctgggattaaaggcatgcaccaccaacacctgcaggaaccattttaatttgggtaaattacaatgtttcttttttcttccagtgtgctgtaagaaaccataccagttcaaacttacagaaacttactcctatgtcttcattgaagagttttataattttatctcccatccataggcttgggcttgctttcaaaataattttatatatcttatttgtagccatatttcaagttattagttaaatataaataacagaacttagcatcttaaagtgtataggtcagtagtgttgagtgcattcacactgt

SEQ ID NO: 2979 - DNA, 310 bp, Cricetulus griseus
  misc_feature (220)..(250): n is a, c, g, or t
  misc_feature (265)..(294): n is a, c, g, or t
gacaggccactggaaacaggagagaggagaaaggaatgagggggagggagaggagggatcagagagaggcgggggggagagagaggatgggaggtgggcagaacccttttaaaagggaacatagtaaatgtgcacaggtggtgctcttagtggctgcagctcctgtcagaaccccaagggcagtccagtacagatgcctgaacactaacatcgagggctnnnnnnnnnnnnnnnnnnnnnnnnnnnnnnncgggggacctccacnnnnnnnnnnnnnnnnnnnnnnnnnnnnnncccctgggcgtaatca

SEQ ID NO: 2980 - DNA, 579 bp, Cricetulus griseus
cctggaaggaagggaaatactgtcagacatttaaagtttttcttatagtcaaatatctgttgggaaactcataggaagttggaagtgcatgtgtgctcactgtctaccctgctgctctgaggaggccatggctagaacaggtgtgaagcgtgactcactgtacgaggtttccacgatgtggatgatagttgacgttggtgcatccagaactcagagagatacctttataatgactgtggcccttctgtttaatagttttggtgttggcaaattttcctgtcccagtaccagaatgccaaaggaggaaacaatcaagggaaaaattttaggccatttcttaatgtttaagatttgtcattttaaaccataatttttcttagaacatctttgaaatttctaatcactttggtcatttaagaatgagagctgtgatgttttgatttataaaggcaaacttaatgcaaagtgggtaacgctaaatccatagcaaagttttttattaaattttataaattttttactagttaattatgtcctaattgtattttggggaatgaacagcagtcaataccacagact

SEQ ID NO: 2981 - DNA, 292 bp, Cricetulus griseus
gaaagtactaagtccttgggactgggaggtatctcatttggtaggatgcttattagcctttgatttaatccccaacacttcttagcacttatccataatcccaccacttggcaggtggaaccaggagaatcagaagttcagggtctaatccaaggcctgcctatactatgggagacctcatttcctgaaaagaagtattgagtattacgttccttaggcatcagtgactttctgtttaaatgaagtaaggtttgtgtcagtaagtggggtgggtgtaacttgaaaggatgtt

SEQ ID NO: 2982 - DNA, 278 bp, Cricetulus griseus
gccggtggagtgagaggatgggcgagcagtctgaatgccagaatggataaccgttttgctacagcatttgtgattgcttgtgtacttagcctcatttccaccatctacatggctgcctcaataggcacagacttctggtatgaatatcgaagtcctgttcaagagaattcaagtgattcgaataaagtggcctgggatgacttcctcggtgatgaggcatatgaaaagacttacaatgatgcactgttccgatacaatggcacaatgggattgtggag

SEQ ID NO: 2983 - DNA, 482 bp, Cricetulus griseus
  misc_feature (418)..(446): n is a, c, g, or t
tgggtgagaaggcagtgcaaagcctgaagcagatccaccagcagctttatgatcgtcatctctataggggtctgggaggagaacttatgagacaagcagtgtgcattttaataaagaacttgtcactttccagaatgccctttaaaggtgacaccgttatagatggttggcagtggctgataaatgacactctcagaagccttcactttgtttcaagccattccagacaacagatcaaggaggcagctgtctcggccctggccgccctctgcagtgaatactacatgaaggagcctggggaggcaggctctgccgtggagacggagctgattccacagtaccttgctgagctccagagcccagaggagatgacccgctgtggtttctcctcagccttgggtgccctcccaaatttccnnnnnnnnnnnnnnnnnnnnnnnnnnnnnacaggtctgagaacagtcacctgtacttctcccaag

SEQ ID NO: 2984 - DNA, 560 bp, Cricetulus griseus
tgtctaacatggcaatgagttctcatccaaacagctactggtaactgactacagagacagcccaggacctggcactgtctaaggtcttttctaattccacatatggtatacacatataaataagcatcttagcacataatgtacagctgcatcagttcaagttccaaggccttatgggtgaactttaaaggccaagagctcctcagagtgcatattgtttaaagatcgaagatctggcaactttagaagtaattttgtaaaaatggaggcctcatttgggtggtttttcatgattaaagtccttaatgcacggatgagcgtttcttgcaaagcttccaccgagttgacattttcaattccagaccgatctgcagataccagaacaactgctgtgaacaagctcatctcctcatcactgagctggagagcgttcagcttctcactaaactcaaacatagaactgagcagatcccctgctcccattgagtgcaggtgatccacactgtacttcttcccacttataaaggtgacagtccgctcctttgcatcaaataatgaag

SEQ ID NO: 2985 - DNA, 487 bp, Cricetulus griseus
gcagcttagagcaggaagctgagtctgtgctggcacagcagggtgactggagtgtcaagggtccaggaggccgagctgcacaggtcagccacccagaccacaaacctttggaatcagactggaacagctgggaagctgagggctcctgggaccagggctggcaggagcccagttctgtggagccacctccagaaggcacccggctagcaagcgaatataactggggtggtgcagagtccagtgacaagggtgacccctttgctgccctgtctgttcgtcccagcacccagcccaggccagacccagacttctggggtgaagacaactgggaaggcttggaggctgagagcagacaggtgaaggcagagctggcacggaaaaagcgtgaggaacggaggaaggaaatggaagccaagcgggcagagaaaaaggccaccaaggggcccatgaagctgggagcccggaaactggactgacaaccctaccc

SEQ ID NO: 2986 - DNA, 459 bp, Cricetulus griseus
gcatctcagcgcggtgcaacgcgacttccttcctgcagctgagcgatcggggttgttcaggacaaggaggtgtgaacagactcctgggctggctgatccatcatggcggaaaaagtgaacaacttcccaccattgcccaaattcatcccgctgaagccatgtttctaccaagacttcgaggcagacatccctcctcagcatctcagcttgaccaagcgcctctactacctctggatgttgaacagcgtcacgctggccgtgaacctggtgggctgtctcgcgtggctgatcggaggcgggggagccaccaactttggcctcgcctttctctggctcatcctcttcacaccttgctcctacgtctgctggtttcggcccatttacaaggccttcaagacagacagctccttcagcttcatggccttcttcttcaccttcatggcccagttggtcatcagc

SEQ ID NO: 2987 - DNA, 362 bp, Cricetulus griseus
accatattctgtctcctcctccctctccccttgtggggagtatgtggaggagctgctgacactgggtagtgagaaacagaagcccagggcttgtgtctgagctgagcctggaccacccccactttcagactgggcaaagtgacttcctcacgcattcacacccagtctgcttggatttctatctctagccagagtgtggcagcacatccgttatctggggtgcagcttctgccaacaagacaattgtcctgagtgtttttaatcatgttccgatgttaggtgttggctcctattgtagatccctgagctctgaagagacccattagcaatgccctttgcccaggtcttcacactgagggtta

SEQ ID NO: 2988 - DNA, 463 bp, Cricetulus griseus
tttaagtatagcaacatatacattaaaataaaatgaaaagaagaaaaaaacggcaaaaggaaagattgagggtgataaatgaaattcatactataagtttctgaattgtttcttttttatcattgggcacttaatttctgtggaaaaagtttcacctgtgtaaaagttctggcaactgtttcagaatcaaggctgacaatcaatgattgggtcagtgattattgatttgtttttttccatctctttctcttgtccctggtgaattccagaactggcttgtcagttccctgtagctcaagccaggtgtttgatgaacaacttatctttgtccagcactaaactggcacaaccacaacgaggagtataaaagtttgtttgaatgatgtctacctaccactggtaagacatttacctgagccagttagaagtagtagatatatactgctatgtgatattatcttag

SEQ ID NO: 2989 - DNA, 410 bp, Cricetulus griseus
tatgtgtgacttgctttgtctgtatgtcagtgtaccatgtgcatgtttggtgttttggtggccagatgagggcatgggatccagagttaaaggtacttgtgggctgccatgtgggtgcaggggaattgaacccatgccttctggaagaatagcaagtgctcttaaccactgagccatctttggagctccaaccaagcgtgttttgacaagacttgagacaaaaatgttttgtataatatttattgatttagtcttcccaagacatgagtggcctagataaatttagctaattcttaagagtttttgtttcttaagaacccctgtgcttattatggagccaggagttaaaaagtcatttattgaaaagccttcaagcatgtcacgggatctgaatactttttttcttgtcg

SEQ ID NO: 2990 - DNA, 487 bp, Cricetulus griseus
  misc_feature (287)..(315): n is a, c, g, or t
tgttttcatgccttaggagcagtcctgaaaacttggaaagcctcttatgtgggacccaagatacattttccagtaatgaacctaaaaaaaagatcattctagttgctgaagattttgttactgtgtgcacatggatgcaatgaactgctgttcatttaaaaataccctgctttcagcaagtatggaaaaattaacattcacaagaatacatgttatttaatagtgattaatttcagtttcagtagaatcccaactagatgttataatttatggttttttagacaaannnnnnnnnnnnnnnnnnnnnnnnnnnnnacaaactatattccctggttattctcaataactaaatgttgttctgaacctatagtaaaaactgttccaatatccttgagtcagctcatgcatacttttgtttctgccatcctatgaaagtacacatggctaccaacatgtctattaactgtacttatatattttaacctga

SEQ ID NO: 2991 - DNA, 581 bp, Cricetulus griseus
gcttgcctagagctcttgatcagaacaggaagactcccagaagctgccttcctggcccgcacttacttacccagccaggtctcaagggtagtgaagctgtggagggagaatctctcaaaagtcaaccagaaagcagcagagtcccttgctgaccccacagagtatgaaaaccttttccctggattaaaggaagcctttgttgttgaagaatgggtcaaggagacacatgtggatttgtggccagccaagcagtacccacttgtcacgccaaatgaggagagaaatgtcatggaagaggcaaaaggcttccagccctcaagaaccacagttcatcaggaacctgatgggaaacctgcttctagcccagttatcttggcctcccaacctatccagaaagaagaaaagaacttactagaactagaagtagatttggataatttggaattagacgatattgacacaacagacatcaatctggatgaagatattctggatgactgaacactggatgaagatattctggaggactgaacactgtttgccatttacttcaataacagatcattgagacaattgatcac

SEQ ID NO: 2992 - DNA, 347 bp, Cricetulus griseus
ctctctctcttctctagagagaggggggacgcgaaaaatggataggagataatagtaaagccgggaccaatgcgagaactgcgttgacgtggcacaaatgaaagctggcacacacagccaagaaggaatctactcctgtgaccagaaactacctcaccacaaccgggaatcctgcgtctcaaaccccagtatctttccctcaactccatcttcttcttccgcccggaagcgctttaaccgcctacaggaggagaacccttttgccagccacggcgcacctcaccgcagcgcgcatccgcggaaggctctctttgcggccggaggggcggggcgtaagcgtgtggcgc

SEQ ID NO: 2993 - DNA, 347 bp, Cricetulus griseus; identical to SEQ ID NO: 2992

SEQ ID NO: 2994 - DNA, 525 bp, Cricetulus griseus
cggggacaccaaaaattccaccttctcggatatcttcaaaaaggagcatccggaccgtttcattgagtgctacattgccgagcaaaacatggtgagcattgctgtaggctgcgccacacgcaacaggacagtgcccttctgcagcacttttgcagccttctttacacgggccttcgaccagattcgcatggcagccatctctgagagcaacatcaacctctgtggctcccactgtggtgtgtccattggggaagatgggccctctcagatggccctggaagatctggccatgtttcggtcaattcccatgtcaactgtcttttacccaagtgacggagtggcgacagagaaggcagtggaattagcagccaatacgaagggcatctgtttcatccggaccagccgcccagaaaatgccatcatctacagcaacaatgaggatttccaggttggccaagccaaggtagttctgaagagcaaagatgaccaagtgacggtgattggagctggtgtaaccctgcatga

SEQ ID NO: 2995 - DNA, 536 bp, Cricetulus griseus
cggcctgcgcatggtgccggagcaccgcgccttcggaagcccgttcggcttggaggagccgcagtgggtcccggacaaagagtgtccaagatgtatgcagtgtgatgccaaatttgactttatcaccagaaagcaccactgccgccgctgtgggaagtgcttctgtgacaggtgctgcagccagaaggtgccacttcggcgcatgtgctttgtggacccagtgcgccagtgtgccgagtgtgccctggtgtctcaccgcgaggctgagttttacgacaagcagctcaaggtgctcctgagtggagctaccttccttgttacttttggggactcatagaagcctgaaaccatggtttgtcgtctctccaacaaccagagatgcttgattctggacggggacagccatcatgaaattgagattgcgcatgtctgtactgtgcagattctcacagaaggcttcactcctggagcaggcagcactcgagccacaggcatgttcctgcagtacacagtgccaggggcagaggctgcaacac

SEQ ID NO: 2996 - DNA, 579 bp, Cricetulus griseus
tattcacctactggattgccgcagtctctaagatgaccaaaataaagtccgttccggaggagtctgaggcgcaggcggagggctgcagcgaggagcgcacgtacgaggagctgctggtcaacctgaaccccatcgcgcagccgctggcgtcccgccgcctgacgcgcaagctctacaagtgcatcaagaaggccgtgaagcagaagcagattcggcgtggggtgaaggaggttcagaaatttgtcaacaaaggcgagaaaggaatcatggttttggcaggagacacattgccaattgaggtatactgccatctaccagttatgtgcgaggaccagaatttgccctatgtctacattccctctaagacggacttgggtgcagctacaggctctaagcgtcccacctgtgtgatcatggtgaagccccatgaggaatatcaggagatctatgacaagtgcctggaggaggtgcaggctctgccaacacctctgtgagagacttgagctgcagcctattccaagagctgctgggctggctgcaggcggctgcccaccctaacatcatctccccaatttcctg

SEQ ID NO: 2997 - DNA, 541 bp, Cricetulus griseus
cattgacctggaagtggaggagaaatgtgcactgatggagcaggtagctcaccagaccatggtgatgcagttcattctggagctggccaagagtctgaaggtcgatccccgtgcctgcttcaggcagttcttcaccaagatcaagaccgccgaccaacagtacatggagggcttcaaatacgaactggaggcctttaaggagcgtgtgcggggccgtgccaagctgcgcatagagaaggccatgaaggagtacgaggaggaggagcgcaagaagaggctgggccctggtggcctggaccccgtggaggtctatgagtccctgcctgaggaactgcagaagtgctttgatgtgaaggacgtgcaaatgctgcaagatgccatcagcaagatggatcccactgatgccaagtttcacatgcagcgttgcatcgattctgggctctgggtccccaactccaagtctggtgaggccaatgagggggaggaggcgggccccggggacccattgctggaagccgtccccaaagcgggcaacgagaaa

SEQ ID NO: 2998 - DNA, 522 bp, Cricetulus griseus
cttcccaatcatcctcaagctgggaagtcaatcttcgagggagtggggtttgcttaagatgagtggctcacaccctgctcagtgtggtaatgagctgtaacccttcacacacatgtaacccatacacatgctggatgtctcagcagatagtacatggacctgtttgggaaatgttgactcctagggacttttgtgctccactgtttctggtagacagagacatacccaagattggctttaacttctcattatcctgtcaaaagacagattgaatttgagcagagttcaacagaaaagaggcaagccagaggcggcttctgtgcagcaactggctcaacttctcaccctctcactccccgtgggctgaggaagagtggggatctatactttgggaccactttggaaccatattcagatgagaggggagactgtccttaccaccgccatcataggtgaatgttacaacgcctctatgcccatgaatagatttcctttctttctttggatgatgtccactgcata

SEQ ID NO: 2999 - DNA, 533 bp, Cricetulus griseus
caggaaaagtgtggacttcctaggctcagcatcaatagagaggacaggcttccatatgtctgaggtcacctttgggggctcagatgagccaggagaagcatgtttccgtgcctcggggaagacactaggcttctgagactctgtaatgaaggaggactcaggagaaccacgagaacttttctgggactcagagaaatcaagtgaagcaggagagcttttccgctggtcaggagaaagcttccgaaggtctggggaccctgaaggcttcctgagctctggagatcctgctggacttcggatctcgggggagagaggcggacctggtcttcgaagctcaggaggcacagggggcactgccttccagtgttcaggtggcaaagcaagaggcgtctttcggagctcagggggaccagacttccatgactctggggatgtggggggcgttttccaggaaccagatgaaactgaagacttccaggatgcagaggaaacaggtggagctgccttccaaggcccaggcgatacagatggta

SEQ ID NO: 3000 - DNA, 569 bp, Cricetulus griseus
ggttctatttgctgtctgaagtccagagtcacaattgccctgcacacacagtagaccagctgagtcattggggcggtgcaagtgtaaaaaagcagggcgggcagggactcacactcagctaccttcacctgtcccacggctctgggtgctgtaaccacagagcagtcaaagcacctgcactgagccctggtggacagcagaggacactggaataattttgcccagaaaaggaaaaggcaggcacttctgtccctaaaaaaagcaacggaggagcctttggcctttcgctgctgcagtcaagtagggggtctgattgtcaaattctctggccccctttcctgctgactcgcagctcttctgatgatgtcatacaaaattggtcttctctcagtggttccgggccagcaggtgacagtatgccaccttctcaaagaggaggactctttggtctggacagagagtctctggaaatgagggaggaaaaaagatcatgcaaactccctgtctgaattcagagggactctacttcagccatctctaatctgctttaattaagcagttcctactat

SEQ ID NO: 3001 - DNA, 335 bp, Cricetulus griseus
  misc_feature (175)..(194): n is a, c, g, or t
ggacaaaaggccaggaagaggtactaaggctctggcttatcagagcccagtgtgtgtggtagtgggtggtaaggctcttggatgtctggtcttgtgttttggaataggtttgtattgtattctattcttcatcaaatcttaatcaaataatgtggcttaattctcctggatatgnnnnnnnnnnnnnnnnnnnngggctggggggtaaacccaaggctttgggcttgctaaatacatgttctaccattgaaaactgtctccttccagggtatattttttatctatggagtatagtttggttattttctttttttaaaaatattttgaaaccggtt

SEQ ID NO: 3002 - DNA, 542 bp, Cricetulus griseus
ggcccggaaacagaagggtgcagagactgaactggtcaaattcttgcctgcagttggtgatgagaatttcaagaggctgtccagtcgtgctcggaagagggcagccaagaggaggtccgggtccgttgaagtccctaagccaaataagtctccagggatcaaaacgttgcctggagagttagcaaaaggagctgtccaggctcggggtaagaagcgcccagcaccaacttctaacagtgatggggatgaggaggaagactctgaggaagatggcgtggcaaaccagggggacctgtggggctctgaggacagtgatgctgacatggtggatgactatggagctgactcagactcagaggatgaggaggaaaagttgttgcccattgaaagagctgctctgaagcagaaggcccgggaagctgctgctgggggccagtggagtgaagaggagactgatgaggaggaagatggtccccctgcgccccgtccctcaaaggatgatgaggcggaggggggtttgcagattaatgtggacgatgagg

SEQ ID NO: 3003 - DNA, 483 bp, Cricetulus griseus
tattgacttagcggcccggtattgaggggtcagagagatccggaccagtccgcggagcagcctagtgggctccggagaaaagccaacatgttaaggatacctgtaaaaagggccataatagccctttctaagtctgctaaaggatatgttcgaacaactgccacagcagcaagtaacttgattgaagtatttgttgatggtcagtctgtcatggtggaaccaggaactactgtcttgcaggcttgcgagaaggttggcattcagatccctcggttctgttaccatgaaaggttgtctgttgctgggaactgcaggatgtgcctggtggaaattgagaaagctccaaaggttgtagctgcttgtgctatgcctgttatgaagggctggaatatcctgactaactcggaaaaatctaagaaagccagagaaggtgtgatggagttcttattagcaaatcacccattggactgtcctatttgtgac

SEQ ID NO: 3004 - DNA, 218 bp, Cricetulus griseus
ggggatactggtgtgttgctgaaggaagctagagaagcgccccaggacatcaagatggcaatttatacatatggtcagctgattccttctttaggggatgcaaaattcagaccaatgatctgccgaaatcattgaaaaacagcttgaatattataaaaaaccgtaagagacacagcaatagctgattcaccaactttacttgctcatcctttctatag

SEQ ID NO: 3005 - DNA, 407 bp, Cricetulus griseus
  misc_feature (175)..(201): n is a, c, g, or t
  misc_feature (203)..(215): n is a, c, g, or t
  misc_feature (217)..(240): n is a, c, g, or t
  misc_feature (382)..(401): n is a, c, g, or t
taacatgtaaaaagacaagtatgatagtggctactgtaatcgaagccagcactaaggtgatggagatgggtaaatctatggagtttactggcaagtcagcttaacctacttggcaagctttgagccagtctctttttggtttggttttggtttttcaagacatgttttcagcacnnnnnnnnnnnnnnnnnnnnnnnnnnnannnnnnnnnnnnntnnnnnnnnnnnnnnnnnnnnnnnntgccaccaccacctggccagactgtctcaagcaaacaaggtagatggcatctaaggaacaccagctgaagttgacgcctggcttccacatgcacaagcagcatgcatgatgggacatgtgcgcacacacacatgaactcaannnnnnnnnnnnnnnnnnnntatgca

SEQ ID NO: 3006 - DNA, 527 bp, Cricetulus griseus
tctatgatgtcttcattctttaagcttgggtattatgagtgataatttttagccttcctttgtgggaccatttgacccagtccttaaaacttactcattttgaattgagtttcaaactttgaaagtgcaaggatttaattttagagggtataatatcctaactctccttgtagatttctatacactggcagcagaaagccattgacttccctttccctatcccactgttgatttaaagggagtatgatattccacttgataaagtaggtttggaacattattttattgctatcacttgcatgtttttctcctccatggtttttcttgggtaaccttttttcattattcatactctggaatctataattgcagttgaggtttctggtgactgaaagtactgtactcaattacagggtgcagctatttgcacagaaaggagccattatgttaaagtttcagaagttggtaaagaatcaggttgtaatgtctgtcatgtctgaatgcatttctgtaatagatatgcgtca

SEQ ID NO: 3007 - DNA, 192 bp, Cricetulus griseus
atgaacttcctgtgacataaatcctactgcaaccccactggactctcctgagagatgtgctccatctctgtgcgccatgggcctctgtttccacatgtacaagaagcctggataaaatctaccatgtaggattgaaattactagcatagtgcttggttattggtggttattaatatgatctgcaacttctcc

SEQ ID NO: 3008 - DNA, 363 bp, Cricetulus griseus
gtgctcagttactgaaatttgtgtggccctcttcatcactgagttcctctgttgtcccaaaggctgggactaggacacagcatcccaggctggcaagaacttgccttgccctctgtctttgggtaccttgttgcttttagcttgtgccctgcctcactctgccctcccggtgcttacttagtatgtgcacatcccatgtcagctcctgtgactgattcagttgtctcaaatgatataggaacaggatctgctgatgggatctgaggcctttcccgaagtctggtacctgccctatggtgcacgttcaccaaagagtgggctccctttttcttcctttcctttctccttcctttccccattcag

SEQ ID NO: 3009 - DNA, 539 bp, Cricetulus griseus
atcttcagagtgagccctgctacgtgtcagcctctgagataaaatttgacagccaggaagatctgtggaccaaaatcattctagctcgagagaagaaggaggaatcagaactgaagatttcttctagtcccccagaagactctctgatcagccccagctttaattataacttagagaccaacagcctaaactctgatgtcagcagcgagtcttcagacagttctgaggaactttcacccacgaccaaatttacctctgatcccattggtgaagtcttagtcagttcaggaaatctgagctcctccgtcatttccacacctccttcttctccagaagtgaacagggaatcttctcaactatggggctgtgggccaagagacctaccctcaccagggaaggttcgaagtggaacttctgggaagtctggtgacaagggtagtggcgatgcctccccagatggcaggaggagggtacatcgatgccacttcaacggctgcaggaaagtttacactaaaagctcccacttgaaagcacatcaa

SEQ ID NO: 3010 - DNA, 235 bp, Cricetulus griseus
aaagcgatgattatttctcttgttggtagatcttataacccttcaaacctgtttgtttttctttgaggatttatatcattttaaatgctctttcattatctttttttttttaacctaaaggaataggaaaatactgtttggtttttgggttttttgttgttgggggttttgttttgttttaagttatatcttaaccttggtatatgtctttcctttggataatgaggcttaaaag

SEQ ID NO: 3011 - DNA, 483 bp, Cricetulus griseus
  misc_feature (430)..(430): n is a, c, g, or t
cagcacggacacggacacggacactcccacagcggccagggccccatcctctctgtggggctctgggtcctcagtgggattgtcgccttcctggtggtggagaagtttgtgaggcacgtgaaaggcggacacggacacagtcacggacacggggacggccacacacacggaagccatgctcatgggagacaggagtgtccttcaaaagaaaagcccagctcagaggaagaagaaaaggaaacgggggttttgcggaaaaggagagggggaaacgcagggtcgagggatgggccagcaaaacctcaggaccctgaagaagaaaaaccaggttcagacctgcgtgtgtctgggtacctgaacctggctgctgacctggcgcacaacttcacggacggcttggccattggtgcttcctttcgtgggggccgangcctggggatcctgaccacaatgacagtcctgctgcatgaagtgcctcatgag

SEQ ID NO: 3012 - DNA, 567 bp, Cricetulus griseus
ggtagagggttgagctagctctgaaacttgtagtaaatttcttttttaaaaaaatttatttcatatgtataagtttcacatgtatgtatgtatgtactatgtatatatctatccatgtatgtgcacttgtgtgactgatgtcttcagaagccagaccatcagatcttctgaactggagttaatgtacagttgtgaaccaacattggcatatgctgggaatttaaccgaggtccctacaagagtagccagtgctcttaacccctgagctgtctttctagcctctagataagattttgatatgccataaaaggaagagaaagatagaaacatgataaaagcagaggacattatatgattgataatgtaaaaattaataatatggctcccatttaatgctgtgtttggattttttaatgttaggaactttaatgtttttcaatttattaggaaacctattaaacataacataaaaagccaggtctatgtgttgctcagtcatccttatgacttttgaaatttttgatgtgcaaaattgtatataattgaaaatgtcttagtgtttgagca

SEQ ID NO: 3013 - DNA, 296 bp, Cricetulus griseus
  misc_feature (6)..(29): n is a, c, g, or t
agggcnnnnnnnnnnnnnnnnnnnnnnnnaaaaaagtttgggttttccggaaccccctttggaaaataatgctaccccaaaattaaaaaaaataccctgcctttgctccggataagggggttaaacagtttggcccaccccccctggggccacccaggggcccaaggggggggccctgtctaaaaaaattaaatttttttattaaaacacaaccaaaaaagccacttggcccattgaaatagggcacatgcgggctgacccccaaaggggggggggcccttggaaaaaaaacccct

SEQ ID NO: 3014 - DNA, 457 bp, Cricetulus griseus
  misc_feature (351)..(351): n is a, c, g, or t
cctccatttgggatgatataaacaatgttggactcagaggccactacttgtgctctgtgtatggggcacggctgatggtaccagctggcaaaggactcatcgtggttgtctcttcccctggggggctgcagcatatgttcaatgtcccttatggtgtgggcaaaactgcgtgtgacagactggctgctgactgtgcccatgagctacggtgtcatggagtcagctatgtgtctctgtggccagggttggtgcaaacagaactggtgaaggaatttatggcaaaagaggatcaacctgaggattctttgtttaagaaggccaaaccaaatttctcaaaggcagaaagcccanaaatgagtggcaagtgtgtggtggccttggcaacagaccccaagatcctaagcttgagtgggaaggtgctaccatcctgtgaccttgctcggcgctatggccttca

SEQ ID NO: 3015 - DNA, 497 bp, Cricetulus griseus
aggtgctggtctaggcccatgcagattatcttgggagctcataggcagcactggggagccagtgagggatgtcaggagttgctcactgtggggtcatcacagctctgcagcacttcagcgaaagcaccctggagtacctggccaacctggatcaagccccagaccccacagtcaggaaggacacctttgctgctgacatctttggagcctatgacattcttttccaccagtggctgccaagccgagatgccaagctccggcttgcagtggtggcagctctgggtcccatgagccacctgcttcccagtgagaagttggaagaacagctccctaagctcctccctgcggtacttggcctctacaagaagcatgcggagacctttctgatatccaaggtatttgtagggagggggagggcacagcaacaccagaacctctcagatcagaccctgcgggagcaaccctaacttaaaattttatgttgggttatgaggcaa

SEQ ID NO: 3016 - DNA, 401 bp, Cricetulus griseus
cttagggtcctacccagcaccagtgagagaaactctggagccatcatatgctctttaacgtgagatcactgcgttggtactataatgagctctttttaacgctagctttcatttagactggttttgtcgacagccacttaacctcctttagtaccatgaagctggactcttaaatggaggagttctgggtcactctacttcacgcattggtgtaaaaagtcacagcttctacttgcttcatctggacatcagactgctgcgtctaagaaaacagtagtaccagttccccacagctagtgggctggaggctcataatggatggctcattggttaaaagcactgtggctcttccagaggatcagcattcgattccccagcactcacatggtggcttacaacca

SEQ ID NO: 3017 - DNA, 471 bp, Cricetulus griseus
tcccaacagtccacagtcccaccccacgcaccccatcccctcttctctggcgctccagtcctgggccttgggcctgaacaactggaaaaggtctggtggctggggaggagtgccagcaatagttcatagtaaaaaatctgtgggctctcaaagctaattttttactaaagtttttatacagcctcaaattgttttattaaaaaaaagattaaaaaacggggatgcttaacagcagtttgtacaagctcctagtgttgattccatggaactgatggctttgctcattttgacccctcccttcttttcctaatgggttaaattctggattacatagaggcttcctttgcctttttctagcagaacaccgtccatccatctgcatctctgtcccatgactcaggggcacccactctgctttgattctcctcctgaaagaaaccattttgagcatgccttttcttaatgtctgag

SEQ ID NO: 3018 - DNA, 137 bp, Cricetulus griseus
aataaattctaattgagaatttgttgcattttcagcaaattttaaaacatttttaggttttacagagattttaacctttaaacaacagatcttaaaacaacaacaacaacaggtgaatacgagtgagtctaacaaag

SEQ ID NO: 3019 - DNA, 445 bp, Cricetulus griseus
atggaggctgaggatgagtggtgatggggtcgggctctgcctctggctttagctctggctctggcacggactcccggtctgggtctggtaacctagtgacccgacacgatttttcgactctccggtggggtcctgcctgcgtcccggcagctgttttggagcgcttcaaagaagggagggcgttcgagtgcgtggggtcgggtctgtgaagccaccgcctcctcccagcgatccagtccgtggccggcctcttccatgcagttgaaataagttgacaaccattagcccgggttgcaactgcaggtggcactggaaactgactggttcctggacatgcccagtagaaggaggggtcctagtcggcagcagctaagccgttcagctttaccttctatgcagactttggttggtggcggctgtggcaatggaacaggcttgagaaaca

SEQ ID NO: 3020 - DNA, 501 bp, Cricetulus griseus
gctcccgtttctgctctttgtattaatgagttaacaggagacattgtgtcctgtgcaggcacgtacatccatgtgtggagcatcaatggcaaccccatcgtgagtgtgaacacattcactggcaggagtcaacagatcgtctgctgctgcgtgtccgagatgaatgaatgggacacacagaatgtcatcgtgacaggacactcagatggagtggtccggttctggaggatggaatttcttcaagttcctgaaacaccagctcctgagcctgtggaagagctggaaatgcaagaaggctgtcctgaagcacagatagggcagcaagcccaagatgaagacagcactgattctgaaacagaggagccgagcatcagccaggatccgaaggaaccacccagccagcccagcagcaccagccacaggccccgggcagcctcctgcagagccactgccacatggtgtactgacagcggctctgatgactccaggcgctggtcggac

SEQ ID NO: 3021 - DNA, 167 bp, Cricetulus griseus
ggaaatattgacaatcaataagcctgatttcaggggtctcttgcaagtagtcacagctgttctgatgaagatactggctttttggcttaaagaacggtcttctacaacacatgttccttatccaggtttcacctttgttagcacagcttcatgctgtatgtgtgaat

SEQ ID NO: 3022 - DNA, 445 bp, Cricetulus griseus
atatcagtggccttgtggctgccaaggtgatcccgtcacctttcaagtatgcggacattgtcaccaccaccactcacaagactcttcgaggagccaggtcaggactcatcttttatcggaagggagtgcggaccatagaccccaagactggccaagagatcccttacacatttgaggaccgaatcaactttgctgtgttcccatccttacaggggggcccccacaaccatgccattgctgcagtagctgtggccctcaagcaggcctgcacccccatgttccgggagtatgccctacaggtgctgaagaatgctcaggccatggctgatgccctgctaaagagaggctactcactggtgtctggtggcactgacacccacctggtgctggtggacctgcgacccaagggcctggatggagcccgagctgagcgggtgttggagct

SEQ ID NO: 3023 - DNA, 550 bp, Cricetulus griseus
gggttgttgtggttggagatcagagtgctggaaagacaagtgtgctggaaatgattgcccaggcacggatattcccacgaggatccggggagatgatgacacgttctcccgtgaaggtgactctcagtgaaggtcctcatcatgtggccttgtttaaagatagctctcgggagtttgatcttaccaaagaagaagatctcgcggcattaagacatgaaatcgaactccgaatgaggaaaaatgtgaaagaaggttgtactgttagccctgagaccatatctttaaatgtcaaaggccctgggctgcagaggatggtgctcgtggacctgccgggcgtgatcaatactgtgacatcaggcatggctcctgacacaaaggaaatgattttcagtatcagcaaagcgtacatgcagaatcctaacgccatcatcctgtgtattcaagatggctctgtagatgctgagagaagtattgttacagacttggtcagtcaaatggatcctcatggaagaagaaccatatttgttttgaccaaagtagacctggcaga

SEQ ID NO: 3024 - DNA, 540 bp, Cricetulus griseus
cggcgccaccctgaggatcccccctcccgccgccgccccttcttctctgtgcagcagatagaagagctgaagcagcagcacactggagcccctggcctaccttccagtgcaccaggaccccaggtcccccaagagccagcacctttccagtcacctgagactcccccactactctgtcctgatgccctaagtggtgccacaatcatctaccagcaaggagctgaggagtccactgcgatggccactcagacagccttggatctgctgctgaacatgagctcccagcgggagctaggggccacagccctgcaggtggctgtggtgaagtcagagggcatggaggcggagttgacatctactggtaggcagccttcccctgaagataccacgccacaggtggtgacacttcatgtgggagagccagggagcagcttggcagccgagagccagctaggcccctctgacctacagcagattgccttgccatctggatcatttggtggggccagctacagtgtcatcacagcaccccctctggaa

SEQ ID NO: 3025 - DNA, 406 bp, Cricetulus griseus
gggtcgagaggacgaggtgccgctgccgccggcccccggagcccagccctttcctagcccggtccagttccagctgccacctcctgaccccgccgcagaccccatcgttaccatgaatcctgccgtcttcctgtgtttacccgacctcagatgctccttgctgctgctggtaacttcaatttttacacctataacagcagaaataacaagtcttgattcagagaatatagatgaaattttaaataatgctgatgttgctttagtaaatttttatgcagactggtgtcgtttcagccagatgttgcatccaatttttgaggaagcatctgatgtcattaaggaagaatatccagataaaaatcaagtagtgtttgccagagttgattgtgatcagcactctgatata

SEQ ID NO: 3026 - DNA, 463 bp, Cricetulus griseus
gctcctgtctgtgaaagacttcctggttctcccaccgttttttctcgtctttttatttccagaagccaatgcgagacattggctctgattaagcgacggctcgtgacccggggtgatggagatcacccctgcaaggggtggactgaaccgagcacacctacaatgcaggaatctacaggagttcctagggggcctgagccccggggtgcttgaccgcttgtatgggcacccagccacttgcctggctgtcttcagggagctcccttctttggctaagaattgggtgatgcggatgctttttctggagcagcctttgccacaggctgcggtggccctgtgggtgaagaaagagttcagcaaggctcaggaggaaagcacaggactgctcagtggtctccgaatttggcacacccagctgctccctggtggactccagggcctcatcctcaatcccatcttccgc

SEQ ID NO: 3027 - DNA, 343 bp, Cricetulus griseus
  misc_feature (50)..(68): n is a, c, g, or t
  misc_feature (79)..(101): n is a, c, g, or t
ttgggtagactgctgttagtccaactgtgaaaacttggatccccagaccnnnnnnnnnnnnnnnnnnngcatgttggcnnnnnnnnnnnnnnnnnnnnnnngggtagagacatgaaatccccagcaagccagctaaccagactagcagtatcagcaagctctagattcagtgataaccctgtctcaaggaataaggtagggagagatagaggaaaacaactgtgaggttggaagaaaggaacgggaaagtaatgccattctattttaattaaaatatatgaaagttgtatttaacaactgtgaaaatctaaaaccaaaatagacttttgactttaaaagcatt

SEQ ID NO: 3028 - DNA, 513 bp, Cricetulus griseus
tggataaagagagggaggggaggggctgaactgtgaagattgtggccccagaaccatgtctactcgggagtcctttaacccggaaagttatgaattggacaagagcttccgcctaaccaggtttactgaactgaaaggcacaggctgcaaagtgccccaagatgtcctacagaaattgctggagtctttacaagagaaccacttccaagaagatgagcagtttctgggagctgttatgccacggcttggcattgggatggatacttgcgtcattcctttgaggcatggtggtctttccttggttcaaaccacagattacatttatcctatcgtcgatgacccttacatgatgggcaggatagcatgtgctaatgttctcagtgacctctatgcaatgggcgtcacagaatgtgacaatatgctgatgctccttggagtcagtaataaaatgactgacagggaaagggataaagtgataccgctaattatacagggttttaaagatgcggcaga

SEQ ID NO: 3029 - DNA, 326 bp, Cricetulus griseus
tggtcttttcttgcgctatcgagtggaagccctaaccctgcgtggcatcaatagcttccgccagtacaagtacgatttggtggcagtgggcaaggctctggagggcatgttttgtaagctcaaccacctcctggagcgcctgcgccagtcattcttcttctacctgctgccggccctctcccgctttgtctccattgggctctacatgcctgccatgggcttcttgctcctggtccttggacttaaggccctggagctgtggatgcagttacatgatgctggagtgagccctgaggaggccgggaaggctcctggccctgggtctt

SEQ ID NO: 3030 - DNA, 487 bp, Cricetulus griseus
tcttggccccggtacccctgtccgcgagtgctcaatgtgaaccctggtaaagagaaaaaaagcctttaccgataccgcggggccccccctcaaacgctcgctcgtggcttgcccgtttatactctgtgacggggtttgagtgtgcacgctgtacccccgcacgcacgcacgctgcccttggccaccgcggccgggagctcgccgggtcgggtccgtcccgccctcagtgagaaaagttgccttctctagcgatccgaggaaagggcgtgctatgtccggatctggtttgtgttgtggggttccctcccgcgttgggtcccctgacccgaccggctgcccgccccgaccgcccgattgtccccgcgcggttggcggggtaaccgagcgtctgtgcctttgttgctctcgttttcgcctatcgcggcccgcgcctcctcgctccgagtccgaggaggaatcacgcggggcagagctgtcgtcagtcacg

SEQ ID NO: 3031 - DNA, 438 bp, Cricetulus griseus
ggagtcattcatctaaccaagctgagaaacctgtccagcttggatctgcgccatatcaccgaactggataatgaaaccgtgatggagattgtgaggaggtgcaagaacctgagctctctgaacctctgtctgaactggatcataaacgacaggtgtgtggaggtcattgccaaggagggacaaaacctgaaagagctgtacttggtgtcctgtaaaatcaccgattatgcactgatcgccattgggcgatacagcgtgaccatagagacggtggatgttggatggtgtaaagaaatcacagatcaaggagccaccctgattgcacaaagcagcaaatccctgagatacttggggctgatgagatgtgataaagtcaacgaagtgaccgtggagcagctggtacagcagcacccccacatcactttcagcactgttctg

SEQ ID NO: 3032 - DNA, 467 bp, Cricetulus griseus
  misc_feature (285)..(313): n is a, c, g, or t
gattaacagccctcccccatctaaaaagacaaagggaagactgccctgtgtctagatagaacacggcaggaacagggccaaggttgaacttctgtcccaccattagctgggttttaggtgtctgtttgcagggatctgggccctcaacactcttaaagctttgctgaaatgcctcaggtatcagtcctctccaggggaaatgattttgggcagaagccaggcaatggagtgccagctgtttgattagtcccagagttttgtattccctccttgtagctcttaatnnnnnnnnnnnnnnnnnnnnnnnnnnnnnctcagatgatgagccttcacaaagttccagcttgttggcaaggggaagcattctgttctacttgaagttttgaagtttcatttgaaatttaagacctctgggggccctggcccctagtggggttgtggagctttgggttcgcctctcccctgcc

SEQ ID NO: 3033 - DNA, 413 bp, Cricetulus griseus
gcggggaaaaccagacagatggatgttgaatcctcctcaaggaggaagtaaactaacacagtgtgccaccatgacgtgatgagcactgaatttaaaagaaatgtgaccagagcaaggccagttactcgtctcacacccaacccacgggtgtcagggacacttgtcaccgttccttcatggtgctgtcatttagttaagtgctcctatcagacgcaaggaattgctcacagtgcagcctcctcgtgtgtgggggtggtgggagtggtcctctgagcatggtgcttctgctatgcaccttgtccagtgctataagtaatttatgaatgaacccttcatttgaggaaaacattatagactagacccaaatgtaggagatagggaaggcttaagaaaagaataaaaggccgggcgat

SEQ ID NO: 3034 - DNA, 392 bp, Cricetulus griseus
tacctaaggggaagagtaagaaaggaaggccagcgcttcagagatgcattggaggatcacaatcggttctatgctgccaaagattagacacattcaacaataaacagataggaggggccaagaggaacacactttttctgcagtgaaattccttttcagttctaaactgcttctatgcagcccaagttagagtcaaccatttgtaaatcgtgtcctgtcgtgacccatctcctgtccagtccacttccccctacctgagagcctggaaatgaacccaatgggacagtgaagatggaggaggcttggctgcctggcagatgcagaatctgtctgtctggacatgaaggaaaacagagattggaaggaggagcagggcgctgttaaccaccctc

SEQ ID NO: 3035 - DNA, 307 bp, Cricetulus griseus
  misc_feature (258)..(278): n is a, c, g, or t
gcgccccacccctgcaagtggtctccagtgtgtggtcctgtctcatccaaggtcacaaaaccctatcactccctgtactggtagccccagctgtctgtcctcccctacctcctcatgactgtcctggttaaatgggcgtcaaggatgactcccatggtactccagccctccactgtgctgatgacaggtgtgtggaagtcaagggcaccccccggggatagatcacacactaggagtgagcacagtctacggagtccnnnnnnnnnnnnnnnnnnnnnaaggctatcttgcttatcctgtgagattc

SEQ ID NO: 3036 - DNA, 582 bp, Cricetulus griseus
  misc_feature (390)..(427): n is a, c, g, or t
cagcctgctggaagagacactccactttgaccatgctgtcagaatggcacctgtaatcacagaggaaaccaccctccatctagaggatatcattaaacagaggatacgagatcaggcttgggatgatgtagaacgaaaagaaaagcccaaagaggatgcgtatgaatataagaagcgcctgacattagatcatgagaagagtaagctgagccttgctgagatttatgagcaggagtatatcaaactcaaccagcaaaaaaccgaagaagaagaaaatccagagcatgtagaaattgagaagatgatggattctctcttcctacaattggatgccctatcaaacttccacttcatccccaaaccgcctgttcctgaaattaaagtggtatnnnnnnnnnnnnnnnnnnnnnnnnnnnnnnnnnnnnnngtgagtgtcagtgatgcagccctcctggccccagaggaaatcaaggagaaaaataaagctggagatataaaaacagctgctgagaaaacagctacagacaagaaacgggaacggaggaaaaagaaatatcagaagcatttgaaaataaaggagaa

SEQ ID NO: 3037 - DNA, 383 bp, Cricetulus griseus
tctacaaacataacctgagggcaaagggtctctgctgctttcgttctttctaagtaggcatttagattattcctgtaggctttctattttttgctttattgctctaatgctgctagttttagtactgtaggtggtatgtctttattagcataagaaaaaactttcacatgagcttttacatactctgggtgggggtggtaagggatgggtgggcagccctggccctttaggacatttcctctatagtgttagctttcatcagtcaactgctgccgctttttaaggaccctgaagcttgtcctgttaaaatctttgggaaatattaagctcataattaaagtttttggggtaggttttgtgtggtgaaacaaatgggcggtctt

SEQ ID NO: 3038 - DNA, 304 bp, Cricetulus griseus
  misc_feature (90)..(103): n is a, c, g, or t
  misc_feature (105)..(120): n is a, c, g, or t
ttattcttgagctgggtatggtggtgtatacctttaatcccagttctcaggaggtacaagcaggtggctctctgtgaggctgaggccaannnnnnnnnnnnnntnnnnnnnnnnnnnnnncagggctatgtagagatgccctgctcccatctatctgtctgtctgtgtatctgtctatcatctattcatttttggagggttaggggagatggttcattgagtaaagcacttgtcacataaacatgaagccctgagtccagacccccccaaacctactaacgctggtagtacagttttgtaatcc

SEQ ID NO: 3039 - DNA, 434 bp, Cricetulus griseus
  misc_feature (68)..(94): n is a, c, g, or t
ggaatatctccatctcaatgacatgaaggaggcagtacagtgtgtccaggagctggcttcaccctccnnnnnnnnnnnnnnnnnnnnnnnnnnnattgagtccacgctggaacgtatttttattgctcgtgaacatatggggcgactggtacaccagctgctctgcgcagggcacctctccactgcccagtattaccaagggctgtatgaaacactagaattagctgaggacatggaaattgacatccctcatgtatggctttacctggcagaactgataacacccattctccatgaagatggggtgcccatgggagagctcttcagggaaattacgaagcctctgagacccatgggcaaagctacttctttgttgctggagatcctgggtctcctatgcaagagcatgggtcccaaaaaggtgggaatgctgt

SEQ ID NO: 3040 - DNA, 196 bp, Cricetulus griseus
tcagggaaaatttatttattgtttactcagggtttattcagctgatgtgcaggctaacccttcactggcttccttgggggatgtgatccccattgtcagggagtcccacccccatgctgtgtaggttctaaacctaacacagcttctgggtgtgctaaaataatatccaaaccctgttggattgttgggggtgtag

SEQ ID NO: 3041 - DNA, 300 bp, Cricetulus griseus
  misc_feature (28)..(63): n is a, c, g, or t
ggcctccatcttccgcgccttcgagatnnnnnnnnnnnnnnnnnnnnnnnnnnnnnnnnnnnngcctccgggaccgggaccgggaagccgcgggttgagcggcaccgtggtgctggagctgcgctgcttgctgcccgagggcgcctcggagctgcggcttgactcacacagctgcctggaggtgacggcggcgactctgcggcgggggcagcccgaataccatcagccactctcggagaccgcgccgtttcacacgcatcccttctcgcactatggccaggccttgtgcgtggtcttccc

SEQ ID NO: 3042 - DNA, 370 bp, Cricetulus griseus
ctatttgacaattattagtgtgaccaaagtattaggcagttttcatacattttccaccttgtacaaaattctgaattcatttttcttccaggttggcacagagctgtcgatgggaaagccctctgcgtattattttggttgttctgacttagcaaagtgattttgaataatacttggtgttcttttataacccacttttgattggtaactgttttctgtattgttgcaggcggatcaaatgagtgagtcttggtggagatttaagtatttattgctacagcttagttgatgaaattgctgttcttgtaaagccatatgttctgttaggtcctgcttgctcagagcgtttctttctacaggtgaaacacta

SEQ ID NO: 3043 - DNA, 480 bp, Cricetulus griseus
gaagctggcgtgaccttcacatagacaggtcaccactaacttctttaccacccacttcacctataacttctgcagacctgtcacaagtttacatgtaaccacagaaatctgttcttgtgactcattagctaatggacactgttctcagcaagggaggctgaatcagccccttaagagagattaggttagaggatcatgtacaagctgatgtgtaaaagtaggaatcacgtgtatcagaaagccggttaggtactttttctacataaagtccctgcctgcctcctggctgtgctgccttgttctaagcccttcccaacagggtcagtgctgttgccagggaaggcagtcaagagcactcatccacttctggacaagtctgggaacttggacacataaaagaataggtgtgtggcattttccaaaggtggcatggcccttaaatgagttattgctattttacatctacaaaataactcagtt

SEQ ID NO: 3044 - DNA, 515 bp, Cricetulus griseus
gtggctctcataggtagtccagtggacctcacttacagatacaaccatctaggagattctcctaaaattctgcaatacattgcttcggggaaccatcttttcagccaggtcttaaaggaagctaaaaaaccaatggtggtgttaggcagttctgcactccagagaaatgatggagcagcaattcttgcagctgtgtccaatattgcacaaatgattcgagtgacgagcggtgtttctgaagactggaaagttatgaatatcctgcataggattgcaagccaggtagctgctttggaccttggctataaacctgggatagacgcaattaggaagaaccctcccaaagtgctgtttcttctgggagcagatggaggttgtgtcacacgacaggacttgccaaaggattgtttcattatttaccaaagccatcatggtgatgtgggtgctcccatagctgatgttattctcccaggggctgcttacacagaaaagtctgctacttatgtcaatactga

SEQ ID NO: 3045 - DNA, 530 bp, Cricetulus griseus
gtgattgtttctctttttgagaagtattacaatgcaaaatatggtggtgttataagatgcaaaatattagttgaggcaggagagataggttagtggttaagaacctttcctgctctcacagaggacctgggttcacaacaattaagcttttctgagatgatttgcatattgtgacattagccacagtgcagtttcctcaaaccatctttcaaggcagcttgccagtgcctaagaagcagcctctctctgtttcagatatcagagatgggatcagctgctctcttgttgtgggtactgctgctctgggttccaggtgagaggatgcagtgttgggagtatctattgtagccaccattgttttttatgctttgatgtcatgatcattaaaattattgcacttcattagttttaatttttcttttattttataactcctcagaatttagctcatgagtactgttgcagattcctcattcatgatagttttacactggcctgctttcagtatacatgtgacaggaatatgtgtt

SEQ ID NO: 3046 - DNA, 444 bp, Cricetulus griseus
gcagccgctgattcaggaacatttggagctggaccatgacccattctccatttaccctctttttacagagactgattccagccagagacagcaccaatctacttcagagaagatgatgggcatcaaaggagctgcagagaagatgataggcaccaaagaaactccacatgcagtttaatttatttgtggcaaagggaagaagtctcatcatcaagtacagtgcatggacactgggaaacatgcatgtctaccagtcccttgggagacactgtgtaattcctcacagatcttcatgtcacagaagccaatggagatgaatttctattacctattgagaagggtataaagtagtcacttttctagaaggtgaccagcgtcaaacatctctggattggggaattcctttttgtcatgcagcactgctgacagtgatgttaaaatggt

SEQ ID NO: 3047 - DNA, 444 bp, Cricetulus griseus; identical to SEQ ID NO: 3046

SEQ ID NO: 3048 - DNA, 494 bp, Cricetulus griseus
ggcccgggcggccagcgcgagcagcggggaccatgttccgacgcaagctcacggccctggactaccacaaccccgcaggcttcaactgcaaagatgaaaccgaatttagaaactttattgtttggcttgaggaccagaaaatcagacactacaagattgaagacagaggtaacttgagaaacatccacagcagtgactggcccaagttctttgagaagtatctccgagatgttaactgccctttcaagattcaggagaggcaagaagcaattgactggcttcttggtttggctgttagacttgaatatggagataatgctgaaaaatacaaggacttagctcctgataacaagaaaaatactgacaacgcagctaaaaatgcagagccattgatcaacctggacgtaaataatccagattttaaggctggtgtcatggctctggctaacctccttcagattcagcgtcatgacgattacttggttatgcttaag

SEQ ID NO: 3049 - DNA, 363 bp, Cricetulus griseus
cggggctatctacacatgagctcacctctctgctagagaaagagctggagcagagccagaaagaggcctcggatcttctagagcagaaccgacttttgcaggaccagttaagggtggccctgggccgatagcatagtgcccgggagggctatgtgctacaggctacatgtgaacgaggctttgctgccatggaagagacacaccataagaagattgaagacctacagaggcaacaccagcgggaactggagaagctgcgagaggaaaaggaccgcctcctggctgaggagacagctgccaccatctcatccattgaagccatgaacaatgctcatcgggaggagatggaacgggagttagaga

SEQ ID NO: 3050 - DNA, 190 bp, Cricetulus griseus
cgccacccccacctgtcccaggaccacacctcatgcagcagccaaactcgcatcatcagcactctgtagcacatgtagttgggccagttcatgctgtcacccctgggtcacacattcattctcaaactactggacaccatttaccaccaccccgtgcacctcctgggcctgccccgcatcaccacccacc

SEQ ID NO: 3051 - DNA, 370 bp, Cricetulus griseus
  misc_feature (339)..(355): n is a, c, g, or t
gatgcccgggatttcactgtttccgccatgcatggagatatggaccaaaaggaacgagatgtgatcatgagggagttccggtctggttctagcagagtattaattaccactgacctgttggccagaggcattgatgtgcagcaggtctccttagtgatcaattacgaccttcccaccaacagggaaaactacatccacagaattggtcgtggtggtcgctttggccgtaaaggtgtggctatcaatatggtgacagaagaagacaagaggactcttcgagacattgagacattctacaacacctgcattgaagagatgcccctcaatgttgctgacctnnnnnnnnnnnnnnnnntgttacctggctcta

SEQ ID NO: 3052 - DNA, 548 bp, Cricetulus griseus
catagaatgttctacttagtaagatgaaagtgcaatttttgtttaaatctatttgtttcttgtttgcttacttctgtttttgctttaagatagggtctcatttaagatagggtctcattttgtagcccatgctgacttcaaacttgctatcctcctgccttagctttctgagatgtacactatgatgccagccaccaatttaacttcttgcagggcatcccaggattgtcagagtccctgtaaccttatgtctgtggctctggcatcctcagcttctgtcccagtgactgctctaccacctacattccatccaggcagaagggggagggggataaagaaacacctctgcttgcagcaagcaagcaacagttctaagagcatcatgtcacctagaatttgattacagagaactctgggaaatgtagtctttatcggaatcaccacacactcaatagttaatcccaagtataccaaaaggggaggaagaatagatgtcaagggacatgtcccacagaagactgtggaaaagcaagcaaggcaagaaccat

SEQ ID NO: 3053 - DNA, 489 bp, Cricetulus griseus
ttggctgtttttcactgaagtgcttaagtggtaggtagtgtttcatggacacggcagatattaaaaacaaagcaagcaaagaaagaaaacactaacaaatgggggaaaccaagcaattcagatgtctattccctttgccataccatgaagctgaggaccttcctgtagctcaaacatgcagatgagaatctgatgtagaatatgaaaaacatcaccctgtttttttccccagagtcaaatttaatagaaaaccatttttcacagatgtgacttgagaatattttatatgcttgtgatttttcttaaataggcttctttggggcttatttcaactgcagtgggggagactcggtgattcaccaaattgtgtgaattaaaggcatgatcaaggaacaggccattgaaaatgatggccccacagtattaaaagcactttgatcttttgttttgacaccttgaatttatctttaattatatgtgatgacattt

SEQ ID NO: 3054 - DNA, 579 bp, Cricetulus griseus
  misc_feature (155)..(184): n is a, c, g, or t
ccttgccacactgacccatccggcctggtccctacctggtctggtgtacaactgctcacaggcaggggctgtctcacacacaccggaatgtactacgggtactacagcaacaccacgctgagccagtcatgcgcctcccctcgagaaactggccnnnnnnnnnnnnnnnnnnnnnnnnnnnnnncctacctcttcacggtgggcgccgccttcttcattacctgcatcactctggtgtacagcatgtcccactcctttggggagagctaccgggttggcagcaccaaaggcatccatgctcttacggtcttctgctcctgggactacaaggtgactcagaagcgggcctcccgtgtccagcaggacagcatctgtactcagctgaaggagctgctggctgaatggcaacttcgagagaggccccagagcgcatgtgggcagctgtggcaggctgccatgctaagcctgggatggttgctgtgtctgggcaccacgatgggctgtgcagcggctgttcttaccttctcagaggtcatgattcatagaccggatgctgatggccagggggtagagctgctg

SEQ ID NO: 3055 - DNA, 370 bp, Cricetulus griseus
  misc_feature (252)..(278): n is a, c, g, or t
aacacagaggaagtgttcagcaacagcactttggactgctctggagtagggttgtacaatttcaaggaatgtttggatttccctgcatcgtgtggattgctccttagctactgcacagattgcaatataatgctgcacgttcaagatgaacagtagctcctagtgatcagaaaatccacgctttgcacatagtttgatctttactgaaatatgttgccaaaatctgtttttgttgtagctttggatttttcnnnnnnnnnnnnnnnnnnnnnnnnnnnggaaacaatggacaatgccctttaactttggcaactactaaggaacccttttttgaaaatccttttaaaaaccctaacccctttttaaaaca

SEQ ID NO: 3056 - DNA, 287 bp, Cricetulus griseus
tggctttccctccccctccatacattcccccctcctgctccttttccagtttttctgcttcccgggaagtgaattgctgatgccaagaggactttattcattaatgatgcaaccggattcgtttcaggattatgttgcacgaaattgaattttgaatgaaggatttttttttttgtgaaaaaaagtgttgactctttatttcgttgcactttaaattattatcttatttaagtatacagtttaattgtattattctcttaaaaatattaaatctatattttatggaa

SEQ ID NO: 3057 - DNA, 577 bp, Cricetulus griseus
  misc_feature (50)..(97): n is a, c, g, or t
caaaaaaaactaaaacaaaaatttgagtaaaaattgtggggttttgtttnnnnnnnnnnnnnnnnnnnnnnnnnnnnnnnnnnnnnnnnnnnnnnnnggtgtatctatccatttgatgttttgaaatcatctcttcagtaactggaggaaggatttgagacagttaaaataatgcatttatgctgtcataaggtttatgagctgtatcttagaaaatgctgtgcgagagcaactctgatacatcattcatgtggcttaatttggaattcttactctgaaatgattaattgaatttagtgttttttttcttttctgtctgactaataactaaaatagtgaacttgggtacagtggtgcattcatgtaatcctagcagctcaggatacttaaggccagaggattgctagtttgagacaagcttgagcaacaccctgtattaaagtaaaataaggtacagtgaaatcaaataaaaaattcagaccacaaactaaatacttgagacaaaaggggggctgtattttctttctcttttcagacagcactttccataggctagtgaatgtaccaaggatgagtt

SEQ ID NO: 3058 - DNA, 568 bp, Cricetulus griseus
ctactcgattcaaggacaacacaccatttctccgctcgatctggccaagctgaaccaggtggcaagacaacagtctcactttgccatgatgcacggcgggacgggattcgccggaattgactccagctctccagaggtgaaaggctattgggcaagtttggatgcatctactcaaaccacccatgaactcaccattccaaataacttaatcggctgtataatcgggcgccaaggcgccaacatcaatgagatccgccagatgtccggggcccagatcaaaattgccaacccagtggaaggctcttctggaaggcaggtcactatcaccggctcggctgccagtatcagcctggcccagtatctcatcaatgccaggctttcctctgagaagggcatggggtgcagctagaacagtgtaggttcgctcgtaacccccttctgctgttttcccatgatccaactgtgtaatttctggtcagtgattccaggttttaaataatttgtaagtgttcagtttctacactttatcatctgctaagaatttaaaaagaaaatcacattctctgtt

SEQ ID NO: 3059 - DNA, 183 bp, Cricetulus griseus
gagcaccgacctgggcaacaaggagcgaggcaagatatggcaccgcaagccgtcgccggccactcaggacgggattatagtgaacgttgttcacaccacttctgaataccaccggaaagtcttgcggtttttgaatgtggcttttgacggctcaggcgattcctttcttgccggggaccacca

SEQ ID NO: 3060 - DNA, 183 bp, Cricetulus griseus
gctgacggcttcctgaggagacggccctcgatggggcatcctggcatgcattatgcaccaatgggaatgcaccctatgggtcagagagcaaacatgcctcctgtacctcatggaatgatgccacagatgatgccccctatgggagggcctccaatgggacaaatgcctggaatgatgtcttca

SEQ ID NO: 3061 - DNA, 465 bp, Cricetulus griseus
gagggagctgcggttcgccgcttcataacctggtgccagagtaattggtggttaaaagaagtcacaagtaacttggatgaagtaggaatttcaactaaggagatactgaggattttctgccgattctgggcaaagatggccaccaatgatgctgttctgaagagactagagcagaagggtgcagaggctgaccagatcattgagtatctcaagcagcaggttgctcttctcaaggagaaagcagttttacaggcaactttgagagaagaaaagaaacttcgagttgaaaatgctaaactgaaaaaagaaatagaagaactaaagcaagagctaattcaggcagaaattcagaatggagtgaagcaaattccagtgccagtccaatctgatactccagtgcaagctagctctgcagtttctacaagtgtgatacagtctacatcggtatcaaccatctcttgtagt

SEQ ID NO: 3062 - DNA, 428 bp, Cricetulus griseus
gcggttgatgctggctttgttcccaatgacatgcaagttggtcagacagagaaaaatagtagcaccagaactttatattgctgttggaatatctggagccattcaacatttagctgggatgaaggacagcaagacaattgtggctattaacaaagacccagaagctccaattttccaagtggcagattatgggatagttgcagatttgtttaaggtggttcctgaaatgacagaaatactgaagaaaaaataaataaaaatcatatcttaaggaaactatcaaaagtattcagctgaaatcatagaaatataatctgaggaaagaaagtatgctaacagcagctagaatgccttttgatgaatcaattattcctttttaatttttttgtggtcctaaacaattattttttgacattttctaattctgc

SEQ ID NO: 3063 - DNA, 580 bp, Cricetulus griseus
  misc_feature (475)..(495): n is a, c, g, or t
cactgtgccctccggggtctggagcgtctcctgttatctgagcagctctctcggttagatacagagtctttggtcaagctaagtgtggacagagtgaatgtacaaagcccacaccgagccatggcagccctaggcctgatgctcacctgcatgtacacaggaaaagaaaaagccagtccaggcagaacctctgaccctagccctgctacacctgacagtgagtctgtgatcgttgctatggagcgggtatctgttctctttgataggatccgcaaggggtttccctgtgaagccagagttgtggcaaggatcctgcctcagttcctagatgatttcttcccacctcaagatgtcatgaacaaagtcattggagagtttctgtccaaccagcaaccatacccacagttcatggccactgtagtatacaaggtttttcagactctgcacagtgctgggcagtcatccatggtcaggnnnnnnnnnnnnnnnnnnnnntccaacttcacacaaagaactccagttgccatggccatgtggagcctctcctgcttccttgtcagtgcatctaccagcccatggg

SEQ ID NO: 3064 - DNA, 542 bp, Cricetulus griseus
  misc_feature (210)..(239): n is a, c, g, or t
  misc_feature (297)..(439): n is a, c, g, or t
tgattcatgggactttaaatgaattctgtgggtgaaagcaccagagttactagtgtccattttcatccaagacccttcttctctaacgttcttggtcctgttgaaacatttcagtatctacaaatactgcaatgttactacccaagagaaaagccattgtgtgtatgctggtcaccatgatcagtgtggtaccatttcctttttttgtcnnnnnnnnnnnnnnnnnnnnnnnnnnnnnnataaactatcacacccttccagccaccatttgtctttatttctagaactagaaattcnnnnnnnnnnnnnnnnnnnnnnnnnnnnnnnnnnnnnnnnnnnnnnnnnnnnnnnnnnnnnnnnnnnnnnnnnnnnnnnnnnnnnnnnnnnnnnnnnnnnnnnnnnnnnnnnnnnnnnnnnnnnnnnnnnnnnnnnnnnnnnnttatatctgaaggaacagttcacacccaggatagggaaacacacttaaaaatgaaacatacatcaaagcacattggctagaacagtgcagcaattagaatttc

SEQ ID NO: 3065 - DNA, 311 bp, Cricetulus griseus
  misc_feature (14)..(57): n is a, c, g, or t
aaggtcgagacctnnnnnnnnnnnnnnnnnnnnnnnnnnnnnnnnnnnnnnnnnnnnacaactcagaacaactgaacgggactcagcgggttctcctagacaacgtcctatcggaagagcagtgccacgagctacacagtgtggccagtggaatcatgctggttggtgatggataccgagggaaaacatcgccccatacaaccaatgaaaagtttgaaggagcaactgtcttgaaagcactaaaatttggctatgaaggccgagtgccactaaagagtgcacgcttgttctatgacatcagcgagaaagct

SEQ ID NO: 3066 - DNA, 329 bp, Cricetulus griseus
tgggtagtacccgctcggctgtggcgttggtggctgctgaaatgacgaccttagttctggataacggagcctacaacgccaaaatcggttacagccatgacaatgtctcggttatttccatgcgctagttcagatcaaaaacagcacgtcttaaaacatttactgctaaccagattgatgaaataaaagacccttcaggactcttttacattcttccttttcaaaagggctacttggtgaattgggatgttcaacgacaagtttgggattatctttttggaaaagagatgtatcaggttgattttttagatactaatattattataaca

SEQ ID NO: 3067 - DNA, 567 bp, Cricetulus griseus
acgaactgctctgtgcaatggcagaaagcagcctggaatgtggttgatggtactgaggtctctacatgtgttttcatgtattaacaaaagagaaggggaactctgtgtcattctaaaccagatggtaagagaaagacagcagaacaaggacgtggaagaggggtggatgctggctttctgaagagccccgcctgagggggaagctggaatgtaccatgttgttagcagtgagtggcaatgactggaaagggcctcactgaacatagcatgcaatgacgggacacaggaaagacccacgacttggccagcaaagccggggcaaagagagagggactgggtcccacaagcaagaggaagataggagagatcaaaggtcagtccttgaagacaatctgttggccgtgaggacgctcatcatgggtgatatggcggcgaatatgaatcctccggacacggtgctcccggttctcttcatcgtctcctctgcctgccccaccacctccagctgcaccccctgtggcctccaggagagctagatctgggccacggggagtctcataaatcaag

SEQ ID NO: 3068 - DNA, 486 bp, Cricetulus griseus
cccggttccgtgctgcttctgagcgcacgcagtgacttggcgctgctgcagctggaggaggagctgtgcacacagcatcctggcctgcgagtgttgcgggcagcagctgacctgggcaccgaggccggagtgcagcagctgttgtgcactgtgcgcaagctccccaggcccgaggggcttcagcgactgctgctcatcaacaatgcaggtactcttggggatatttccaaaggcttcctggacgtgagtgacccagcagaggtgaacaactactgggctctaaacctgacctccatgctctgcttgacctccggcaccctgaatgcctttccagatagccctggcctcagcaagactgtggttaacatctcatctctgtgtgccttggagcccttcaagggttgggggctgtactttgctgggaaggctgccagagacatgttgtaccaggtcctagctgctgaggaacccagtgtgagggtgctg

SEQ ID NO: 3069 - DNA, 479 bp, Cricetulus griseus
accattcagtttacaggagacctatgaggcataaaagaaatgagtttcttggggagctccagaaaaaagaagaggagatgagacagatgtttgtccagagagtcaaagagaaagaagccgagctcaaggaggcagaaaaagagctgcatgataagtttgaccgtctgaagaaactgcaccaggaagagaagacgatgctggaggataagaagaaatccctacacgatgaagtgaatgcattcaaactgagaaagacagcggttgatctgctccagtctcatggttctcatgctgggggctcgcagactctgagaagatacatacatatcaagattaatccatggttgtgtactgaatagtatgccctgctacagcctggactggactccacttagcctcctaagcgaaggttcttattccaactgacaactttttttaatggtgccagatagctgggccctccaccccctgctctggta

SEQ ID NO: 3070 - DNA, 480 bp, Cricetulus griseus
ccctccagaggatttacggcatttcattccctgaccccaaactgctgaaagagtgggagaagttccaagaggaagctaaaaaccgagatcataggaagattgggagggaccaagaactatatttcttccatgaactcagccctggaagttgctttttcctgcccaaaggagcctacatttataatacacttatggaatttatcaggagtgaatataggaaacgaggattccaggaggttgtcactccaaacatcttcaatagccggctctggatgacctccggccactggcagcactacagtgagaacatgttctcttttgaggtggagaaggagcagttcgcccttaagcccatgaactgcccaggacactgtcttatgttcgaccatcggccaaggtcctggagagagctgcctctgcggttggctgattttggtgtgcttcataagaatgagctctctggggctctcacaggactca

SEQ ID NO: 3071 - DNA, 495 bp, Cricetulus griseus
agctttacttagtcagtagggtgcgcctgttggaggcttagacttaagatgactcaaacagccatcccctgtccctgctgtatgtatgctggggaaaggcttctctcccactcactctcaccagattggtttttggtttttttaagtctaggcagtcctgaagctcattatggataccaaactggattcagactcacagctagggttacagatgtgagccaccatgcccagctttcttccttctggaactagaatagagaccatccactacctcacacatgccagtcaatatgccctgcctgccatggtgccctgagcctgcgctcaccacctctttatacagttttcttgaggcttgtgcgaggagcaataaatagcacatcttttccactgctgaatcagaaccagttaagcagtagatataggccttgagcaatggatataaaaatactggccttcaggaggtggtgctcgcctttagtcccagcactcggg

SEQ ID NO: 3072 - DNA, 481 bp, Cricetulus griseus
tccgttgctgaaaattataagctctgcatagtgttagctttactgtgattacatctgtttcttattttaagcaggcccgtacctttccagggtccaactacaggatagattacagacttcattagtgtctatttcttttactctgtgtagacttaagaaagtctaatccagaggtgggccaattcagaattgactgtaattgaacatagattaaaagtattgatgggaggcttgacacatagcatgagttatttgacttttgtaggatatttaaaatcttcatttgcagttcatgtaacagttgcgtcttaaaattcacacaataaagcagtcctgttcaaaattttttttattgtggcttgaagagttttttaaagtgaatttagagttgttttgtttttgatgtgaaatgcagatgggtgctagaagagcctcttccccatcactacagtgtaataatattacaccatactgaaatgta

SEQ ID NO: 3073 - DNA, 423 bp, Cricetulus griseus
atcgtcaaaaagaggaccaagaagttcatccggcaccagtcagaccgatatgtcaaaattaagagaaactggcggaaacccagaggtattgacaacagagttcggagaagattcaagggccagatcctgatgcccaacattggttacgggagcaacaagaaaacgaagcacatgctgcctagcggcttccggaagtttctggttcacaatgtcaaggagctggaagtgctgctgatgtgcaacaaatcttactgtgctgagattgctcacaatgtttcctccaagaaccgaaaagccattgtagaaagagcagcacagctggccatcagaatcaccaatcccaatgccacgcttcgcagcgaagaaaatgagtagatggctggtgtgcatgttttatttgtgtttaaataaaaccataaaagc

SEQ ID NO: 3074 - DNA, 226 bp, Cricetulus griseus
tttggccccttgctctgttccagcgttgctgcagctgtttctcagcccttttcaacactccagcgaccgaccacaagctcttgtttccaggatggtgatccgtgtatatattgcatcttcttctggctctacggcgattaagaagaagcagcaggatgtacttggtttcttggaagccaacaaaataggatttgaagaaaaagatattgcagctaatgaagagaat

SEQ ID NO: 3075 - DNA, 477 bp, Cricetulus griseus
cttccggggctccccagctccccgtgtgtctcttggtgttggggatggcgggatccgggaaaactacctttgtacagaggctcacaggacacctccacaacaaacgcttcccaccctacgtcatcaacctggaccctgctgtgcatgaagtccccttccccgccaatattgatatccgtgacacagtgaagtataaagaagtcatgaaacaatatggactcgggccaaatggtggcatagtgacctcactcaatctctttgctaccagatttgatcaggtgatgaagtttatcgagaaggcccagaacacattcaaatatgtcctgattgacacacccggacagattgaagtgttcacctggtcagcttctgggacaatcatcactgaggccctggcatcctcatttccaacagtggtcatctatgtaatggacacatcacgaagtactaacccagtaaccttcatgtccaatatgc

SEQ ID NO: 3076 - DNA, 600 bp, Cricetulus griseus
agaaagcaaaagcatgtaatgtattaacaggcttatcgctatgcagaaaatggagggggcattaaaaaaaatgtaagcttgtgacatattcattgcttctgttttccagctacatcacttaaattagaagtcaacagcagtgattttcctggctttacataggaggcaaatttagggaaggttgacaatattactgtgtttggctttctttctttccttttctttctctttttttcttaagagtctaaggtttacacaatcactcataatgtgacgtgagccagcaaggccaaaaacgctagagaaacaatgggatctctccttgtaaacttgtacagtacgtggtgacttttttcaaaacagctttttgtacatgatttagagacaaattttgtacatgaaaccccagatagactataaataattaattctaacccaacaagtaggtagctgtgtatgacactgctttaaatcattcaaatgcctttgtttttggactgtgcaaaggttggaagtgggtttgcatttctaaaatggtaacttttattctgcaagagttcttagtaacttcttgagtgtggtagactttggaacatgtac

SEQ ID NO: 3077 - DNA, 573 bp, Cricetulus griseus
gtaccacattacgggcccaagttcatagttccttatctcccaagcttgaagaggagagaacacaagtaatgccctgggcttgtttttgtcaagttcctacagcatgctccttttaccatacaaaataccagcacattggattacaacctgagtaaaggcaacatgaacatttcattttttaagccaagcatggtggcacacacctttactcccaaaaaggaaaggcaggcagatttgtgggttcaaagccagacaagactacaagtgagatcctgactccaaagaaattttttacaacaagggggattaacataagttcacaacttttgaactacaaaccttaatccaccaactgcataaatttaataagttgttgggtatagtggcccatgccactatattcataggtagggggtcggcagatctcttgagttccaggacagccaaagctacatagtgagaccctatctcataaagaaaaaaaacaaatattttgaaagacaacatctacatcttttcaaagtagaattatttgaacaaattcacatcccactaaaatatatcatatatgga

SEQ ID NO: 3078 - DNA, 508 bp, Cricetulus griseus
  misc_feature (248)..(272): n is a, c, g, or t
gagtattgggtcagcaggcagctgtttacctggggttttgctgcactattgcgatttcggaggggcttgggagcagttttttagaggattcttttgagagaaggcatcaagtccgtgtcatagcagtgtctgaggatgcctcctgtgactgatttccaattagacttgtactgtatataagagcctcttaaaatgtgggatcttcaattttttaactcaataaactagtaaagaatatctagtttccnnnnnnnnnnnnnnnnnnnnnnnnntaagttttctccccaaatacacgaagcttgactcagtcttgcactgacgttaactgccatactacctcttattatgtagatgtccatggaaagtgctccctggaatggaacagtttgaatgcaacagcccactctgaagaccgtgaggccaagcacctgccctagttgtgatctgttacacatttgtatttccagggagaatgtcaacttccctatctgttttcttctagtctgca

SEQ ID NO: 3079 - DNA, 537 bp, Cricetulus griseus
tggggaggctgagactcgggagtgcatctactacaacgccaactgggagctggagcgcaccaaccagagcggcctggagcgctgcgagggggagcaggacaagcggctgcactgctacgcctcctggcgcaacagctcgggcactatcgagctggtgaagaagggctgctggctggatgacttcaactgctacgacaggcaggagtgtgtggccactgaggagaacccccaggtgtacttttgctgttgtgaaggcaacttctgcaacgagcgcttcacccacttgcccgagcctgggggcccagaagtcacctacgagccacccccgacagcccccaccctgctcacggtgctggcctactctctgctgcccattgggggcctctccctcattgtcctgctggccttctggatgtatcgacatcgcaagcctccctacggccatgtggacatccatgaggaccctgggcctccacccccatcccctctggtgggcctgaagccactgcagttgctggagatcaaggctcggggtcg

SEQ ID NO: 3080 - DNA, 487 bp, Cricetulus griseus
ggcagaagtatgagaggatcagtgagaagaagatgtccactcccattgaagtgctgtgcaagggctatccttctgaatttgccacatacctgaatttctgccgttccttacgttttgatgacaaacctgactactcctacctgagacagctcttcagaaatctgttccatcgccagggcttctcctatgactatgtgttcgactggaacatgctcaaatttggtgccagccgagctgcagatgatgctgagcgggaacgccgggacagagaggagcgattaagacactcccgtaatccagccacccgtggcctcccttctacagcttccggccgtcttcggggaacccaggaagtggctcccccaacgccccttacccctacctcacacacggccaacacctctcctaggcctgtctctggcatggaacgagaacggaaagtgagcatgcggctgcaccgtggggcaccagtcaacgtctcctcatc

SEQ ID NO: 3081 - DNA, 283 bp, Cricetulus griseus
gcagggttcagatgtcagtgtggtgagagctcaccacttggtggtattttagcagctttcttctagagcccagcggtggtcagcagtcatgattgtggctaacctgtttagaatggttccaacaagagtttcatccccttcctttgccctcagtagatccttgcaacacagtcactcctgctagaccccatatgttctgggtgaacaggtgacaccatctcactgcttactctccacacatcagccaaagctgacaggttcttttctttctttttcttaaata

SEQ ID NO: 3082 - DNA, 481 bp, Cricetulus griseus
gaacaactggtgtccttcctcagtggcaaagatgaaacagagctggccgagctagacagagcgctggggatcgacaagcttgtccagggaggtggattagatgtattatctgagaggtttccgccacagcaagcaacaccacctctgatgatggaagaaagacccgccctctacccccagccatactcatctccttctcctactgccagcctccctggtcctttccaaggcatggtcaggcagaaaccttcactggggactatgccagttcaagtaacacctccccgaggcaccttttcacccagcatgggcatgcagccccggcagactctaaacagacctccagctgcacccaaccagctgcgactgcagctacagcagcggttacagggacagcagcagctgatgcaccaaaaccggcaagcgatcctgaaccagtttgcagcaactgcccctgttggcatgaacatgaggtcaggca

SEQ ID NO: 3083 - DNA, 479 bp, Cricetulus griseus
cggtcctatttgcatttgaagaagctatcggatatatgtgctgtccctttgtgctggacaaggatggagtcagtgcagctgtcataagtgcagagctggcgagttttctagcaaccaagaatctgtctttgtctcagcagctgaaggccatctatgtggagtatggctatcatattaccaaagcttcatattttatctgccatgatcaagggaccattcaaaaattatttggaaacctgagaaactatgatgggaagaataattatcccaaaacatgtggcagatttgaaatctctgctatcagggaccttacaactggctatgatgacagtcagcctgataaaaaagctattcttcctaccagcaagagcagccaaatgatcacctttacctttgctaatggaggtgtggccaccattcggaccagtggaacagagcccaaaatcaagtactatgcagagctgtgcgctccccctggc

SEQ ID NO: 3084 - DNA, 479 bp, Cricetulus griseus
catcttgtcatccctttgcctagctccaccccccgggctgggaaacccggccgctgacggtccgcggtcccccgggcccagaccctgggctgccccgcgttgtctcccccgtccacacgctacgagcctggaatgcagctctccaacagggcggcagccagggaggcggcgagccgcgacgtgctggccgcggacctccgctgcagcctcttcgtctcggcgctgcagagctacaagcgggactcggtgctgcggcccttccccgcctcctacgcccgccacgacagtaaggacttcgaggccctggtgagtgcgccctgatccagcgttgctcgctgcatcctgggccaagtggccccatggaacggcaggcataggcagcaccacccgtgttagaaaacacaccaattccttggacttccctttcccagcctggccttggggaaggttcccatcagcaggaacactcctaaacaccc

SEQ ID NO: 3085 - DNA, 570 bp, Cricetulus griseus
gcgggactaaagttttccaaaggagaaattcttcagattgtaaacagagaagacccaaattggtggcaggctagccatgtgaaagagggaggaagtgctggtctgatcccaagccagttcctggaagagaagagaaaggcatttgttcgaagagactgggacaattcaggacccttttgtggaactataagcaacaaaaaaaagaagaagatgatgtacctcacaaccaggaatgcagagtttgatcgtcatgaaattcagatctatgaggaagtagcaaaaatgccacccttccagcgaaaaacattagtgttgataggagcacaaggtgtgggcagaagaagcttgaaaaataggttcatagtgctgaatcccgctagatttggaacaacggtgccatttacttcacggaagccaagagaagatgaaaaggatggacaggcatataaatttgtgtcccgatcagagatggaagcagatattaaagctggaaagtatttggagcatggggaatatgaaggaaacctctatggaactaagattgactctattcttgaagttgtacaaact

SEQ ID NO: 3086 - DNA, 156 bp, Cricetulus griseus
ggatatgtcaccctgctccatatccagcccatctactcacagctgattattttgaatatcttggttcctgtaatcggcttaatcacagagctgccattacacatgaagagagactttagttttcacctcgtctttgtattctcatattaaatacag

SEQ ID NO: 3087 - DNA, 463 bp, Cricetulus griseus
aaaggcccacagccagcctagtgttttttttttctctatcttgacctaaagattgctatttttccaataacatgcctgcctgcctgcctgcctgcctgcctgcctgcctgcctgcctgcctgcctgcctgcctgcctgctgccatgttccctgcctccatggtccctgccattatgataatgaactaatctctgaaactgcaaatgaaacccctaattaaaagctctgctttgtaagacttgctgtggactggggggtgggggggctcttcataacaatagattaatggctaaggcaatataatcgattggtaggatcaatatagtaaatatggccatcttaccaaaagcaatatacacattcaatgcaatccccatcaaaattccaaacagaattgatctacctaaagatatggctgtaccactcttgatcatgtacacaaagggttcttcatcctaccaca

SEQ ID NO: 3088 - DNA, 495 bp, Cricetulus griseus
tgaaggaaagttgacctgtaaaaactaaagacccacactttccttgacgacccactctatttgtcctcctattttgttctgttatctgcagtttgaagggaaaagatcaatgagctcaaatgagaaggctcattgagtgctcattcccttgccacaggtggactttcctctcatccttttcctggatgagaccatagaaatccagcccctgaagttctcaccctcttccagtgccctgagactatgtctattatttatgcctaaaatctcagtcttccctcactagcaaatagtattataagaatggatgattaatgataattgactaagtcctgtctgggttgtgttttctggtatctttgtaagctacggatggaacaaagtctcctgcatgatgaacaatcactctaccgctggctctagctgtagtagttttccttagttggtaggattatggtataaattgtgcttttagtaatctttgagccgtggaag

SEQ ID NO: 3089 - DNA, 551 bp, Cricetulus griseus
cactagccctgtggcagagacggaaggaaccataatggaagagagctcaagagacaaagacaaagcggagaggaaaaggaaagcagagattgctagactgcgccgggagaagatcatggcccagatgtctgaaatgcagcggcactttattgatgagaacaaagagctgttccagcagacagtggagctggacgcctctgtctcggccactcttgatgacaggcctctcgtttcggatacagcacttacagcattgggcccggcacagacacaggtccctgaacagagacagtttgtcacctgtatattgtgtcaagaggagcaagaagttactgtggaaagcagggcaatggtcttggcagcatttgttcagagatcaactgtactgtcaaaagacagaaccaaattcattcaggatccagaaaaatatgatccgttattcatgcaccctgatctgtcttgcggaacacacactggcagctgtgggcacgttatgcatgcccattgttggcaaaggtattttgattccgttcaagctaaagagcagcgaa

SEQ ID NO: 3090 - DNA, 318 bp, Cricetulus griseus
ctcccttgtatactttgccctccattctggttagcccactgcagctgtctgtactcctcttgcctctgcagagtgcccattccctcccaccacaccttttatagcctcttttaataggcctccctcttcagggaggagctagggtcccggtggatgttatcagagcgctggtgtcagattcctggctcgatatggtttttgtgatgaagcatgagaatgctagagtcctgtgttatcatcgccccacccgctcctgtcctgggacagtctcatcactagttccccaaggtggtgtggctggaggcagtattgcaggga

SEQ ID NO: 3091 - DNA, 428 bp, Cricetulus griseus
  misc_feature (228)..(243): n is a, c, g, or t
acctgtcaaagcacctgaaaccaccgttcacaggcagttgtcaatttgagttgtagtgaatgttttttaggcactttatagctgctttccatatgtagaaatttgtaatggaatgcaaaataccttttttaagtccccattatatgatttccaaatcagtgttaggagtctacattgatggcaaaatactgttttctaaagcagggactgtgaagcccccaggccacnnnnnnnnnnnnnnnnagatgctgtagttttcacagtgtcaacttactcagatttgagaaaatgacttttatactaacctatattttggagtaaattccagcttccttatccccatgccagtcctcatcctggaaagggagctgcatcttggtgtttgcaggaaaagcagcatccggtcaccctagcagcccatattctct

SEQ ID NO: 3092 - DNA, 103 bp, Cricetulus griseus
gaagaaaagaacattttccagtttatttgtgatgcctcttcactgcatcaagtgaggaagaaactggactccctgggcctgtgttctgtgtcctgttccctgg

SEQ ID NO: 3093 - DNA, 502 bp, Cricetulus griseus
tgaactctatgaaaaacgagatctcatcaaaaacctaaagacgatgaaagaagatcttatggaaagtatccaaaatccacaaggggaaatatgcagcacaaatacaggaagacatttcagagctaatgaataaaactatgacagtaaaagattcaatcgctgagaaaacatattttattgaagaagagaaaaagaaacatgaaaaactaagaaaagaaatagaggtacagcataagagatatgatgcaattcttaagcgtttgcattgtcagatgagcaagattcagttaaataggaggaaatggcaatggaacatccaacaactggaaaaaactgcagctgacttaaaaaagcgccttggagtgaaagaagcccatgaactacagaacagaccagcagcattgtgggaaagaataccgtgaagatcctttggtcacttgtgaaccagcacccagcggcaaaggcctgtctcaatggccgatattttcttttgtcccccttc

SEQ ID NO: 3094 - DNA, 531 bp, Cricetulus griseus
agactcgaggcggtcccgtggccgagcttcgccctcgccatggccctcagcgatgcagacgtgcagaagcagattaagcacatgatggctttcattgaacaagaagccaatgagaaagcagaagaaattgatgcaaaggcagaagaagagttcaacattgagaaaggtcgccttgtgcaaacccaaaggctgaagattatggaatactatgaaaagaaagaaaagcaaattgagcagcagaagaaaattcaaatgtccaatctgatgaatcaagcaaggctcaaagtcctcagagcaagagatgacctcatcactgagctgctaaatgaggcaaaacagagactcagcaaggtggtaaaagatacaaccagataccaagtgctgctggatgggctggtcctccagggcttgtaccagctgttggagcctcggatgattgtgcgttgcagaaaacaagaatttcctttggtgaaggctgcagtgcaaaaagcaattcctatgtataaaatcgccaccaaaaaagatgttgat

SEQ ID NO: 3095 - DNA, 493 bp, Cricetulus griseus
tgcaaccaaagaagtggtgtacagagattatattgacatcagtgttgcggttgctaccccaaggggtctcgtggttcctgtcatcaggaatgtggaaacgatgaattatgcagatattgagcggaccatcagtgaactaggagagaaggcccgaaagaacgaacttgccattgaagatatggacggtggtactttcaccattagcaatggaggagtttttgggtcactttttggaacacccattatcaacccccctcagtctgccattctgggcatgcatggcatctttgacaggcctgtggctgtgggaggcaaggtggaagttcgacctatgatgtatgtagccctgacctatgaccaccggctgattgatggcagagaggctgtgactttcctccgaaaaatcaaggcagcggtagaagatccaagagtcctcctcctatacctttaggaggaagccacacactctacctattgatcatgcaggaactga

SEQ ID NO: 3096 - DNA, 156 bp, Cricetulus griseus
ctcctttgtctccgtttcttttgattttagtttaaactttggaagcctgatacatgagcaagatacatatttttttctcaaagatggctttttgactggcttaattctaccatagaattaagtaatcaaatgtgctctcctcaatccttaaatgat

SEQ ID NO: 3097 - DNA, 546 bp, Cricetulus griseus
  misc_feature (332)..(368): n is a, c, g, or t
  misc_feature (524)..(538): n is a, c, g, or t
actggacgcgctcagatgtcggtgttcctcccagttcttgacccctggtcctgtctccagcccgtctcagcttacccactctgactcctttgagctgcttggaggggcagcttctggtagtagtggcttttatactttcacagaatcccttcatccagagatgtcttctggcaccagtgccctgcagcagcgagcacttccagtgccctcactgcctactgtcgtttagtcactgactgctttctggtttgaaggatgcagtggttcctccttccttgaaccctttctgcgtacgtgtcaccctgctgaaccatgcagcctcaccagagcgnnnnnnnnnnnnnnnnnnnnnnnnnnnnnnnnnnnnnttacagtgaggaatgctattacataaggcactttaagtcagtgacagctccaaatttgcacttcatctgttgactagtaaactgtacccagaacaggagcttgtggacacccctggatggtattgcagcttcaggggcaggcacttctgtcacggnnnnnnnnnnnnnnnatttttct

SEQ ID NO: 3098 - DNA, 578 bp, Cricetulus griseus
cactactttaactgttaataaaaatgtttttatggtgtcaaaagaaatctgaaagattatgccaagccaaaaatctcagagacactaagaacataaaggtgaagaggtatttaaggttctggctaccccgagtcatgtacccatctccattacaacagttgcagaatgccaggatctcatagatccaggtgcaaggtgaaaactagcatttatttttaagttgatgaatctaatgcattacccttcacataaaactggggccttaggaattatctactgctttctcctatttattcccaagggattacggtaagagttctttagtgctgagcagatgtgtaacaagaagaaaagaggaagagaatttatgtttgagagtttataaaccaagtgtcagcattagatgagatttcaggctaaaattttataagataagaagtctaagaaagctcttgtatcagagaagcaaatttatatatcatttgaagagtgacaccttttcctgtgtttcagaatctaataacccttttaagattatggaacatcaaggttgggaagtggtggcgcatgccttaatc

SEQ ID NO: 3099 - DNA, 579 bp, Cricetulus griseus
  misc_feature (75)..(75): n is a, c, g, or t
  misc_feature (493)..(507): n is a, c, g, or t
tcagggtctcagtttctcatcagctctttcttacatgccttcatgtagggagaactaaggtagagagagacaggngaaaaagtaactggcctgggctctagctgtcccctgccgactaaaggcttcttacgtcccatcccggtatatccatgctggcttctctatggagctgacactcagcaggtgttcatgttagtcctttgtcttccaaacacccatttgccagagtcagtgtcattttaggtggccatttctgttgaagcacttgtatcataagacgttggatttggactagtgacctttagaccatgtccttgtagctacacaccaagggctcccaggagaccaaaatagttaaacattacttgactacaactgagtcctctgggtaatggccactgtttcttgtactgtaactgacatagttgcttagtttgccctttcaccccagcatctggcaacagtgctattagtacaagctgagacactatgnnnnnnnnnnnnnnnaggctccctgaacctgaacctgaacctgggggagccagaagatgtgctcaagtgctggctgcagcccaagcc

SEQ ID NO: 3100 - DNA, 446 bp, Cricetulus griseus
gtaggtttggggtccagaataacattcttcaaggtttataagatgaagaagtttttatactttgcccaattactaaaacggcacattaaaaattcaatgaagggaaggatcatactgagtaaaattaaagactgctgtttggagaagaattctttttcatggtgctactaatcttactgtaccccaagtttttaatagaaaggtgttaatcttattttgctctgtaagtaaagaatgtgtatattctgtaaacaacatcttagctcaaaacgttgagtcatttagatgtgatctggtataaacccttctttactaaaaatgtatgaaatcttacactatagacagcaagattttacatgggagaggatttgcctttcattgacttactactgaaaacaaattaattgggacttttatcccttaagttattagctgacttttaaaat

SEQ ID NO: 3101 - DNA, 508 bp, Cricetulus griseus
atggggtcatccacttctgacaccattctgttatgctagacctttccgccataagccaccaagccccaccaccatgtgtgcgctttacgccagccgccagcccgagttagggcccaaattaatacacagaatcttgtattaggttcaaatgctgcttggccaatgactaggattctcatctgttagctcagtcttaattatcataaatctatatattttataagatttatcggatgccttattggtgtccctccttgccagtggctcacatcctgccgcttgaggaagcggaggggaaaagggacccttcctttttctcctttcttaaatatgagtctccttgctatgtcacttcctgcctggatcaccactgctctactacaattcccagaatcctctttgactcttagtcctgcctaacttgctgtctcattggccaaacagtattttattcaataatcaataagatgaacatacatagtacattccccatcacagtgctgtttaa

SEQ ID NO: 3102 - DNA, 220 bp, Cricetulus griseus
gagctgacaaagcaaaaagaaataataacagcccaagacaatataattaaagaaaaacgtgcagaagcggctaaacacaatttgcaaaacaatgattctgaacttaaaattaaggagttagaccatagcattagcaaacataagcgggaagctgacgatgctgctgcgaaggtatccaaaatgttgaatgattatgactggattaatgctgagaaacacc

SEQ ID NO: 3103 - DNA, 550 bp, Cricetulus griseus
tagtggtggatgcccagcaccttctgccacccggagatggtgtttcctcacaggacttttctccggaagcttccatcctcgtgaacctctctaaacacatgtgcagccccacagatgtgagtagcctgtctcagttcacagagtcctcctctcccagtcttcctgctgcaccctcaggtgctggagaagagaaaggtctgtatccacctggaggactgtggccttcccagccagtgtgcctgaccagtagcttcaactgcccagcagagaacagtgcaccgggtgtgtcccaggggcctgcctccatccctgacagcagtttcattgattggagtgcatcctgtgaaggccagtttcccagtgtgtactgcccgctggaactgaacgattacaacgcctttccggaagaaaacatgaattacgccaatggcttcccctgcccctccaaagttcagactgacttcattggccacagcgctcactctacctggaacactccagccagcactcccactacctgggaacatgccggttttgtcaactctccgtc

SEQ ID NO: 3104 - DNA, 431 bp, Cricetulus griseus
taggcaattcatagtatttcagttttgagatgcaacccgatgaatatctgctgccttcctgacattagtgtctttttgtggcggggggtgcataaataattgagttactgatctttgtattgaactctcaaccacagttatgtgacacataccttaatttcagtaattcagtacattttaaattctattaaacttaacattatgcatgcctcactcttttaaaagcactgctgttgatgttatttataatctctacaattgggagtttgaaaagtacaagtttgatggtggttatttttttcaaatcacttattttgataattctttgtacatgttttacctcctctggaaagcattctatatgtaaagtagattctaagacagttgaattttcatggcatttataggtctatgttattttaacttttgtt

SEQ ID NO: 3105 - DNA, 300 bp, Cricetulus griseus
aatgtcttccaagaattttatctaccttgagtctctggagtgagaaataagggagtgcaggtaaggattccagtaactccaagtggtgtatcagcgtatccaacgaacaaattaatgatttttaatcagtttctgggccttgagtgggtacccaagcatgtgtattcatcattactgctactgtggtggcacagtgtcatcccttaccatgccacctttctcactgacctggtgattctgtatttttgagtaattatgtggatgcgagcgatcctggagtcagggctttgggtcaaggag

SEQ ID NO: 3106 - DNA, 504 bp, Cricetulus griseus
gactatatctcttttggcatcttaactgcagtctcactgactaaagctgagggtacagagacagattaaccagagatgcagatcagccagcccccaacatgaacgcagcttttggttggctagatacacttgtcttttaataacaaaacaatgctgtttacacctggcatcattcaacctatgttcttgtcactgctcccgccatagatgaagatagcctacgttccactcctccatacatcataggtctccacatttacttcagactctttgagccagtgtatggtatcttccacgtgtctcaccttgctgccaggtaccagctccatgtattctcctgagcttaaaaaaaattgtatctgagcaatttctgttctctaggatgatctctgttgccagtcaggacctcagagtagagctctgtgaagtttccatggcatcaaaaaccagagggtctatgcttggtcctttgctaccaactgttcagtttttacttagctctag

SEQ ID NO: 3107 - DNA, 431 bp, Cricetulus griseus
  misc_feature (69)..(89): n is a, c, g, or t
ttgtttaggtagaaaagacaagtccaaagagtgtgtgggctttcctgttcctaaactttcactaccatnnnnnnnnnnnnnnnnnnnnnagaaaaaaaaagagaaaaaaaaggaaatagaggtttaactaacccagtgcccaaaggagggctggggaaggctggggggggagcaagggtgggaaagtatatgacataagcagtatttaatgtttccggaggggccctattgccaggagagcccaggtccccctccccagctccgctctctccacagcctcccgcacccttccttccctctgcttggtgaagtgcacagccccaggtggtccccggccttgctgaggcagggaagggaaggtgtgtgtggtccacgagggagaaaggcggatcaaaggttttacttgaaaacaagctccatcctttttctat

SEQ ID NO: 3108 - DNA, 446 bp, Cricetulus griseus
  misc_feature (49)..(72): n is a, c, g, or t
  misc_feature (137)..(170): n is a, c, g, or t
tctccagccccgccaaagcttgttcttattttttttttattttttggtnnnnnnnnnnnnnnnnnnnnnnnngctttggctgtcctggaactagctcttgtaaaccaggctggtctcgaattcacagacagagatcnnnnnnnnnnnnnnnnnnnnnnnnnnnnnnnnnnaggcatgagccaccaacacctggccccaggagagaatctttaactctgaatctcactaaagatgaccattttaaagataaggcatggcttcttcacctttggctaaaatcaggtgtggtagcagatggtcttaattttgctgtttccaacgtgttctagattaggaaactatgtataattcatcatcttaatttagaagcatctatttcaaatgacatgaccagtgagctagttttttcttttatagttgttttacagccagatccatcatttaca

SEQ ID NO: 3109 - DNA, 335 bp, Cricetulus griseus
tttctggagacagtgctggtgggaatttggcagctgcccttggacaacagtttacttacgttgccagcctgaaaaataagctcaaactgcaggctttaatctacccagtcctccaggctttggatttcaacacaccctcttaccagcagaacgtgaacactccaatcctgccacgccacgtcatggtgaagtactgggtggattacttcaaaggcaactatgacttcgtacaggccatgattgtgaacaatcacacttcccttgatgtggagaaggccgcagccctcatggcccgtctcaactggacatccctgttgccctcatccatcaaaaag

SEQ ID NO: 3110 - DNA, 197 bp, Cricetulus griseus
gtccgggagggggcgcgctagctgtctcggcggcccggcaagagacccgggcgtgaggcggcctctcagggccggaagggctggtcatcagacgcagcggcacgggaggctgagagtgcttggatcaggtttacaccatggccccgcagaacctaagcaccttctgcctgttgctgctgttcctcatcggggctgtg

SEQ ID NO: 3111 - DNA, 449 bp, Cricetulus griseus
  misc_feature (83)..(105): n is a, c, g, or t
aagatagatctgagtttgaagcctacagataaggagtttcagaagagccttggctacacagagaaacactgtctcagaaagannnnnnnnnnnnnnnnnnnnnnnaaaggaagagaagaaacccaagcttcttaggcttgattccctagtactgaaaaacaaaagtaaaactgtgacattgtaaacttgatatatgtaggacaaataaggtgtaaagccatctgatccatccatatcaacacaacttcatgtctgctttttagatgcacaaagtaagcatagttactccttcattgacttacttgccttttatgcattttcagtctgcagtgaaaaagcttattatccttccccagttcagggtttatgtaaatgtccaattggataaaaatatttttctatttaaactggcactctcccagatttttcttttccaattattcttttgg

SEQ ID NO: 3112 - DNA, 578 bp, Cricetulus griseus
ccggcgcgccgggttttgccggcgctgaaaactggaagcggcatgctggtcaaccggctcctgacaggggcgcgagcccgggcgcctctgcaaacgagtctcctcgagacgtggcgcctccgcggccggaccgcctcctcctactccgcttcctctgagccgtccaaggtgcgggcgctgatctatggcaaccacggggatccggccaaggttatccaattgaagaacctggaactcactgctgtgggaggatctgacgtccatgtgaggatgctggcagcccctgtcaatccagctgacataaatatgatccaagggaactatggcctccttcccaagctgcccactgttggagggaatgaaggcgttgggcaggtggtagcagtgggcagcagcgtgtctggattgaagccgggagactgggtgatcctagcaagtgctgggttaggaacctggcggactgaggcggtgttcagtgagaaagcactgatccaagtccctaaggacgtccctctccagagtgctgccaccctatctgtcaacccctgcacagcctacaggatgttgatggacttcga

SEQ ID NO: 3113 - DNA, 485 bp, Cricetulus griseus
tcccttgctgtgcttacacttaggcagaatggccttttctccttgtcctcccaggatctgctgcagcccctctgtgtttgaacttccctcgtgtatttccctcaacctgggatttatcatttctttcctttgtagcccagccagccacatggtgaaatgatttgaagaattccttatcagaaacatctctgacactgctttggaggcggactccagtctcagatttggcgggggaaaaaagacaaaaaacaaacgacttactaatgacatttcttttaaaccaaggattaaaatttcattagtggttctgtgggtcaagaatctggagtgtgtcttggcttttgggtgtgtcattgtggtgtggctaaagcttattcctcagaattccctcccagcatgtttccagaaacagtgggcgtctgaggagctgctgtgggagagagctggaggagaggaaaccccgtccttccacacccccatcattg

SEQ ID NO: 3114 - DNA, 366 bp, Cricetulus griseus
agatttgaagccttactccaaactggggaaaagccccacgtttgagctgctgttcgactggggcaccacaaactgcacagttggggaccttgtggatcttctgatccaaattgagctttgggggggtgctactctcctgctgcgagatgctgtgcccaaaactgtcagcagtataccttctagagaagctgcgacggtggcgcagacacctgggccctgccatgaaaaagtcaggacattggtaacgcctatgccaagggtggaacaaagctataggccacctgactcctcaagcccaaacaatgaaaacttagaaatcagtgatactgatactcgttttcacagtttttctttttatgaactgaa

SEQ ID NO: 3115 - DNA, 290 bp, Cricetulus griseus
ctgaatctgtcattatttaaaaaaggcactgagaccttttaaaaagggatattgctcttggtgataaagcaagaacaacagacttgtcaaggaactctgaagatggctcatttgtgtttatctttgccatgaaagtttaaagacctgagttagatttccagaacccaaagtgtagtggtacccactatccccaagttgcataaatggatacaggcagatccctggccagccagcctagcctacttgatgagttataggccaatgagataccctgccttagggtttttgtt

SEQ ID NO: 3116 - DNA, 259 bp, Cricetulus griseus
aagtgtgtcatcatttcccccaactgtgagaaatccatcaagggtggcctatatgaggccctctacaacgtcatagccatggcccgggaacaggagatccctttcgtatttgcccttggaaggaaagctctcggacgctgtgtgaaggagctggttcctgttagtgggggggggatcttcaactatttcggggctgagagcctatttaatagattagtggagctcaccgaggaagcccggaaggcgtataaagacatgg

SEQ ID NO: 3117 - DNA, 508 bp, Cricetulus griseus
  misc_feature (462)..(476): n is a, c, g, or t
cctctcagtcctacagctgaaccgtctgttagatctgctttatctgtgtgtatcttgctttgagtacaaaggaaaaagtgtttgaaagaatgaatagtttgacctttaagaaatcaaaagacatgagagccaaacttgaagaagccattctggggagcatcggtgccaggcaggaaatggtacggcggagcagagggcagcttgagaggagcccatctggaagtgcctttgggagccaagaaaacctgcggtggagaaaggacatgactcactggcgtcagaacacagagaagctcgataagtcaagagcagagatagagcatgaagcgctgattgatggaaacctggctactgaagcgaacctcatcatcttggacacattagagattgttgttcagactgtttctgtaacagaatccaaagagagcattctgggtggggtgctgaaagtgctactccagnnnnnnnnnnnnnnncaaagtgcagtgtatctgcagcactgctttgc

SEQ ID NO: 3118 - DNA, 448 bp, Cricetulus griseus
agacgaagagtacctgtggtgcattgagcagacgctgcacttcaaagatggacctctcaacatgattctggatgatggtggtgacttaactaacctcatccataccaagtacccacagcttctgtcaggcatccgaggcatctctgaggagaccacgactggggtccacaacctctacaagatgatggccaatgggatactgaaggtgcctgccatcaatgtcaacgactctgtcaccaagagcaagtttgacaacctctatggctgccgggagtccctcatagatggcatcaaacgagccacagatgtgatgattgcgggcaaggtggcggtggtggcaggctatggcgatgtgggcaagggctgtgcccaggccctgaggggttttggggcccgagtcatcatcaccgagattgaccccatcaatgcactacaagctgccatggag

SEQ ID NO: 3119 - DNA, 321 bp, Cricetulus griseus
atattaacaggaccatgcagcaggatgtggcttgtttctgtttctttactaaccagtgataactttatagaaatgtcatcggtccattgtttgtcagtggaacctcagcctcacatgggcatctctgttttgtctttttttgagtgggggggagatgaccctctgcagtgcactagctcatagtacggtcttcatctagttgaactaaactgggttctgcccacttctcttcatggatcctccatctgcaatccatggcaaaatgtccctgtgagaccctttcctcatgtactgaggacttactgtgtgcctgaactctgg

SEQ ID NO: 3120 - DNA, 365 bp, Cricetulus griseus
aaaagtaccattatcatgctggggtaaatactaagtaatatatacttccttttacgggcaaaatgtgtatccttttgtaaatgtattttttaccactgtgcaatggggcaaaatcatactttaggaaaaaattcctaggcgtggggcctaaaaccccaacctttgcttcatgtgaactgaatacaatcaaagaattgagagacaggtttaagaggaagaatttgcaatcatctcctgaggcagctacagcttgaaacaagagaccgggacttgctggtaagtaaaaaccaagcctcaacttcaaaaacaatataattgccattcccctaatagaccaccaagcaaacagtaataaaagttacagg

SEQ ID NO: 3121 - DNA, 456 bp, Cricetulus griseus
  misc_feature (41)..(58): n is a, c, g, or t
gccatcctaactgtacagcagcaaacacaggctacagcttnnnnnnnnnnnnnnnnnnagagtcatcctcagattgagccagcaaaccaagagttgtccccaaacatagttgaggtggtacaaagttcaccagttgagcggccatctgcgggcacagcagtatttggcactgtgtcagccaccccaagttcctctttgccaaagcgcactcgggaggaggaggaggacagcaccgcataagcagcagaccaggttcctgatgacactgtggaaatgcctctcccaaagaagctgaagacagtcacacccgtggcaactgaggaagaagttatggcagaagaaagtactgatggagaggtagaaactcaagtttataatcaggattctcaagattccattggagaaggagttacccagggagattatacacctatggaagacagtgaagagacttca

SEQ ID NO: 3122 - DNA, 341 bp, Cricetulus griseus
ttactaccggaagcaaaggaagaagcaagcacgtctggttctgcagccgcagtcgagtgtgcatgaaacagttgatggctatagaagatatttcactcaaattgtagggttctttgtgggggaagatcacatgggacatgtgacccaaggattagtaacccgggcgtacactgatgaactgtggaacatggccctctcaaagataattgctgtccttcgagctcactcatcttactgcactgaccccgaccttgttctggagttgaagaatctcattgtcatttttgcagacactttgcagggttatggttctcaagtcaaccgactttttgaccttttat

SEQ ID NO: 3123 - DNA, 93 bp, Cricetulus griseus
gtcgaaaccagtatgacaatgatgtcactgtttggagtcctcatggcaggattcatcaaattgaatatgcaatggaagctgttaaacaaggtg

SEQ ID NO: 3124 - DNA, 292 bp, Cricetulus griseus
ttaagttcaaatgccttatttggaaagtagctctggaaaaggctgttagtgtaaacgcagcaaattaaagtgcattattaggtagcacactccctgggagtggagctcattcctcctgggaacagcatagggcctatgagtgtatgtgggagatttgacaacatacatgtgtgtgtacaaaggtagtatacaaaggctcacattttcaaaagggaaatatgctcgtatgtgtaataactgttctgtgtgacatcagttcatgggcatacacagtttgccatgggcagtgcaa

SEQ ID NO: 3125 - DNA, 100 bp, Cricetulus griseus
ggagttctaacaccatggtgaaaagctctgtaaacatgaaatctaaatcaaatgtagatttttcacaatatgcttattaataaatgaaatctatgaaacg

SEQ ID NO: 3126 - DNA, 98 bp, Cricetulus griseus
  misc_feature (83)..(97): n is a, c, g, or t
ctttttcgctcttatatcaaaaccacgattcccaccactaattattataaacgagaacaacaaaatactcatgaacccaattnnnnnnnnnnnnnnng

SEQ ID NO: 3127 - DNA, 221 bp, Cricetulus griseus
ccacgcgtccgccgactttcaggagcacaactcttacggccgaaattctctggatgataattcttgggtattcccaagccctcctaagtcaagtgagacaacatttggggagaataaaaacaaaaccttccctttatccaacctgccaccgagtgcgctacttggaccagcataatcagaactgcctttacaaaagctaacttgatgggactcaccatttg

SEQ ID NO: 3128 - DNA, 431 bp, Cricetulus griseus
  misc_feature (263)..(280): n is a, c, g, or t
aatgcatctttgtattgcaagttggtgacagatttgaatatttaaaaccacaaacaagcataccaaggttttggaaactgatgaaaaattgatgtgatcagagtaagaagttaaagtttcatcacatgggtgggtagaaaataccataaacatggggtggacccaggaaacactcagccatataatgttaggactatgacacattggtagtattaacttgttgacatgttctaatttttacagaatattgaaaaaggtgagannnnnnnnnnnnnnnnnncagctagttagatttatcctgctcttgctctgctttttcctttcttttcaactttctgctgttggtacaatggcttactgaacctggaatctctaaagtatagtactgaaccccttatttgacacatgtgacttcaactgatctaaaatca

SEQ ID NO: 3129 - DNA, 442 bp, Cricetulus griseus
  misc_feature (89)..(108): n is a, c, g, or t
aaaccctgctcctggtggctctgggagtgtggctccagagtttgaccgcctcccaagaggggtggccgcagcatacgggggaagagatnnnnnnnnnnnnnnnnnnnnatttgccctaaggacccctgatgacacggctgaggaggggggccacctcattcccggaatagcagaatctgtgtctaactgccacttcaaccacagcagcaagaccttcgttgtgatccatggctggacggtgacaggaatgtatgagagttgggtgcccaaacttgtggctgccctgtacaagatagaacctgactccaacgtcattgtggtggactggctgtatcgggcccagcaacactatccattgtcggctggctacaccaagctggtgggaaatgatgtggccaggttcatcaactggatggaggaagagtttaactaccccctggac

SEQ ID NO: 3130 - DNA, 292 bp, Cricetulus griseus
  misc_feature (153)..(153): n is a, c, g, or t
gatcgccctgatactttaatgtctacctggggctccctgtctaagatgacagtggtcaggtaaagagcctggaacccctcatttgtcatcgtccatggccagggctaggaagtcacctagagggtggtctgtgtctgatgtgcgggggtgtcnagaggcatggggacagttcactgaccagtgaccctcttcctggcattttggacatggtttgggtggcactcggggattaggacaagcccaggcccaatgcccttcctgatcacatttgaagcatggacgctgcggtcct

SEQ ID NO: 3131 - DNA, 341 bp, Cricetulus griseus
tatacacgagcgcgcagctggttgagctggagaaggagtttcacttcaaccgctacctttgccggccacgccgagtggaaatggccaacctgctgaacctcacagagcgccagatcaagatctgggggcagaaccgccgaatgaagtacaagaaggaccagaagggcaagggcatgctgacctcgtctgggggccagtccccaagtcgcagtcccgtgcctcccggtgcaggaggctatctgaactctatgcattcgctggtcaacagtgtcccttatgagccccagtcaccccctcccttctccaagcccccccaaggcgcctacgggctgccttccgcc

SEQ ID NO: 3132 - DNA, 201 bp, Cricetulus griseus
tgtttctttttgcacatctgttttaatttaatatttgaacctggaattggggaagaatattttataggtggcatagggccaaagcctatggtttggacagaatcatgccagcatgaaaagaaaagaacattctccttatatggcggggggagattgcatcgggatccctagctgtcgatgtctctggacatgttcatgtca

SEQ ID NO: 3133 - DNA, 90 bp, Cricetulus griseus
agatgcagctcaatgtaaaaatttgcctcgtatgcttgcaactctgggtcctatccctaccattgccaaaactcaatggaaaactggtct

SEQ ID NO: 3134 - DNA, 516 bp, Cricetulus griseus
  misc_feature (192)..(211): n is a, c, g, or t
  misc_feature (221)..(238): n is a, c, g, or t
gttcaaggaaaatacatctgtcttaaactggaatcttttgatattcttcagaataatgaagttcaatttcattattgtcatctgttttgggcttttttctaagtaggtcttttggggggtctttgttttatttttgttattttggctgtgttttgctgtttatttttcttttgagggggattttttgagagnnnnnnnnnnnnnnnnnnnnctgtagctcnnnnnnnnnnnnnnnnnnttatgtagaccaggctgtcctcgaattcttaaagctctttgtgcttctgcctcctgagtgctgggactaaaggcttgcaccaccaccatcctgctttaagtagtatttttaaatcacaagcattttggtattagaaacttggtatattgtgcctgggcggagcaaaaagggcatccagcctctctggacttcgtatcactgtcctggctcttagttcatacagttgttctctggatgtatgtctctccatcgggctcccacttctgaaacccatttcc

SEQ ID NO: 3135 - DNA, 260 bp, Cricetulus griseus
  misc_feature (204)..(204): n is a, c, g, or t
caccatgatcatctaccgggacatcatcagccgtgacgagcggtgctccgacatctacaaaatccgggagatcgcggacgggctgtgcctggggggggggggcgagatggggagtagagcggagggggacatcgatgactcgctcatggggggaaatgcttccgccgaaggcgcatagggcgaaggagaccgaaagcacagtantcaccggtgtggatattgtgatgaaccaccacttacaagaaaccagcttcacaaaa

SEQ ID NO: 3136 - DNA, 105 bp, Cricetulus griseus
attgtttacttgactcagtactacaagctacctggggcatttatgacaaagactcggggcttcggaaagccctgcatgacagcctgcatgactgtgcacattggt

SEQ ID NO: 3137 - DNA, 207 bp, Cricetulus griseus
ccatggcgctgactgtgggagggaccatctactgcctgattgccctctactggcttcccagcccaaaataagtgaattagcctttgggagactcttcgtggcacaaaccctttgatttttcaaattcctgggtttttgttttggggggggtttgttttttttccacttgggatgggctactaacatttttgcaaacaaaggaaaaga

SEQ ID NO: 3138 - DNA, 220 bp, Cricetulus griseus
ttattttacaaaaattaactaaagatcttcttattctgaaatgaagaaaacaaaacttccactttccatttctaatctgaagaaacttgacagtataacatatatttacaatgtcgtgagcgggaggtgttacatatgttacttcaatgcaaattctactcaactcttacacagcttaaaaataatatcgcccatatgacagtcttgctgatttttatat

SEQ ID NO: 3139 - DNA, 229 bp, Cricetulus griseus
  misc_feature (149)..(149): n is a, c, g, or t
tttaaatcaccacagtccttataaatggcacagctgccttgtcatcaacaatgtctcagatttgataaaagaagcccaagacatgggtgacatccacaagacagcattaaggagaacagatcccaaatgcaaggtgatggacatctcanaacttgtgactggcattccgtcactagtaaaggaagcaaaagatgcctgtgctaccatgacctgaaattaaaggcgggct

SEQ ID NO: 3140 - DNA, 406 bp, Cricetulus griseus
cttaagtggcccgcagcgtgctgccactgtcggtagtcttcattggcatgataagtttcaataacctctgcctcaagtacgtaggggtggccttctacaacgtggggcgctcgctcaccaccgtgttcaatgtgcttctgtgctgacgggctgctcaaacagaccacttccttctatgccctgctcacatgtggcatcatcattggtggtttctggctgggtatagaccaagagggagctgagggcaccctgtccctcataggcaccatcttcggggtgctggccagcctctgcgtctccctcaatgccatctataccaagaaggtgctcccatcagtggacaacagcatctggcgcctaaccttctataacaatgtcaatgcctgtgtgctcttcttgcccctga

SEQ ID NO: 3141 - DNA, 343 bp, Cricetulus griseus
  misc_feature (195)..(195): n is a, c, g, or t
cacagtttctctggaatgcactttatcggtaccgggcctgtgaccactgtcttcgggcactggagaaggcagaggagaatgcacagaggctgactgggaaaccaggccaggttctcccacacccatagctgtgcattgtgcgcaaggggcggcaccataactgcccgcattgccaggtgatgtactgcagtgcanaatgccggctggcagctgcggagcaataccaccgagtcctgtgcccaggcccatcgcagggggacccccggcaccccctcaatatgctgcaggaggcatggaggagtgttcactatcctccggagactgcaagtataatgctgatggc

SEQ ID NO: 3142 - DNA, 457 bp, Cricetulus griseus
  misc_feature (78)..(95): n is a, c, g, or t
  misc_feature (160)..(160): n is a, c, g, or t
ctctcattagtggtttccgttccattattaagcctgagtggatccgaatgttctccacccctgagcttcatcgtctcnnnnnnnnnnnnnnnnnngagatggatctggaagatttaaagaagcacaccgtgtactatggaggctttcatgggagccacanagtcatcatctggctctgggatattctggcttccgacttcacacccgatgaaagagcaatgttcctgaagtttgtgaccagctgctccagacccccactcctaggattcgcctacctcaagcctcccttctccatccgctgtgtggaagtgtcggatgaccatgacactggggacaccctgggcagtgtcctcaggggcttctttactatccgcaagcgggagccaggtgggcgtctgcctacttcttccacctgcttcaacctgctcaagctgcccaactacagcaagaaaagtgg

SEQ ID NO: 3143 - DNA, 455 bp, Cricetulus griseus
  misc_feature (386)..(400): n is a, c, g, or t
gggaggagaagcagcttgaggcatccttagatgcactgctgaatcaagtggccgatctgaagaattcactggggagtttcatttacaagttggaaaacgagtatgaccggctgacttggccctctgtcctggatagctttgcattgcgcggtggacagttgaacactctgaacaaggtcttaaagcatgagaagacaccactgttccgtaaccaggtcatcatccctttggtgctgtccccagatcgagatgaagacctcatgcgtcagactgaaggacgagtgcctgttttcagccatgaggtcgtccctgaccatttgagaaccaagcctgaccctgaagttgaagagcaggagaagcagctgacaacagatgctgccagaatnnnnnnnnnnnnnnntcacaagcagatccagagcttgaataaaatgtgctcaaaccttttggagaaaatt

SEQ ID NO: 3144 - DNA, 371 bp, Cricetulus griseus
cctggcaatgctggagcaacctcttggaaatgagcagaatgattttttcccctctgtcactgtgttggtccggggaatgtctggaagacttgcctgggctcatcaactttgccttttacccagaggagcaaaagcaaatcagaagctttttgtgccagaacctcgcccagttcctaaaaatgatgttggatttaaatattctgtgaaacatcgaccatttcctgaagaggtggacaagattccttttgtaaaagcagatttaagcattccagatttacatgaaattgtcactgaagaattagaagacaggcatgaaaaactaaggagtggtatggcccagcagattgcatatgaaatacacctggaacagc

SEQ ID NO: 3145 - DNA, 107 bp, Cricetulus griseus
tcggggcaatgaacatcatgccattaactgtgtgaatccactgacattgttggctttcctactggcttcacctgacctttctttgctccatattcagtcttatattc

SEQ ID NO: 3146 - DNA, 343 bp, Cricetulus griseus
attcttcagaaaggactgcagtatgtggaggcggagatcagcatcaatgaggatggcacggtatttgatgggcgtcccattgagtcgctatcgttgatcgatgctgtgatgcccgatgtggtacagacaagacagcaagcctttcgggagaagctcgctcagcagcaagccaatgcatcggctgcagcggcggcggctgccgcagccacagccacaaccacagcagctacaacaccagcagctgctgctcagcaaaacccaccaaagaatggagaagccaccgcgaatggggaagagaatggagcccatgcaataaataatcactcaaaaccaatggaaatag

SEQ ID NO: 3147 - DNA, 552 bp, Cricetulus griseus
agagcgagaggaggagggcgctcccggccaccgcgctgcagacgccattatcctctgtttccccgctgcacggacgtcgccgaccgtcgtgctcgtctcgcgcccgggtgcggcctgcagattggtgtatccatttaattcaagaaaatggagaccgaacagccagaagaaaccttccccaacaccgaaaccaatggtgaatttggaaaacgccctgcagaagacatggaggaggagcaagcctttaaaagatctagaaatacagatgagatggttgaactgcgcattttgcttcagagcaagaatgctggggctgtgattggaaaaggaggcaagaatattaaggctctccgtacagacgtaagtattaaactactaaacaagtgaattccttgtatgtttctagacttaaaggttcacatcttagaaatccctgaatgtagctacaaaccatttctaataattaatggttatatagatggttcctgctttttttaagccctgattaaggtggaacatatataattaaatcttttcattttccgataaggc

SEQ ID NO: 3148 - DNA, 302 bp, Cricetulus griseus
aactgtgaacgctcaggccgacagggccttccaacatctggaacagaagtttgggcggatgcggcgacactacctggaacggaggaactacatcattcagaacatcccaggcttctggatgactgccttccggaaccacccgcagctgtcctccatgattaggggtcaggatgcagagatgctaaggtacgtcaccaacctagaggtgaaggaactcagacacccgaagactggctgcaaattcaagttcttctttcgaaggaacccctacttccgaaacaagccgatcgtcaaggaatatg

SEQ ID NO: 3149 - DNA, 285 bp, Cricetulus griseus
  misc_feature (222)..(276): n is a, c, g, or t
gataacaaaaaatgttgttttaactcttacctgagctgacttgctcaggttttatcttatttctaaatagataaaattaaaaaggtaagtaaactaagctaagcattaagcatactgttttaatagctatatactaggtagctaattgctcttgggtttctttagaataaagcatgaagggaaacaatggcttctcatggcattgctcaatgttttgtgttnnnnnnnnnnnnnnnnnnnnnnnnnnnnnnnnnnnnnnnnnnnnnnnnnnnnnnnaatgatgtt

SEQ ID NO: 3150 - DNA, 358 bp, Cricetulus griseus
cttccgagatgttctgggcacgggtgccttctcagaaggtatcctggcagaggacaagaggactcacaagctggtggccatcaaatgcattgccaaaaaagccctggagggcaaagaaggcagcatggagaatgagatagccgtcttgcacaaaattaaacatcccaacattgtagccctggatgacatctatgagagagggggccacctctacctcatcatgcatctggtttcaggtggggagctatttgaccgcattgtggagaaaggattctacacagaacgggatgccagccgcctcatcttccaagtgctggatgctgtcaagtacttgcacgacctgggtattcgtgcatcg

SEQ ID NO: 3151 - DNA, 522 bp, Cricetulus griseus
tgccacggctagggtaggttccgggcacagagagtacggctcaggccggcggtagccgggagggcagccgcctccagctcccggctgggggccttggaaaggaccgctctgaactgtctctcaaccatggatcacgacgaccctgccgaggctttgactgcgctgcgcgagaggcggccgggcttggtggagatattgcaagcggcggcaggctccgggttggccgcctacgctgtgtgggcgctgcttctgcaacccgggttccgccgcgtgcctctgaggctgcaggtaccctacgttggcgcgagtgcccggcaggttgagcacgtgctatcgttgttgcgaggccgccctggaaaaatggtggatctaggctctggtgatggcaggatcgtgctggcggcccaccaatgtggtctccgtccatctgtgggttatgagctgaacccgtggcttgtgggacttgcacgactgcatgcctggagggctggttgttctgggagtgtctgcctaccatcgaaa

SEQ ID NO: 3152 - DNA, 510 bp, Cricetulus griseus
gctgcgcatctcggggcgcaatatgaaggtgcttttcgccgccgccctcatcgtgggctccgtcgtcttccttttgttgccgggaccctccgtggccaacgataagaagaagggacccaaagtcacagtcaaggtattctttgatcttcacattggagatgagcctgtaggcagagtgacctttggactctttggaaagactgttccaaaaacagtggataattttgtagccttagctactggagagaaaggatttggctacaaaaacagcaagttccatcgtgtcatcaaggacttcatgatccaaggtggagacttcaccagaggagatggcacaggaggaaagagcatttatggtgagcgcttcccagatgagaacttcaagctgaagcactatgggcctggatgggtgagcatggccaatgcaggcaaagacaccaatggctcccaattcttcataactacagtcaagacatcttggctagatggcaaacatgtggtttttggcaa

SEQ ID NO: 3153 - DNA, 259 bp, Cricetulus griseus
aagcttgttaagtaactataaagcagaaaattgagaaactaattctcccatatatcattgcttatattttaaaaataagttaataactaatttaagcgcaaggaaaacacaataattatataaaatgtaaggacattttgtagtatatatacaaacaaaaggttaatttttaatcaatactttattttgttcattttttgagattttaacaattacatcatcaccccatctttttttttttaccccaaacccccttgct

SEQ ID NO: 3154 - DNA, 141 bp, Cricetulus griseus
gtcttatgaatgacacaatggctacagactctcctagaagacccagccgttgtacgggtggagttgtggttcgccctcaggctgtcacggagcagtcttacatggagagtgtggtgacctttctgcaggatgttgtgccgc

SEQ ID NO: 3155 - DNA, 472 bp, Cricetulus griseus
tcaacatcgcactggcccttgagagaaaatgcaaggccaatccagtggactagtggcactgtgattctttctcttgcttggaagacactaacatttaatgagcgccagctgtgggccagaacatgagaaagaaggaagcagcacctgggacgccaagaaccaggcctgccagcacaggagggctgaacctgctgccccctcctccagggagcaagacctccactcttatccctccccctggggagcagttgtcttttgggggctctgcagcccagccagcagttatttctgtttcaggaggtgccacagaaccctggccacagtctaagcctgctgccaccaccactgctgatatctggggcgacttcaccaaatccacagggtcgtcgtcctccaaccagtctcagccaggcaccggctgggtccagttttgatgcacaactttttcttcatgacttctgggaaggagctg

SEQ ID NO: 3156 - DNA, 579 bp, Cricetulus griseus
caatatatgcattttctcactggacagcccgatgccactttatattttaaagggtcacaaagatactgtttgtagtctttcgtctggaaaatttgggacattacttagtggctcatgggacaccactgctaaagtctggctgaatgacaaatgcatgatgacattacagggtcatacagctgcagtatgggcagtaaagattctaccggaacagggcttgatgttaactggatcagcagacaagactattaaactgtggaaagctggaaggtgtgagaggactttttcagggcatgaagactgtgtcagaggtttggcaattttgagtgaaacagaatttctttcatgtgcaaatgatgccagtattagaaggtggcaaattactggcgagtgtcttgaagtatactatggacatacaaattatatttatagcatatctgtctttccaaattgtagagattttgtgacaacagcagaagacagatctctgagaatatggaaacatggtgaatgtgcccaaacaatccgacttccagctcagtctatatggtgctgctgtgtgctggataatggtgacat

SEQ ID NO: 3157 - DNA, 385 bp, Cricetulus griseus
gtatagtggctcacaattgtaattcagctcataggcaaaggcaggaggaatttaaggtcatctttgggtacataacacttaaaggccaatgtgggctacatagagactctgttcgaaacaaacaagccaatagcacaaacaacaacaaaaagggaaaatatccacagattatcgctcctttcctcattttccttcagtggttatggcttgcctaagtgtagcacggtgccacaaatagggtattgagagtggtagggtaaagacatccttatgctgcccttttataattgaatacactttcctattaattaaaaactccacaacatcattaagcatttatttgctctattacgtatgataagattattaaatgtggacccatcct

SEQ ID NO: 3158 - DNA, 263 bp, Cricetulus griseus
cagtagccacagacaatcacaggcatcagtttagaccagttttgatggtcaagttcttggcttgcctttccaggtagggggtaaaagttccgtcggcctatggggtgacccataaaccgagtggaagagcccatcccatgtaggctcatgaaacctgggaactgccttttcctcacaaggcaccaccgatgcccattgcttgggaaactatcctatcaggtgagccatgtgccctgccaggggagtaacaggtgctgcctttt

SEQ ID NO: 3159 - DNA, 501 bp, Cricetulus griseus
  misc_feature (363)..(382): n is a, c, g, or t
gggaggggaggccgagtcctggaagtggagctccgcgctgggactggttccttcgcagccattttctgtccaaccaaacagccgattggagacgggagccaaccagggctgcattggaggttaaaattgggcaaggatccaacaccttttgacaggtgtttgagagcaccactagtacacagttctgacagtgtttcatgacaatggatggcgacagttccacaaccgacgcttctcaactagggatttccgcagactacattggaggaagtcattatgttatccagcctcatgatgatactgaggacagcatgaatgatcatgaagatacaaatggttcaaaagaaagtttcagagaacaannnnnnnnnnnnnnnnnnnnaaatgtggctaggataatgaaaaatgccatacctcaaacaggaaagattgccaaagatgccaaaaaatgtgttcaagagtgtgtgagtgagttcataagcttcattacgtctgaagcaa

SEQ ID NO: 3160 - DNA, 404 bp, Cricetulus griseus
aggcagccaccaaaccctgctccaggggtccagcagatggggccgccatattacactgaccctggaggacctgggatgaatcctgttggcaacaccatggcaatggctttccaggtccaacccagttcaccccacggagtcacagcctacccaccccctccttcctactgcaacacgcccccgcctccctatgaacaggtggtgaaggacaagtagcaagatgctacacagaaggcaaagaggctggacaggcccttctgtgtgtcctccccaccctcaccgatacttgctaacagggtggtccaagggcaaactgctctttgatgtcttcaaagcaagcccagctctctttcaagttttttgtggaggacatttgaatttcagtctcctctgtcgcttctgtc

SEQ ID NO: 3161 - DNA, 179 bp, Cricetulus griseus
  misc_feature (9)..(26): n is a, c, g, or t
tttctgctnnnnnnnnnnnnnnnnnntctcacccgcgccgctcctcgcctctcttgttagcccgagactcgcctctcagccgcccgccgcacagacgcacgagtagacagtgcagctccatcggctgatcctcgctgagctccgagggtaggcggtaccgggcggcccacgatgccgaa

SEQ ID NO: 3162 - DNA, 544 bp, Cricetulus griseus
cctggcctctcgggcctttccatgagttctctggccagtgcacatctgtgacaaccaggtatgttgagtcctggtctcaccctgggagcacaaggcacccctctcttcctcctatatgaccctagtgtgccacactctgcagacccttagaaaataagtgtttacatggctgggcgagggccctgcccctggggcacacccacccacactgctgaagccactgtagcctgggactactgctccccacggccccagggaggagtctgattttattaaggtaatttcttatagagcagtcaccaaaccttaccacacagtgaaggtggagtatccacggctactccctgtagtgaggtaatcgtcctcatagccacagtctctggatcctttgcctctgccttcataagctgccaggtctcccctcctagcagtggctgaggaagggctctgactccaacaggcctgcacctgactagagaccccctccatgttgtcccctgcatttcttgctggctcccagtaggtgtgcagcagccttctctcc

SEQ ID NO: 3163 - DNA, 471 bp, Cricetulus griseus
  misc_feature (330)..(330): n is a, c, g, or t
atattctccatactgtccaacccaagggcaagatcaccttctgcaccggcattcgagtggcccatctggctctgaagcaccggcagggcaagaatcacaagatgagaatcatcgccttcgtgggtagccctgtggaggacaacgagaaggaggtggtgaaactagccaaacgcctcaagaaagaaaaactcttcgtgtttctatggaagagcagcggcagcggcaggaggaggaggcacggcgggcagccgcagcctctgcagctgaggctggaattgccacatctgggactgaagacacggatgatgccctactgaagatgaccatcanccagcaggagtttggccgtgctgggcttcctgacctaagcagcatgactgaggaggagcagattgcctatgccatgcagatgtcactgcagggagcagagtttggccaagcagagtctgctgacattgacgccagctcagc

SEQ ID NO: 3164 - DNA, 493 bp, Cricetulus griseus
aaatatattgtagggtttattgaaaagaaatttgaaataaaaaaatgctttagttgcaagattaagcttggagcagtgtatcctttcaaagatacatgtcaaaggactgaatgagattcatccaaagatgcttagctgcttcattaaacattctggcttgttctcctgtacaccaagctccataagctcatagagagggaatcagagtgttgtggggtagaaaagaaagatcctgaatatgtcctggactccagttgagggcacaggaacccatatgactaaaaaccatacagatcttgacaggacagtgtggctgagaatatcctctccaccttggggaattaaagctttccatagtctagccttgatatagaacttattcttgggacacatgttacctgccagcttttggttaagctcattgctcttttgttgatgaatctttaagaacaattgctacaatataattttgtgaacttggagaactgaatat

SEQ ID NO: 3165 - DNA, 382 bp, Cricetulus griseus
tgatgcggccttgtttactatggaaccaacatcaggccttctgagactagtgaggcctcttgatgctgtctgttcagcaggtcaagagatgacacatcttgattctgtgagacattttttggttgtttacaagcggagcactggggactgtaagggcatggtgacacctgcagccggttagttcccagtctgctggtgtgaggtttttgcagacttttacacacattgctccaagagaccagagctcccataatgactttgttgaggaagaacaagaagcgtttgtcctcagtgtgaacttgctttgcctgccccgggctggtgaaggggtgatgggcgggttccctcctcctccttcctttccccactgggagtgggtgag

SEQ ID NO: 3166 - DNA, 335 bp, Cricetulus griseus
  misc_feature (143)..(143): n is a, c, g, or t
attcaggatattgtggtgcactacaccttcaacaaggtgctcatgctgcaggaacctctgctggtcgtggctgccttctacattctgttcttcaccgtcattgtctatgtccgtctgggacttttccatcaccaaggatccanctgcgggaagccaggatgaaagtggcctgtgtcacagagcatgtcttaaccctagtcaacaagaggtgaggcctctaccgtcactttgacgagaccatcaataggtgcaagcagtcccgggatgtctctactctcaatagtggcaaaaagagcctggagaccgagcacaaagctgtgaccagtgagattgct

SEQ ID NO: 3167 - DNA, 421 bp, Cricetulus griseus
aggccaggcaactactttccagatgactcttaatggcaaacctgcacctccacctcagagccagatccccgaatggagcagttagggagggttgtggaactggacagtgacatggtagatatcactcaggagccagttttggattctgtgttagaagagtgtgtgcctgaggatcaagagccagtgtctgcttcgacacacattgcatcttcgctgggaattaatccacatgtcttacagatcatgaaagcatcattgcttgtggatgaggaagatggagatgccatggatcaacacttcagtcacttcccctccaaaggagatactgttcaagaaatctgttctcctagacgccctatttcagcctcccactcatcaaaatcccgttcaatcgttggtgggttgctgcaatcaaaatttg

SEQ ID NO: 3168 - DNA, 391 bp, Cricetulus griseus
  misc_feature (85)..(109): n is a, c, g, or t
cacaccaagaggagaagaaaaaggtggaagacaagaagaaggatcttgaggaggaggtgagcaacttccagaagaagaaggcagnnnnnnnnnnnnnnnnnnnnnnnnnccatcagtccggggcccatcaaaccaagaaggacaagggtaggaaaaactgaccatctgcctcttgagagaaagaagtgggcatccttcctttaagttcaggagccattttttatttgactctgttacctgcaccccttacataagctgtttggacagttctgctcattctgggggcgggggattccaactagccagtcctgctttttgtatttgttatccagacttacttttggtatcaaaaattatgccagtcttgagctcacttcaagggaaaatgcat

SEQ ID NO: 3169 - DNA, 417 bp, Cricetulus griseus
tcttccaaagtgttgatgcataaagctacaaataaatgcactaaaattttgaagcaaatctaccttagaaacttttttgaaattgtacttttaaagatttaggattttgcttaaatattctgagttaaattctgtattaggaaagatgggggattctttccttaaatactaagtatgttcctcattttatttttaaccagatgttttatagaaatgagttgagaaaagtttaacatgcactatttatagtactttgccattaacaggcaatgttctaaaactaaatttatttttgttcagtgaacataagtttagatttttaaagttggtaatttatctccactaatatttttttaagaaactgtgaagagattaacggaataattttcagattttactaatgtaatgtgtagctac

SEQ ID NO: 3170 - DNA, 92 bp, Cricetulus griseus
agtctgtcgggctgcctgctctgggacgcaagcgctgcttcacatccgccgtacgccggccctgctgcggtcacccgccctgcggggtaccg

SEQ ID NO: 3171 - DNA, 491 bp, Cricetulus griseus
  misc_feature (158)..(172): n is a, c, g, or t
cattagaagatggtggctccagggctgttgagggacagaaaagcccccagaagagagaagttttgagtgtccgaagatctactcgaaacaccccagctagaaatgtgagtactctagaaaaatccattttagtgccaaatgaggaagttgctaaagtnnnnnnnnnnnnnnnaaaacctacaaagaagtctgcaaacgaaagccaaaaaagtccattaccagcaatatcagacttcaaggctgaaacaacccacaaagagccagctaaccaggaggaaagattgcttgctgctgcagcttcgactaaatcttcctggagcacaaggactaggtctagaaagaccatgttgttgacggacttttcagaacccaaaactgagcctttattttctcctccttcagtgaaggctccaaagaaagcaaaagctgaaaaaatggaggccactgcccagctgaaagagttggtatcagatttatcatctcagtttgtt

SEQ ID NO: 3172 - DNA, 339 bp, Cricetulus griseus
  misc_feature (5)..(20): n is a, c, g, or t
atatnnnnnnnnnnnnnnnnatttgattatgcctctataaatacctgtgaagaaagagtacagtccaaaatttattagccctgcctttctatggggaaagccaaggttgttggctgatacctctaatcccaaccactgagacccaagggccaggcgggggttatgggaaaatccatatcttcctgggctacagaatgaaaatctcaaaacaaaacaaaatgaattatcttttattccaaaaagagattcgcaatttgcaattcaaatatcttttttaaaaagttagtaatgtagagcagggtgtagtggtacatgcctttaatcccaccacttgggagg

SEQ ID NO: 3173 - DNA, 506 bp, Cricetulus griseus
ggaccttctggtgctccaccaatgcctggtggcccccattaccattaagttgacagtggatgaagagatggcgcatttctttttgaagtacatgtacatgcacatgaaggcatatatatacaaatggctattggtaaagggcgtgcctgaaagaacaactttcgtacctcagagagctcctggcctgcttcatgtgtttggatatgtagagcatcatgtgggtacaatcagataaaaatgtaaaagcaaattattcaagtgtggttaatgtggttatgtatactgaatagcttttgataataattgtttaaagtatagctgtgtcctcagactctaagactacatggattattgttagaatctgtaacttaattggcaaagtaattcaagtatttttttataatcacccccaacctcatatcactgaaaacagtcacgtaattggaacatgactcctcaacatcttgagagcctcttgtgaaattttagctacataaatatattgt

SEQ ID NO: 3174 - DNA, 347 bp, Cricetulus griseus
accaatggccaacatgcattctaccagcttattcaccaaggcaccaagatgataccctgtgatttcctcatccctgtgcagacccagcaccccatacggaaaggtctgcaccacaagatccttctggccaacttcttggcccgggcggaggccctgatgaaggggaagtcaaacgaataggctaagaaggaactccaagctgccggaaagagcccggaggacctggagaaactcctgccacacaaggtctttgaaggaaatcgcccaaccaactccatcgtgtgcaccaagctcacaccattcattctgggagccttgattgccttgtatgaacacaagatcttcgt

SEQ ID NO: 3175 - DNA, 489 bp, Cricetulus griseus
gcgcgtgggctgagacacaggaggaactgctcttcatacacaagcatacaaggatatacatatctatatgcacaaagtgtccatcctatacccaatgtgtctggttttggcactaaattcatatagttataccagacagcaataataactgagcatggagctaatggtgttaaaacagctcagtggtgagggtgggtagctgtatatagatatgcatgtatgtatataattttataaatcccacataagttaatacaggcctgtgtataaacacacatgtggaatatttgtgtatatatatgtacagataataaacatccttaagatttgtgtctggtcctacacctaggcatcaagttaaaaaccatcagacctcaattgtacaataataagggttttgtttaaaataattaaaagttctacagcacttagatatgaagtttgtcacacttgagtagccttgacaaccatgctgtaatactgaaccta

SEQ ID NO: 3176 - DNA, 182 bp, Cricetulus griseus
acaacatttggtgccctggacgtgggaaggctctgcccttggtacccccctccacatcccgctggcgggtacgtgtggggtgaaggacatccttatcacgcgaataaacaatccacattcctgacaccggtttgctggattctgcgtacaacaccggacccaattcggtaaggctacccctt

SEQ ID NO: 3177 - DNA, 437 bp, Cricetulus griseus
aaattaactattatgtttgcactaagatttactgggagtgatagatggacatatctatatatcattaaggactgacttgtctttctgtacataggaagttaacaatactgtatttgttttaaccccacagtgttttactccacttttcaaaaaggtccatttggcacttttatcttttttccttcctttcctctctccctccttccctttctttcttttattttcttttgtaaggaaatcagatttttgtctctccttttagatgaaatgactagaaaggtcaaacttgacagatagtttaggtggagtatatttttaaaattaagaacatgtatatttatcctgtgttaccaagtttttatgtggcagttggggagggggagccctctgaaatgatcatgaggtgaatttttcttcattaggagatgtggagaatc

SEQ ID NO: 3178 - DNA, 362 bp, Cricetulus griseus
aaaatgtgaaacctctcccccctcctccccgaggcccctgcgcttatacaggctgcacaagggcgcactgcacacagtcagccatgaggacatcagggacctgaggaactccacaggctcccagggtggtgcagtgagtaatcctagcagcagtaatagtagccaggactccctccacaaagccccaaagaagaagggcatcaagtcctccattggccgcttgtttggcaagaaggaaaagggccggcctgggccactgggcaaggagtcaccaggacaagttggcgtttcacagacagaaaatccatctcaagatgccttgggactcagcaaactaggaggacaagctgaaaaaaaaccgt

SEQ ID NO: 3179 - DNA, 329 bp, Cricetulus griseus
  misc_feature (194)..(214): n is a, c, g, or t
ctccgcagcaggccggaatccgtgtccatcggtcctcctgaacccgcgcagacgtcgtcaaagttgccatgccggagaacgtagctcccaaaagcggggcgcccgccgcggggccgggcagccgcgggaaaggcgcctaccaggggggggacaagccggcccagatccgcttcagcaacatttccgcggccaannnnnnnnnnnnnnnnnnnnngacaagccttggacctaaaggaatggacaaaatgatccaagatggaaaaggtgatgtgaccattacaaatgatggtgccaccattctgaaacaaatgcaagtattgcacccatca

SEQ ID NO: 3180 - DNA, 578 bp, Cricetulus griseus
  misc_feature (198)..(198): n is a, c, g, or t
  misc_feature (543)..(543): n is a, c, g, or t
tggtatgttattgccaggtagttggatagacttaagcccacaatttgaattgctgctaggagttacaaataatttctctgttccagggccaccaagttatgggttttagagagtggggatgagaattctgatcttggcttctaagtgagaaaccaggtatttgagtttccaagacttcaggcaggcatcacatcctanggctggtggatattgcagtgtaacatgggccctctggcatctcaaagggggtgcttaggaatgtgagaaggttctcgtatttattcagtagtgttttcttggtcattgttgtccttcctttagcttcagatctccagctgcagctggggacccaggaaggagtccattgtaaaacctgggaagaacttatgagtgtttggttgtggataaggtcactgccctaggtagaccaaacagaagactctgggtgaacagcattatgccaggcagagtcaagaacagtgttaatttaattcctcaagcagtttaacaggacaatgtccatctggaaggaagctcacctangtttgtggtaacaacagcacatatcagaagccaga

SEQ ID NO: 3181 - DNA, 553 bp, Cricetulus griseus
  misc_feature (273)..(273): n is a, c, g, or t
gcagcaagccatgcaatctctgaaggagactggcttcattaattactatggcatgcaaagatttggaaccactgctgtccctacataccaagtgggaagagctattctacagaattcctggacagaagtcatggatttaatactgaaaccgcgtgctggagctgaaaaggggtgcttggtgaaatgcagagaagaatgggccaagaccaaagatccagcctctgctctccgaaaactacctgtcaaaaggtgtgtggaagggcagctgcttcnaggactttcaaaatatggaatgaagaatatagtctctgcatttggcataatcccaagaaataatcgattaatgtatatccatagttatcaaagctatgtgtggaataccatggtgagcaaaaggatagaagactatgggctgaaacctgtgcctggggaccttgttctcaaaggagccacagctacctatattgaggaggaagatgttaataattactccattcatgatgtggtgatgcccctgcctgggtttgatgttatctaccccaaacataaaatt

SEQ ID NO: 3182 - DNA, 374 bp, Cricetulus griseus
agaacatcccaaactgtcccgctccgtgcccactcctctggtgattgctcataaaatttctgagaagttagcaggaaacgaagccctgtcccccacctccccatcgaaggagggcaggcctggggaatggaggacaccgacttctataacctgtcgaaatggggaccaggttggcgtatggcaccgacacacagcccagccggcacccaagatccaccgcttccccagcaacatatgcgtgaccaacagcgccggcaaggacttcaacaaaactatctccaaggcggccgtcaacgtgcaggagcggaaggcccatgtcctggccaacatcaatggcatgtccttcatcgccgcgggcgacacgtcatcggaag

SEQ ID NO: 3183 - DNA, 436 bp, Cricetulus griseus
  misc_feature (269)..(321): n is a, c, g, or t
gagtgtttttcaaaacacgctcattatgcctccaaacaggcacaatgagagtccacgtgatccatggaaagcatgtttttcatcattcatatccctgtttttattttacagaacccaataatgagccaacagtgaacttaggtcccccatgttgaaaagactgttattttggcctcaaggcagttttacaaggcaaagatgtttcctctctgagcagaatgttatagttttgccatgagaattttggtgcctggagtatcgaagtgcannnnnnnnnnnnnnnnnnnnnnnnnnnnnnnnnnnnnnnnnnnnnnnnnnnnngaccataaagcagtgacagaaccttgtctagcctccatcagagcagccagctcgcctgtgcttcaagcacaccaggcccatgtctatcctttgaagacttcaactcatttacctc

SEQ ID NO: 3184 - DNA, 481 bp, Cricetulus griseus
  misc_feature (403)..(403): n is a, c, g, or t
  misc_feature (445)..(445): n is a, c, g, or t
gtttggaaagagtgctagcaggggtgcatgggctccatcggaagttctgacaccattctctctaatgctgttatctatggcctgtaacagcaatgaacaattaagttctagggttgtggtactatgcccaagagatgtctgaggagctgttgagttatggataataggcctaaagttacactatgtttaaaagtcgatacaccttcttcgttaggactttgggtcaatgtgtcctctgtggttcatagttaatactacatctggcacactggcatcagcctacatagaacagccatctgctgtcttgcagctttgtctccctgtagtctgtgtctgttttctgtttgtaagtttcagcactgtgcagtaaatgccctgacttccatggtaaggcctaatttanctgcctgtgtctcccttgcaaaaaatgctgggagaggcaggngagcgggaagccacattgaagtgtcccggaagcacg

SEQ ID NO: 3185 - DNA, 507 bp, Cricetulus griseus
gaactagaatacttcggtctatctgctgcaattctggacaaaaatttcagaaaggcatatgactatatcagggtgatggtaatggaaaatgtcaataagccccagctgtggaatattttcaatcaagttaccatgcattggggagatgtgagacatcatcgcttctgtctccgcctgatgctgaaaaaccccgaaaatcatgcactgtgcgttctaaatggacacaatgcttttgtatctgggagcttcaaacacgcacttggacagtatgtgcaagccttccgtgcctatcccagtgagcctctctacaacctctgcataggcctgacctttattcacatggcatctcagaagtatgtgctcaagagacatgccctgactgtacagggcttttccttccctaatcgatacctcagcatacgtggaccttgccaggaatcgttctacaatttgggccgcggccttcatcaactgggactgactcaccttgcaatccactactaccag

SEQ ID NO: 3186 - DNA, 484 bp, Cricetulus griseus
tgatatgagaatatatttattctcagatagctagaggcttgcttggtaagtcagaccatgaggctgtgggagacgaagagaaggcagcaccttgctaatgcagatggggctggagtatcctcaggggtttcgacatgttaactcaggggggagatcgaaaccatcttgaaaggatgtgtgttagtgtcacgtaggggaaagggaggagagaatccttgtgcctttttgaggcttacgctgagataaagggacttttcttttaatagtgtaggacaaagagcctagggataaattactgtttgctcagacacaatgttctggagcttggtaaagttgctacacttagattttgatttatactttggttttcattgcctttttatttatttgtgtttagtaaaacctgagtgtgacttgtttgccagttatacaatgctgtgtgtcttggaatctaagttcacctactcattttgctttgctttca

SEQ ID NO: 3187 - DNA, 306 bp, Cricetulus griseus
gctcctgctccagcggcaagatgtgatccaccagctaggagggacgccaataaggcgtccgataagataagtcttataaaatatatagatgtatgatgattgatactgagctaacagatgagaatcctagtcattggccaagcagcactgggactaatacaagtctctctgggtattcatttgggcctaacttgggcaggcggctgccataaagcttacacgtggcggtggggctcatcggcttttggcagaaagatttatcgtaacagaatggtgtcagaagtgggatgaccccatgccccaagg

SEQ ID NO: 3188 - DNA, 482 bp, Cricetulus griseus
aaagaaaaacaagcatcattgtgggtccaaggagacatttttcgttccaaactgaaaaatagaccttccagtgaaggaagtattaataaaattatttctagcttggatgatatgtctattggtggaaacttatctaaattacaaagcatggaaaggtttggagagagtaacttataagatgaagatgtggaaatgaaaagcagcataacacagggagacaaactacgtgccttaaaaagccagaggcagccccgttcctcgccatcctgtgcatttaggtcagatgatatgaaaggacaccaaagggcagtgtcccagactttcagattaaattcttccccacaaccatctgtatctactgtgaagacccccaaagtgtgtttgtccccttcagcaacagccaaaaggataagcagaggttctttgtcttcgggcgcaaatataagaagcttctccataaactcccggctagccagttctct

SEQ ID NO: 3189 - DNA, 430 bp, Cricetulus griseus
gccaagcgcgaggctctcaggcgggaatgggtactaggtgccccgaggaccaggccccgttggcaccgagcttggatctactctgcggacgtgcccaagaagagccgcaggtcagagtcgccccttccggcctctagctcgccttgctatgggtcacgttggctctcgcaagcgctcgaggagtcgcagtcggtcccggggtcggcgggggtcagaaaagcgaagtaagaagagtagcaaggacgcctcgaagaactgctcagcctccaagtccccaggtcacaaggcctgcagcacctctgaggagagaagcaagcacaaggcccggaggacagcgaggtccagctcttcctcctcctcttccagttcttccagctccgcatcgtcctcatcctccagtgatggccggaagaagcgggggaagaacaag

SEQ ID NO: 3190 - DNA, 446 bp, Cricetulus griseus
  misc_feature (323)..(359): n is a, c, g, or t
gctggggtggacacctgcctacatgtggtgcttagcagcaaggtctgccgtggctacttgatcaagatgggtggcaagattaagtcatggaagaagcgctggtttgtctttgatcggctcaagcgcaccctttcctattatgtggacaaacgtgaaacaaagctgaagggggtcatctacttccaggccatcgaggaagtgtactatgaccatctgcgcagtgcagccaagagtccgaatccagccctcaccttctgcgtgaagacccatgaccggctgtactacatggtggccccgtctgcagaggccatgcgcatctggannnnnnnnnnnnnnnnnnnnnnnnnnnnnnnnnnnnngttcatgaactaactaccacgcacctcctgggtacaggtcagcaccaggacctatgccctgccactcactgctcggcttgtccttgg

SEQ ID NO: 3191 - DNA, 369 bp, Cricetulus griseus
  misc_feature (123)..(137): n is a, c, g, or t
ccaatacagaatagcaacaaaagacagaaaaacagtattaggtgtccctgaagtgttgctgggactcttaccaggagctggaggtactcagagactgcccaaaatggtgggtgtgccggctgnnnnnnnnnnnnnnntgactggtagaaacattcgtgcagacagagccaagaaaatgggattggttgaccagttggtggaacccctgggaccaggagtaaaacctccagaggaaaggacaattgaatacctggaagaagttgcaattacttttgccaaaggcctggctgatcggaaggtctctaccaagccaagcaaaggcctgatagacaagctgacgtcatatgccatgactattccatttgtcag

SEQ ID NO: 3192 - DNA, 84 bp, Cricetulus griseus
ccatctgtcaacggttcaccatccaccaattctgaaagtgatggatctagtacaggctctttgccaccaacaaatacaaatgtg

SEQ ID NO: 3193 - DNA, 515 bp, Cricetulus griseus
ttccgtcgctcttcatccccttgtcatcctcaacatctccgaccactggatccgcatgcgctcccaggaggggcggcctatgcaggtgattggggctttaatcgggaagcaggaggggcgaaatatcgaagtgatgaactcttttgagcggctgtcccacaccgtggaagagaagattatcattgacaaggaatattactacaccaaggaggagcagtttaaacaggtgttcaaggagctggagtttctgggttggtataccacaggggggccgcctgacccctccgacatccacgtccataagcaggtgtgcgagataattgagagccccctctttctgaagttgaaccccatgaccaagcacacagatcttcctgtcagcgtttttgagtctgtcatcgatataatcaatggagaggctacaatgctgtttgctgagctcacgtacacactggccactgaggaagctgaacgtatcggtgtagaccatgtggcacggatgacagcaacaggca

SEQ ID NO: 3194 - DNA, 366 bp, Cricetulus griseus
gtctttctggggtttcactttgataccaaattctcattattttcaatgggaatttttatacattgagccaagcttggatagcaaaacttcaagaaggacaggtggactgaaataagcagttagagggggcttttgagacaatcaccaagtgcaattccatggtgggtgcctccaggtgaggtatactgggacctcggcgttctgtctggcatctggggaccttcggattagctttatcaacctcagccttggccctaatgagaaactctttgtaagtgggctctgggttgttttcaccctgattgaacacagagatgagggataattaacactccacacatacttttatagaaatggaccaacttc

SEQ ID NO: 3195 - DNA, 332 bp, Cricetulus griseus
catcgagatagagaccgagatcgtgttcttgactatgagcgggatcgatttgacagagaacgcagatctcgagatgacaggaatcagtcatatcgagacaagaaagaccattcctcatccagagggaggaggatttgataggccatcctatgaccggaagtctgatagaccaccctatgaaggcccatccatgtttggaggagaaagaagaacttacccagaggatcgaatgcccctgccagctccttccctgggccaccaaccacctccaggtccacgggttgagaagaagcctgagtctaagaacgtggatgatattctgaaacccccag

SEQ ID NO: 3196 - DNA, 436 bp, Cricetulus griseus
aactctgcattctagctgcctcttcagaggcacggggttgcgggattggagaggtgggatggagccttttgagtcagatctggagacttgcctccaggccagcagcaccctctaatctgccagggtccctcttaacatctgatggtgagggtggggtgttgggtctgacttgaccccagtaccttagccatgggtggccaagtggaggggagttgacatccctagctaaagcacaagcaccttagtcataccccctccctccacccttgcccgggcctgttgtcccatctcccccagcaaagatcccaaagcacaatgtcctggtaacttggcaagcagctgagcctggccatggtgaggacaggctgtgctccctgcccagacttagtaagggggcagctccacgggactgaaaggtcttgtggtagagtgggca

SEQ ID NO: 3197 - DNA, 650 bp, Cricetulus griseus
  misc_feature (20)..(40): n is a, c, g, or t
  misc_feature (49)..(80): n is a, c, g, or t
  misc_feature (83)..(100): n is a, c, g, or t
  misc_feature (151)..(166): n is a, c, g, or t
taacccttctgtgtgcactnnnnnnnnnnnnnnnnnnnnngactatacnnnnnnnnnnnnnnnnnnnnnnnnnnnnnnnncannnnnnnnnnnnnnnnnngcccaggagaaagaggatgacgttgtgaagctcaagaatcacgaccctcannnnnnnnnnnnnnnnccacctgacactccggaaatcccagataaccactttttggataatctttgcatcttttgtggggagaggaatgagtccttcacagaagagggcctggacctccactactggaagcactgcctcatgctgacgagatgcgaccactgcaggcaggtggttgagatatccagcctgacagaacacctgctgacagaatgtgacaaaagggatgggtttgggaagtgccaccgctgcaaggaggctgatgacaaggaggagcttcccaagctcctcaaaaccaaggagtgcaaccctgccaaatcggagaaggtggcaaaccgatgtcctctatgtcatgagaactttgcccctggagaagaggcatggaaggttcatctgatggactctactggctgcacaatgaacctgcgaaagacacatgttctttacaaagccaccgccccacagcaagggaagggcccagcagcattgaagtcaagcacct

SEQ ID NO: 3198 - DNA, 650 bp, Cricetulus griseus
  misc_feature (1)..(21): n is a, c, g, or t
nnnnnnnnnnnnnnnnnnnnngtccgagtctttactgtatcatttgagtgaacttaaaggaatggcttcgtggaaacaaaaatatgaacctctaggactggatgctacaggcattgaagacgccattactgctgtgggctctttcatcctcaaggcaaacgaacttctccaagttatagatagtagtatgaaaaacttcaaggcattttttcggtggctatatgtagcaatgctgagaatgacagaagaccatgtgcttcctgagctgaacaagatgactcagaaggatataacatttgttgctgaatttctcactgaacatttcaatgaggctccagacctttataatcggaaaggaaaatactttaatgttgaaagagttggtcagtatttggaagaagaagaccaccaccttgtgtgacccccttaccccaaaaggaacccagtggttgacttcttccaaaacagcagccacctgaaagaaaggcctttgctgtttccttattaccctcgaaaatcattgcattttgtgaaaaggcgaatggagaacattattgatcagtgttggcaaaagccgggcaatgtatttggaagatcgatgaatcaggcaatttgcatttcattatatagagatgctaggagtatggact

SEQ ID NO: 3199 - DNA, 568 bp, Cricetulus griseus
  misc_feature (1)..(21): n is a, c, g, or t
  misc_feature (108)..(127): n is a, c, g, or t
nnnnnnnnnnnnnnnnnnnnnggtacgtgaataatagccacctagaagtgaattttaaccttaaaatacctattccagaaagtaaattaatgtattcaaactcagggnnnnnnnnnnnnnnnnnnnntgaggctttaaaaaccttagtcaaacaaagaaaaaactcggggttccaggagatctggcttgtgcaggcaccaggcatgcactaaatgcacagttctcatagaaaagtaaatcaaagagaccagtgagtatgagcatccatagtggattctttttaactctttgtaggactgttataattaaaagttgtttaagccagccatggtggcacaaatttttaattaacacattcaggcatcagatacaggttgacttctgagtttgaggccagcctgctacagagtaagttccagaatagccagggctatccagagaaaccctatcaaaaaatgaagaaaaataaaacctgtttaaactacttgatagtttagaaacaaaagccctccttagttaattctataaagccagagcaaacttttccacaccctgcaaaatccatcag

SEQ ID NO: 3200 - DNA, 568 bp, Cricetulus griseus; identical to SEQ ID NO: 3199
  misc_feature (1)..(21): n is a, c, g, or t
  misc_feature (108)..(127): n is a, c, g, or t

SEQ ID NO: 3201 - DNA, 650 bp, Cricetulus griseus
  misc_feature (1)..(35): n is a, c, g, or t
nnnnnnnnnnnnnnnnnnnnnnnnnnnnnnnnnnnaaattaatgaagaccctcaaaataaaaaagagatctgaggatgaggttcagtggtcgttactatgcacaaggccataggttcaagccccagtactttttaaaagcaacatctgacatttagaatagcatattataagacatagtcctaaccgagatagttgtatttgaattaaccctggagaccactctagtggttatttttcctttattttggctcacaatttcagagcggtttcaatacatcatggcaggaaaggcaaaacaactccaactctggctgtgagatgggagcctgaagaagagcagctgctcacaacacaggaagcaatgagaagagtgagcctgtccctggtagtctgcttctcaccagccagccccttccataggccggacagccttcacaatagggcacagactggggaccaagtattcaccacataatcctgtagtggacatttcagattcaaaccctaacagtaactgtagaagagaaagttaaaaagctgttcgttcacaagaagtgatctgtaaccctttactgtgtcctcatgctgtgagctgagagttggagtttattgcctgaaggagactgaataaaaacttgatgagagaaga

SEQ ID NO: 3202 - DNA, 650 bp, Cricetulus griseus
  misc_feature (1)..(22): n is a, c, g, or t
  misc_feature (81)..(109): n is a, c, g, or t
  misc_feature (250)..(280): n is a, c, g, or t
  misc_feature (499)..(535): n is a, c, g, or t
nnnnnnnnnnnnnnnnnnnnnncggccgccctttctttttttgtttcctttattgagggttaattgctcgctagacgcccnnnnnnnnnnnnnnnnnnnnnnnnnnnnncgggtatccgctcaattttcccccccaaataaaaaaaaaaccccccattttaaaaacccccttttaaatttttttaaaaaaacccccccctttaaaaaaggggggaaaaaccaaaaaaccctttttaaaaaaccccccccnnnnnnnnnnnnnnnnnnnnnnnnnnnnnnnccaaaaaggcccaaatgttcccccaaccgggttaaggaaaaaaaacctcctaaaaaagggggttttttaaaaaaaaaccccttggggggggacacctggtttttatttggaaagggaaccccctttccttggtgggggtttaaaaggggcccaccccccgggggggaaaaaacccccctttttttttttggggcgcctttttaaaaaaaagggggcccnnnnnnnnnnnnnnnnnnnnnnnnnnnnnnnnnnnnnttctgcacccccccttttttaaaaaaagggggaaaggggttttccccccgggtttttttatatattttttttgggcccccgggaaaaaaattatattggggcccgttgtttataa

SEQ ID NO: 3203 - DNA, 650 bp, Cricetulus griseus
  misc_feature (1)..(38): n is a, c, g, or t
nnnnnnnnnnnnnnnnnnnnnnnnnnnnnnnnnnnnnntaggacccagactcgtaaactgggatttgtggtattgtgtggtagactgccacctcagctaatctatggagttagtgcttgcttaacagcataacccaaaggaaggtcccaacaggatcccacaccagacctgtctctggctgattttcaggatacttcacacttgtcccttcggtagctccagcctagagatcatcaacttgtgagccaccagatggctggctctattcagtgtgcccttctcaacattcctagggatattctggatggttagacgattctctctgactgattggtctgtgatatattttgaatatgaaacattccctgcaggctcatgtgtttgaacttaggacccagctagtgaccctgctttgggaggctgcggaacctttatgacatgacgtctacctgatgtgcagacttacgagttgttacacgccatcctaagcttccagcaatctttacgctcatgatagccacaggggtggaatctacagtcttgtgcctccactaccacactcttgacctgcttgcactactgaggcctccctgtcatgactggttgaattccctgacccctgggccagagtgagtacttacccatagttg

SEQ ID NO: 3204 - DNA, 650 bp, Cricetulus griseus
  misc_feature (1)..(26): n is a, c, g, or t
nnnnnnnnnnnnnnnnnnnnnnnnnnctttgtttttaactaaatactatatattaagggactgatgaatacatagggtgtgaatactcagtaaaggatgattcaataatgaggctatttttccttttctttgataattaaatttttttggatagtaagagaataaatacttgctcaaaatggccccaaaattctgaggagacagagctctggattattttgtttcatatcaattcattaaaacacttatttctagcactgaaatcaggctaggaaacccacatttgggatcagtcccctatctgacacttaaggaaactagtgacattatttctcacaccccaaagatgtatttctgatggataggagacattggcggtaacttaataaacaacttttctgatgcctattgtaacatttcaaccatcactatcactctaaaagcccttaaattattttcttaggtagcaactgatggatttcactaactagcacaagtcactaaacatacataggaaatgggcaagccacaagttaatggcaggtcccataacttatataaagagagctagattcagagaaaaggatcttacttagactacttataattgtcctattggtccacagcactataaaagttcagtgatttga

SEQ ID NO: 3205 - DNA, 650 bp, Cricetulus griseus
  misc_feature (1)..(21): n is a, c, g, or t
  misc_feature (179)..(215): n is a, c, g, or t
nnnnnnnnnnnnnnnnnnnnngatagcaacacagagagcatgtggcaagactgctcataccatggtggtggtacagaaagggaagaggaaagcacagtgggggagacagatgataggtgatagataataaataggtatatatggatgatagatgatagatgatggatagatatagatgnnnnnnnnnnnnnnnnnnnnnnnnnnnnnnnnnnnnngtaggaagatactgattaagtaagagcaagttgcctggccagggattgttttatgtggcagcatatcgatgattcagaggacttacttgggaatgttgtaattatggcagcttgggaaggaggcgccacatctcagggcatgccgtatttactcttggtgaatgattattgcgttatcaattgatgtttctagataagagtgcttgattctactgaattaaaatacttctaggcactaaatcagagatttaagatttgaatgtttaatctccctctgacattatataacagaataaagtttatatcttaattgtgagacatgcctatgttggcatataattactgtcctaaattgtgtgcttactaaaggattcctaatattctatgctggacaatatacattattataatgaggtatgggagcagaatgggaag

SEQ ID NO: 3206 - DNA, 650 bp, Cricetulus griseus
  misc_feature (1)..(21): n is a, c, g, or t
nnnnnnnnnnnnnnnnnnnnntaccatcggcctcctcgctgcatccacgtctataacaagagtggggtgggtaaagtcggcgaccagatcctgctggccatcaggggacagaagaagaaagcgctcattgtgggacatcgcatgcctggctcccgaatgaccccaaggtttgactccaacaatgtggtcctcattgaggacaatgggaaccctgtggggactcgaattaaaacacctatcccaaccagccttcgcaagaaggaaggcgagtattccaaggtgttggccatagctcagaactttgtgtgagcagagcggctctgagccatgcaaccattcccttcacactggtaacagaataaatgttttaatgtgtgttttcttcctatgctgtctgagctgcggttgtgaggagggtaacagcagttgaatactggcttcctccctcgacccccggagtggcctgggctttctttacagctcacaatcatgggtcattcagtgattcaacaaccgttgctcttctcttcttcacttgttggtctccttggggggagtaaggactcccttagtttctttaatagaatctcgtcaacacacataatattttgttaaagatactgtggggttaaagagatggctactcttct

SEQ ID NO: 3207 - DNA, 569 bp, Cricetulus griseus
  misc_feature (1)..(20): n is a, c, g, or t
nnnnnnnnnnnnnnnnnnnngaaacctatgattatggtggttttacaatgatgtttgatgaccgccgtggacgtcctgtgggatttcccatgagaggaagaggtggttttgacagaatgcctcctggtcgggctgggcgtcccatgcctcctgctagaagagattatgatgatatgagccctcgtcgaggaccaccaccaccacctcctggccggggtggccggggtggcagcagagctaggaatcttcctcttcctccaccgccaccacctagagggggagatctaatggcttacgatagaagaggaagacctggggaccgctatgatggcatggttgggttcagtgctgatgaaacttgggactcggcaattgacacatggagcccatcagaatggcagatggcttatgaaccacagggtggttctggatatgattattcctatgcagggggtcgtggctcatacggtgatcttggtggacctattattactacacaagtaactatccccaaagatttggctggatccattattggcaaaggtggtcagaggatcaaacaaatccgt

SEQ ID NO: 3208 - DNA, 650 bp, Cricetulus griseus
  misc_feature (1)..(20): n is a, c, g, or t
nnnnnnnnnnnnnnnnnnnnagaattagcagaagccattcaaaaatcagcagaggatgcagagcgtcagaagccatgatgcatgtagtgtgtgtgctgcagctgcagtgggccccagaccagagaaaagcagtaaagaatctacctcactgggaatatcatcattgctgacttcagatggattcaatcatccagtcccttcttcagggcaaagtcctgaggttggtagccctacgagtcttgctcgctctgtctctgcttcagtctgcgccatcaagcccagtgaccccaatagcattgaacctatagctatggaggctatgaaggcttcggctgaattgcagacgaactctaaggaaacagagcctcctgctctgcaggctcttcctcatctcgcttccccagcaggccaggatccagctatgcctttgcgtctttcatctgaagaagcatttgttacagataatccagagaaatctgtggaaagaagagcccagggcctcagagtttatctccacacaagacaggacactagtttatctctcacaactactgggatgcatgggctacaggggtttgtagaagaaaagagttggcatccagaaaatccgaaccccagtcaaatgaatggccttcagcaacacagagaac

SEQ ID NO: 3209 - DNA, 650 bp, Cricetulus griseus
  misc_feature (1)..(21): n is a, c, g, or t
  misc_feature (438)..(456): n is a, c, g, or t
  misc_feature (621)..(642): n is a, c, g, or t
nnnnnnnnnnnnnnnnnnnnnaaagataattgttcatttgaagcatgtacaatgtaaacaatttcagatggccaggaaaagagtaagcacagtggaaataagatctttgaaaccagacttgtctgtgttttaattctacttgtgctttactgttgctttagaaatggggaagtgacccaacctatcctatgaaaccttggtgtttacatgtttgaaatgaggctaggaactggagacaaggttcagcaggaaatagtgcctgcttttcaaaaaggactcaagttttagttcctggtgcccatgctgggttgctcacaactgtctgtaattccatcttggcagacacacacacacacaccaatctccccaaaacttaaaaattagctggacatggtaccacacacttttaatctcagcattagggaggtagagtcagannnnnnnnnnnnnnnnnnntgccagcctgttatatatagaaagttccatgatggccagggttacatagagaaagcttgtctcaaaaaataaaaattaaataaaataagatggctaatggcaccaattcatgctttatctgttcaaacatgtttcccaaaattcaccccttttctcttcttgagnnnnnnnnnnnnnnnnnnnnnnttctcctg

SEQ ID NO: 3210 - DNA, 650 bp, Cricetulus griseus
  misc_feature (1)..(34): n is a, c, g, or t
  misc_feature (193)..(215): n is a, c, g, or t
nnnnnnnnnnnnnnnnnnnnnnnnnnnnnnnnnncgcgtcctcggggacacccgcactgctatggctaccggtggcggcgtggcctccagagaggggctgcgctacgccgaatacctgcccccctccacccaaaggccggacgccgacatcgaccacgccgcgggaagaaggctgatagctgtaggactaggnnnnnnnnnnnnnnnnnnnnnnngtcgctatgcatttcaaatgtggaaacctctagaacaagtaatcacagaaacagcaaggaagatttcatcaccgagcttttcgtcctactataaaggaggatttgagcaaaaaatgagtaggcgagaagctagtcttattttaggtgtaagcccatctgctggcaaggccaagattagaacagcacacaagagaattatgattttgaaccatccagacaaaggtggatctccttacttagcatccaaaataaatgaagcaaaggacttgctagaatcgtccaccaaacttaaatgatgctgaaagatcctaccaaaggaaaaggtgcaaggctctagaagtcttcctacagaagactatggaacatggacttgcttcatattaaccaactctgttcttctgtcattaagtgtgcagcaataaaagatatgcacct

SEQ ID NO: 3211 - DNA, 305 bp, Cricetulus griseus
  misc_feature (1)..(32): n is a, c, g, or t
  misc_feature (274)..(305): n is a, c, g, or t
nnnnnnnnnnnnnnnnnnnnnnnnnnnnnnnnctgtagtccatatggttaagatatctttatttagataaacatcagccaaacacaagccagagcatgccaggggcagcaaggcagccaggccagagagaaggggtccccatgtgcctgcagacccttaagaacctaacatcctgacctccccttgaccacgctctgacaggagtagtcaggcacacctgtagccaacccttaggaggcgtagttacagtgtctccctacacaaatgggtgaannnnnnnnnnnnnnnnnnnnnnnnnnnnnnnn

SEQ ID NO: 3212 - DNA, 650 bp, Cricetulus griseus
  misc_feature (1)..(20): n is a, c, g, or t
nnnnnnnnnnnnnnnnnnnntttatgtcagggtcagtttcaggtgcatagaactggtcctcaagagctcatatccttcctgtgacatttcacatctgatgactgcaatgggaactttgatcccaactgtgggtcacattgatggaaacggactctgaagttcctagctaaaccaaaaccttgttggatttgctttcagtttgcttctcatatggcttggcttatgctctctctatctccagttctagcaatgtaactttagagggttttttcctccctaaaaataccttgcatcacacatggcttttcaacatctgtttccacagaatctgacctggagacaggaacttgagcagaatgtaaaagagaactagccaaggggaaatccttggtatagaggaatgtttcacagtctatgctttattcatttgaaaaccgtatttccaaatggaaacaaaacaggctgaacaaggaaagttcagtcactattgggtgtgtggtaggacacggcatctctggcagtcgaggttgttagtcctgttagtgttggtcgtaagccttcactctccttcttaatctctacatcaacctttcaccttgtttcagagaagtttttccgtctttggaaagaagcatcatacattctccatc

SEQ ID NO: 3213 - DNA, 650 bp, Cricetulus griseus
  misc_feature (1)..(21): n is a, c, g, or t
nnnnnnnnnnnnnnnnnnnnnttaggaagtgacacacatttatgttaggagaatgttcagtatgaaaacttgggaggcagacaagccaaccatttctttgccttcattcgggatatagatgaggaaggtctgtaatgttaggacctggtagcagtcctcagaacctcatagtaatggcttagtttaggtttatgtcagtttaatgaaaatatttgtatatgtcatctggaagcatgcctagtgttaaatcacttgcctggcttcagcaggtttccagataagttgagagaatacagtgaaactaaagccacagaattgacactcggttatggtcaggttagggcacaggttttatgaggaagattttaataggaggagagcaacttttatgaatataaaggaaagaatgcagcacaaatctgaatgagaaagtgtctgccctcctaatctagtcatgtgtggaaagggtgactggggtattttgtgggaacctgtaaggattaggattctagtgttggtggtggtggtgggggggggacatatgggtttactagagaaactaatgggggcctggagactgatatacctgggagcctagcatagcgtgcgtaccttaatcccggcctgatgacagggctggggcagggacc

SEQ ID NO: 3214 - DNA, 650 bp, Cricetulus griseus
  misc_feature (1)..(21): n is a, c, g, or t
nnnnnnnnnnnnnnnnnnnnnaattcaaccaggtacatggcagcatcagtgactgtaagttgtctgatatctctccaattggaagggatccctctgtgtccagttttagcagttctaccctcactccctcctccacatgcccctctctggtggactcaaggagcaactcaatggatcagaagaccccagaagccaactctcgtgcctctagtccctgccaagaatttgaacagtttcagatcatcccaactgtggagacaccctatttggcccgagcaggaaaacatgaatttctcaatcttgtcccagacattgaagaagtgagagcagggtcagtggtatctaagaagggatacctgcatttcaaggagccactttccagcaactgggctaagcatttcgttgtggttcgtcgcccttatgtcttcatctataacagtgacaaagacccagtagagcgtggcgtcattaacctgtctacagcccaggtggagtacagtgaggaccagcaggccatggtgaagacacctaacacctttgctgtgtgcacaaagcaccgcggggtccttttgcaagctctcaacgacaaggacatgagtgactgggtatatgcctttaacccacttttggctggcacaataagtcaaaac

SEQ ID NO: 3215 - DNA, 633 bp, Cricetulus griseus
  misc_feature (17)..(59): n is a, c, g, or t
  misc_feature (72)..(139): n is a, c, g, or t
  misc_feature (152)..(220): n is a, c, g, or t
  misc_feature (232)..(300): n is a, c, g, or t
  misc_feature (313)..(367): n is a, c, g, or t
  misc_feature (369)..(381): n is a, c, g, or t
  misc_feature (392)..(539): n is a, c, g, or t
  misc_feature (556)..(577): n is a, c, g, or t
aatattgtattagcttnnnnnnnnnnnnnnnnnnnnnnnnnnnnnnnnnnnnnnnnnnnaatgtctacgctnnnnnnnnnnnnnnnnnnnnnnnnnnnnnnnnnnnnnnnnnnnnnnnnnnnnnnnnnnnnnnnnnnnncgataggtatgtnnnnnnnnnnnnnnnnnnnnnnnnnnnnnnnnnnnnnnnnnnnnnnnnnnnnnnnnnnnnnnnnnnnnngtagtgtcaaannnnnnnnnnnnnnnnnnnnnnnnnnnnnnnnnnnnnnnnnnnnnnnnnnnnnnnnnnnnnnnnnnnnnatactcctacctnnnnnnnnnnnnnnnnnnnnnnnnnnnnnnnnnnnnnnnnnnnnnnnnnnnnnnntnnnnnnnnnnnnntttagctatannnnnnnnnnnnnnnnnnnnnnnnnnnnnnnnnnnnnnnnnnnnnnnnnnnnnnnnnnnnnnnnnnnnnnnnnnnnnnnnnnnnnnnnnnnnnnnnnnnnnnnnnnnnnnnnnnnnnnnnnnnnnnnnnnnnnnnnnnnnnnnnnnnncgactacaacaaaaaannnnnnnnnnnnnnnnnnnnnnttctacaaactcttctaatcccaacattttcagcaaacgagcttatactattttat

SEQ ID NO: 3216 - DNA, 650 bp, Cricetulus griseus
  misc_feature (1)..(22): n is a, c, g, or t
  misc_feature (70)..(90): n is a, c, g, or t
nnnnnnnnnnnnnnnnnnnnnnaactggtagcactgcatggctgtgcatagagtcagcacttataacacnnnnnnnnnnnnnnnnnnnnngggctcactgactgaaaataagcaaggctttctgctttgtctacctttcagccttggagtagttaggttcatttgtgactccggagagcaataagccattttccaagagtaaataaaaatcatgatctctgatatactgtgccaggtcctttgaacaaactaccattacagcagcagcatccaccagctgcattggtgggatgttctaaatatgttcagtagccatatgtcctgttaagggctttcagtgtgtctaattccatggaagaactaaggccagaagaagggcatcagagggttatctcagcatggagaggcattatagctcaaggccaacccaaattttgtttagtttttggtttttggtattgtgtggttttgtgatcagggtctcactatgtagctactgctagcctggacggaactctatatgtagctcaaagtggcctcaagctcatagaaatgtacctacttgtgcctccagagtgttgggattaaggtatatgccaccacacccagatcaaaaactaatgttttttatttaagtggacacgtgtggt

SEQ ID NO: 3217 - DNA, 651 bp, Cricetulus griseus
  misc_feature (1)..(21): n is a, c, g, or t
  misc_feature (61)..(106): n is a, c, g, or t
nnnnnnnnnnnnnnnnnnnnnatttagagaaggccctaggccctaacctgtgtatctaggnnnnnnnnnnnnnnnnnnnnnnnnnnnnnnnnnnnnnnnnnnnnnntatccctccatggggagtgggctctagtgaagccacattatgcagcagagcacccttctgccatttttgacctctaaccaggacagaactagggtcattgacagattctggtcagggataagaaccagaacatcttgctttcagggttcctctccctcattgtgcctgaccaattattctattctcatcagcatcaccacagtgtccccatccatcatggatgacaacctcatggaagctgcatcagtagtccagtttcagtcaccctctgcttgctcatatactctaatatcttagaagattatgcgcagttggtggggtatagaaaggagtaaaggctcgaatcctacgttaaagtcctgttaacccctgtcatccctttactatggcgtgtcaacagttctatcacagtcactattgaccttgctagctctgtatcattctgcttatatatggctgtggctgcagagacagagatatctctgctctgataatagatgtttaaggtgcgcccaaagaaaaagtcattctaccgcccctgaaat

SEQ ID NO: 3218 - DNA, 650 bp, Cricetulus griseus
  misc_feature (1)..(21): n is a, c, g, or t
nnnnnnnnnnnnnnnnnnnnnacaggaaggaacaggaggcaagaatgcaaaattcaccatggagtaactactggttgaagttgatgcagagaattctggaccttgaggacaaagactaaaatgacttctataatgaggaaggagcatgtcttttgggcatttgtatgtctgttgctcagcattgtcccggagcttcttagtgctctgcctgaggaagttgatggacatgcaaaaaccacagattcagaacagccaccaatgaaaccgaagcatacattttgcgcaatgaaggtagatgatggaccgtgcaaagccatgataaggagttattttttcaatatttttacttaccaatgtgaagaatttatatatgggggatgcagaggaaacgaaaatcgatttgaaaccctggaagaatgtaaggagacatgcatcagaggttataaaaagaagactgtaaagacaccatctggagcagaaaagccagatttctgcttcttggaagaggaccctgggatctgccgaggcctcattactagatatttttataataaccagtcaaagcagtgtgagcaattcaagtatggtgggtgcctaggcaaccgcaacaactttgagactttggatgaatgcaagagcatctgtgagga

SEQ ID NO: 3219 - DNA, 650 bp, Cricetulus griseus
  misc_feature (1)..(21): n is a, c, g, or t
  misc_feature (24)..(43): n is a, c, g, or t
  misc_feature (171)..(192): n is a, c, g, or t
nnnnnnnnnnnnnnnnnnnnnctnnnnnnnnnnnnnnnnnnnntctctgggggcatgtggcctgtggttcacattcagaaaaagaacacaaaaactcgagccaattttggctcccgcccatttgcgtatgcggaaggacaggcccatcgtaatgctgcggacttgtgcacnnnnnnnnnnnnnnnnnnnnnngctaactttgaggccctgccatttgctatggcatctgatagtgacaacgatgctggcaccagtattgcatcagatccaggcactcatgggccaccatgccgaattgctgcagtggccacagcccagcaacaatatgacagtgacacctcctgccattataaagtggagctcagctatgagaatttcatcacctctggcccagacccccatccccctcccattgcggatgatgaaagtgatgacgatgacgatgatgacatcccacaggaagaccactatgccctgttggtgaaagcttgggagaccaaggttttccctaccatccgaagacgctttcgaaatgaagctgagcggaagtcaggcctggaccagatcaagggtgctttacaactaggcatggtggatatcgcccggcagacagttgaatttctctatgaggagaatggcggcatcccaag

SEQ ID NO: 3220 - DNA, 650 bp, Cricetulus griseus
  misc_feature (1)..(76): n is a, c, g, or t
nnnnnnnnnnnnnnnnnnnnnnnnnnnnnnnnnnnnnnnnnnnnnnnnnnnnnnnnnnnnnnnnnnnnnnnnnnnngtatacaccccaaccgggcgcccccggggggggggacccccatgaggaaggggaggaggggggggacccgccccgagggaaaaaaacccctaccgggggcaaagagaaaaaaaatgccaccccaaagaaaatattcccccacgccaacaggaagcatgcctagcggaaaatcactggactggcttaaacaaggaaccagataaactgagagaatacagtgaaactaaagccacagaattgacactcggttatggtcaggataaggcacaggatgtatgaggaagaactgaataagaggagagcaactttaatgaatataaaggaaagaatgcaacacacatctgaatgagaaagcggatgacctcctaatcgacacatgagaggaaagggcgaccggggcattcagggggaaccaagaaagaataagagcctagcgctgaagaaggtggcggcagggggccaaaggggcaccggagaaaatagcgagcccctgagactaaacacctgcgacccaaccagccatcggaaccttacaccaggccaagacgacagaacaggggccagggccacacgc

SEQ ID NO: 3221 - DNA, 650 bp, Cricetulus griseus
  misc_feature (1)..(21): n is a, c, g, or t
nnnnnnnnnnnnnnnnnnnnngtcctcggggacgtgatgactgctgaagcacataggactctcctgctgacggaggacatgcacacaggcgctgcgtgatgaatagcatcatgtgtgttgctttcccagccagaggagaggacatcttgcctcactccccaggagaggccccgtctcaggtgtgacttcagccaacatccaaacccatatacaggtccaaggtcacagggacagacaactttgccatcccctgaacgaacaggcagcgttggaatcttccagaaaagaccttcaggagtaaagcagagagaaagcaagtctgtccctgggcctgagggggcacaaacaactccttttctctgtagaaacaaaggaaaggcggtatagacttgaatcctcctcctcggtggatctggggaacgtatgattaggcacaataatgttctttttaaaattaacagcagaccttatgtagaaaagcaatcactggtactgaggtacaaagaagccatttgtgggattggaacagcagggaaccaggggatgaggtaggagagatgtcttgtgggaactaaagtcaaacaagaccttagagcagctgcccaggtcactgacagaagtgtgcggtatttgcactaaatcttcagtgt

SEQ ID NO: 3222 - DNA, 650 bp, Cricetulus griseus
  misc_feature (1)..(20): n is a, c, g, or t
  misc_feature (346)..(377): n is a, c, g, or t
nnnnnnnnnnnnnnnnnnnntttcagtgtactgggaatcgcttttaactgagaagcacttctcttgtagatgtttttgtaattaagatatcgatttcagtgtatagggatgctaagcaagagtcacagatatacagatacaaatctagatcattacagaagagtcagtatgctgcttgtttagcactactgactgccattgtaagcatgcagaaaaggagcattgcagctagtgcaggcagattgcaaaggtgctgccatttgaaggcctcagacttgccgacagctgaagattcagcaagtaaaagctctgagatggagcaagagccatttgttgaaataggtgnnnnnnnnnnnnnnnnnnnnnnnnnnnnnnnnattttaggcaattgttcaactcatctctaataaagttctcattttcatcagtttttcaacattgccgttcagagctccacacagtttaaaatggtgaatgttttaaataagatctgataaaattctgaatgataacagtttatgtgtgatctacattaataaatattttggaagcctgaaaggtattactattggccctgtttgattagttagtaaggtaactaagatttaaaaggggtcccttctaaagcgtcccccacagcattaaaataa

SEQ ID NO: 3223 - DNA, 650 bp, Cricetulus griseus
  misc_feature (1)..(20): n is a, c, g, or t
nnnnnnnnnnnnnnnnnnnnggaacccgcctggtgtatgagagtctacctagaagcgaagctcaggctactactataccagaactggagatgcccagcttgcctgctatttcagtgctgcagtggcctctgctaagtaaaaagtcttcatagagatctccctgtcagctccccagcatgacactgcagtacctcatgctcctgactgccctcctgatgggaggctccagcaagtccacagagagcaaggcccagcaacctgagtgttgtatgaatgcagtagacttcaatgctacctgcccaggcacaggcctatgtggcccaggttgctacaggcattggaatgcagatgggagtgttagctgtgtccggtgctggaatgggaccttcccgacatacaatggctctgagtgcagaattctcactggccggggcatgcagtttcccatgaacagaagcacagggactcctggacagccacattttgggggtcctgatgtggcagcttacctcttcctggggacactcttcatcagcacaggcctcatgctctctgtggctgggttcttctacctcaagcgctccagtaaacttcctgaggctttctacaggagagacagagcccctgtcctgcagcctggggaaacagct

SEQ ID NO: 3224 - DNA, 651 bp, Cricetulus griseus
  misc_feature (1)..(30): n is a, c, g, or t
  misc_feature (32)..(80): n is a, c, g, or t
  misc_feature (127)..(159): n is a, c, g, or t
  misc_feature (173)..(186): n is a, c, g, or t
  misc_feature (188)..(218): n is a, c, g, or t
  misc_feature (227)..(259): n is a, c, g, or t
  misc_feature (261)..(311): n is a, c, g, or t
  misc_feature (356)..(376): n is a, c, g, or t
  misc_feature (402)..(415): n is a, c, g, or t
  misc_feature (417)..(439): n is a, c, g, or t
  misc_feature (455)..(481): n is a, c, g, or t
  misc_feature (483)..(537): n is a, c, g, or t
nnnnnnnnnnnnnnnnnnnnnnnnnnnnnnannnnnnnnnnnnnnnnnnnnnnnnnnnnnnnnnnnnnnnnnnnnnnnnncagagatccaggacacggagggcattccccctgaccagcagaggctnnnnnnnnnnnnnnnnnnnnnnnnnnnnnnnnngaccctgtccgacnnnnnnnnnnnnnngnnnnnnnnnnnnnnnnnnnnnnnnnnnnnnntgggtggtnnnnnnnnnnnnnnnnnnnnnnnnnnnnnnnnnannnnnnnnnnnnnnnnnnnnnnnnnnnnnnnnnnnnnnnnnnnnnnnnnnntagatccaagacacggatggcattccccctgaccaaaagaggttnnnnnnnnnnnnnnnnnnnnntgaagatggccggaccctgtccgacnnnnnnnnnnnnnngnnnnnnnnnnnnnnnnnnnnnnnacgactcaggggtggnnnnnnnnnnnnnnnnnnnnnnnnnnnannnnnnnnnnnnnnnnnnnnnnnnnnnnnnnnnnnnnnnnnnnnnnnnnnnnnnngcaagattcatgacacggatggcattcctcctgaccaaaagaagttgaactttgccggtaagcagctggaagatgggcggaccctgtccgactacaacttccagaaggaagcca

SEQ ID NO: 3225 - DNA, 633 bp, Cricetulus griseus
  misc_feature (17)..(59): n is a, c, g, or t
  misc_feature (72)..(139): n is a, c, g, or t
  misc_feature (152)..(220): n is a, c, g, or t
  misc_feature (232)..(300): n is a, c, g, or t
  misc_feature (313)..(367): n is a, c, g, or t
  misc_feature (369)..(381): n is a, c, g, or t
  misc_feature (392)..(539): n is a, c, g, or t
  misc_feature (551)..(551): n is a, c, g, or t
  misc_feature (553)..(553): n is a, c, g, or t
  misc_feature (558)..(577): n is a, c, g, or t
aatattgtattagcttnnnnnnnnnnnnnnnnnnnnnnnnnnnnnnnnnnnnnnnnnnnaatgtctacgctnnnnnnnnnnnnnnnnnnnnnnnnnnnnnnnnnnnnnnnnnnnnnnnnnnnnnnnnnnnnnnnnnnnncgataggtatgtnnnnnnnnnnnnnnnnnnnnnnnnnnnnnnnnnnnnnnnnnnnnnnnnnnnnnnnnnnnnnnnnnnnnngtagtgtcaaannnnnnnnnnnnnnnnnnnnnnnnnnnnnnnnnnnnnnnnnnnnnnnnnnnnnnnnnnnnnnnnnnnnnatactcctacctnnnnnnnnnnnnnnnnnnnnnnnnnnnnnnnnnnnnnnnnnnnnnnnnnnnnnnntnnnnnnnnnnnnntttagctatannnnnnnnnnnnnnnnnnnnnnnnnnnnnnnnnnnnnnnnnnnnnnnnnnnnnnnnnnnnnnnnnnnnnnnnnnnnnnnnnnnnnnnnnnnnnnnnnnnnnnnnnnnnnnnnnnnnnnnnnnnnnnnnnnnnnnnnnnnnnnnnnnnncgactacaacananaactnnnnnnnnnnnnnnnnnnnnttctacaaactcttctaatcccaacattttcagcaaacgaagctatacctatttat

SEQ ID NO: 3226 - DNA, 650 bp, Cricetulus griseus
  misc_feature (1)..(22): n is a, c, g, or t
nnnnnnnnnnnnnnnnnnnnnngcaaaggacacagtcagtaagacaaaatgacagcccacagaattggaaaagatcttcaccaaccccacatctgacagagggctgatttccaaaatatacaataaactcaagaatctagccaccaaaacaccaatcaatgaaattaaaaagtggggcacagagcaattttttcttatgtttctcatttttcatttcactcattagattttgtatggaagaatgccaagtagggaagactgggggatctaccttgagggtgtcttttattgactcacaagcatgatgttttagggtttctgttgtgatgatgaaatactatgaccaaaggcatcttgggaaggaaatggcttattttaattacatttccacatcacacttcatcactgaaggaagtcaggacaggaactcaaacagcacaggaacctggaggcaggagctgatgcagaggccatggagagatgttgcttactgacttgttcctcattgcttgctcagcctgctttcttatagaacccaggaccactgaccctgatgtgttccctactcacaatgggctaggacctttccaaacaatcactaattaagaaaatgctctatgggcttgtctccatgtgtcccaatcttatgg

SEQ ID NO: 3227 - DNA, 650 bp, Cricetulus griseus
  misc_feature (1)..(20): n is a, c, g, or t
nnnnnnnnnnnnnnnnnnnnttgtgtctccaaacgctcgtcaaaatgaagattgaggaggtgaagagcaccacgaagacgcagcgcatcgcttcccacagccacgtgaaggggctggggctggacgagagcggcctggccaagcaagcggcttcagggctcgtgggccaggagaacgcgagagaggcatgtggagtcatagtagaattaatcaaaagcaagaaaatggctggaagagctgtcttgttggcagggcctcctggaactggcaagacggccttggctctggctattgctcaggagctgggcagtaaagtccctttctgcccgatggtgggtagtgaagtatactcaactgagatcaagaagacagaggtgctgatggagaacttccgcagggccattgggctacggataaaggagaccaaggaagtttatgaaggggaggtgacagagcttactccgtgtgagacagataaccccatgggtggttatggcaaaactatcagccatgtgatcatagggctcaaaactgccaaaggaaccaaacagctgaagctggaccccagtatttttgaaagtttgcagaaagagcgagtataggctggagatgtgatttacattgaagcaaacagaggagctgtggaaagg

SEQ ID NO: 3228 - DNA, 650 bp, Cricetulus griseus
  misc_feature (1)..(21): n is a, c, g, or t
nnnnnnnnnnnnnnnnnnnnnttcgtgagcgggctgatggggcttcgcggatgcctagggtggctctagagaaggagctagaagcgatcaaagcccgagtcagggagatggaggaagaggctgagaagctaaaggagctacaaaacgaggtagagaagcagatgaatatgagtccacccccaggcaatgctggcccagtgatcatgtctcttgaggagaagatggaggctgatgcccgttctatctacgttggcaatgtggactatggtgcaacagcagaagagctggaagctcactttcatggttgtggttcagtcaaccgtgtcactatactctgtgacaaatttagtggccatcctaaagggtttgcgtatatagagttctcagacaaagagtcagtgaggacttccctggccttagatgagtccctgtttagaggaagacaaatcaaggtgattcccaaacgaaccaacagaccaggcatcagtacaacagaccggggtttcccgcgtgcccgataccgtgcccggactaccaattacaacagctcccgatcgagattctacagcggttttaacagcaggccccggggtcgagtctacaggggccgggctagagcgacatcatggtattccccttactaaaaaaag

SEQ ID NO: 3229 - DNA, 650 bp, Cricetulus griseus
  misc_feature (1)..(22): n is a, c, g, or t
nnnnnnnnnnnnnnnnnnnnnnaaaaacggggagatgaatttctttggacatgacatttttctcattttcagattgctacacagtgagtgaaattacccagtcaaagccagccacctcttatctgatgcactggctggctcctagaaacttaatcatctccagcgtcacctttttaataataaaatatataatgccaatccatcttccagtcctgaaaacaggtgccctctacttgcaaaggactttcatgttatgcatggcatgggttagctgaagcgatcaccctgttaaccctcatgcaggcaacttgaacataaacgtttcatctcttcccccaaggagccttgcttgacagcagcaacatgagtagatttctacccagacatttcctggcagtctcttcactagcagagattgtaaaagcagtcgtgcataacgggaaagaaaaaatgactctataatctgaatcccttttaaaaactagtatataacaattttacacaatagtggggctccttatgacattttaagacatgtacataatgtatttcaattcttatattctgataagtatattggttgatgtttcataccatgtattttttcaaacaaacccttttatatttaatataaacgcgagtgcgtgtgt

SEQ ID NO: 3230 - DNA, 650 bp, Cricetulus griseus
  misc_feature (1)..(19): n is a, c, g, or t
nnnnnnnnnnnnnnnnnnngggaccagcaggagcttctaggaggcggattaagtcacaccctctatcactaagaataaagatgaaaacttagtactggaaccttgggagatacactgaaaccagaggaatcatactttgtaatctcttgtgaaagagcgtatgttgccaagactcacctaaagctctgagtaaacactatttgcactatagcacaacatgacgctaattctatattgtgcccatgattgtgttaagggttagactgtatctctagtgctgaccagggcagatcaattacttacctcttatggtaggaggacgtcatgagaaggctgcatgctgtcccagaacagatgttttaatctcctggtaaaatcaataacatcctgaggattcagctcgtggaacatgaaattgtgttaaaaacagacgaactgtggagctggggttaagagcactgactgttcttaccgaggactagtgttcaatacgtaacccccgatggcaatctataactccaattccaataatctgactcccttttctgacttctgggggaactgctgctcagggtgtaagaaaaacatctatgcacacgaaataaaaccaaggggaaaataggtaaataattaggggataaaatggctaa

SEQ ID NO: 3231 - DNA, 650 bp, Cricetulus griseus
  misc_feature (1)..(34): n is a, c, g, or t
nnnnnnnnnnnnnnnnnnnnnnnnnnnnnnnnnngttgcttcccgcctaccgcggtttcgtctcaaacctctccctgcgaggaggagggcctgccgacggccggtccctttgcaggtgaaggaagaaactcttaattctggaagtagcgactcaataccatggccagcctcctaaatgaagatccagaaagaagtcgaatcacatacgtgaaaggggatcttttcgcatgttccaaaacagactctctagcccattgtatcagtgaggactgtcgaatgggtgctgggatcgctgttcttttcaagaagaaatttggaggggtgcaggaactgttaaatcaacaaaagaagtctggagaagtggctgttctgaagagagatggacgatatatatattacttgattacaaagaaacgggcttcacacaagccaacatatgagaaccttcggaagagcttagaggctatgaagtcccattgtttgaagaatggagtcactgacctctccatgcccaggattggatgtggtctggatcgtctgcagtgggagaatgtgtctgtgatcattgaagaggtgtttgaggcaacagacatcaaaattaccgtgtatacactctgaacagatgaagaatttggatgagcccgtggctt

SEQ ID NO: 3232 - DNA, 650 bp, Cricetulus griseus
  misc_feature (1)..(21): n is a, c, g, or t
  misc_feature (368)..(387): n is a, c, g, or t
nnnnnnnnnnnnnnnnnnnnnttgttttcatatcagcatatctgtgctatgttagggtttttaaaaaaaaaacaaagctattcccctgctggtttttatggcagtaccttattttgacactagggggcaggagctctcctgctccaatcactcatgggaacatttttccaattgcagtgttatgttgtggtttcagtgtttatcagtagattgacctgtagtaagtggcagaataaaagcagaaatgtcccttttcagtgtgtgttaataatgttgcttgatagtagtcttcaaaaaatgccttcaacttttattatttctgaaaataatttgaaacttgatcatgaagctccagctaaaatccagannnnnnnnnnnnnnnnnnnnatttgtttgtttgaggtgggtgtggtggcttcacaccaataattcctacactcgtggaagcgggagagtcaggcatttggacccagcctgggttacacatttttttgtcacatgatttgtgatttgaccttggcagtttccttgatcttttaatgtaaaggtcttaaaacatcaaaatattttattggagtagtcctgttgactaagaaaataaaattcagccaggcatggaggcttgtttccataattttgtacctgggaag

SEQ ID NO: 3233 - DNA, 168 bp, Cricetulus griseus
  misc_feature (1)..(21): n is a, c, g, or t
nnnnnnnnnnnnnnnnnnnnnggggttggcgatctctggtcataacgacgaagcgctatgtgaacatgacttcgcagacgcagaagctggcttgccctgcactcattaaggtgctgcggcttgaggtgagacagccttgcgagccaccagcccaggaactctgtggcc

SEQ ID NO: 3234 - DNA, 650 bp, Cricetulus griseus
  misc_feature (1)..(20): n is a, c, g, or t
nnnnnnnnnnnnnnnnnnnnaaattttaattctgaagaaatcaaagataaaaaacatatttgaaagccacctattgattgctccttgccacccctttttctgcagcagcaaatacttgctatgctttttgtacctggaaagatgtttaaaataaggagttttgatgctagtggtatatatatgcttttgttgaaaacatgaaattctgtcttaagtgtatcaataacatctctaactttatttcatcatattacagtatatttttggatagatactaggtaataaggaatattgcaaggaaattatctacatgctaaaataaccacatttgccatttggtaacaataaatttgtttcaaatgccactttaaaaacaaatataattcttcctacacatttgtttatattcaatataatataatgtctgaccccagcactgtatgagccaagcacatgtttttgtcctgcctgcctttacacagcttgcccacctgtatataatagtagtacactattaaattagagcacatgcaggttcaaagagacacacagtgaactttaaagttcatcacgtcaggaccaataatcagtcatctaaaataatcctgccatatcatattttcaacatgatactacatacacctaataag

SEQ ID NO: 3235 - DNA, 650 bp, Cricetulus griseus
  misc_feature (1)..(41): n is a, c, g, or t
nnnnnnnnnnnnnnnnnnnnnnnnnnnnnnnnnnnnnnnnnagcaaatcttgaagactatacaccattgtagaacaaaggattgtgtgactctgttgaggtttacattcctcctttggtagcatgcagagtgccttcctgtatcaaaaatgctaacacatgatgtgaaggctctatgtagataccagttcaacatccacatgttcaatgagttgtataggtattgttttaagcaatggggccttggcatcagtttgtggagagcaaaacgtaggttatttgtgggttcctatgtggtccctttggccaataacttaatttagatgtaattcaatctttgtactggaagcttcatttgataactagagatggccaattgaggctctgtctctccattatttggtgatttcatttagatcatctttaggtatgtatatattttaggaagctactactatattacccattaaatggctctttattttagctctctcttcctatattcccttcattgttctctgtagcacaaattctaattgatcttaataataaaaaccctgagtcaaatataggggtaaatgctgaaagatcagagaagcagagcagccagagcagttgttacctctactgaatccttagacaaaagggcca

SEQ ID NO: 3236 - DNA, 650 bp, Cricetulus griseus
  misc_feature (1)..(21): n is a, c, g, or t
nnnnnnnnnnnnnnnnnnnnnaataaaaactgtcaaattcaatgtgcacttgctactgttacctttatcaactatttcatttttcctttttaaaagatgatattacttgtcctgcagtggacaatactgtacaaagaaaacatctgaggagagagattgtgtctgtaacattcctcatggcataattttctgaacttctggctgcaattaaagtactaatgggatgggcctttaggtttttgtttcacagtagagaaaatgcttgcattagataaagcagctaggatacaggtaagtcctacttgtatttgggttcaaagacagaagtgtgtgcatgctaggtacatctgacaacagaaatacagaataaaggacagtagatggttgtgcttcatttctgaactcttcagtgactgaaatttattagtatttacattatagctggctttccctagtgatcaaattcacttctcaagtttcttttgagtacaaacttgtttaaataacaggctattttattggtatatttctctgttctacctgttagccatgttctactaaataccagctttggcatcatcacttgaagaatcaggtgcctgtggtgcagagtacttttgcatgtttaatacccctaatttgttctgctg

SEQ ID NO: 3237 - DNA, 650 bp, Cricetulus griseus
  misc_feature (1)..(21): n is a, c, g, or t
  misc_feature (560)..(575): n is a, c, g, or t
nnnnnnnnnnnnnnnnnnnnnaagatgagctgtatttaaacctggtgctggagtatgtgcccgagacggtgtaccgggtggcccggcactttaccaaggccaagctgattatccctatcatctatgtcaaggtgtacatgtaccagctcttccggagcctggcctacatccactcccaaggtgtgtgtcaccgtgacatcaagccccagaatctgcttgtggaccccgacactgccgtcctcaagctctgcgatttcggcagtgcaaagcagttggttcggggggagcccaatgtttcctacatctgttctcggtactaccgtgccccagagctcatcttcggagccacagattacacctcatccatcgatgtgtggtcagctggctgtgtgctggctgagctgcttctcggccagcccatcttccctggggacagtggtgtggaccagcttgtggagatcatcaaggtactaggaacaccaacccgggaacagatccgagagatgaaccccaactacacagagttcaagttcccacagatcaaagctcatccctggacnnnnnnnnnnnnnnnncggacgccacctgaggccattgcgctgtgctcgagcctgctggagtacactccgtcctcaaggctctcccccctg

SEQ ID NO: 3238 - DNA, 650 bp, Cricetulus griseus
  misc_feature (1)..(29): n is a, c, g, or t
  misc_feature (531)..(555): n is a, c, g, or t
nnnnnnnnnnnnnnnnnnnnnnnnnnnnnagcgtctagattcggagtataaggaaggaggccagaggaattgggtccaagtgttctgtaacggggccgtgcccacggagctggccctgctatacatgatagaaaacggccccggggaaatgcccatagactttgccaagcagcccactgcttcctggatgtgtttgtctctcttggctgcactggcctgttctgctggtgatacctgggcttctgaggttggcccagtgctgagcaaaagctcaccttggctaataacaacctgggagaaagttccagttgggaccaatggaggagtcacagtggtgggactcgcctccagtctcctcggtggtacctttgtgggcctggcctacttcctcacacagttggtgtttgtgagtgacttagacatctctgctccgcagtggcccattattgcctttggaggtctggctgggttactaggatcagttgtggactcatacttaggggcaacaatgcagttttctggcctggatgnnnnnnnnnnnnnnnnnnnnnnnnncccagcccgagagaccaagcacatagcagggaagcccatcttggataacaatgccgtgaacctgttctcctctgttttggtcgccctcttgctcc

SEQ ID NO: 3239 - DNA, 650 bp, Cricetulus griseus
  misc_feature (1)..(21): n is a, c, g, or t
  misc_feature (433)..(453): n is a, c, g, or t
nnnnnnnnnnnnnnnnnnnnntggaaggatgctctatttctgagatgcgggaaggtcagctagttgcttctcaatctctctgagctaataggttttcaccccagcctctgactcatgaatcttattgataaatagaatgatagagatttaattaaaaactacttttggtggcaacagaggcaggagaattcatcaggacataaaaatcccaccaggccactgcctgaaaaaaacaggtcagaaactgtagagccacagttactggctgaaacagcagtagattcaggtgtagctgttgtgccattgtgctggtagaaaaacaacattttggtacccagtgtgaggtatcaaatgtaagaagtctttctttggcccaccagttcccgaataatgacacagagacttttttttttgttattggttggtttttgtnnnnnnnnnnnnnnnnnnnnnacagtcctggctgtcctggaattcactctgtagaacagtctcgccttgaactcacagaaatccacctgactatgcctccagaatgctgggactaaaggcatgtaccaccatcacctggtgagactttattatgaaagcttaggcttattcccaactagctattaaaacttaaattaacctgtgtatattaatctaca

SEQ ID NO: 3240 - DNA, 627 bp, Cricetulus griseus
  misc_feature (25)..(67): n is a, c, g, or t
agagagggaaagggaggggagggannnnnnnnnnnnnnnnnnnnnnnnnnnnnnnnnnnnnnnnnnnactgggagagatgacagaactggaaggcatggcgggggaaagatgtagaaacttagtgcagtggaaactccctggaatctatgagagggacaccaactgaaatctcctagtaatgggggatacagagcccaaactggcggcaattttacaactaggcaaggctcccagcagttggacagggacatcaacccagacagaaaaccttcgacttacaatctgtccctcctgcaagacatgctggggcaatggtgacagagaactgactaaacattaggcagagtcaggggaactgaagaggggaaggaaggattgtaggagccagagggtttaagaacactatgagaatgtgggccacagaatcaactaagctgggctgatatcatctcacaaggactgaagcaataaacagggaccctgtatgtatctgagctaggtcctccgcatacatgttatggttgtgtagactggtgttcttgtgggactcctaacaatgggagtggggggagcactatctctgactcctttgcctgcacatgaaaccctttttctcctactgggtt

SEQ ID NO: 3241 - DNA, 650 bp, Cricetulus griseus
  misc_feature (1)..(21): n is a, c, g, or t
  misc_feature (34)..(56): n is a, c, g, or t
  misc_feature (127)..(155): n is a, c, g, or t
  misc_feature (190)..(208): n is a, c, g, or t
  misc_feature (277)..(300): n is a, c, g, or t
  misc_feature (498)..(520): n is a, c, g, or t
nnnnnnnnnnnnnnnnnnnnngctgacattttgnnnnnnnnnnnnnnnnnnnnnnnccgatctcacctaatgtctacgcttctatgttgacaacgcttaatagtctatatagttatcataacagtgnnnnnnnnnnnnnnnnnnnnnnnnnnnnntatgcattcaaatcctatcggaattctggtgctannnnnnnnnnnnnnnnnnnaacgcgcgaccctacttgtagtagggtcatacacttacggatcagactatgtaaaagacctgaccctgnnnnnnnnnnnnnnnnnnnnnnnngatctctcatactactacctctaacctgattataatctaacaaagatgtatgaattactgtcacagcgcacagattgttagtcaatactgtagctatagcaactctatgacaaatgaacgaaacaggcataggactctaccagacattggatattgatccactatctacatcattaatcatattagatatctgactannnnnnnnnnnnnnnnnnnnnnngcaaaactatatttaaaaagaaaccgtctacaacaagaaacggtatacttctatactaattattgtacaaactcttgtaatccccacattttcagcatacgagcttatactatgttatatgctattcgaa

SEQ ID NO: 3242 - DNA, 389 bp, Cricetulus griseus
  misc_feature (1)..(21): n is a, c, g, or t
nnnnnnnnnnnnnnnnnnnnnaagatgagcggtatttaaacctggtgctggagtatgtgcccgagacggtgtacctggtgggccgacgctttaccaagggcaagctgattatccctatcatgtatgtcaaggtgaacatgtaccaactgtttcagagcctgggctacattcactcccaaggagtgtgtcacagtgacatccagccccataatatgcttgtggaccccaagactgacgtcctcaagctttgcgatttgtagcagtgcaaaactagtcggttgggtgggagcccaatggttcctacatatagtactaggtactaccgtggcccgaacaggtcatatttccgagccgaaggattacacactcatccagtctatgtgtggaca

SEQ ID NO: 3243 - DNA, 650 bp, Cricetulus griseus
  misc_feature (1)..(21): n is a, c, g, or t
  misc_feature (468)..(487): n is a, c, g, or t
nnnnnnnnnnnnnnnnnnnnnaccgggcgcggacggcgaaggcagccgggatgatggtccctcttcttcaatctcagcgctcaagcgtctggaacggagccagtggacagataagatggactttaggtttggttttgagaggctgaaagagcctggagaaaggactggctggctcatcaacatgcaccctactgagattttagatgaagacaaacgcttagtcagtgcagtggattactactttattcaagatgatggaagcagatttaaggtaagccctcgaccaagaaaactaaatcctacccatgaccagtaattgctctaaaatagggggtattcattcactttgtgtcagggaggaaatgggagggtgtaatgtgcaattgcttgcaacccatcaagagcatggctactatgaacttcatcagtcacatttaaaatatcccgagggaaggtggctcaggaggnnnnnnnnnnnnnnnnnnnntgttcttgcctgtgagagatgtgcagatctaaatttcatgtatgcagtatctttaaagagctgtcaaaggggctggagaaatggcccagtggctggtcttccaggggatgcaggttcaattcccagccacctacaaggcagctaacagctgtctgtaactgtt

SEQ ID NO: 3244 - DNA, 651 bp, Cricetulus griseus
  misc_feature (22)..(102): n is a, c, g, or t
ttgaacccatctgtgcgaaatnnnnnnnnnnnnnnnnnnnnnnnnnnnnnnnnnnnnnnnnnnnnnnnnnnnnnnnnnnnnnnnnnnnnnnnnnnnnnnnnngccaaaaagaagcaggctgcaccactggagaatggtgcgacagaggaggaggaacccatcccgcccatgtccagttactgccttctggctgagaattcctacgttaaagtgacatacgacatccaagccagcctacagaaggacagccaagtgactgtgtcagtcatcctggagaacaagagcaacagcttcctgaaaaacatggagctgaacgtgctggactcgctcaacaccaagatggccaggccagagggctcatcagtgcatgacggtgtgcctgtgcctttccagctaccccctggtgtctccaatgaggcccagtttgtgttcaccattcagagcattgtcatggcccagaagctcaaaggcacactgtccttcattgccaaggacgacgatggggccacccacgagaagttggacttccggctgcactttagctgtagttcctacctgatcaccactccctgctacagtgatgcctttgccaagttgctggagtcaggagacctgagcatgaactctatcaaagtcgacggcattagtatt

SEQ ID NO: 3245 - DNA, 261 bp, Cricetulus griseus
  misc_feature (1)..(21): n is a, c, g, or t
  misc_feature (28)..(46): n is a, c, g, or t
  misc_feature (133)..(150): n is a, c, g, or t
nnnnnnnnnnnnnnnnnnnnntaacttnnnnnnnnnnnnnnnnnnnaactgtgctatctttgatctcacctaatgtctacgcttctatgtttaaaaagtataatactctctatatttattatagcagcaatcnnnnnnnnnnnnnnnnnnattattagtatgtattcaaatactatatacattctcgtgtttgcaacatgcgacgccgaattaggcttagccctactagtagtaacgacaaacactcacagaacatactat

SEQ ID NO: 3246 - DNA, 650 bp, Cricetulus griseus
  misc_feature (1)..(20): n is a, c, g, or t
nnnnnnnnnnnnnnnnnnnntcacactgtgctgtattgctgctgaactaaatgcactttccccatatgtggggcactggcttcaaacaattcagttcagtaccattatttttcaatctcatgtttccttcgttagtaggtggtatagtacagttatgggaaaatggcgcattgcattgacacattggtagttccatggaagttatgtaggatgtgcatgtactatttgataatattttcttttgctttactgcctttacaaacagcaaaagtgtaaatttgtgccccttacatagtactcttatttttggtagtgttggtctaggtcacttacttattgaggagaccccacagagcaagtgcatcctagatatcaccctaaaacataccttccacatgatgaacaactattatatataattaaatattgctgcttatttttctgttggcctccccccagtttttgggcattttgttctaaacaactattttttacaattaaaagtgtaatatcaagataaaaatctggacttttgcttttcctggcactcaaactcaagactgggtttgaggagcaaatctgggttcataactgacaaatttgaaggagcacgtaagaaatggaaggcaggtaaagatttaaaccctaca

SEQ ID NO: 3247 - DNA, 650 bp, Cricetulus griseus
  misc_feature (1)..(21): n is a, c, g, or t
nnnnnnnnnnnnnnnnnnnnncattgtgtctgtgtcacagcttcccttcaggccactagagatgtatatttggatgccggtgagctgaggaggagacccccaagaaagggcggtcctcgagccttgtatgtacccatggaggggagtgactttgtgagggtcagcaatgtttactcatgcacaccctcctttcttgtgatattgacagccatcttccttgagtgaggtgtaaagccctcttaagatttttcagtaccccactcccaaagaatgtttaatatgtaaaaacattgcttgaaaagttgtctaccagtgaatttggggatgatctagggccagtaccacagctcctgcacagacaaccaagtcctctggcttaggagagtacaagagagtagccaaaagagtatagtacccaaggctcttacccttatcttggccagtgtctgggcagagcccagtcagtgcatactttcccctataattcttaggttacaaacttgagtttcagggaatttcagtcagcaaccggtagagtgaataaatacttggttaccagcctaataatgtgaactgctacacttatttttattctttaagaacacaaagactttatgcagatactttaactataaattaatgtaaaatgg

SEQ ID NO: 3248 - DNA, 650 bp, Cricetulus griseus
  misc_feature (1)..(22): n is a, c, g, or t
nnnnnnnnnnnnnnnnnnnnnngggcacctgaccgcccgctcacttgcagcccttcggcaacataggggcagcccatgcatgtcagcctgtatcacagaaggaaaagcgccaggtgcctgtgtctgcgccgatctgaagagctgtgcatgcagtatagcaggccaaggtctgagccacagcagcatttttatttgagattttgataactgtttatatgtgttgaaaaccaaaatgacatctttttaaagcttgtccataagtaaacatagatgtcttttatagtggaaaaaacacgtggggaaaaaaatcatctattttgatgcagcgtttgataaatgataaaacacccgacacctcactctttatactgcacagaatgaatgaggaggtctgggctggggagacgaaggtcaatgctgtttttgttttcttttaggatcattcccttttaccagcttttaaccgtctgatacccatagcaggcaaactctcctagttaacatagttaagttcagcacttgtctcgtttaatgtcaaggtttgcattttctacgggcagtctccttcctcacaaacccactgtgcaggtgctattgttgctcttagaaatattttcagaaatgttatcttctaagtgaaatttctagcc

SEQ ID NO: 3249 - DNA, 559 bp, Cricetulus griseus
  misc_feature (1)..(21): n is a, c, g, or t
nnnnnnnnnnnnnnnnnnnnntagcagacctaagctctcacagaggagtcagccctcagatcttgtttttgctcaactgagaggaatccatgaggtgctatctggcaggattaagtggattctattgctttggttctcctttccctgaggacctgatatttttttatgtcctcctagattttcttggtttgggtatgttgaggtttgttgagaaggaggttgaagcaaagttccaggagcgaaattacagtgtgttaagagtgtggggaaaattagttttatttttccctacatgggatacaacactgtgaaattcagtcttcaacagaaaggccctgcagttctcctaaaacatagttcttatttctttctttaacaaagtttaagctagtgttaataaattaaaagagaaattgcttgtctctccacctcagctttgttttatgcccgtttcatatcgttgtctgtgctgtaattcatacttttgataccatttctgatgtgtaaagtcggctgtcttgtaaatatcttataaagagttcaattgtaaataaactat

SEQ ID NO: 3250 - DNA, 650 bp, Cricetulus griseus
  misc_feature (1)..(21): n is a, c, g, or t
  misc_feature (421)..(440): n is a, c, g, or t
nnnnnnnnnnnnnnnnnnnnntcactaggtagaacaggctgttatattcttaacaacttatatgcttttattggttacaaaaatagagggaaagggcctgatgcattagacttaccggacggtatgaatggttcccaaggcagttgtctaagatgaaagtacaagtgaacccaagtcttgtcgttacccctgttaattttgtgtgtgtcatttgctgtatgaaagggatataatgtgtacttaggagtagttcctactttgtagtattttttatttgggtcaaaataagcttcagtgttcataaatatctgctcaaaattgttactttaatttcaggtttttttgtatgtaaattgccttaaattgatgctccctttcaagtgtactcatttgttctatttagacaatttagttgaacttnnnnnnnnnnnnnnnnnnnnaagggtcgaacccttgatataagaaagtggccaaaggacaagttttatggcttgtgggaaatggttgaaactttaactctttctcttacggattatatgccattattaggacatgtcccatatacgcggatgtttaagtttaactcatactcacaagcgatcacaaaaagcatattaaaataacgtggatggagctcttcgtggggaggg

SEQ ID NO: 3251 - DNA, 651 bp, Cricetulus griseus
  misc_feature (25)..(84): n is a, c, g, or t
tactgtgtgaaactgtatccgctcnnnnnnnnnnnnnnnnnnnnnnnnnnnnnnnnnnnnnnnnnnnnnnnnnnnnnnnnnnnntccgaagaaacatgaggggtttttaaacctggtgctggagtatgtgccctaaaccgtgtacctggcggcccgagactctaccaacggcaagctgattatccctatcatgtatgacaaggtgaacatgtaccaactctttcggagccttgcctacattcactaccaaggagtgagaaacagttacattaagacccacaaactgctagagtaccccaacactcccgacctactagctatgcccattgtatcagtgaaaaacagcttggactcggggcggagccccaacggtttccttacatacaattaatctggaactaaccgtgcacgccacattgttatactttaggaaacaccaagacttagcacaatcatgcctatccattgtagacgagacaacgtgggcatgactgttctaggtaagcagcatgccctaattgaaccaggccctaatatctcacctggcaccactatggacgaaggtctcagcattgatccgcaatagggtcatggttgtcccgcatgctccaacccacaggtaacacgatcgcgattgtataaatccccacc

SEQ ID NO: 3252 - DNA, 440 bp, Cricetulus griseus
  misc_feature (1)..(18): n is a, c, g, or t
nnnnnnnnnnnnnnnnnntatgcttctgtggtctttgatagagttgaagacagatagttatggttataattttcttcacttattataaaaaataagttacccttctttttatttagacaaaaaagagagatgatgggggaaatacttctgtgtatgtttataaataaagtgcttgcttggccaatgagacagcaggttaggctggactaggagtcaaagaggattctgggaaatgtagtagagaagtgatgttccagacaggaagtgacatagcaaggagactcatatttaagaagaggaaaaaggaaatgttgctctctttcccctcggctcctgctccagcgggaagatgtgatccaccagctaggagggacgccaataaggcgtgcgataagataaggcttataaaatatatagatgtatgatgatggatactgagc

SEQ ID NO: 3253 - DNA, 307 bp, Cricetulus griseus
tcccaaccatctacaatgacatcttctggcctgcaggggtacatgtacgcgaaacaccatacacataattcataaatctttttaaaaaatttagtctgggaatagagacctgtaatcccaaatacatggaaggctgaggggggggggggtcaattttaagggcatcctgaacaactcacttggggttctgtgtcacaaattaaaaaggagtactcacagggctggagatgtgatgtaactctgggagggcagtggcttaacatttgaggagcgctaatcacgcccttagtaagccctaaaacacttg

SEQ ID NO: 3254 - DNA, 261 bp, Cricetulus griseus
  misc_feature (120)..(120): n is a, c, g, or t
  misc_feature (207)..(248): n is a, c, g, or t
aagctgaagcagttccatgcctatcccaagactctggaggacttccgggttaaaacctgcgggggcgccaccgtgaccatagtcagtgggcttctcatgctcctgctgttcctttcccanttgcagtattatctcaccacccagggcatcctgagctctacctggacaactctcggggagataaactgaagatcaacatcgatgttnnnnnnnnnnnnnnnnnnnnnnnnnnnnnnnnnnnnnnnnnnatggatgggggcc

SEQ ID NO: 3255 - DNA, 131 bp, Cricetulus griseus
  misc_feature (17)..(17): n is a, c, g, or t
gtactccaattattcantcaaatcggaccctgtaaaagctgtaaaatgataacagagcaacccgatagcagaaggggcaactcttctgttggattttctgtgttgcagcatacaagcaatgatccatattg

SEQ ID NO: 3256 - DNA, 241 bp, Cricetulus griseus
  misc_feature (16)..(16): n is a, c, g, or t
  misc_feature (28)..(28): n is a, c, g, or t
  misc_feature (204)..(204): n is a, c, g, or t
tcaactgtgctccaanccagccccccanccctatacctttccaacatccctcagcaccatcaactttgatgaggttccccccatggggtgaccatcggggcagatctcaaaccagccttgggctcgcaccatcctggcccaaaccttgggccctccttgcctggggccagctctgggtcaacccccaacccctgtgctcattgnctagcgcccaggggccctcccccaagcgcctggggcc

SEQ ID NO: 3257 - DNA, 240 bp, Cricetulus griseus
  misc_feature (4)..(4): n is a, c, g, or t
ggantgaatattgagtttgaagcttattccatctcagataataattatggcggaatcaagaagttactgcgacagcttttcctaaaagctcctgtgaacacctgggagaggtaacagatctcttgattcaacagatccctatttgggagtggtgattaagccaacggatatttcataagaccgcgatgatgaagtatatgaacatgagatcttccgcttcataagcctcttaaatttaac

SEQ ID NO: 3258 - DNA, 218 bp, Cricetulus griseus
  misc_feature (140)..(140): n is a, c, g, or t
  misc_feature (174)..(191): n is a, c, g, or t
tgtaatctcacatacctgcacagctacctgacctacatcaagctgtcaacagccatcaggcggaatgagagcatggctaaaggcctgcacagggccctgctgcagcaacaaccagaagatgacatcaaacgttctcccangcctgagggcctgatccggctctatgatatcatnnnnnnnnnnnnnnnnnnactgctgcagcttcctggcttagaaga

SEQ ID NO: 3259 - DNA, 442 bp, Cricetulus griseus
  misc_feature (115)..(115): n is a, c, g, or t
  misc_feature (118)..(118): n is a, c, g, or t
  misc_feature (161)..(161): n is a, c, g, or t
  misc_feature (173)..(173): n is a, c, g, or t
  misc_feature (431)..(431): n is a, c, g, or t
tggggtgcaagcatatattataaaataatcacctcaaaggatatttaagatatccatcattttatacatttaccaacccccacctgtagggagacactgtacccccccctcctantancttggacaggggtgctgggacatgcccgtgagggcgtgggcanggaaagtctaanctgacatgggaaccattcttaagggaccacacacacacacgtgaatagcccttctttctggcccctctctctgggctggctgccttgctgcccctggcatgctctggcttgcgtttgggatgatgtttatctgaataaagaaaccttacccttacggactgcagatcgatctcatcacccaccccatgccttcttcgtctcaacctaatgaatacataaagtaacttaagttactgacaatatggggtcaatccctanagctcatataa

SEQ ID NO: 3260 - DNA, 104 bp, Cricetulus griseus
ccatgttcccatggccagtctccacatggacacaggaaggcttgcacaggtgtttctaagggtgctggggggcatcctggagaaccaatgagccatgtgcctgt

SEQ ID NO: 3261 - DNA, 479 bp, Cricetulus griseus
  misc_feature (18)..(34): n is a, c, g, or t
  misc_feature (36)..(60): n is a, c, g, or t
  misc_feature (97)..(143): n is a, c, g, or t
  misc_feature (171)..(195): n is a, c, g, or t
  misc_feature (199)..(223): n is a, c, g, or t
  misc_feature (255)..(278): n is a, c, g, or t
  misc_feature (281)..(299): n is a, c, g, or t
  misc_feature (321)..(368): n is a, c, g, or t
  misc_feature (370)..(386): n is a, c, g, or t
  misc_feature (401)..(421): n is a, c, g, or t
  misc_feature (423)..(435): n is a, c, g, or t
tacaattgtattaacttnnnnnnnnnnnnnnnnnannnnnnnnnnnnnnnnnnnnnnnnnaatgtctacgcttctatgtgtgagaagggataatacnnnnnnnnnnnnnnnnnnnnnnnnnnnnnnnnnnnnnnnnnnnnnnnaataggtatgtattcaaatcctatcggnnnnnnnnnnnnnnnnnnnnnnnnnaccnnnnnnnnnnnnnnnnnnnnnnnnntagtgtcaaacacttacgggacagactatggnnnnnnnnnnnnnnnnnnnnnnnnggnnnnnnnnnnnnnnnnnnngtcatactcctacctctaaccnnnnnnnnnnnnnnnnnnnnnnnnnnnnnnnnnnnnnnnnnnnnnnnntnnnnnnnnnnnnnnnnnactatagccactttnnnnnnnnnnnnnnnnnnnnngnnnnnnnnnnnnncgacattttatatgggtccactatcttcatgatgaattatatta

SEQ ID NO: 3262 - DNA, 443 bp, Cricetulus griseus
  misc_feature (36)..(36): n is a, c, g, or t
  misc_feature (39)..(57): n is a, c, g, or t
  misc_feature (203)..(203): n is a, c, g, or t
  misc_feature (228)..(228): n is a, c, g, or t
cgcgcgtgataccactcactataggggcgaattggnggnnnnnnnnnnnnnnnnnnntccaccccacgcgtcccgggggtgtctcttaaacgtgggtgggaccctgactgccccgcgggagaaaattacaaaagaaatggatgactttctacaaaaattgaggcggaagaccaaaattggagtggtaggtgggtcaaattttnaaaaattgcaaaggaacggggaatngatgtggttcataaataccattatctatttccaataatggcttggtggcatacaaagatgggaagcttttgtgtaagcagattattcaaggtcatctggggaggcagtgatccaagacctgatcaactactgtctgagctacattggcaaaaattaaactccctaagaaaaggggaactttcattgaattccgaaatgggatggtgaatgtgtcc

SEQ ID NO: 3263 - DNA, 235 bp, Cricetulus griseus
  misc_feature (6)..(78): n is a, c, g, or t
atactnnnnnnnnnnnnnnnnnnnnnnnnnnnnnnnnnnnnnnnnnnnnnnnnnnnnnnnnnnnnnnnnnnnnnnnnnacccctccgcggggtgtctataaaacgtggatgggaccctgactgccccgcggcgataaaattacaaaagaaatggatgactttctacaaaaattgaggcgacggaccaaaattggagtggtacgggggtcatattttcaaaaattacaatatcggc

SEQ ID NO: 3264 - DNA, 419 bp, Cricetulus griseus
  misc_feature (34)..(34): n is a, c, g, or t
  misc_feature (42)..(42): n is a, c, g, or t
  misc_feature (65)..(104): n is a, c, g, or t
  misc_feature (211)..(211): n is a, c, g, or t
  misc_feature (237)..(237): n is a, c, g, or t
  misc_feature (243)..(243): n is a, c, g, or t
caacatactggcacagtgttagtcgcgcgtcatnacgcactncactataggggcgaattgggctnnnnnnnnnnnnnnnnnnnnnnnnnnnnnnnnnnnnnnnngatgtcacaaaggatgaattcaaaagactgtttgctaaataccgagagcccggagaagtttttatcaacaaaggcaaagggttcgggttcattaaacttgaatctanggccttggctgaaatagcgaaagccnaccttnatgacgcccgcatgagagtatacagcttcgggttcgctttgccacacatgctgcaaccctttctgttcggaatctgtcaccctatgtttctaacgaactgttggaagatgcctttagccaatttggtcctattgaaagggctgttgtaattgtgggatgatcgtggcaaatctaca

SEQ ID NO: 3265 - DNA, 160 bp, Cricetulus griseus
  misc_feature (97)..(97): n is a, c, g, or t
  misc_feature (145)..(145): n is a, c, g, or t
aaaatcactcatagaatgatggaaaaggcatgccattgggaggattggggtataagatcagagaactgaacacctgacattgctgtgcaaggtccantttcaaatttcaacaatatataagaaacaataaagataaatgccatanggaagaatcttattt

SEQ ID NO: 3266 - DNA, 406 bp, Cricetulus griseus
  misc_feature (83)..(123): n is a, c, g, or t
  misc_feature (220)..(254): n is a, c, g, or t
  misc_feature (256)..(282): n is a, c, g, or t
  misc_feature (295)..(347): n is a, c, g, or t
  misc_feature (350)..(366): n is a, c, g, or t
  misc_feature (373)..(385): n is a, c, g, or t
  misc_feature (387)..(401): n is a, c, g, or t
actttaatcacttctcgggactgggctatttcaatctcacctaatgtctacccttctatgttttagaagggtaatactctccnnnnnnnnnnnnnnnnnnnnnnnnnnnnnnnnnnnnnnnnncataggggtgtattcaaatcctatccgattctggtgtgtgcagcatgcgaagccccactaagcttggccctacttgtattagtgtgaaacacttacnnnnnnnnnnnnnnnnnnnnnnnnnnnnnnnnnnncnnnnnnnnnnnnnnnnnnnnnnnnnnnatactcctacctnnnnnnnnnnnnnnnnnnnnnnnnnnnnnnnnnnnnnnnnnnnnnnnnnnnnnctnnnnnnnnnnnnnnnnngctatannnnnnnnnnnnncnnnnnnnnnnnnnnnggata

SEQ ID NO: 3267 - DNA, 303 bp, Cricetulus griseus
  misc_feature (268)..(268): n is a, c, g, or t
cgcatgacttatataaaccttatttctgggatatgcaaattcattcttttctgattcttgagggactgtgcaagactgtgatttcactatggggagtttaaagtacagtgtaagaatcaaaactaagccatgggaagaagatagggttgtgcttcaggaagataattgccccactctttaagaatgtggacttgaactcaattctgctttcagatatttaaatatgaaataaaaatccatacatttactctgtggatttctgggctanataacatgggaaggaaggatggaacataaacaaaa

SEQ ID NO: 3268 - DNA, 215 bp, Cricetulus griseus
ccaattcattgctcaacaatgtgctgaaaagactccagctcctgcccttctcatggggtttgcttagtgtacacttttattttaaaaaacattctatttctaatgggtgtgcacgcatgcactcacgtcattgcgtgataaggccaaatgtgttcgatcaacagctggagttacattctccatccacctgacatgggtgcggggaacagaactca

SEQ ID NO: 3269 - DNA, 365 bp, Cricetulus griseus
  misc_feature (6)..(40): n is a, c, g, or t
  misc_feature (68)..(127): n is a, c, g, or t
  misc_feature (187)..(206): n is a, c, g, or t
  misc_feature (208)..(228): n is a, c, g, or t
  misc_feature (242)..(299): n is a, c, g, or t
  misc_feature (344)..(365): n is a, c, g, or t
tcccannnnnnnnnnnnnnnnnnnnnnnnnnnnnnnnnnngcgagatgggaattacgggtgactaatnnnnnnnnnnnnnnnnnnnnnnnnnnnnnnnnnnnnnnnnnnnnnnnnnnnnnnnnnnnngaccaagagttgattaccgttcatacactataggagaaacttgaaacgtgggtattgtgnnnnnnnnnnnnnnnnnnnngnnnnnnnnnnnnnnnnnnnnnctaccatgaggggnnnnnnnnnnnnnnnnnnnnnnnnnnnnnnnnnnnnnnnnnnnnnnnnnnnnnnnnnnggggaccactctagtagaatgaatctgacgcggattctctgtaannnnnnnnnnnnnnnnnnnnnn

SEQ ID NO: 3270 - DNA, 365 bp, Cricetulus griseus
  misc_feature (14)..(14): n is a, c, g, or t
  misc_feature (122)..(122): n is a, c, g, or t
taaaactgggctanctgggactgtgttctaaaaccctgtcctcacaaaaagagataatttcaaatgactcgggtcacattctattcacattactcattaaatggacaggattcctgatagancatacttttcaagaaacattatgactcaagcatattaaaaattagggttcacttaaatataatactgagctataatggaagagtgaacaattcatggaaatattgatcttactaagttagtttcaagtaccagaatttagcaaatttatatcttttcacataccaaggatttatgaaagagcaaaggcctaacaattataaaaagagttgagggacaggaactctttgaatttcttctctctg

SEQ ID NO: 3271 - DNA, 342 bp, Cricetulus griseus
  misc_feature (7)..(46): n is a, c, g, or t
  misc_feature (81)..(133): n is a, c, g, or t
  misc_feature (140)..(160): n is a, c, g, or t
  misc_feature (219)..(240): n is a, c, g, or t
  misc_feature (250)..(271): n is a, c, g, or t
  misc_feature (273)..(287): n is a, c, g, or t
cttaccnnnnnnnnnnnnnnnnnnnnnnnnnnnnnnnnnnnnnnnnaatgtctacccttctatgtttaaaacggataatannnnnnnnnnnnnnnnnnnnnnnnnnnnnnnnnnnnnnnnnnnnnnnnnnnnngtatgtnnnnnnnnnnnnnnnnnnnnntggggcttgcagcatgcgaagccacactgagcttggccctacttgtactactggcaaannnnnnnnnnnnnnnnnnnnnnaaaaacccgnnnnnnnnnnnnnnnnnnnnnncnnnnnnnnnnnnnnnatactcctacctgtaacctgagtatcatccaacaaaaatgcgtgaattaatggca

SEQ ID NO: 3272 - DNA, 439 bp, Cricetulus griseus
  misc_feature (15)..(15): n is a, c, g, or t
  misc_feature (126)..(126): n is a, c, g, or t
aaattttcttttaancctgtgaggggaatattgcacagtatcccttctaattccattgctgagcatttagtatccttgccttaccgagttcaaaggggatgggaaagtaaagtgtctttttcttantgcattttcagttatggggatgtgaatatagacagagggctctgcaccaactaatggagacttgacttccgtggagaggtagctgtaatattgggtttcactagataaactacaacatttctttggtacagtttgtaaagtagttttgcacacattcaactcttgattggggtgaaaatcctttcagtcaagtaattagatacataggcaggcgtattcttacagcacatgagagaactgagactcaaacatgaaatggggcaaactagctgggaagttgcagagctaaagcaatccacacatctttcatgcc

SEQ ID NO: 3273 - DNA, 227 bp, Cricetulus griseus
gccaagaaatgagactggcttatgaagaaatgactttgttaagatggaagtggccctatagctgatctgtccgtctggatgaatgggggtcatcctgttgggagtgcagataatggggtttgtcaagccaagtgtcagttggtttagatggggaaagggggatcagaaaagggacttgccttttggatccaggataaaacaacagaggagtgaaacaaatcctgtgt

SEQ ID NO: 3274 - DNA, 343 bp, Cricetulus griseus
  misc_feature (122)..(122): n is a, c, g, or t
  misc_feature (297)..(297): n is a, c, g, or t
atcactttttcaaagggggaagatacaagttttaaccacagtggaacagtttcctaaaaaaaaagaaaaaacaagaacgtaaacctgggagctatagaatacactatgggcatttataatanctattttatatattgtagtgttggaacagttttaaattaaatgtgttacattcacaagtggtggggcgtgttgtgattaaggtgtgtgtgatttactccaaggggggcgtcttgacgggactgggtttgtgtaacaacggaaaaaaatgcgatgcgtatgtgtgaaaccttgcanaagggctcattctaccacatggtaaccctctagctgatgacacata

SEQ ID NO: 3275 - DNA, 344 bp, Cricetulus griseus
  misc_feature (16)..(57): n is a, c, g, or t
  misc_feature (86)..(144): n is a, c, g, or t
  misc_feature (161)..(173): n is a, c, g, or t
  misc_feature (175)..(190): n is a, c, g, or t
  misc_feature (228)..(264): n is a, c, g, or t
  misc_feature (266)..(297): n is a, c, g, or t
atattgtataaacttnnnnnnnnnnnnnnnnnnnnnnnnnnnnnnnnnnnnnnnnnnaatgtctacccttctatgtttaaaagggnnnnnnnnnnnnnnnnnnnnnnnnnnnnnnnnnnnnnnnnnnnnnnnnnnnnnnnnnnntatgtattcaaatcctnnnnnnnnnnnnngnnnnnnnnnnnnnnnnaccacaatagcttggccctacttgtactactgtcaaannnnnnnnnnnnnnnnnnnnnnnnnnnnnnnnnnnnngnnnnnnnnnnnnnnnnnnnnnnnnnnnnnnnnatactcctacctctaacctgattatcatctaacaaaaatctatgaat

SEQ ID NO: 3276 - DNA, 344 bp, Cricetulus griseus
gtcccctaatgcgcatcttcatggcacagttaattagacccaaccccagctgcactgaatggatcaggtcctctggcttcctgtagttaaatcttaccatggggtgatagcaaacctgtactctaaagcctgtcacttttgtagatggtggggggtttatactggcttttgtagctacaaaaagcatcaaagactttatatatttaagccaaaagcaatgggtatttcctgatgagatcctaaatgtatggaaaacatgggggctgtaaagggataatgcatttgctgtgtgtttataactcgagggctataatatatatttcaatatcacatattctgtacta

SEQ ID NO: 3277 - DNA, 288 bp, Cricetulus griseus
  misc_feature (27)..(27): n is a, c, g, or t
  misc_feature (164)..(164): n is a, c, g, or t
  misc_feature (185)..(185): n is a, c, g, or t
cgacccagggcggggcggccgcgcgtncgtggttaagggacatgaagatcaagtccctggaggagatctacctgttctccctgcccattaagggaatccgagattattgatttcttcctgggcgcatccctaagggtgaggggctaaagatcatgccactgcanaagggggcgggggctggccancggaccaggggcaagggttttgtcgctattggggactacaacgggcatgtggggcttggggtgaagggctccaaggaggtggccactgcgcatccgagggggc

SEQ ID NO: 3278 - DNA, 410 bp, Cricetulus griseus
  misc_feature (106)..(132): n is a, c, g, or t
  misc_feature (173)..(196): n is a, c, g, or t
taagctaacaaaatggtacgtcacctattataggaagaatggggaaattgccacgatcatactctaataatcgggtttcttattagctcattgagtctatatatgnnnnnnnnnnnnnnnnnnnnnnnnnnnacctctgcaagtacaatagatgctcaagaagtagaaaccannnnnnnnnnnnnnnnnnnnnnnnttgcttattggaatggggcttccatctctacgaattgtatatataataggtgaagtcagtaacccaattatgacaggtaaaactatggggccatcaatgatactgggggtatgagtacacagactacgaagacctatgcgtgggctgatatatgattccaaccaatgaccttaaaccgggaggtgtacgatgactcgaagtggagaatcggata

SEQ ID NO: 3279 - DNA, 382 bp, Cricetulus griseus
  misc_feature (86)..(86): n is a, c, g, or t
aaattttaatactagtgtgcaggctttaatgctacttttccaagtcatgaattctcaacagacaatatctgatcggtattatacancactatacagaaaagtgttggatccacgggtgatggcatgttccaagcaagccatgtttcttaaccttgggtacgagggtctgaaaacagacgtcctgttgctcccggtgaacgcctttgtgaagaggggacttcacggtacttgcacacagatgccggcattcatgtggggagcgttgtatcttgtgtgggaaatccttaaagcaaaaccagatttaagaagccaactagatgatcatgccggaatctgatgaagaaaactgtggtgacgtcagagatgacagtgacgtagaaga

SEQ ID NO: 3280 - DNA, 121 bp, Cricetulus griseus
aagaatcaaagcgttttaatttaagggcccattcggcaaggcgaaattcctttaaaaagcgaaataaagaaagacaaagtgccaaatcaaatactcctgcaagtgatagactaactgatga

SEQ ID NO: 3281 - DNA, 302 bp, Cricetulus griseus
  misc_feature (34)..(65): n is a, c, g, or t
  misc_feature (67)..(80): n is a, c, g, or t
  misc_feature (109)..(152): n is a, c, g, or t
  misc_feature (241)..(264): n is a, c, g, or t
  misc_feature (267)..(302): n is a, c, g, or t
gggggtccgggctccttcaagtatgcctggggcnnnnnnnnnnnnnnnnnnnnnnnnnnnnnnnngnnnnnnnnnnnnnnctccctggggaaatttgagaccagcaaannnnnnnnnnnnnnnnnnnnnnnnnnnnnnnnnnnnnnnnnnnngggaacatgattactgggacttctcaagctgactgtgctgtcctaattgttgctgctggggttggggaatttgaggctgggatctccannnnnnnnnnnnnnnnnnnnnnnnccnnnnnnnnnnnnnnnnnnnnnnnnnnnnnnnnnnnn

SEQ ID NO: 3282 - DNA, 401 bp, Cricetulus griseus
  misc_feature (116)..(116): n is a, c, g, or t
tctgttgttaaactcagtagggttacttgcatttgtagttcattccttccaccagtctctcgtggttctagtttttaactaaactgcattctatcaagttgaatttcctcvcttancatttatttctggtgggtcttacttaaggaaaatttttagtgtgaacactgaggagcagctcagatgggtaccagactctcttttgaacctttaaagcaaagggtgcagaggtgaggctagaaaaatacttattctccaactctgatgagcccctcgtgtttccagcccatagtttattatagcatcagcgaactggggccataagcaaaatttcttagctgtgcctcatgcagattatgctgacgggcgatggcttgaggcattgctcacggtaaaacactgag

SEQ ID NO: 3283 - DNA, 2580 bp, Mesocricetus auratus
  misc_feature (857)..(877): n is a, c, g, or t
ccaggaggatccctcaggagaacatgtgaagaagcagggctgtcccaggcctggggtgataagacactctacagaccttctcggggacatctagactgtgagctggcccctgctgcccggtgtgtgtggctggggctgtgtggcgggtgagcatcctggctgctgacggtgcagcctccctcctgagctgagcgtaggcattttgggaaatcccttaatacctctattctgtgcaggcgtatataaggaggaccagaacactagctctccactgcactgcccagaggcccttgcctgactcactgccagccttcggtccctgcgttgccaagaagaacatggacgtcaccatccagcacccttggttcaagcgtgccctggggcccttctaccccagccgactgttcgaccagtttttcggcgagggcctttttgaatacgacctgctgcccttcctgtcttccaccatcagtccctactaccgccagtccctcttccgaacggtgctggactctggaatctctgaggtaagatggcttgtctagaggacagctagggatccactgctgccctgtgctctcctctagaaacgtccctgactctcccagcctcgcagcctgcagaggctgggtgggagcccacgtgcttagctgcccaaacctccacatggctgggaacggggtcggagggggcgacctgccgagcccgaccgctgccttttcctcccatcagctcatgacccatatgtggtttgtaatgcaccaaccacatgctggaaaccccaagaacaaccccatcaaggcaagttacatggcaaaggcaagcgtcctgagctggccgctccctggactttctcnnnnnnnnnnnnnnnnnnnnntgtgggggtgggatgttctgccctgatgcacagagaggaggtcctttcttatagcagagcaggtgctttctgtagctggcaaagctgcggatggggctcccttctagcttccccaatggtcaaagaaaggccacaaggctatgtctctctctacccaagggacccacagttctggaagagttaagcctccctttactttaaaagaaggcttccagagcaggtccagccgcaggcctaggaagccaaatgcccaaatgcaggctctagttatggtagagggaggagagcgcaaaggactttgtgctagcagccaggggtgctgtgactgcttttgtagtgtcacatggccggtgaggtgggctcctgggactgtggctatatcgcatactttagtcctaccagctagccagttcccaactagtcaggcaaaaaaatccccaatggacccactagcccatgatcaaccataaccaaccggctatttaacaaaataatcaaccagttacttaacatgctgagacccacccaacttctcaccggccaccaggctataacgaaacaactggtcaacctgttaactagctacccgatgatgatcaaccagccagctaactcataaccaattacttgaactctaatcagccaagccattcatttatcaaccagtcatcctactataactagtcctccaacctataaccaattagccagccaccctataatcggttggctgacccagcattgcccagtctttgggtttggaggtcaggggtgatcttacctgaggggcccggtgagcagtcccagctccagggttacttggcctgtggaagtagagctgtgacaagattgattgttggttctgacggctgggcgcttccctgtctggtctcatccacccagtaaggtcacacggctgtttccccatcctttgcccctggagctggtggtcctttgggaagctccacatgtaggtttgggtttcaggtccgatctgaccgggacaagtttgtcatcttcttggacgtgaagcacttctctcccgaggacctcactgtgaaggtcctggaggactttgtggagatccatggcaagcacaatgagaggcaggtgagtttgggatgcacctccatctgtgtgggtcctgcacgcccagagaagcctggggagcctctcgtgctaggctggctcctcccaggaccatggaggtcactgtcctcagccctggcgggcccaggcagcagcatgagcggggctcagggatgcaggatgaggaccttagtattgggcacaactccagctgtcctcctggatcttctgggtgatgggattagagagagcctcagggaatgaaggctgaaggtagccccctctgagccatattttcacatgaagcctgactggggagagagaaccccgaggataggagaattggagtttatgcacgccaaaagttgcacagcccccgtggtatttcagttagtgagtgacagtcctgaggcataaggaggtcccttgccaggcgggaaagacttcttccccagtagtcacccaccctgcccatggctcctgatcaggtggagaaccctcaggtgtttgggttgagggagcccaggccctggctggaagtagcatctcccgatggagctgggatgatgcaggaagctcagaggctggctaggtgtgtcacacctatgtgggcc

SEQ ID NO: 3284 - DNA, 906 bp, Mesocricetus auratus
  misc_feature (323)..(389): n is a, c, g, or t
cccatcacccctgaccattctcctccctgatggtgcccaggatgaccatggctacatttcccgtgagttccaccgtcgctaccgtctgccttccaatgtggaccagtctgccctctcctgctccctgtctgcggatggcatgctgaccttctctggcccaaaggtccagtccggcttggatgctggccacagtgagagggccattcctgtgtcacgggaggagaagcccagctctgcaccctcgtcctaagcgggcctcgccttggttgtcccctgaggcccctgacccactgagcccagggaccacagcagagtctgcctgnnnnnnnnnnnnnnnnnnnnnnnnnnnnnnnnnnnnnnnnnnnnnnnnnnnnnnnnnnnnnnnnnnnctttgttcccttcccattttctcagagggttgagggtttgagagagtggcttagagagcttggggtcttggcctgaggggctgcaggttcggggtgacggaggctcaacaccagccagctggaaggaatgatggcattgaactcttgagatatgacctgtcctcctggaacgtgacagagtgggtggcggctaaccagccgagagccctctgccgagcccctggacagcagcttcccttgctgcccactcttacgcaggctcatgtgccgcgctccgacggctcacttctcccagcccctcctcctgagactttctctatgaccctggccacccatgaaaatggagcccctggcagacaataaagagcaggtgacagaagcaacttgcagtctggtgtcctgttgtctcctttggggtgggggtggggcactgggagggtatagcggtcatctcccacctgcctgagagggtttctggcaccctacgtcatctcttaagcccatggcccctctgcag

SEQ ID NO: 3285 - DNA, 346 bp, Cricetulus longicaudatus
agatcttctgctcccaggagagagagcaatgtctagagtagggaaaaggaccatcttagccctctactataggcagctgtctgctacccgtcactcaccaatgggagaggaggcatgggtattgtgttcagatggggcccagtgttatttatttgagactggatcagggtgagaacttgaggggaagggttggagtagaaggttatgatctttctagacagtgctgcattggtggcttgactgaagtccttaagtttacctgaacaccaggggcattgtcttcaagccccatgaggacagccaggcattcttgttggctagaactggaagagtcgtcaagcgggtc

SEQ ID NO: 3286 - DNA, 269 bp, Cricetulus longicaudatus
agatctcagtgggtactattctgtggagacagacacaagttgaggggagataactgacggtgctcatgttggtgtttctctaaggaatggacatgattagctatgcacatagaaaaatggggaaatgggggtcaagaatgtagcctttcatatgagggaagaggaagcttgagttgggtgaagaatagaggagagtaagctaagagataccatgatagagggaaccattgtaggtttaaagagaaatctggcactagggaaatgtccag

SEQ ID NO: 3287 - DNA, 204 bp, Cricetulus longicaudatus
agatctccagagaaaattgggagcaagggaggagaaaggagggagctaggagaatgagaaggggagaagaggagggataaggaggatatgagggagcaaaaaggtgagttgggggaagaaaagaagaaaacaagaaaggagataccataatagagggagacatttaagggttacagagaaatcaggcactagggaaaggtctgg

SEQ ID NO: 3288 - DNA, 354 bp, Cricetulus longicaudatus
  misc_feature (41)..(75): n is a, c, g, or t
agatctcctctgtgagtctaagcacaagagaaaccccgccnnnnnnnnnnnnnnnnnnnnnnnnnnnnnnnnnnncataagtatagaccttttagagtaacacctaacttttcaaaggagaccataaagtccaatgagcgggaacagatgtttaaagcccagagaccagagatccaggcagctagtatacctattaacttcaattcacagtggagaacaacaacaacagacaacaaaacaagacaggctgttcaccctctccatgcctcgtcaatacagtactgttgtctttctcagagcactgagacctttaaatccccaagcaccttaccaaggtcagaggagtcaggtctc

SEQ ID NO: 3289 - DNA, 354 bp, Cricetulus longicaudatus
  misc_feature (241)..(272): n is a, c, g, or t
agatctgcctgcctctgactcccaagtgctaggattaaaggcgtgcgcagtttcacagcgtcatgaggcaaaaagacatggaagtatgatagggacttgatgggaggaagacgggggaaagaggtgatgaaggtgggagggggtaagagaaggcagaggcattagtgtaaactgtttctgcgtgtacgaaactgacaagggaataaagtttttaaactctctctctctatctctctctctnnnnnnnnnnnnnnnnnnnnnnnnnnnnnnnnttggtttttcgagacagggtttctctgcgcttggagctgtcctggaactagctcttgtagaccagctgtcttgaactcacag

SEQ ID NO: 3290 - DNA, 599 bp, Cricetulus longicaudatus
cttgagatgctcatctctgcagccatagctacaacagacttagcacacacactactagcacatcacctcctctgggtattgctatgaggtgtggtcctcttcagtgcctggatgtcagcccctaccagaaggaaggcttggctttgaggatccgtgagggttggggagaacagcagttagttccattgtgacaatgggagactggcatgtctccagcttcctgttgcagctttgcagacagccttacggactaggacagatgactcccagatctgctcctgcagatcatcttcatattccttcccaagggcatcctcggtgactttcatccagtaccaggccctgtgctatgggcccggtcaactgcagcccagaacttcctgcctcttactgtctagatagggagagccgataggttgagccctggggcaccgacaatgcagactttaagcctcgaccccacctgtccctggaagagtccaaacttgcctgagtccctacacagctcactcagaaccacaggttctgggtctgcacgctgtcttcttaagatgcccggtgcacggaaaggccacaggtagctgctctgaacatcttgg

SEQ ID NO: 3291 - DNA, 765 bp, Cricetulus longicaudatus
  misc_feature (714)..(742): n is a, c, g, or t
aatccctccttttatttagaagccatgctttgaatcctcactcaggggaaatggtttggtccccactgaggtaccattgggatgctcatctctccagcctattgcaagagacttagaacactgctagcatcacttcttccagggatggctctgaggtgctgtcttcttcagtgcctgcatgtcagcctctaccctaggaaaggcttggctttgagaatccatgtgagatggggagaacagcacttcgttccattgtaagtaacaataggagacagatgtgtctccagcctcctgttgcagctttgcagacagccttatggactaggacagatgactcccagatctactcctgcagatcaccttcatattccttcccaagagcaccatcggcaactttcatccagtacaggacctgtgcaagggctcagtcaactgcagtacttcctgcctcttgactgtctagctagggagggccgaaatgctgagaggcctggggcactgactatgctgactttaagccttgactccacctgtcactggaaatgtgcaaacttgcctgagtctttacccaactgcctcagaactacagggttctgggtctccatgccgtctatgtaagatgccaggggcatgggaagctcacaggcagctgctctgaacatcttaggagaattgcttgaggaccacccccctgctgtgcacaatgtctggatnnnnnnnnnnnnnnnnnnnnnnnnnnnnntccctttgagcacagggcttgct

SEQ ID NO: 3292 - DNA, 537 bp, Cricetulus longicaudatus
catttatttcagtccagtcaatatacctatattaggtacaaagccctctacctacatacctccaaccccaacccccacccaaaaatgacagaagttcctaactagaaggactttggctgggtaaaccctcggattgctacctggtaaataagcagaaaggtgggtttctgtttagcaaaaagtagatcttcccaaaataggttcccttttctcaagatccatctttaatctggcaggcatctcccttcctctttccttaaaggtcaagtagattgggcaagggtgcctagtccctggtcagcctggacaccgtatctcagctgaaatcccaactgtgctgatagtcataaattcgtcttgttttaccaccagcctccttttgtctatgacctactccctggttggccttggcagtttagttcccaataaacctttctttctacttgtgtagtggtctaggtagttgtgacttttacaaagtcacaagaaacaagtgaatttgagaacttactctcagctaagcagttagacagccta

SEQ ID NO: 3293 - DNA, 940 bp, Cricetulus longicaudatus
  misc_feature (324)..(342): n is a, c, g, or t
  misc_feature (377)..(393): n is a, c, g, or t
cagaggcgtagtcttcaccatggcgtatcccgggcaccctggcgccggcggcgggtactacccaggcgggtatggaggagctcctggagggccttcgttccccggacaaactcaggatccgctctatggttacttcgcgtctgtggctggacaggatggacaaattgatgctgatgagttgcagagatgtctaacacagtctggcattgctgggggatacaaaccttttaatctggagacttgtcgccttatggtttcaatgttggacagagatatgtctggcaccatgggattcaatgaatttaaagagctctgggctgtgcnnnnnnnnnnnnnnnnnnncttcatcagttttgacagtgacaggagtggaacgnnnnnnnnnnnnnnnnngcagaaggctctgacgacgatgggattcagattgaacccccaaactgtgaattcaattgcaaagcgatacagcaccagtgggaagatcacctttgatgactacatcgcctgctgtgtcaaactgagggctctcacagatagctttcgaagacgggattctgctcaacaaggaatggtgaatttctcatatgatgatttcattcagtgtgtcatgaccgtctaagtcaagaagaagttgtctgaatatactcaacattccaactgagcccaagcttgcttcctcctgccttcagtgctgtgtgcagatttccaacaacactccctgacaactgttgaacgggattgtgactttatatacaaccgaagcttcatttttaattttgataataaatccctgaggttcaattaatataagaacaagtgtgttgtaccagccagaacctaccttgagccactattaaccaggccttattttcctgctgtcttttatataaacttaagtatgcagagagtttaaagcatattgttatatttcttgtgacatgaa

SEQ ID NO: 3294 - DNA, 2009 bp, Mesocricetus auratus
  misc_feature (779)..(793): n is a, c, g, or t
  misc_feature (1421)..(1547): n is a, c, g, or t
  misc_feature (1636)..(1651): n is a, c, g, or t
  misc_feature (1733)..(1754): n is a, c, g, or t
  misc_feature (1777)..(1803): n is a, c, g, or t
agccggaagtcatccgaacgtaggctaggtctaccaaggcggggttagacagcaggctgttccgtttggcagccaggatggcatcgcctgcgctggaggagttggtgctgaactccaggcacagactggtcaggggcctcaaacagcagaaagcctccgctgaccagatcgaggaggaggtggccaaactcctaaaactgaaggcacagctgggccatgatgaaagcaaacagaaatttgtgctcaaaacccccaagggcacaagagactacagtccccggcagatggcagttcgggaaaaggtgtttgacgtcatcatctgctgcttcaaacgccatggggcagaagtgattgacactcctgtgttcgagctaaaggaaacactgatgggaaagtatgggcaagactgcaaactcatctatgacctgaaagatcaggggggggagctactgtcccttcgctatgacctcactgtcccttttggacggtatctggcaatgaataacttgaccaacattaaacgttaccacatagcaaaggtgtatcgccgggataaccctgctatgaccagaggccgttatctgaattctatcactgtggattttgacatcgctggccagtttgatcccatgattcctgatgcagagtgcctgaagatcatgtgtgagatcctgagttcacttcagataggcaagttcctggtcaaggtaaatgacaggcgcatcctagatggaatgtttgctgtctgtggtgttcctgatagcaagttccgtaccatnnnnnnnnnnnnnnncaaactagataaggtttcctgggaggaagtaaagaatgagatggtgggagagaagggccttgcaccagaagtggctgatcgcattggggactatgtccagcagcacggtgaggtgtgtctggtagagcagttgctccaggatcctaaactctctcaaaacaaacaggctgtggagggcttgggagacctaaagctgctgtttgaatatctaaccctgtttggcattgatgacaagatctcctttgacctgagccttgctcgagggctggactactatactggggtcatctatgtggcagtgctgctacagatgccaaccggagctggggaagaaccctggtgtgggcagtgtggctgctggaggcgctatgatgggctggtgggcatgtttgaccccaaaggacgcaaagtgccatgcgttgggctcagtattggagtagagcggatcttctccattgtagagcaacgattagaggctttagaggaaaaagttcggaccactgagacacaggtccttgtggcatctgcacagaaaaagctggctggaggagagactaaagcttgtctccagttgtgggatgctgggatcaaggccgagctgctctacaaaaagaacccaaagttactnnnnnnnnnnnnnnnnnnnnnnnnnnnnnnnnnnnnnnnnnnnnnnnnnnnnnnnnnnnnnnnnnnnnnnnnnnnnnnnnnnnnnnnnnnnnnnnnnnnnnnnnnnnnnnnnnnnnnnnnnnnnnnngaagaccttgtggaggagatcagaagaagaacaaatcagcccctctacgtctgctgaaggaagcagactagcagaggaagcaggattgnnnnnnnnnnnnnnnnaacaaaactgcatatgtacttaaatagtttgcacatttctgatccagcagaagactgaagggtggtcgggtacacgaggccnnnnnnnnnnnnnnnnnnnnnngttattatcggtaatcactggcnnnnnnnnnnnnnnnnnnnnnnnnnnngaacagaaaagaaaaaaaggccaggtgtacagtttcctagtcgggaatagggaggagcagtataggtcagtataggtggattaatcaagactgactcctaaactcctgtatgaacctgagatggcttcttgcagagccacataccagatgaatggatgcctccctacaacctgccgccaaaaagtccaataaatgtctcccccgct

SEQ ID NO: 3295 - DNA, 1933 bp, Cricetulus longicaudatus
  misc_feature (20)..(84): n is a, c, g, or t
  misc_feature (1533)..(1554): n is a, c, g, or t
  misc_feature (1768)..(1843): n is a, c, g, or t
  misc_feature (1872)..(1914): n is a, c, g, or t
gaattcacccactgaagtannnnnnnnnnnnnnnnnnnnnnnnnnnnnnnnnnnnnnnnnnnnnnnnnnnnnnnnnnnnnnnnntatgttctaaacattttccatctggctcttctttgttttacccatgtttgtgattgccctgaaaccctaatatgagggctgcaaataaatgcattgctttgtatacatcaggttcgattcccagcagtgcaaaacccaaaacaaaagccaaacttgctggacagttctggcatctaggccatctccatttaagttttggtaatcatcttgtcagcagcatcaaaaagattaaaccagcaacaacaccatccacccatacactttagggatctctaccagtagagcccagctcagagttcaaaattccccaggaaccttattctgggagaggaaaaaactctggcaccagctacagggggaacatgcctgccaggaagccatgtccacacagtttctgagaactcaggaccactttgcaggcaaaactggagcaaagacaagggcaggtcagtggtggacatgagcaccccggcccaggactgcacggtaatgcatagctcttggccctgtttaaaactaaacctcaagccagcacctgaagatggatcccctttgtttattcccctttcccgtatggccacactggataaaactctcttcacttctcttttagctagcatattgagttcatgggccaagcctagcttggcctgcctgcacccaggccagtaccctagaaactctggtaacagtctcatcctatggctttctaagtgacattgttcaatggatgtaatttataacaagatttaaagattaagcaaaacctagatttgaagtagagtttcaaagtaaagtagcagcatgagtcagttggcttatctttcggaagctccttctgcaaatgaggtaagggtggttttatgagacccattgtttaggttttggggatgaaagagggtggactctgctcaagtcccaacaacaaacattgtggccaaataaacttagattcttgtcttaactttcttgtttacaatgactttaggaaaagtatctctgcaggcaatttccattgtatcaatataatgtttgggtccttttatatactatatctaaaataggcaatccttagaaaaaagaagcatattttgtgtttggggggggcatgttacttaatgattacaagagtatttttctcaaatgatgatattttgaaactaagatggtagtagttgtataatgaatgtcatgaatatactaaatgttctagagtaacatacttaaaaatggttaaatatatatttggtgaaatttccttataattatggggggcactgattgctcaatggtaaagatcactttttacagaggatgcagacttggttcctagtacccatatggtgagctataatcacctgtaactcaagttgtaggggatccaatgccctcttctggtttctgtaggtacctacacatgaaattaaagaaaaaaaaaaaaactttacnnnnnnnnnnnnnnnnnnnnnntttacaattttacaaatgtttatatgggggcattgtttccctcctcctggccccatttctgagggtgcgagcactggcctcaccattagagcctttggtttccttttcagcatagaaagtacctcttagaccagagaagagatactggaggggtagttgaaaccttttgactttaggagtgttaaaaatgtcatctgagccaggcattggtggnnnnnnnnnnnnnnnnnnnnnnnnnnnnnnnnnnnnnnnnnnnnnnnnnnnnnnnnnnnnnnnnnnnnnnnnnnnnagagcgagtgccaggataggcaccaaagnnnnnnnnnnnnnnnnnnnnnnnnnnnnnnnnnnnnnnnnnnnaaaacaaaaatgtcatctg

SEQ ID NO: 3296 - DNA, 549 bp, Cricetulus longicaudatus
tatacgtgaatagtttttcttccctctgtgtgttttaaaatagttactaatgctttcttggatctgcatttaggagttatcctttccattaaaaatataagctgtttcttccaaggcgactcctgggcgtggagcctaccctggggtatggttgataaacacagtgtcactgtacattgttagttataaattatataactaattttaattataaaattaacactaattataatagcattattaatgaaattaacattgattataataaaacaacattaataataaaattaacattgtagacactggcttggagtgctattaaccaaaacaggctgagtgccattattagcaacaagaggcaagatgatttccctgcttacagagaaatgggggcatttttaggtaatgacagagtaataggtgtactgatggggtaggagacatggctcaacagttaagctcttgctacacagttattaggaccgattcagatcctagcacccacataaaagcaaaaagggcatcctgtgaacttctcagttccaactc

SEQ ID NO: 3297 - DNA, 3030 bp, Mesocricetus auratus
  misc_feature (791)..(810): n is a, c, g, or t
  misc_feature (1950)..(1968): n is a, c, g, or t
aaggtggagaaggagaagcacgcgacggagaacaaggtgaaaaacctgacagaggaggagatggctgggctggaccagatcatcgccaagctgaccaaagagaagaaagctctgcaagaggcccaccagcaggctctggatgcccttgaggctaggaagactaaggtcaacactctgaccaagtccaaggtcaagctggagcagcaggtggacgacctggagggctccctggagcaggagaagaaggtgcgcatggacctggagcgagccaagcgcaagctggagggttaccttaaggtgacgcaggagagcatcatggacctggagaacgacaagcagcagctggacgagaaacttaaaaagaaggactttgagttaaatgcactcaatgccaggattgagaatgagcaggccctgggcagccagctgcagaagaagctcaaagagcttcaggcacgcatcgaggagctggaggaggagctcgaggccgagcgcacagccagggccaaggtggagaagctgcgctcagacctgtcccgtgagctggaggagatcagcgagcggctggaggaggccggcggggccacatcggtgcagatagagatgaacaagaagcgcgaggccgagttccagaagatgcggcgggacctggaggaggccacgctgcagcacgaggccacagccgcagccctgcgcaagaagcacgccgacagtgtggccgagctgggtgagcagatagacaacctgcagcgtgtgaagcagaagctggataaggagaagagcgagttcannnnnnnnnnnnnnnnnnnnacctccaacatggagcagatcatcaaggccaaggctaacctcgagaagatgtgccgcaccttggaagaccaaatgaatgagcaccggagcaaggccgaggagactcagcggtctgtcaataacctcaccagccagcgggccaaactgcagacagagaacggggagctgtcccggcagctggacgagaaggaggcactgatttcccagctgacgcgaggcaagctcacctacacccagcagctggaggacctcaagaggcagctggaggaggaagtcaaggccaagaatgccctggcccacgccctgcagtcagcccggcacgactgcgacctgctgcgggaacagtatgaggaggagacggaggccaaggcggagctgcagcgtgtcctatccaaggccaactcagaggtggcccagtggaggaccaagtatgagacggacgccatacagaggaccgaggagctggaggaggccaagaagaagctggcccagaggctccaggacgcagaggaggctgtggaggccgtcaacgccaagtgctcctcactggagaagaccaaacacaggctgcagaatgagatcgaggacctcatggtggacgtggagcgctccaatgctgccgctgcagccctggacaagaagcagaggaacttcgacaagatcctggcagagtggaagcagaagtatgaggagtcccagtcagagctggagtcttcccagaaggaggcacgctccctgagcacagagctcttcaagctcaagaatgcctatgaggagtcattggagcacctggagaccttcaagcgggagaacaagaacgtgcaggaggagatctcagatctgactgagcagctgggctccactgggaagagcatccatgagctggagaagatccgaaagcaactggaggctgagaagctggagctgcagtcagccctggaagaggctgaggcctccctggagcatgaggagggcaagatcctccgagcccagctggagttcaaccagatcaaggcagagatcgaaaggaagctggcagagaaggacgaggagatggagcaggccaagcgcaaccacctgcgggtggtggactccctgcagacctccctggatgccgagacgcgcagccgcaacgaggcnnnnnnnnnnnnnnnnnnnatggagggcgacctcaacgagatggagatccagctcagtcatgccaaccgcatggctgctgaggcccagaaacaagtgaagagcctccagagtttgctgaaggacactcaaatccagctggatgacgcagtccgtgccaatgacgacctgaaggagaacatcgccatcgtggagcggcgcaacaacctgctgcaggcggagctggaggagctgcgggccgtggtggagcagacggagcggtctcggaagctggcagagcaggagctgatcgagaccagcgagcgggtgcagctgctgcactcccagaacaccagcctcatcaaccagaagaagaagatggacgcagacctctcccagctccagacagaggtggaggaggcggtgcaggagtgtaggaacgcagaggagaaggccaagaaggccatcacagatgccgccatgatggccgaggagctgaagaaggagcaggacaccagcgcccacctggagcgcatgaagaagaacatggagcagaccatcaaggacctgcagcaccggctggacgaggcagagcagatcgccctcaagggtggcaagaagcagctgcagaagctggaggcccgggtccgggagctggagaatgagctggaggctgagcagaagcgcaatgcggagtcggtgaagggcatgaggaagagcgagcggcgcatcaaggagctcacctaccagacagaggaagacaggaagaacctactgcgactgcaggacctggtggacaagctgcagttaaaggtgaaggcctacaagcgccaggctgaggaggcggaggaacaggccaacaccaacctgtccaagttccgcaaggtgcagcacgagctggatgaggcagaggagagggcggacattgccgagtcccaggtcaacaagctgcgggccaagagccgtgacattggcgccaagggcctgaatgaagagtagatcttgtgctacccaaccctaaggatgcctgtgaagccctgagacctagagcctttgaaacagcaccttaggcagaaacacaataaagcaattttccttcaagcc

SEQ ID NO: 3298 - DNA, 1138 bp, Cricetulus longicaudatus
ggatccggacaacacccacaccggcccctccaggtccagaaagctggccctgcgagaagcgggactgaaaaggcgtgcgggagccagaaatccaaaagggtgccaaggcatgcgtcctttttccacccagaaataaccccaggctttcaatttgaggttatttcaatatccagcaaatgcgttacttcctgccaaaagccagcctccccgcaacccactctcccagaggccccgccccgtcccgccccctcccggcctctcctcgtgctggatcgctccctaaggacgccccgctccagaagccccacctaccaaggacgccccacccttgttcccggactggtatgaccccagcctgctgacatccctccgccctttctcgtgcacgcggctatggcggaatctgagttgcagctggtggcgcagcgatccgcagtttccccgacttccccatccccggcgtgctgtttaggtgagatcacgagccagcaaggcgttggagccctgttcctgggctcccggcgaggcgcatgggcagtctcggggatcttgtggggtctccgcccccctttccccggccaccagcctctccttgttcccagggatatctcgcccctcctgaaggaccccgcctccttccgagcttccatccgtaaagcagagaaatcttgacacatacacacactcatacagccctgttatcacaataagacatgtattggtcactcccaaaggtccttgtgcccgctgaggtcccctccctcaccctgtctgctcccccagacccaggaaaccataatgtgctttctattcctagagatatattttgggctttctagaagtttctacaaactcagagacactgttgtggattaacaaagtcctctgttgaagcccaagcccctgggatctcagaaggtaactgaatttggagatattcaccttaagtccacgcatggcggcaagatcgactacatcgcaggcgagtggccatgccaggccgtgctggtcccccactgtgcaggctcccctcccttcccttatgtcaccctcagtccatcccacacccatcccttctttcttcaacccctaatcctcttttagcactctgtttctcttgccttggtccctcgttgac

SEQ ID NO: 3299 - DNA, 2016 bp, Cricetulus griseus
aggatccgagtgtctgcatgtatttcttgccggcgagaacatatagcacgcgggacatctggtgccgaaacccgggaactcttcaacatctccggcattgcggagacccctctaacggggtggattcagaactgcagggtggtaaattcggagaggtatgctttattctcccaccttctttttagactttgctttcaatttgtcaccactatgggatggaaaagccttattctatctttattctattttgttcacattggtcttatattatgcccaccgtggctggtgttcagttcgagaccaagcttacccaggatgcctccagaattaatgggctcttcaaaacagagagacctaattaaaaactgtctagagattggaggcttgcgtcccatggtagcagatttgagtcaaaaaacgcttaaagaggtacaggataatatatcagaaaccgaacgagatcagagaatacgagctcgaaaaaggaaggacgttgctcaaggaaaaaggccctccctaggatataaaaaaagggggagagaaaatagggaaaaccggtcatcatcccggttaatttatgagaaattaagactcaaaacctaccctctgccctacaacgaaactaccggccttggagctgagcagctcagactctcagattttagactctaccaaggaagcagagctagaggaggaggcagcacgatattaagaggacagataccaccccgatatatatcggctgccaaaagtgaaagcctaatatcaaggccagtcgcctatcaatccagcgggtgtacttcatcagcacccccattatttggtaactcactcttttttaccattagaggagcgaaggaaattgcagatggctttcccagtctttcaaaatccgggcgcaagagtacatgctcccgtagactattatcagattcaagaattggctcaatcagtccggaagtctggggtcaatgccaattttacaacaatacaagtagaaagactaccaaactatgctatgacacccactgtttgggaaacaacagtaaaggcagtgctccccaatatggctatatggagtggaaggctcttttttatgatgcagcccaggcacaggcaaaggcaatgtcacagcagaaaatgaaaatcagagacaatggacctttgaaatgctcacaggacaggggccacatgcctcaatcaaacttattacatttggggcgtatatgccagatatcagctgccgccattaaagcatggaaggcattgacaaaaagggatgaatcaggtggacatctacaaagatactccaggggccccaggagccattctcagactttgtggccagaatcacagaggccgctacacgatattcggtcatgcagaacaagccatgcctctgattcaacacttagatctttgaacaagcaactcaaggaatgccgagcagccatagccccccggaaaagtaaaggtttacaggactggttaaagatctgcagagaactcggagggccacttactaatgcaggcttggcacagccatctcacaaacccaaaggcgccgaaatatgtctgcctgctttaactgtggaaaaacagggcaccttaaaaaggactgtaaagcccctgaaaggactagagaagtggagttgtgcaggcgctgtggaaaaggttatcatagggccagtggaatgcaaatccgtgggacataaaggtacgcttttaccccctacgagaaccttaactcccaaccaaaaaacggccgcgggcccatgtcccagggccctcagaaatatgggaaccagttccggaaaagcaactcagagaaggaagggactcccgaggacactccggagtggacctgtgtgccgcctccgacttcttattaaatgccccaaatcgaaatctgttcagcctgtctcaatccaatctccggggcctttaccccccccctcccccactaccattgggcttattttgggccgaggttccttgaccttacaaggactcatt

SEQ ID NO: 3300 - DNA, 117 bp, Mesocricetus auratus
aactgcaaaggccaacgttggtgctggcaaaaatccaaaggagtagatctgctgcggtgacttgatctgctgtggtgtgcagatttccgagaggacaaataaactaaacatttatgt

SEQ ID NO: 3301 - DNA, 265 bp, Cricetulus longicaudatus
  misc_feature (30)..(42): n is a, c, g, or t
  misc_feature (44)..(57): n is a, c, g, or t
  misc_feature (87)..(138): n is a, c, g, or t
  misc_feature (202)..(265): n is a, c, g, or t
gaattctaatagggcagcaatgaaaacttnnnnnnnnnnnnnannnnnnnnnnnnnngattttagaggacaagtattgcttgtgcannnnnnnnnnnnnnnnnnnnnnnnnnnnnnnnnnnnnnnnnnnnnnnnnnnncagccagagggtaacttacaggagtcagatctctctttccatcatgtgcattattcacactgtnnnnnnnnnnnnnnnnnnnnnnnnnnnnnnnnnnnnnnnnnnnnnnnnnnnnnnnnnnnnnnnn

SEQ ID NO: 3302 - DNA, 485 bp, Cricetulus longicaudatus
  misc_feature (175)..(485): n is a, c, g, or t
ctgcaggccctacccagaaccccaggcattccctgtgcaggcaccaggtgataatagcagctgcagggcaggcagaatatggggcatgtccctggtagtgggggacactgtgggaaggcttcaaagaaaacagtccaggtgacctgagaaattggaacagtagtgcccagagcannnnnnnnnnnnnnnnnnnnnnnnnnnnnnnnnnnnnnnnnnnnnnnnnnnnnnnnnnnnnnnnnnnnnnnnnnnnnnnnnnnnnnnnnnnnnnnnnnnnnnnnnnnnnnnnnnnnnnnnnnnnnnnnnnnnnnnnnnnnnnnnnnnnnnnnnnnnnnnnnnnnnnnnnnnnnnnnnnnnnnnnnnnnnnnnnnnnnnnnnnnnnnnnnnnnnnnnnnnnnnnnnnnnnnnnnnnnnnnnnnnnnnnnnnnnnnnnnnnnnnnnnnnnnnnnnnnnnnnnnnnnnnnnnnnnnnnnnnnnnnnnnnnnnnn

SEQ ID NO: 3303 - DNA, 3906 bp, Cricetulus longicaudatus
  misc_feature (313)..(327): n is a, c, g, or t
  misc_feature (2097)..(2143): n is a, c, g, or t
  misc_feature (2563)..(2599): n is a, c, g, or t
gaattcattagcttattacttcgttgactgatggacatgaggttgtcaccactttcaggctatcccatgaataatgtcgctgtgaacacttgttacacagtttccttcaggcgtctgttgtctttcccttggatgcatgcctgggagtgccattctggaatgctaactctgtgtttaacttttagaggaactgccaggctattggtgctgtcttcgagtcttccagagccctaagaaaaggttggtcatgttgaacaaatagcattattaccagatctttccaggaaggatctaagcagccctggtaaaatannnnnnnnnnnnnnnggcagcagacaggctacacaaaggctttgatgtcaccagagagcagctggaggaaaactctgaggtgccgtcacacccatgagtcccactccaagcaagggtatcagttttggctactataaagcaaactagacccagccatttaaagcaatgccccagtaaaggcctggcttagggtacacaaggatcagagtttgatccccaggaatgaaaatttttaaaaaataaaaaaatcattaacactcagcattcaggaggctgaggcaggagggtgaacggtgaggccagcctgagctatatattgacatcttgtctccaggtaaaactcaacactgtggtgacgaatcttggcgtgtcaacttgaccacatctggaatcaactaaaacccgagcagctggatgcacctgtgagtggttttcttaattggatcctttgaggtgggaagactcattttaagtcttgaccacacctctggttgctgcccacatggaaggacatggaagaaggaagcttttgctttttgcctgcttgcccccactcttgctggcaagtccatctgccctgctgctgaggtagtctcttgctggcattagaacctacttctcagggttccaccatatcctgaagagcagatgagacaccaggctttttacctttccatcaggagacaaccatgattggactagccagaccgcagcctgtgagccgttctaatcaatcccctacaaatagaacatttttcttccatcagttctgttccgttggagaacccagactaatacaatctcccatgttccagtttcatgtgtcactaccatgtgacaggccagtagggtgagtgggctcagctgggctctgcgccaggtcgcgatcaaacagaggagtctgttgggcaaagctctcatcctgaggttgtgtgagaacccacctctatccgaatatgcatagaccccacttgcagctgtaggactggggtcccctttccagctggatgtcagcgagggtcaccttagcaactgacagacttctcattccttcatcttcaaggcagcaagatcacctcaaatcctcctcctgagtcaaacctccctggcttcctcttctgcacccagccagtgacagctctctgctctgacaggttcagacccacaggatggtctgttctcattacctccacccttcacggatcacacaggaagtgagggagggacaactccagattcccgtccagcacagggacagggaggtgcaccagctgaagacagagtagagttgaatgctgaccaagtcaggacactttgaggagatggctgttcagaactgagccccaaattgcgcctgtgaagaactgattcagatactacatgagtgtgattgacaagcaggaaacagcatgggctaagatgtaaagcagagaaatcttgacacatacacacactcatacagccctgttatcacaataagacatgtattggtcactcccaaaggtccttgtgcccgctgaggtcccctccctcaccctgtctgctcccccagacccaggaaaccataatgtgctttctattcctagagatatattttgggctttctagaagtttctacaaactcagagacactgttgtggattaacaaagtcctctgttaaagcccaagcccctgggatctcagaaggtaactgtatttggagtattatctgaagttaaaatgaagttgttacagtgaggcctgaatccgtgtttattctatttatatttaccttataatttacnnnnnnnnnnnnnnnnnnnnnnnnnnnnnnnnnnnnnnnnnnnnnnncctgcatacatgtgtgtgtgctatgtgcatacccacagaggccagagagggcatcagaccctgaagctggagctagagatggctgtgaactgccatgtgggttctgggaaccaaacagggttctctgaaagagcaactggtgttcttaattcctgagccatccttcagccccctagacctgtttttatatggcctcagggtatagaccaaagcccttttgttttgcatacatatacaaatgttccttgccctcaaggaattatgcttccttaaaaataagtcaaaatacatcaaatacacagacatacacagctaacaaaccaagcagccgagcttggcactccagagcactgtatgatgccaggagattctcacttgtgaacttagggttcatgaagccccagccatggagggaaagannnnnnnnnnnnnnnnnnnnnnnnnnnnnnnnnnnnngggggatgaaggaaaaactctcctggaatttttgattaccattgcatagtcttagaccaatctgagaatcaatactctaatttgtaaacattttaacttaattataatttatatactgtaaaaatcactttaggatccatgagaaggttgaaccctgtctcaaacaatacaaaaacttaaaaaaaaagagttaaaaagctatgtatgctaagatactcaaatcagtattgtatgcgtaagttgataaaccaaaaaacaaaaaccataacaaaggacagaaagatggcctcagctggtaaaggtgtgtgtcacggccttgatcgtgagttccatccccggaacctatctggtggaaggagaggatggactctcttgctctgtcccctactttcacaggcacaggcttcctgcacacagacgcatacacataaatgtaacttaaattgtgttaagtttccactgtcaagtgtaacaacccagcgagtttctgtatagtcatagcctgtagccatcaccattaccaagtgcagaagatttttatcacacaagaaaggagccccatgccatcgcatcaccccgaccctgcagctgctcatctgccgtccatctctgaatttgccttctacagactcttcatataaagagtcaatcaacctccagcctttgcgtctggcgtatttccctgagcgcagtaggtcagagcagacatcctgacagctttgagactacagtgacagtgacatttcacatgcagacagacaaaccagggtggggccgtcctgcagaagcggctttcccaccggatgctctgaagtctgcctttcgtcagatccgagttaatcttctcccaaataaaccatgaggttaaagtccaggtttctgtgcctagagctggctggagtctggggggacagacagcaaccacagagtctgtgatgctgagagattttgtcctggctgcccaggggccaagctggccatcagaagtgttggtatggcctccactgtggagggggcagcagtacccagttggagagctttcaccaaaagttcctttacaaaccaggtgatggaaatttcctgtctctcacccagcacccatgagctgggccaaccaaagaaggccgttctctgggactgtttggtgactgctacccacacaggagctctgtgtcctagtcctgatcccttcaactggctgactggctgactcctacccctctcccccgttctgtcccatgtagataaatcccagagatatttcctggtttttcttgggacaagcaatgaatgctgaccatgaattc

SEQ ID NO: 3304 - DNA, 372 bp, Cricetulus longicaudatus
tttgtaaatacctctgtaacatgtttttcccattttccttttttaaaattaattttcaattaaagtaaaaacaattttattttatataccaatcccagttccctctccctcctgtgctccaattctcccccaccacccccctatcccacccaccatctactcctcagggaggatgaggcctcctatgggggatcatcaaagtctgtcacatcattttggggcaggacctaacacccccccccccatgtgtatctaggctaagagagtatccctccataggaaatgggctcccaaagcctattggcacactagggataaatactggttctaacaccagaggccccgtacactgtccaagccccccccccacca

SEQ ID NO: 3305 - DNA, 390 bp, Cricetulus longicaudatus
aatgccagcactcatgggataggaggttcccaggtttctattattttcctctagattttttatttaaattagaaacaatcttattttacatatcaataccagttccttcttcttctcatcctcccatgcccccccccccacatcaaccccctcatcccattccccttctgctccccagggagggttaagccttccatgggttatcatcaaagtctgtcacatcatttggggcaaggcccaggaccttccccacgtgtctaggctgagggagtatccctctatagggaatgggctcccaaaatctattaatacactagagataaatactgttccactaccagaggccccgtagactgtagactgcccaaccaccttacctgacccccacat

SEQ ID NO: 3306 - DNA, 368 bp, Cricetulus longicaudatus
  misc_feature (1)..(124): n is a, c, g, or t
nnnnnnnnnnnnnnnnnnnnnnnnnnnnnnnnnnnnnnnnnnnnnnnnnnnnnnnnnnnnnnnnnnnnnnnnnnnnnnnnnnnnnnnnnnnnnnnnnnnnnnnnnnnnnnnnnnnnnnnnnnnntcctatgctccccacctaccctccaaccacctgccagctcactccccagagatactgaggccctccacagggtcatcaaagtctgtcacatgatttgggggaggaccaggccctctttcctttatctgggctgaaatagtatccctcatagggaatggactcccaaaggccatttgtgctctagggataaacactggctccaaggttagaggtcccatagaatatcctggcctcctagctaaca

SEQ ID NO: 3307 - DNA, 388 bp, Cricetulus longicaudatus
taggcagcgtcatcaaaacggctaaatggaaatttatttttttctggctattctttctttaaatttttttattttactaatttttatttttaaaacatctttattttacataacaatccctgttccttctccctcccatccctccgctcctctcaccacttccccattccatacccatccattcctcagagagggtgaggcctcctataggcaatcatcaaagtctgtcacatcatttggatagaccaaggccctgaccctgtatctaggctgagcaaggtatccctccatagggaatggattccaaaaaaaccagttcatgcactagagatacatactgcttctactgccatggccccataaattctcaaggccccctgggccccca

SEQ ID NO: 3308 - DNA, 363 bp, Cricetulus longicaudatus
tgctgaagtgcatccccctttcccccctttttttaaaaatttaaattagcaacaatcttgttttacttatcaatcccagttccctctccctcccctgcaccccacagaccccctatcccatcccctttctgctccccatggagggtgagtccttccaagggagatcttcaaagtctgtcatatcatttggagcagggtctaggcccttacccttgtgtctaggctgagagagtatccctctatgtgggatgagctcccaaagtccatttgtatgctagggataaatactgagtcgcctaaagaagaggggatagctattgccttctgacatgaaaggtgagtgactggtgctttgactgtacc

SEQ ID NO: 3309 - DNA, 1071 bp, Cricetulus longicaudatus
gtgagcctcgcctttaacggctgagcatctctccagcccatcttgatttaactttggtaagtgatatctatccagaaaattgtccatttcctttagattttcaaatttggtggagtacaggttttttcaatgtatgacctgatgattctctggattctcaaaaaaatcagaagtcctactatatgcagaagataactgcactgagaaagaaaccagagaaagatcactcattacaatatcaactaacaacataaaatatcttaaggcaacactaaccaaatgagaaagacctgtatagtaagaactttgaatctttaaagaaagaaattaaagaagataccagaaaatggaaagatctcccatgctctgggataggtaggatcatcatagtaaaaatggcaatcttgccaaaggaatctacagattcagtgcaatccccatcaaaatcacaacacagttcttcacagaccttgagaaagaacagtactcagtttcatatggaaaaacaaaaaacccaggatagccaaaacaaccctgtacaataaagaaacttctggaggcatcatcattccttacttccagactccattatagaacccatagtcctgaaaacagcttggtattggcaaaaaaaaaaattgacagatagaccaatggaatctagttgaaaaccctgatatattaacccacaaacctatgaacaccttgttttttgtcaaagaagctaaagttatacaacgtaaaaatgaaatcatcctcaataaattttgttggcataactagattcggacatgtagaagattgaagattgatccatatgtataaccatgcactaaacttaactccaaatggatcaaagacctcaacataaattcagcttcctgaacctcctagaagagaaggtagatggaacaggagactgctttctgaacataaccccagtagcaccaaacattgggatgatctggccctgggtttttttggttggtagattttttgatgatggcttctatttcattaggggttataggtctgtttaaattgcttttctttcttgatttaattttggtt

SEQ ID NO: 3310 - DNA, 1071 bp, Cricetulus longicaudatus; identical to SEQ ID NO: 3309

SEQ ID NO: 3311 - DNA, 2259 bp, Cricetulus longicaudatus
  misc_feature (385)..(406): n is a, c, g, or t
tcggaaccggacgtgtccgcgaagatggcgggccggagtatgcaagctgcgaggtgccctaccgatgaattgtccttaagcaactgtgcagttgtgagcgagaaggattaccagtctggacagcatgtgattgtgaggacctcccccaatcacaaatacatatttacactgaggacccatccgtcggtggttcccggaagcgttgcattcagcttacctcagcgaaaatgggctggactttctattgggcaggaaatagaagtcgccttgtattcatttgacaaagccaagcaatgcatcggcaccatgaccatcgagattgactttctgcagaaaaaaaacatcgactccaacccatatgataccgacaagatggcagcagaannnnnnnnnnnnnnnnnnnnnnaggccttctcagtgggacagcagcttgtctttagctttaatgataagctcttcggattactggtgaaggacattgaagccatggaccctagcatcctgaagggagagcctgcatcaggcaaaaggcagaagattgaagtcggactggttgttggaaatagtcaagttgcatttgaaaaagcagaaaattcatcgctcaatcttattggcaaagctaaaaccaaggaaaatcgccagtcaatcatcaatcctgactggaactttgagaaaatgggaatcggcggtctggataaggagttttcagatattttccgacgagcatttgcctctcgggtgttccctccggagattgtggagcagatgggttgtaaacatgttaaaggcatcctgttgtacggcccccctggttgtggtaagactctcttggctcgacagattggcaagatgctgaatgcgagagaacccaaggtggtcaatgggccagaaatccttaacaaatatgtgggagaatcggaggcgaacattcgtaaactttttgctgatgccgaagaggagcaaaggaggcttggtgctaacagtggcttacacatcatcatctttgatgaaatcgatgccatctgcaagcagagagggagcatggctggcagcaccggagttcacgacaccgttgtcaaccagctgctgtccaagattgatggcgttgagcagctgaacaacatcctggttattgggatgaccaatagaccagatttgatagatgaggctctccttcgacctggaagactggaagttaaaatggagataggcttgccagatgagaagggtcgactgcagatccttcatatccacacagcaaggatgagaggacatcagttactgtctgcagatgtggacattaaggaactggccgtggagactaagaatttcagtggcgctgagctggaaggtctggtgcgagcagcacagtcgacggccatgaaccgacacataaaggccagtacgaaagtggaagtagacatggagaaagcagagagtctgcaggtgacaagaggagacttcctggcttctttggagaatgacatcaaaccagcttttggcacaaaccaagaggattatgccagttacattatgaatggaatcatcaagtggggtgaccctgtgacccgtgtcctggatgacggagagctgctggtccagcagactaaaaacagtgaccgtacgcctctggttagcgtccttctggaagggccccctcacagcgggaagactgccctagctgcaaagatcgcagaggaatccaactttcccttcatcaagatctgctcccccgataagatgattggcttttctgagacagccaagtgtcaggccatgaagaagatctttgatgatgcttacaaatctcaactcagttgtgtggtggtggatgacatcgaaaggctacttgattatgtccccattggcccccggttctccaacctggtgttgcaagctcttcttgtgttactaaagaaggcacctcctcagggccgcaagcttctcatcatcgggaccaccagccgcaaagatgtccttcaggaaatggagatgctgaatgccttcagcaccaccatccacgtgcccaacattgccacaggagagcagctgctggaagctttggagcttctgggcaacttcaaagataaggaacgcaccacaattgctcagcaagtcaaagggaagaaggtctggataggaatcaagaagttactaatgttgattgagatgtccctgcagatggaccctgagtatcgggtgaggaaattcttggccctcttgagagaagaaggcgctagccccctggactttgattga

SEQ ID NO: 3312 - DNA, 2711 bp, Mesocricetus auratus
  misc_feature (208)..(234): n is a, c, g, or t
  misc_feature (1821)..(1850): n is a, c, g, or t
atgtgaagcaggggggtagggaatcttaggagccgtcaggacagggaggtcgggcggaggttcctgcagaggctgactcctctgcagtggcagggtcttcccagcatgaccagtggcgggagaggagactgacccgcttgttcccatcagctcctgaaggtgacactgagccctgggtggcccctcaccaccaaaacaggtgcctgtnnnnnnnnnnnnnnnnnnnnnnnnnnngccgccctttagttccaaggtcagaggtcctgagagccagagagccatgggcaaatcatcagaggcatggtgcattgtcttgttttctgttttcgcatcattttctgctgagcctaccatgcatggggagatcctgtcccctaactatcctcaggcataccccaatgagatggagaaaacgtgggacatagaagtcccagaagggtttggggttcgcctctacttcacccatctggacatggagctgtcagagaactgcgaatatgactcagtgcagataatctcaggaggcgtcgaggaagggagactctgtgggcagaggaccagcaagaatgccaactcccccattgtggaagagtttcaaatcccatacaataaactccaggtcatctttaggtcagacttctccaacgaagagcggtttactggctttgctgcatattacgctgccattgatgtaaatgaatgcacagattttacagatgtcccttgcagccacttctgcaacaatttcattggtggttatttctgttcctgccccccagaatacttcctccatgatgatatgaggaattgcggagtcaattgcagtgggaatgtattcactgccctgattggggagatttcaagccccaattaccccaatccataccccgagaactcaaggtgtgagtaccagattttgttggaggaggggttccaagtggtggtgaccatccagagagaagattttgatgtggaaccagctgattcgcaggggaactgccaggacagcttactgtttgctgcaaaaaatcgacaatttggtcctttctgtggcaatggattccctgggccactaactatcgaaacccacagtaacactcttgatattgtctttcaaaccgacctaacagagcaaaaaaagggctggaagcttcgttaccatggagacccaatcccttgtcccaaggaaatcaccgccaactctgtttgggcgcctgaaaaggcaaaatacgtgtttaaagatgtggtgaagatatcctgtgtggacgggtttgaggctgtagagggaaatgttggctcaacattcttctattctacttgtcaaagcaatggacagtggagcaattccaggctacggtgtcagcctgtggactgtggcattccggaacccattcagaacggtaaagttgatgatccagaaaatactctgtttggctctgtcattcactactcgtgtgaggagccgtattactacatggaacatgcagaacacggcggggagtatcgctgtgctgctaatgggagctgggtgaatgacgagctgggcatagagctcccaaaatgtgttccagtctgtggggtacccactgagccctttagaatacagcagaggatattcggaggatttcctgcgaagatccagagttttccttggcaagtcttctttgagttcccgagggccggtggggctcttattggcgagcactgggtgctgacggcagctcacgttgtggaagggaactccgacccatcgatgtatgtggggtccacgtctgtgagaatggaaaacctggcaaacgttcagaagctcaccaccgaccnnnnnnnnnnnnnnnnnnnnnnnnnnnnnngggatgacctaagcacacggacaaattttgacaatgacatcgcactggtgcggctgaaagaccctgtgaaaatggggcccactgtttcccccatctgcctgccaggcacctcctcagagtacgaaccctcagagggtgatctgggactgatctcagggtggggccgaacagagaggagaaatattgttatccagctcagaggggcaaagttacccgtgacctctttagagaagtgccgacaggtgaaagaggagaaccccaaagcgagggcggatgactacgttttcaccagcaacatgatctgtgctggagagaagggcgttgacagctgtcagggggacagcggtggggctttcgctttgccggtccccaatgtaagggaccccaaattctacgtggcaggcctagtgtcctgggggaaaaagtgtgggacctatggaatctacacgaaggtaaagaactacaaggactggatactgcaaactatgcaggagaatagtgtccccagtcaggactaacccattcataccgccagcccctccccccaggacacagcaacgcattgctctcagaccctgtggtagtcccattatctcgcagtgatggagagaagatgcaggagtgccgttaacactgaacttgattgtcaagacacctgaatggatggagggtctgatcacaggcctgtgttgattactcaggtgtgaattccctcctgttattggtaacaacatggcagagactcctctgtcttgcaccattctgcagggtatcttaacctccgtttctttcacctgcttgattccatttataatccttggagtcctttatttacttacaataaagcatatttctaacctg

SEQ ID NO: 3313 - DNA, 1004 bp, Cricetulus longicaudatus
  misc_feature (794)..(832): n is a, c, g, or t
gagatggctatcgaggtctctgtgaactgagtcaggcagatgcttcctcccaactgtaccaccatcctcaggaggccgtgaggcagggtgcgagccagctgtcctgtggagttgactccctgtgcacaggctgctgagagccaggtaaacatgcctgggttccatgctgcccatggttggatgcactcactcctcttacctattacaggctccacctgctgtcctgagtgtgaggactaagtgagcacgcatgcaaggaggggcctcggcaacccagctagggtgctgtacacatcccttgataccaccttattcttttcttaactttttctccatccctggtgggaacgaagataggaagaaataggtgcccactggtgtcctggtgtagtggccagatggctcatgcaggaccatcccctcagggttcttactggccatgcgaggcatctcagaactcctgccttttgttcccctgagcatcaaatgtcctccagaagacttggagcatttgctgagggccaaacacagacagatggtacccggggctggtctagaaagaacagtacagcatctgggacaatacagtacttgttttgtcacttaaacacagcctccctgagctgcctggtggagtcctgatacttcggccacatcagaatgccagctagactaaagagacagtagaggaagggcacagtgagggttggccatgaggaggtggttgagaacaccgactgaaggaatactcaagaggagagccctgacaaagcaggaggaatgtccagcccagnnnnnnnnnnnnnnnnnnnnnnnnnnnnnnnnnnnnnnncctgagtccttaagagcagacagtaagtgagatcagggtgagatcagaggaggtctgagaccctcagttagaaagatccccaagtccttcccccatacacacacctgcaagctgctaaaaacccactggagttggtgcctgggacttaatgaggtgcctgctgacatagcat

SEQ ID NO: 3314 - DNA, 350 bp, Cricetulus longicaudatus
cggatcttctgtcctctccaaaccaagaggttaacatcttgaaggcgtggcgttgatgcgcatgcctttaattccagcactcaggaggcaaaggcagaggatttctgagttcgagaccagcctggtctacaagagctagttccagggcagcctccaaagccgcagagaaaaaagagggtacatcttgttgcacaggagggtctgtggcctcaaggtaggcacccctaccccaacgtgctaccctgctttcccctccattccaggcaatacgcattgtacttgtacttgtatctctggacttgaaactatccaccagtttcttgaaagcaggggtgaatctcaatcctagc

SEQ ID NO: 3315 - DNA, 1306 bp, Cricetulus longicaudatus
ctagcgctcattaaattgagaggtcaggtagctgtgtgtgtgggctcatgcactatgtgacttccgcagcagctagactgcagggaaggaaagaaagcaagaaggcggggtttaaggcaagttccttgttcccttaaaggaaaaggaagcccactgtcttggccagtgacaccaacccctcacacattagagggtgtgattttcttttctgtaataacaatgacacaaataaaaatatttatatagaaagcatccatatatagattccgtaaacactgtaggtgaacaagtgcaacttcaaaagtaaatacaaagtaagaggcaaaacctacaagcattttgcctttaggagaaaatgtaattttccagaaatgatcccatccagacacaaaagtggctctgtctcctggggaggcggcagcatcctgccgtgctccctgcacccacctcagtaactgcagacggcaacaagtggcagcaagggtgccactaaaacaaactgagtcatacactgaagctgaagcctgtgctctgagcattccttctccctaagacacaccctctgaccctgagaggatgtcccttctgtgaagctcctacagccacctctccagccctggaccctctcctgaggtgctgagtaaagtaaccaccaccactgtacccacccagtctcttccatcttcctaattttgccattacctttttctgccatggagagccatgtaatttttgacgttctaatactgtgtccctgtctccaccgcctcactggcaggtgtttctcatcagctacacaggctacaaagactttacactgaacagtcaagcctcaggttcaagttatcttctatcttgctaagatgctgagactttgagtaaagtcacttttctcatgagactgtctctgttcacacagcccgacttacttatcaggcacttacaaaagatacatcagctccaaatccctctttattagagaagtcttctccctcatacagccagtaaccaactcgaaagacgactgtacccagcccttgatcctgtaaggagcactaaagaacatcccaactctgggaacagcaggcaagactgaggtggggcaccagactacaagactgaaacgtagggaggggttagggctctccacactgcctgtgttgtgtccaggccttctttagtcctcaccacccaatgccactgatgagcctttagactgcctcctctcaatgccatgggctggagcacagcacgtgacttatttgggtatgggtaagactagttcatagagcagtgacactcaacg

SEQ ID NO: 3316 - DNA, 271 bp, Cricetulus longicaudatus
  misc_feature (45)..(64): n is a, c, g, or t
aggccagcctggtctccagagcgagtgccaggataggctccaaannnnnnnnnnnnnnnnnnnnatcaaaaaaaacaaacaaccccaaaaagcctagtgtctaacatccctctcagggaaattgctcctctgttggaattccatcctctcttcagtcagacaatggtcccaagttcatctctcagatcccccaaatgctatctacagctctcaaaaccccttggcattttcatatcgcatatcacccccagtcctcagggaaggtagaatg

SEQ ID NO: 3317 - DNA, 770 bp, Cricetulus longicaudatus
  misc_feature (542)..(543): n is a, c, g, or t
  misc_feature (736)..(753): n is a, c, g, or t
agcactacctttgctgacagctctgacaggacactggaacgttgaaaggggaagtctatcagcttcttcaatggccaatccatgacttccctgttcagagctgctgtgtgggatccttggtctctgctcatgtgtgacctgactggacctggtgaccacatacatgcctatcagctgactggctacatggccacacatgtgcgaattctcagcagatgcacctggaagactaagttgtggcctttggtaacctgaatcctctcaccttggagggggaaactagctgcctgccctgcacagagaaggattcagatactaagctaagacccaccatccccagactattgatgccttccctggactcagaggtgacagtatgcatctaagggctgtcacggaggaaaaggcagaggctaggattcccagccctgttcccaccactggaagaagcagtaggccccagcctacccctcctctgatgtttgctgttttgttgttgttgttaattcctcaccaggtggaaccagcactgtggggcttanntaagctcagccagctgttgctgaacacgggaatgcagtgcgtggcagagtcagcctggagcagtggaatggggagggctagggccacggaatcccaggcctagatggagcgtggtctgagtttggggcatagaaagctggggcttcaaaggggactctgtgggaaggtccaaggatgttcaactgctgctttnnnnnnnnnnnnnnnnnncatgcattgaaagagct

SEQ ID NO: 3318 - DNA, 478 bp, Mesocricetus auratus
  misc_feature (220)..(266): n is a, c, g, or t
gatggacaaagtggagctgtcagatctgtccttcaacaaggactggtctttctatctcttggctcacagggagtttgtacccactgcgactgataaatacgcctgcagagtttcacacataactctgaaggagcccaaggtggtcacctgggaacgagacatgtaatcaagcgtcatggagatgcttcatttggatcagaagtatttctcagcttttaannnnnnnnnnnnnnnnnnnnnnnnnnnnnnnnnnnnnnnnnnnnnnngaattaattcggactaggatgagagagaatgagagagaatgagagagaatgagagagagtgagagagttccttgtgcctgagattttagtcacagttcactctgttcctttgtaagtgcctgagttccttgctgtcaccatgctccctatagctagaaagatcgattgtcttttgtacatcctaataaactcttgttaaaaccacgtagtcc

SEQ ID NO: 3319 - DNA, 787 bp, Cricetulus longicaudatus
  misc_feature (76)..(90): n is a, c, g, or t
gggggcccgcacagccaagaacatgaccgagcgccgcgtgcccttctcgctgctgcggagccccagctgggaaccnnnnnnnnnnnnnnncccggcccacagccgcctcttcgaccaagccttcggggtgccccgcttgccggatgagtggtcgcagtggttcagcgccgctggttggcccggctacgtgcgcccactgcccgccgcgaccgccgagggacccgcggcggtggccctggccgcgcccctggccgcgcccgccttccaccgtgcgctcaaccggcagctgagcagcggagtctcggagatccggcagacggccgatcgctggcgcgtgtccctggacgtcaaccacttcgctccggaggagctcacggtcaagaccaaggaaggcgtggtggagatcaccggcaagcacgaagaaaggcaggacgaacatggctacatctcccggtgctttacccggaaatacacgctgcctcccggtgtggaccccaccctggtgtcctcttccctgtcccctgagggcacacttaccgtggaggctccgctgcccaaaacagccacacaatccgcggagatcaccattccggtcactttcgaggcccgcgcccaaattgggggccaggaagctgggaagtcggaacagtctggagccaagtagaagccatcagcctgctgcatccccaacagccatcactcgccacccctctctatcagtctttatgctcttttgatacatgtactttctgtttttctcaaataaaagttggaagctactgccccc

SEQ ID NO: 3320 - DNA, 2106 bp, Mesocricetus auratus
cctataaggtaagaagcagtcctcccccccttctgtaatcgctgtgccgcctcagcttccccctcctctggccctaaccactcgctgcgcagattctcaactggagaatgctgatattgggatcccttcctagcttggagccagccaagccagtcatcgaccttgggagcaatcctgagctgcaggacacaatgtgatctggctgttgttgagtctagctcccacaaaatcctaagagtgcctgaagctctcctgcagcatgtgtggcatttgggccctcttcggcagcgatgactgcctttccgtgcagtgcctgagtgctatgaagattgcacacagagggccagatgcatttcgctttgagaatgtcaatggatacaccaactgctgctttggatttcaccgcttggccgtggttgaccccctctttggaatgcagccaataagagtgaagaaatacccttatctgtggctctgttacaacggggaaatctacaaccacaaggcgctacaacaacgctttgagttcgagtatcagaccaatgtggatggtgagattatactgcatctctatgacaaaggaggtatcgagcaaaccatttgtatgttggatggggtgtttgcattcatcttgctggacactgccaacaagaaagtgtttctgggcagagatacctatggagtcaggcccttgtttaaagccatgacagaagatggatttctggctgtatgttcagaagctaaagggctcgtttccttgaagcactccacaactcccttcttaaaagtggagcccttccttcctggacactatgaagttttggatttaaaaccaaacggcaaagttgcatctgtggaaatggtgaagtaccatcattgtcgggatgaacccctgcatgccctctacgacagcgtggagaaactcttcccaggcttcgagttagaaacggtgaagagcaaccttcgtatcctgtttgacaatgctgtcaggaaacgcttgatgacggacaggaggatcgtctgccttttatcagggggcctggactcgagcttggttgcctcctccttgctgaagcaactcaaggaggctcaagtacagtatccactccagacatttgcgattggcatggaagacagccccgatctactggctgctagaaaggtggcaaattatattggaagcgagcatcatgaagtcctttttaattctgaagaaggcattcaggccctggatgaagtcatattttccttggaaacttatgacattacgacagttcgagcatctgtaggtatgtatctaatttccaagtatattcggaagaacacagacagcgtggtgatcttctcaggagaagggtcagatgaacttacacagggctacatatatttccacaaggccccttctcccgagaaggcagaggaggagagtgagaggctgctgaaggaactctacctgtttgatgttctccgcgccgaccgcactactgctgcccacggtcttgagctgagagtcccgtttctggatcatcggttttcctcctattatttgtccctgccaccagaaatgagagttccaaaaaatgggatagaaaaacatctcctgcgagagacgtttgaggactccaacctgctccccaaagagatcctctggagaccaaaagaagccttcagtgatgggatcacctcagttaagaactcctggttcaagattctacaggattatgttgaacaccaggttgacgacgcaatgatggcaacggcagcccagaagtttcccttcaatactcccaaaactaaagaaggctatttctaccgccagatctttgaacaccattacccaggccgggctgattggctgacccattattggatgcccaagtggatcaacgccaccgacccttctgcccgtactctcacccattataagtcagctgccaaagcttagatgctctctaaactctagtgtaaaagttaagtgtttcttctcactctgaaggagtagacatcgagacaaacacagaagtaatgcaaatcaaccatcaaccactcaggctaacataggcatggaaagaaataaaaatattacatctaaaatgaaaaaaaaaa

SEQ ID NO: 3321 - DNA, 747 bp, Cricetulus longicaudatus
gtacctggccccaggagccacccagtagcggctctcccgcagaggagcgcgggagaacgcccaccctcgccgccaggggcggggcctgggcggtccgaggggcggtccgagggcgggggcctcggcagcggcgtctgtgacccgttgccgaggcggcggcgaagctagttgggtttacctcaccgctttctcgtgcctcggcgcctcctctgcgggcttcctcctcacaccgctcttcgctcccgccagccgaccgattccgtcatggcgacccgcagccccagcgtcgtggtgagccccgggactcttcagcagagcggacagccaggcctaggcggctggctgctcagtggcgccgctcggggcccgttggcgggccttgggtgttggggcccgcggaagtccggggcgggggcggtcaccgcttcccggaatccggctgcgcgtccccagagggcggcgggcagcaggatggaatggcggggttcagggctgggtctcccctgggagccccgagacggttgactgcttgtgaggcaggcaggtggaaatggcgttgccttgacatgtgcggccaccgggagcccggctgggagaggcggagggcgacttggagaaagatacctcacggagaggggagaggggagagggcgggggagctttctcggggagacccttgctcttgaagttcggggcttggcggccagggagagcttcggggggcgcctctggaaggagctccagtac

SEQ ID NO: 3322 - DNA, 275 bp, Cricetulus longicaudatus
  misc_feature (172)..(192): n is a, c, g, or t
tagcttatgctctgatttgaaatcagctgtctttctttttcagattagtgatgatgaaccaggctatgacctagatttattttgtattcctaatcactatgtcgaggatttggaaaaggtgtttattcctcatggagtgattatggacaggtaagtaagatcttaattgaannnnnnnnnnnnnnnnnnnnncggttaagagcactgactgctcttccagaggttctgagttcaattcccagcaaccacatgatggctcacaaccatccctaatg

SEQ ID NO: 3323 - DNA, 221 bp, Cricetulus longicaudatus
ctaacttcttacatctaataattttttgtgtgtattcaagaatatgcatgtaaatgatgtttttttttaactagaatgatcagtcaacaggggacataaaagttattggtggggatgatctctcaactttaactggaaaggtaagtaccttaaagggaaagcaaagaatcatttttataccaagaatcaattagtaactgtgctttcaatcactcacttgg

SEQ ID NO: 3324 - DNA, 285 bp, Cricetulus longicaudatus
gcattcaggattaaaagcttataaaaaatgaacatatgggtcaaatattctttctaatagtatacttgtttcaagcaggatacagtataatcaaatacaagcaagaatttcccagagttatatgattttactgataattggaaatatatctcacttcattttctgattttcatttctcttttttcttctagaatgtcttgattgttgaggtaagtgctgcatttatttctaaaatactgttaaattttctcagcttagtgtatactataggtaagccagggaaaa

SEQ ID NO: 3325 - DNA, 193 bp, Cricetulus longicaudatus
acttaccacttaccattaaatacctcttttctttttaaaaggacataattgacactggtaaaacaatgcaaactctgctttccctggtcaagcggtacaacctcaaaatggttaaggttgcaaggtatgtatgccattttaaagtagaatgtttttttttcattgggagcaataagcaattgcttctttgtaa

SEQ ID NO: 3326 - DNA, 459 bp, Cricetulus longicaudatus
ataatgttctattgtctttcccatatgtcacatgtaatattttgtaattaacagcttgctggtgaaaaggacctctcgaagtgttggatataggccagactgtaagtagatgccctttggtgatcattttatctatcatagctgaaaggtgactaaaattgcttagagttattttagagaacgtttgtaaagaaggcacatttgcaaatattagatttgaaagtactgttttctctgtctaaataataaactgtgattctttacagttgttggatttgaaattccagacaagtttgttgttggatatgcccttgactataatgagtacttcagggatttgaatgtaagtaatgtttctttttttctcgctctcatttttcaaaaaacccacataaaaatttaggaaaggaaagaattgttttctccttctagcacctcgtcatttgaccagactgatgg

SEQ ID NO: 3327 - DNA, 3554 bp, Cricetulus griseus
  misc_feature (879)..(956): n is a, c, g, or t
  misc_feature (1008)..(1046): n is a, c, g, or t
  misc_feature (1318)..(1359): n is a, c, g, or t
  misc_feature (2726)..(2880): n is a, c, g, or t
  misc_feature (3171)..(3215): n is a, c, g, or t
  misc_feature (3530)..(3547): n is a, c, g, or t
gaattccggaaagaagaatgggggagggggactggtccgcccttcctggctgtcgccaccttgcaggttttgacacagtgacagagggagatctgagaaaggagacagactggagggagctacttgttctcctggaaacccgggagccacttggtgcagacagcccttcctactttccctgcggctcttttgtgtgactttgagaggggctcccggcgactgattgctactgagcgcctgctgaggcagcagctgggctccggaaggaggacccgagcagagtaagtggccagagcgagccagcacagacctcaactgatggaactggcatgcagtttttgaagtcagcagaaacagaaatcaaattactatcattttatgctgctggaacgtcaaggaaggggattccacaccagctcagtcaccaccgtgcgacaggcgagtcacaggatagcggaccctggcgacaatgaatgtaagttcttaggctgctgtcttttactgctgtgggattttctttctggttgaagtcacgcttggccacgatgccgtcattgccatgagaatttctggagtggaaagttctctgctgctcttcgggatgcgtttttctttcactaaccaagccacagacatgagctgcaattcctgatcgccgctgcggcgattctgcctgagactaagaagcatacccagttactatgggattagcactgcatgggtttttaacggacttccttagcacagagggcacacagccttcctacggatttcggatgctgttttaactttgtgatggctgaactcgtgaaatccgcacatttatcccgagaattggctgaaacagattcccagcggttccaaaacttttcttccttnnnnnnnnnnnnnnnnnnnnnnnnnnnnnnnnnnnnnnnnnnnnnnnnnnnnnnnnnnnnnnnnnnnnnnnnnnnnnncctcggactcttcctagcactgtgaagggaggcagtatcaagaggcgtcacnnnnnnnnnnnnnnnnnnnnnnnnnnnnnnnnnnnnnnnagaggagccacacatggtctccgcttcaacacgtcctagcaccgggacatgaagatgaatggtgagccaaggctatgacttgctagtctttccacacttgatccgctacaacttccggcttagacatggaaattctttgtgaagacaatacttctctgagctcaattccaaactctttaatgcaagtagatggtgactccgggctctaccgtaacgacttcaactccagagatgctaacagctctgatgcatcaaactggacaattgatggnnnnnnnnnnnnnnnnnnnnnnnnnnnnnnnnnnnnnnnnnngacatgcctctccattcttcatctccaggaaaaaaactggtctgctttattgacagctgtagtgattatcctaaccattgctggaaacatactggtcatcatggcagtgtccctagagaaaaagctacagaatgccaccaactatttcctgatgtcacttgccatagctgatatgctgctgggcttccttgtcatgcctgtgtccatgttaaccatcttgtatgggtaccggtggcctttgcccagcaagctctgcgcagtctggatctacctggatgtcctcttctctaccgcctccatcatgcacctctgcgccatctcactggaccgctatgtcgctatccagaaccccatccaccatagccgcttcaactccagaaccaaggccttcctgaaaatcattgctgtatggaccatatctgtaggtgtttccatgccgatcccagtctttggattgcaggatgactccaaggtctttaagcaggggagctgcctgctggccgacgacaattttgtcctcataggttcttttgtggcatttttcatccccttaaccatcatggtgatcacctacttcctcactatcaagtcccttcagaaagaagccaccctgtgtgtgagtgacctcagcactcgggccaaattagcctccttcagcttcctgcctcagagttctctgtcatccgaaaagctcttccagcggtccatccacagggagccaggctcctacaccggcagaaggacgatgcagtccatcagcaatgagcaaaaagcgtgcaaggtgctgggcatcgtgttctttctgtttgtcgtaatgtggtgcccattcttcatcaccaacatcatggccgtcatctgcaaagagtcctgcaacgaacatgtcatcggagccctgctcaatgtgtttgtctggattggttacctctcctcggctgtcaatccactggtctatacactgttcaataagacttacaggtctgccttctcacggtacattcagtgtcagtacaaggaaaacagaaagccactgcagttaattttagtgaacactataccggcattggcctacaagtctagtcagctccaggcgggacaaaataaggactctaaggaagacgctgagccgacagataatgactgctctatggttacactaggaaaacaacaatcagaagagacttgtacagacaatatcaacaccgtgaatgaaaaggttagctgtgtgtgacggactggttgctgtgacgctggcacttgaacaagtttttagccttgtgtgtgggggtgggaataaggaggctgggacaaattagactactccagtgactcaacagaatctatatgcctcattgtattctgtgtatgannnnnnnnnnnnnnnnnnnnnnnnnnnnnnnnnnnnnnnnnnnnnnnnnnnnnnnnnnnnnnnnnnnnnnnnnnnnnnnnnnnnnnnnnnnnnnnnnnnnnnnnnnnnnnnnnnnnnnnnnnnnnnnnnnnnnnnnnnnnnnnnnnnnnnnnnnngcataaaatcaatctaattaatttctattattcaaattgaaaccttgctgccatgttgttgatgggtggcgcaggagtgagttggtgaactattattgtatataaaaatagctagaaatactaaaataatgaatagcctcttttaaaaaagtgtttaaaattcaccatgacacatattttgaaaataaaaaaatagtattatgaaacttgtattgctaatataaattaattgaaatacttgacaatattttttcattcttgccttttcatagatgccattttgaatgttcnnnnnnnnnnnnnnnnnnnnnnnnnnnnnnnnnnnnnnnnnnnnntgggaagggtttaaatgttactcaataacgtgctgcttctcttctacttcttggcttaacctgaatttgcaatgtgatcttgtttcgtatattttcctctctgtaaactatcaaaggataattttgcttttcgaaatacagttctagaacgcgcttcaaagaaacagcaccctggaggtatttggtcacgcactgtgggaccactgcattgtgcatgcgccctttgagctgtgaccagtacattgatttgactgccacagctaaacaataaactcaggtttctcgctgttagcagtagcttcttaggctgtttcnnnnnnnnnnnnnnnnnnggaattc

SEQ ID NO: 3328 - DNA, 1369 bp, Cricetus cricetus
gcatgcaactggtgcctatgctgtggttggaagatgcccccataactgctagtcgtgcggggccgggaagcagggtcagtctgcgcgccacgttgtctacgtggctgcaccatactcatggcccgcctgtcccgctagagagcaccacgtgcagaatgcaaagccgggaataaactttgctagtctcccaagcctgggtcgcgccattggggaagtgtgcaggggtgagggggacagcgagcaggtgcgtgcaggagtcggagtcccgcccgctcccatagggccctgcggcgtgctggcaggccggcctcggtggcttgctgccgtgcgcgtgcctgccgcagggcgtgtcggcacgaggccgggcgggacggggcgcgcgcgcgggggcgagcggaggcccccccgggggcgggcacgcgcgctgcggccccccgccgcactgacgcgcgtggcccgcgcccctcccgcccctcggcgcccggcccggggttggccgccgcggatcccccgcccctcccccgcgcctcccggccggaaccgatcgcggctggtttgagctggtgcgtctccatgacgacgtgctcagcgtataagtagtgcgtcgcgccgtcgggctttgtcagtccctgcagcggccgccgccgtccgcccgccctcagccagctgctcggtgccacctcgggccagcgtctgcggcgggctcgacgaggcggctgacggggcggcggcggacggcccggagctcctcggggttcttcggcggcgactagttctcatggggctggccgagattgcgtccgtgcgctgtgaggtgagcggggcgcgggagggatgtgcggccacgtgtcgcgaggccccggctcgtgccgcccgcaagggacacgtgccccggggccgtgaccttgcgagcccgtgccgcccggaaggaaggcagcggttcctgacccgtggctgcaaacccttgcgacgcccacgggagctctcttggcgtcagcccggctctgcgctccaccggcgaggatggaggcaacccgcggcaggtgcaccccagcgcggccgccggagcagtcctccctgcagctccctgccgctttctttggtttcgctacgtgtacagagcagagccgacgtagaagttgctagacctaaatttagtccgggagtcactgctgatggatgcccaccggctgtgacttggaattagcactcctgggatgacttagtggtttaggagaagcccggctgtccggcgtgcatgtttagaagcccggctcggaatcctcagtaactgtaaaagtgagggggccagagcctgtcaaggatgtctgggagaggacaaagaatgcagtggctcattttattcaaa

SEQ ID NO: 3329 - DNA, 1161 bp, Mesocricetus auratus
  misc_feature (319)..(336): n is a, c, g, or t
ccaggaagaaggaacatcctgagacgtctgaattaaacctcacaatcagcctactttgagcacaccaggacaagggatcatggacatcgaagcctatttcgaaaggatcggttataacaacccagtctatacattggatttggccacactaaccgaagttcttcagcaccagatgcgaacaattccttttgagaatctcaacatgcactgtggagaagccatggacctgggcttagaggctacttttgatcaaattgtgcggaagaagcggggcgggtggtgtctccaggttaatcatctcctgtactgggctctgacnnnnnnnnnnnnnnnnnncaccatgttgggaggatatgtttacatagtgcctgtcagtaagtacagcagtgagatgattcaccttctagtgcaggtgaccatcagtgacaggaactacattgttgatgctgcctatggaggctcctaccagatgtgggagcctgtagaattagcatcagggaaggaccagcctcaggtgcctgccatcttccgtttgacagaagagaacgaaacctggtacttggaccaaatcagaagagagcagcatgttccaaaccaagaatttgtcaactcggacctccttgagaagaacacatatcgaaagatctattcttttactctccaaccccgcactatcgaggattttgaatatgcgaatacctaccttcagatatctccagtatctgtgtttgtaaacacatcattttgttccttgcaaacctcagaaggggtttgctgcttaataggctccactattgcgaggaggaaattcagttataaggaaaatgtagatctggtggagtttaagaatgtgagtgaggaagaaatagaagatgtgctgaaaactgcgtttggtgtttctttagagagaaagtttgtgcccaaaaatggtaacctatcttttagtatttagggtaaagcgcaaaactgcttttcattattatttcatgttcttaaacatttgagacatatgcaaatatattcataggagtccttaaagagtcatcacccagctcgatgttgatcagctgatgacttgtatcttctacttcctacattttatgaaaaagcaattgtagctgtcctgttatttcaccaataaaaatataatcagttataatt

SEQ ID NO: 3330 - DNA, 709 bp, Mesocricetus auratus
  misc_feature (615)..(634): n is a, c, g, or t
  misc_feature (683)..(709): n is a, c, g, or t
tgcatgcagaattgggctgtggttcccgaagcttctggctgtcaaaggcatttctgatattgctgacactgatcactgaaagggaactcgagaagcgatgcacatctcaaagctgccagctgctctcctcatcttctctgtggcactaaaccacttgaaggctacacctgtcagaagtggcaccaaccatcagatggacaaacggaagtgcaacacggccacgtgtgccacacagcgcctggccaactttttggtccattcgaacaacaaccttggtcccgtcctctcaccaaccaacgtgggatcgaacacgtacggcaagaggagtgctgcggagattccagacggggattctttggatctcttcctcctttagagtcggcatacttcttcatctcttgttattttgtgtgtaaatactctggcactttcacgaattatttaacagtgcctttttcatttctacttgtgagtgcactgcaacgtgttccatgctttctggctctgtgtgtgtaaaatcctcatcctaagaatggtttttaaactgagggctgaatcaagatcaggctgaagaccatgtctcttgacacaacatgttcttgaaatactgaaaannnnnnnnnnnnnnnnnnnncttataactttgtgattcaagtctaacaataaaggagactcctggagcnnnnnnnnnnnnnnnnnnnnnnnnnnn

SEQ ID NO: 3331 - DNA, 336 bp, Mesocricetus sp.
ctgcagctgacgccatgagtagcgattctgagatggaagtgttcggcatagccgctcctttcctccgcaagtcggaaaaggagcggatcgaagcccagaaccacccctttgacgccaaaacctactgctttgtggttgactcaaaggaagaatatgccaaggggaaaattaagagtagccaggatgggaaggtcaccgtggagaccgaagacaacagggtaaggcgtttgctctttttcttcctcagcactgaccactcctcacatggctttgtggaggcatctgaccctctccaccatgccagaccaagctggcctggagtcagcatctgaacag

SEQ ID NO: 3332 - DNA, 3627 bp, Mesocricetus sp.
  misc_feature (1122)..(1152): n is a, c, g, or t
  misc_feature (1235)..(1325): n is a, c, g, or t
  misc_feature (1503)..(1524): n is a, c, g, or t
  misc_feature (1576)..(1603): n is a, c, g, or t
  misc_feature (1856)..(1870): n is a, c, g, or t
  misc_feature (2084)..(2101): n is a, c, g, or t
  misc_feature (2120)..(2211): n is a, c, g, or t
  misc_feature (2557)..(2597): n is a, c, g, or t
  misc_feature (3117)..(3117): n is a, c, g, or t
  misc_feature (3124)..(3125): n is a, c, g, or t
  misc_feature (3141)..(3142): n is a, c, g, or t
gaattcagttagaatatctcactgacgctgtgcaagcatcgtcgctcattaagcagtgcaaatgtcttctgtctcacagcaacctcgtgagcacgaagaagccagatcctccgaattcagtcgaatgaccaggtgaagtcagagatgacaggaagattgcagagaaggtagaagagcttgagcaataagagaacatcaaggacagtagagccatgcaaggcctgacgtaggtcgcagaggaataggccatccgactcaagaagaagatgaggtgacctcaatgagatcgagatccagtgagccatgccaacgcaggctgcagagaacctcaaacacctccgaactgtccaggacagctacgagtcgggaagtcatggtgggactccatgtcagatatgcaaagcatgctagtcatcgtcttgcccgacttcagcctctctgctatttctggctaggacactcagctgcacctggctgacgctctccggggccaggaggacctgaaggagcagctggccatcgtggagcgcagagccaacctgctgcaggccgaggtggaggagctgcgggccacgctggagcagacggagcgggcccggaagctggcagagcaggagctgctggattccaacgagagggtgcagctgttgcacacccaggtgagggcaggagcagggtcaagggtcaccaggcacactgtctgacgtcgtcctccccacccagaacaccagcctcatccacaccaagaagaagctggagacagacctcacacagctccagaatgaggtggaggatgccagcagggatgcaaggaacgcagaggagaaggccaaaaaggccatcactgatgtgaggctccccgtcccgttttggccacggagatatgtgcctattaagcctcttccttaacctgaatagtgatgaagttacttgtggacaatctgatgattaaatgtggcccgaacttactgttcctaaatcatgtcttctgtcatgtcaagctttctctccttagagggtgtgttcttcattgttgcctgagtgagaccttaggcacattctcatcacatcttaccttctggctcagcttcttctggtcaatgctcatgcgcactgctgccnnnnnnnnnnnnnnnnnnnnnnnnnnnnnnnagagatacattcctactctaggtctcatcccgtgtaggttagactcattcacctagagtgaattctctagtctcattctgatnnnnnnnnnnnnnnnnnnnnnnnnnnnnnnnnnnnnnnnnnnnnnnnnnnnnnnnnnnnnnnnnnnnnnnnnnnnnnnnnnnnnnnnnnnntctctaccttatcagtacagtatctctcagctacgatccttgaacttgtgtgaaatgaactctggttgagtctagagacagtccagatactctccgcaccggtcctgtagagtatcttatgtatcttctgtccagtgtagcttttgtccagttccaagtggaacactcactcggtctnnnnnnnnnnnnnnnnnnnnnntctgtccagtgtagcttttgtccagttccaagtggaacactcactcggtctnnnnnnnnnnnnnnnnnnnnnnnnnnnngcctgcaatgccaattccacagctgcaagactttgagccttccacacacgtgatttcaggccgccatgatggcggaggagttgaagaaggagcaggacaccagcgcccacctggagcggatgaagaagaacctggagcagacggtgaaggacctgcagcaccgtctagacgaggctgagcagctggcgctgaagggcggcaagaagcagatccagaaactggagacacgggtaccatgcaaggggaagcccannnnnnnnnnnnnnnccagcccatgctgcccaaggaccgctcgtctagaagtaatgtgtcccaaagcagtcagttctccccagatcagagagctggagtttgagctggaaggggagcagaaaaggaacacagagtctgtaaagggcctgaggaagtatgagcgtcgggtcaaggagctcacgtaccaggtaggtagaaagagcacctaatgagggtttctctccaaggnnnnnnnnnnnnnnnnnnctgcgaacaacgtggaacnnnnnnnnnnnnnnnnnnnnnnnnnnnnnnnnnnnnnnnnnnnnnnnnnnnnnnnnnnnnnnnnnnnnnnnnnnnnnnnnnnnnnnnnnnnngctgagattgcaggatctggtggataaacttcaagtgaaagtcaagtcctacaagaggcaggctgaggaggctgtagcgaaggttaaagatagttgtgtggctggcccagcccgttagcccgcaagggaggccctgaagagaaggggacaattgccgatttcacctcggctgggctctttgcctgtaggatgaacaagccaatgttcatctcaccaagttccggaaagcccagcatgagctggaggaggccgaggaacgtgctgatatagcagaatcgcaagtcaataaactgcgggctaagacccgagacttcacctccagcagggtaagtccacctagggaagnnnnnnnnnnnnnnnnnnnnnnnnnnnnnnnnnnnnnnnnncttgtaggggatcctctacctcccagatgacaatcttaaactcggagacagaacttgcttatagtcactagcctgggtggagctccactagaatcgggtctgtagcattaaataaaacaccctccagaaagctgcctgaatcatagtccactgagcttgttttttagtagtgccctctgccggtatgagagaggcttgttcaggagcaccctctagaggtgtctgaaggtgttctgcagttactgtaaccacagacccattgtggcctgggagaagggacttattctctctggggacagtttctcaggctatcgagggatctcatgtgggccaccatacatcctcccaaagacccccaaattccttgcatcccactgaaatatacaacactctttcatgcttgcgggaacgtgtgtgctgctttggcttgactgagagcatccacattctctctagatggtggtccatgaaagtgaggagtaatcgagccctcccgatgcagggtggaagatatgcagantgtgtannttccatggctccttgnncatcatacttaagttccatgtgactctttgccacatgcaataaaatttgccttgtttcaagttgtttcgtcttgtgcctttcctcttctccgcatgagatgatcctcttttgatgattttttttctccgatactgaatatcataagcagatggttaggcagaattaattggtaattgtgtgatgtgtaagtgggcttctggttatatgagattaagcattgcttcatgggtcaggagagagagcttgcaactctactttatatcagtagagacaaaggtgttcagacactgttcaatgctggatacactctcacatttctaggaatatattcttgatttagttaataatggctggttcacatacatgaatatagatgaatgtcatagtgttggtcttcagatctcagagcacggtgtagctcatggtgacatactcccaaatctcagctctggtccacctgcactgtaaagcacattttataagc

SEQ ID NO: 3333 - DNA, 2733 bp, Mesocricetus sp.
  misc_feature (18)..(48): n is a, c, g, or t
  misc_feature (730)..(750): n is a, c, g, or t
  misc_feature (1616)..(1633): n is a, c, g, or t
  misc_feature (2138)..(2138): n is a, c, g, or t
  misc_feature (2153)..(2154): n is a, c, g, or t
tttgacgtaaggaacatnnnnnnnnnnnnnnnnnnnnnnnnnnnnnnnacagagtagcaagtctcgcatactctccagcactcctctcgcctggcctcactggatacacaatttgctgcttgatctgaaatgcctaatcctggaatgaatctctgaagtctctctgattcatcacccataaggtggtttctgtggggaaagactatgttccaattccagtgtctcatctgaagcatccatagatggaaagtgcatacagagggtgtttaataaatacttcttatgaaaactttgtcctgttttctccactcctcacctagcttctgtttctcagcttgtgtgtgtgtgtaggcgtgggcagggacggtcctcattctcaagtgggatatatgggtactggctctctattaatgactgtgggtgccatcctccctgcagccacgcaccctcttaagaacagggtaggaaacaaacagccgcatggaaatggacaaaacctttcaaaattaatacctttcattcttgtcttaatattccagtcctgatttagaatgacagcatctgttagataataccaccctccctttctttgcaggccaccatcattccccccctcgttcccccatcctggctggcagctggtctttcctaattcggtaatatgtctgattaaccacaggccctatgcagctgtcacctcttgaacatgggctggtgtgcattaactccnnnnnnnnnnnnnnnnnnnnncctactagtgcttaagaaggattaagttaataatgacagtaagagacagaaagcaaggaggaaggagagagaagggaaaggaaaaaaacctataattcatggcacaagttttacagtggaactgtcctgccataaccttggcttgtgatgacgctggctcataatcccaaggggatttcaacaggttcaatctgatttttattcatttttctcatgtgatgagatttcctaagcaaatagcacaataggcaaaataccctgctcccaagtggtcgttgctcccactggtttccagggtgggaggaactgcaggagtcaaggcagggctcctaagcaaaggcaacccattgtgtcaggtgaagaagcaccgacccagagagagagataaggcatctcaaattcccagctttctgcagttggaaaaaatggtttcggaccctgctcatttctatatatactttccccttggcaacaacaaaaaaaatacgtggaaggggccagttctcagcttgtggtgtcactcattctctttccaaatatagagaaagaatgagcccagggggttagtggtggcctataaaagcccagggggtggctgctcctctgtggctcactctgccgtggtcagaggtaagtggcagtctttccttgtctctcttgtggcctttgatgctttcacaccggttcagtcactgctctggctgtggctgctggctttgtctatctctgaggtggtccttgtttctctctcaagacttgcctcctgctttgtcacacgagtgcctgttctctcctagacacgtgtcaagagagatgcgagctcagtgcctagctgccatgcctggcagctagagcgtactcctgcnnnnnnnnnnnnnnnnnnctagtcattgacttgccattcaatgatgactgcatgagaactgtcaagtggcgagacatgcagcagttgcagctctgccgagctgagctagctgtctgcctatgctgctcagctagactcttctacgcatgcttgtgtgtgagtgtcatcagatcgtcacacaggcattgcacgtctatgtatcttatgcatgtgtgtgcagtcgatgtcagcgtgtgttgctgatcttgtactagtagatgcagtctgtagctagacgatcgactacctggttgcatctgcaatggagaagtgtacatggccggagaaccagtgccagacgttgagccgtctgccagcgtgaggccatggccttgtctgccctcatgctgcttacggctaagactctctatacgcatgcctttttagtcctttttcaccttaagatccggtcaacacagaagcagatgtgcaacgtctctaagtatctctatgccatgtgtgcaggtcccgtagctccacagcngctgctgctcctctnngcttgtccttgtggtgtgactcaggttaggatcgggccaagtccctgggcttcaggaaaccttcaggtaaacccaggtcacccagcactcctttaccatgaggactagcttaggaccgagagaaaggtctccttctcgggttgcacgcagaggctcccatctcttcccttgtggtttgttgtttttaaagatagaatctcatatgtagccccggatggcctagaactcactagatagaccaggtgactcaaactcagagacactgactctgccttctgttgttcttagcatggaagaagaagccgtctcaaactgcctcttccattctgttcagtgttcttgttgaggaatgtcttattgtttattatttttccatgctattatttttcaatgctctgtctgccgtatgtgcttctcagaagaggaaaatggagtgtcaagagtggcattagaagccccttcaccaaatgaagggattgagacacttggattaaatacactctaagtccacagcgtacagtgacaagtgaacaactatgagccgattatatttccagggtgacaccttgtgtggagctc

SEQ ID NO: 3334 - DNA, 418 bp, Mesocricetus auratus
  misc_feature (323)..(324): n is a, c, g, or t
accaccaagacctacttccctcactttgatgtgagccacggctctgcccaggtcaagggccacggcaagaaggtcgcagacgccctgaccaatgccgttggccacctcgatgacctgcccggtgccctgtccgctctgagcgacctgcacgcccacaagctgcgtgtggaccctgtcaacttcaagctcctgagccactgcctgctggtgaccctggccaaccaccaccccgccgacttcacccccgctgtgcacgcctctctggacaaattctttgcgtccgtgagcaccgtgctgacctccaagtaccgttaaactggagnnccggggctgcgtcctgcgggcttgccttctggccaggccctcctccctccctcgcacctgtacctcttggtcaaagaataaagcctaagtaggg

SEQ ID NO: 3335 - DNA, 748 bp, Cricetulus griseus
ggcacggagcagcgcccacgatggctcgctccgtggccgtggtctttctgatgctcctctcagtggtctgcttggatgccatccagcgtcccccacaagtgcaagtctacacacgccacccaccagaggatggtaaaacaaacttcctgaactgctatgtgtctcaatttcatcccccccaaattgaaatcgagctgttgaagaatggaaagaagatggacaaagtcgagctgtcagatctgtccttcaacaaggactggtctttctatcttttggctcacacggagtttacacccactgcgaccgataaatatgcctgcagagttacacacaccactctgaaggagcccaaggtcgtcacctgggaacgagacatgtaatcaagcatcatggaggtctgaagatgcttcatttggatcagtttaattctaaagtatttctcagtttttaatatgctgtttaatctatgcacacggaaggaatagtaatggcacatcatcttctatataacctaccttgaattctgcatgttttccaaaaacagatggaagagtaacatcctagatatctgaaataataaagcatcaatgagtattttgatcagaaacaaaccgttttgataatttgaatgaaaaaaacttgctattaaatataattaagaacagtagttgatcatatatcaaaccctttgtacatcttattagttggatgtagttattcatctttggtctatcacaacataaatgtt

SEQ ID NO: 3336 - DNA, 80 bp, Cricetulus longicaudatus
atggcggaatctgagttgcagctggtggcgcagcgcatccgcagtttccccgacttccccatccccggcgtgctgtttag

SEQ ID NO: 3337 - DNA, 79 bp, Cricetulus longicaudatus
gctgaactagaaatccagaaagacgccttagaacctggccagaaagtggttgttgtagatgatctcctggccactggag

SEQ ID NO: 3338 - DNA, 6296 bp, Mesocricetus auratus
  misc_feature (1237)..(1549): n is a, c, g, or t
  misc_feature (2395)..(2432): n is a, c, g, or t
  misc_feature (2605)..(2641): n is a, c, g, or t
  misc_feature (2795)..(2809): n is a, c, g, or t
  misc_feature (3933)..(3973): n is a, c, g, or t
  misc_feature (4388)..(4411): n is a, c, g, or t
  misc_feature (5012)..(5055): n is a, c, g, or t
  misc_feature (5453)..(5468): n is a, c, g, or t
  misc_feature (5781)..(5832): n is a, c, g, or t
ggatccactcagagtcagatcgagcagctgatggtgaagtgtaaacaatgccaggaagataatgaacagtgtcgcactttcactgtcaagagcatcttcagctgcacatctgtgcctccagggagagacacagttgcacatctgtgtttccagggatgcagcacacctgagcccagcagggagctgctggcacagctactagcctaggcctgccttttgcttccttagtcactctgagatgaggccgggattatttcgccctgcccctgactccctggctccttcctccagcactccctgcacaggaatgtctgaaatttgagactctgtaggccaatagtccaataggagagcagaatcaagtcccacctcctccctcctagcctaggacattgtcataaagctcaaaccagcaaggtccaggtcggcccgctctgcaccagcaccatgcctgtgacactgggttactgggacatccgtggggtgagtgagagagctgctgctgggtgtgacagagacagagcaggaagtagctagggctgatctcttggagacagatagagttcagaacttgatggaaagctttgcctatcaggggaagttcaacaggagagcttgtgcttatgtggtctgggtgttgagcttgtggggagactgtaggtgtaagttggaggctcaccaagaggcggctaaggaagactgtcagtttccccatctgtgacctgtcctatgtcatctttacagctggctcatgccatccgcctgctcttggagtacacagacacaagctatgaggaaaagaaatacaccatgggggacggtgattatgtcctgttggtcagacctgggctcccctgctcattggtgcccagcaacacttgtctgttgctcaactctacagggctgttccttctagaaatttccttgaatttggtcttccagtggagggctgagttacctcctacaggaattggatgatgttttcctctagggcttgttttagtattttgcaaacttcagtgatggagggtccatgcacttacaagcattctatacccttgggtgtgcaaaagtgggtcaggtgcagatctccttctttgggggggtctcatgcttgactccttgaaggattcctagagaaggaatctggggcattagggtgctttctttcatgtcatcttgtccacagctcccaactttgaccgaagccagtggctcaatgagaagttcaagctgnnnnnnnnnnnnnnnnnnnnnnnnnnnnnnnnnnnnnnnnnnnnnnnnnnnnnnnnnnnnnnnnnnnnnnnnnnnnnnnnnnnnnnnnnnnnnnnnnnnnnnnnnnnnnnnnnnnnnnnnnnnnnnnnnnnnnnnnnnnnnnnnnnnnnnnnnnnnnnnnnnnnnnnnnnnnnnnnnnnnnnnnnnnnnnnnnnnnnnnnnnnnnnnnnnnnnnnnnnnnnnnnnnnnnnnnnnnnnnnnnnnnnnnnnnnnnnnnnnnnnnnnnnnnnnnnnnnnnnnnnnnnnnnnnnnnnnnnnnnnnnnnnnnnnnnnnctacttaattgatggatcacacaagatcacccagagcaacgccatcctgcgctacatcgcccgcaagcacgacctgtgtgagtggggctggctgcagggaggacagaagccatcatcttggcttttttgggctatgctgagagtgactccatgctgtgtgcgctgcaggtggggagacagaggaggagaggattcagctggacattctggagaaccaggctatggacacccgcatgcagttggccatggtttgctacagccctgactttgtgagtcccaccaccgctgagctggacctcaccctgtactcttgcccctagaatccactaaggcccagtttgctactggagtctcttggtgctactcattgcacagtgtttgaaactgagacagggtaaccctggcacccagtatgccaaatggaaattcccagtcatggctcctaagtcttaagatccagtccagacttcacagtggaactccagccctgatagtatagacagagttcagaatgctccagttccaactgctggttctgtcccgagccgtgtcacctgcagtgtcttaaagcaatgccacatctgccacacacgccctcacacgtgaggagaagaaactgggctgggggacactgtcctcccaaaaggcttcccagagctgtgtcctgaccccacagagataagcaggtgttcccaaaagcagttcagttgctgaaggcctttgatcctctcttcctgcttcccttgtgctctcaaattcatctcatctctttggaaactgtaccaaagtcctcagcctcacccccagaaggtagaacactgttctctgggtgtttgcttgtttgcnnnnnnnnnnnnnnnnnnnnnnnnnnnnnnnnnnnnnnccacagctgtcttgggtctgatgcaccactgttcagacaacagtgggagagacctgggctgtgggagtgggagcgtggcggggagatccccacccctcctctgcctgctgggactgcagagtcctgtgaggacagcctcttccagggtgcctgtgtctgaggatggtgacagnnnnnnnnnnnnnnnnnnnnnnnnnnnnnnnnnnnnntgcttcaggagaaacgaaagccagaatacttggagggtcttcccgagaagatgaagctgtactcggagttcctgggcaagagatcatggtttgcaggggacaaggtaaagggctgttggtggggaggaggaattgccattcttcccaggcatcnnnnnnnnnnnnnnncaccctggcttcctgcagatcacctatgtggatttcctcatctatgatgtccttgaccagcaccgtatatttgcgccaaagtgcctggatgcatttccaaacctgaaggacttcttggctcgctttgaggtgatgccctgaacctgcttcctactggatgtcctatttcccttgccccttgccagaatgccttttgtcttagttagggtttctaatgctttgaagagacaccatgaccatggcaactcctgtaaggaaaacatttaattgagggcttatagtttttagagttcaatccattatcatcatgggggggcatggcggctgggagtgtggcagcattcaggcagacacagtgctggagaagtaagttgagaattctacttgtgaaggcaaatggaagtgatctgacacactgggcagtgttttgagcaaaggaaacctcagagcccacctccacagtgatcactgcctccaacaacaccacatctactccaacaaggccacgcctcttaatagtgccactcccttttgggccatttttttttttcaaaccaccactttcactccctggacctccaaaggctagtagtcatacataatgcacaaatgcattcagtccaacttcaaagtctccatagtctatcacagtctcaaacttacttaaaggtttaaatttcaaagtctcttctgagattcatacaatctcttaactgtaatcacctgtaaaaatcaaaatcagaaagtaaaccacaggatatatattaccattccaaaacaccgggaagggacatagtcaggaaatacgggatcaaacctgaaagccagctgggcagactccaaactctgcatgtctgatgacaaagcgcccttcagatctccaacaatactaaacctcctaatagggccactccctttggagggcattttctttcaaaccagcatacctttctacttggaatggaaatgaggaataattagcatttgttgaacagggaactgtgttcagttcttagatctattgcatgaaatttatcatcacaaccttcatgttacatagaaatatcaatgccattggactgttaaggaagctgactgtagagatcgtcagtttctcagggaannnnnnnnnnnnnnnnnnnnnnnnnnnnnnnnnnnnnnnnnttctagcttccaagaatagaggacagaggatctcactgatgccaaagaataaaagccatggtttgccatggagcctggattttccatccctgaggcgtatcaggatgtgtcaggagtgtgtagcaagtgctgttcagagggggaattctggcaggactgatacacagtgacaagatgcagtgtgcatatttggcctgtccaattctttgctcagtcatgtccctgactggggaagcactgagacccagggctacagctggtgctgggctgagtggacaggtcagtgctgtttgggggaggtaatcctgacttgttcaatgtttaggtatcctgtttccttcctttcatctttcctcctcagcaatagcttgatgttgagatggggttttgtttcattcaccttctctggtgtctnnnnnnnnnnnnnnnnnnnnnnnncagaaggacttggaaagctgcatctccattcaggatgcagagtggcaggcatgcctgactatgaggcacatgtgatgccacaaaacctactttattagagatttgggggatcgagccagtatccagtgggaatcttagcatgggatcttctgttctgccctcaacaggcgatgtgctttgctaggttcatcagctcggattctggtccaggctgctcagctctggagatgcgtacgagctgacccacagcatagtggcagagtgtgggaggcttcagtcaaggccagctaagcctgcccatatgagtccaggcagccccagaactctgagttctttacagctcatctaggcatctacggggaagacggcacacagcagcgtcattgtggagcccttctctagcagggctggggacaataggatgaatatatgagtatggattcagctgccgggttttaacgtttagatcttctgcttcaagagaatggcaaagatcactcccttatctccttgctggttcaactatcctctcctccttaagtcagaatttgctgaggtactgggtgagagctttgctgtcttcaaagtacactggcatatnnnnnnnnnnnnnnnnnnnnnnnnnnnnnnnnnnnnnnnnnnnnacaggcaggagggagtctgctaggagaaaaaaagcgagtgtttgtgtgaacagagtgacaagggatttcttgcttggtgagtgagccaaaagagccggaatggaagatgcagggatcctcccgtatagacgggtatagactgtagtcgttctagtggtgtgagtaggaggggcacatttagtctctgggtgtgtcggcctccctcctgttgaacgcagagccaacactgttctgcaggatgttgtggagcgatccatagatacacgtactgcaactgcagatgggacacacggctgaaggcagggtttctccttcattctcttacagccttgggcacccgagcagctcatgctgtgttcgggttcttagagtgaaacctgtgcaccccgtggccacannnnnnnnnnnnnnnntctctcctctcccttgcagggcctgaagaagatatctgactacatgaaaagcagccgctttagctgcaaacaaatctttgcaaagatggccgtttggaactcaaaataggacttcgaagcccagacctgggtgaatactcctgatcaccatgatggctccggcccttaggcatggttctgtgaccccaccaaacgttgatttcttcttctttcagctccccactcctctatttcttctcacaagcccttccttcagtcaagcctctggatcctactcctgttcctttgccctgccctgagtcctgccatcccnnnnnnnnnnnnnnnnnnnnnnnnnnnnnnnnnnnnnnnnnnnnnnnnnnnnagatcagatctgcctgtgtgctggctctggtccccagagtgagcaacggggccctgtttgatctccagtaaagtctgaatgacatttttcctgtgtcttgttttgctgctgtgactctccgtgttggctttttgggtggtctctgttttgttgcctgaaggaggggctggagaaagaattttagggactctggggttacttaaagtccttgatgtccctgtgtcctcaatcaggtattcccctggaagagatctccttcatttcccaactattcttcagagtgcagtgcctcagttgtccgtgtgtagtttgactcatgtttcagagacatcctgtgccgaagggaagtgttgagcaggctggccttggctggtccatcttctcatcagcttttctggctgcacacaccacccttgtttgtgttgccaacatctctcttcataaacattccccactgtctgcag

SEQ ID NO: 3339 - DNA, 11932 bp, Cricetulus griseus
  misc_feature (134)..(157): n is a, c, g, or t
  misc_feature (319)..(333): n is a, c, g, or t
  misc_feature (892)..(906): n is a, c, g, or t
  misc_feature (4045)..(4095): n is a, c, g, or t
  misc_feature (7309)..(7332): n is a, c, g, or t
  misc_feature (11408)..(11463): n is a, c, g, or t
ttatgcaaaagtgcacctgtttctaatttgatctgaaaggaacattgctttttcgtgctcttaaaatgtaatctaatcaaatggcagcatgggcaggggcaggggcccgggtggtgtttgttgttgtttatttnnnnnnnnnnnnnnnnnnnnnnnnttgacaagaaagtaagatacctggcttgttcttggagctgccctgtacaccaatcatggggtcccttccacaggtactcagccttgtggctccttcctttccttccagagcacaaagcctggggttccagttgggatccatagaatgtttcaggaagagttnnnnnnnnnnnnnnnaaggagaactcacactgggcacctctgtgcagccacaccccctgtgcggttatgactagaagagcagcaggtgtcagggccttggcttccagccatgagtgggcacctagagcataacctctgaagtcctcccacctgccacctgcccagggacaggcagcaacatcccccaccgcacacacactgtgcgttaagtatcttaacggtgggagcagggagactgagcaggtgggaaccatgctgaagaccccttgtgaggctggctgtaggcagcatgtccacttcatggacagagatgagagtagagtgcgcaacagaggtcagacatggtccaggcccttccagcctccctctgactctgtggagatgaggagggagccaggcgaggtccaggccctccccaccccctctgcctctgtggagatgatggaggggaatgaaggagggagccagacagttgtgccaacacaactcctccgtcgagtgtctaattgcttatgatcatgcatgctctctctgcactaacatttattaatgtgtagatttccattagcgagtnnnnnnnnnnnnnnncatttgcatatggctggaaaaaagtggggcgagagagaaacagcgccagctacccaacaggcgtcaatcacagtgacagatcagatggtctaaggctgggggtggggtgggggaggatgtctgagatgccggcatgcatcctctcagcccataacacagaaattcgggagagtcctcctgctgggaaccacgcccctgaggctggggctggccacctctccagttcctgccgatgcatggtcatgtctggtctgagcagcttctggggtgcccacacacagatggtgaaactggggcccagaggctctccctgtgatgaacaaatgtacctgctgaaccacaggtggacccactgccatatgcagcctttcaccgagccccacattctgctctcttccctgcctggatcccattctcacctctgtacacaaggcccttcttcagcttgaatatggggttttcagctgtagccagcacctgtgagtagagctctactgactgaaggaagttagggtaggcaccagttttgtcaggaagatgatgagatcagggaggggtgactgctggagccccgcagtttggtaagactgtcatggtttgtgtcctgatgctgtgtgtcttgtccacagtgaggacaggaaagatggcaactcactaactgggccctaaccagcagggtgtctgtggttctccattccttatcctctccctctacatggccgctgaagctaggagtcccccttggttctgcctcacaggtttgactacctctgatgtgcctctcccctggcctggggcttacccaggaatggcagaggtgattggagcatggaggccaccaccaggcaaggctcctacactcagccaggcccccacctgttgttggctgttttttactctgaactcttttgggggcctgccacccagctcccaaataaatcacatacacacagagacttattcttatgaatgctcagccttagcttggcttgtttctagccagctttccttaaattatcccatctaccttttgcctctgggctctttcctttacttctgtaatattactttcacttttactcattggctgggtgggtggctggcccctggagtcatcatcctcctagatctcttttttctcctatctattctctctgcctgccagcccagcctatcctttctcctaccttgctattggccattcaactctttattagaccaatcaggtgttttagaaaggcaaggtaacacagcttctcagagttaaaagcaatgtaaaagaatgcaacacatctttgcatcattacacaaatgttccacagcataaacaaatgtatcacagcttaaaataatgttccacaacacctgccctgggactgctcacccatccttcacccagactccaaacattttccgagagcacaagagcaattgtgctccttccctgcttgtgaccaacagtggcttctcagagccagccagcaggcccccaggctcgtgggcctgtcccaaggctctgaggctaccctctgaggtctgcaggacccctcctggccacctgtgctcctgtgggacttacatttctatagattctgtctgaaaggcagaagtcccctcccctgccccttccatggctctgctcagagttatgctatgtctcctggctgacttccggtttacacagcgaagacagagctaagcaggacaggtcgggctaggagcaaatggctacttctccctgttagttcatctgtctgctccctgagatggcacagcactcaacaccatagagtgtgtagcagacatcaggagtgtaaggaaggaaaggagaacgcctgtctctttccaggttctcctgatgccctcagcaaggcctaggtgacacagccggcagaactaagccacaggtgagaaggaagggaggggcctgctgacccagcagcactttttccttctgaggcttaggagctattagcactggtggctaaatccctaatcctccattcagtgccctgagacttcccagctgcccctacgtctgagcagccaacatggctgtagctagcctcagagatagcttcccagagccctggcaaccaagcacctcacagttcttcgcagcccaacccctgtaacgcacactcttttgtagcactgatcttttcaatacccctcacctgagagggcgagaacccaggctgcaggaggggccagactgcctacttcacctctactgagggttcctagcctacagggatggtgtcttagacactgctgtgggccaagagctgaatgcacagaagcaggcgcacgtgacctgcattccagatatactaataagtttggttcagtagcacagcaagactgtctaggtcagtggttctcaactttccaaatcctgtgaccctttaatacagttcctcatgctgtggtgactctcaaccataaagttattttgttgctacttcacaaatgtaattttgctactgttatgaattggaatgtaaatatctgacatgtgacccccccaaagagttcgtgaaccacaggttgggaatcactggtctaggcggtgtcaatgcagacagtagacaaggcgcacagtggggccgggccctggtgtggagcgtggtggtgttggctctccttggagacctgagggaggagcagaaggatcgaggtgacaagttccatcagcctgcagaggcaggtgatcaggaagggtgccactgtgctggttcagggcccgagtggtcattaagtgggtgcaaaggagccagggcacatcagttgtgctggtgcggacagcaggccagcctcagtctggatatggttgttgtgccccaggtttcccagacccagcaaacagaggcccaaaagggggatgtgggattttccagggtatcctgctgactcagagacacagggcagaatctggtcctcctcttgggtgcccattgctccgtctgagtctgtgtgactccagtgccaggcgctttcctctagtgactgttgctttgatgaggcagagaggcacagcctcccctacgaactatgttttcatgtgggaaggagaatggcaatggaaacccacagaattctgtagactgtgtggttgtagctctggccgtggctggcnnnnnnnnnnnnnnnnnnnnnnnnnnnnnnnnnnnnnnnnnnnnnnnnnnnaagtgaagatgcatagccaatcagagctaaggacttctaatgaccgtctcaacagactctgaacttgcctcgctgaatgaacacactgtactgactgccgtgtcccccctcatctcagtgacagcttttgacctgtgaggcagcgttccttacctcaacttagagacagacagtgcttccagaggaggccttgctgcccacttactcactgggtcagcaggtgtttactaagctcctactgtgtgcccactccaccctgcaggttcacataagagcctaggggatgggcaaagcagctgtccccagcatggtggctgccaaggctgctgaggtgctgttgagctggttgggggtcagggtagatcaggggggtgaccaccagggtcatgtctccaccttgacctcattaatcgttggtcttaatcaccaagccaagctccttaaactgctagaggccaactctcacccccgacacataccagtcctgtgttctttttctcagggaacctgcagggaaggggttgattttctgagcagacagacctaggaatcccaggtgtgaagagatgagcaagagagagcttaagggctcagaggctcagaggagaacacttccctggccaggttcctaccagggcttcagggcctgggtacctgtgtggcaagtggcatggcgttttctcccgtcatctgcttcttaactcaaccctcaccttgtcagagaggtcttcataagtggtataacttcggcgttgagggacctttcctcctgttctttgactagctcttgtaactgccactcaccaccatctctcacagggtgttggcttcttgcaaccagtgctttcttgtctcctgtgggcccccagaatcaaatcccttgcctgggacttagtgggtgctccaggcatatgtcatctggacagtagtcctagaacaacttacacatgggggtctccagggacctcagctatatggcagatatgctggcccccatatcctcagacactaggctggtccaggaccagcctctccctcagactggcatcccagcaggccagtgccagcatctctcagcctacacagggttctgacaccctgaagccccaggtgtctgattatcctctctgcccctgagttcacccagttttatgtccattgccttctatataaggcaaaacttcttaggccctcaccatggcctctaggtccacgcactcacctgaataacctggcagcctgcttcctcatggggggggcccttgttcttccccaccctagcaggccaccctcatctctgtagcccgtggtcatccctccctggactggaatgtgtttcttcctctagctgagccttgctcaggccagaagcgctctaagcagggccatggcctcctcctttgtctcccaggtggctggctcataaatgtttaatgaacaagtgagtgagcaaattccaattgaatgcaacaaatagttatcgagctgctgagcctggggtggggtgggtggtaatggactgagctgactgtgctcagatctgtccaaagagctcgtgtcagggccaggggactgggaagggccggggtaggtgagttcagggagaggcattgtcggttgaagcattatggagaaatggacttagggtcctaagcccccagttgtagcctgaggccactggactgacatgggtagaaatttcctggggaggactctggggaagacaagatgagacacccttcctttactcaagggcctctacccggtgtcaccttggcccctttgcaagccaattaggccccagtggcagcagtgggattagtattcttagtatgatatctcccagatgctgaatcagcctctggcttagggagagaaggtcactttataagggtcttgggggggttgatgcctggagttgcgctgtgggagctgtaggtggctgagctcgctaggcagcctcggtctctattgacgaacagcccctggggcagcctcgagggccacagccatgaacggcacagagggccccaatttttatgtgcccttctccaacgccacaggcgtggtgcgcagcccctttgagtacccgcagtactacctggctgaaccatggcaattctccatgctggcagcttacatgttcctgctcatcgtgctgggcttccccatcaacttcctcacgctctacgtcaccgtccagcacaagaagctgcgcacaccactcaactacatcctgctcaacttggcggtggctgacctcttcatggtctttggaggattcaccaccacgctctacacctcactgcacggctacttcgtctttgggcccacaggatgcaacctcgagggcttcttcgccacactgggcggtatgagcagagggactggggtgtggcatgagggccaagggggcacggaagggcctagggagggactgcagcttgggagaagcagcttaatgggcctctctccactcctctttaatcggtatcacccaaaggctttgcttattcactgacaacactgatgctgagctgggcatcagttgtttagagcaagcgtctatctcatgagtaatacaagaatcgaggctccagagaggtcaagggctcactggggagtcacagtgtgagagggaaccctctgaggcagctaagctggggcagagtcagatgagcaccaggatgagctagaaaaggcacacaggtccaggtgacaattgggtcggtgtactgggcatctgtctgactgccttcccagccccgtgggcctccatcatgagtgcatgctccatacactgggaatctagaggagtcatttgtggtttttttctttttctttatatccttgggggaagacaacagtctcccattgtgcagactggccataaactaagtgaggatgcccttgaactcctgatcctcctgcctcagcttctcaagtgctgggatcacatggaccacctcgccacactaggggtttccaaacatttttctctcatttgcctggaagatcaaagaggctactacagggacaatgagcctgtttagctgaggcagggagcaggcaaaagactcatttagagatgtgacagggccggaaccagaatcagggtcccctggctgggacccaacattgttgtcagtggatgttagaggacacaggaaaagtgggcatgacaaagctcaaggccagagcaatgggtctagcnnnnnnnnnnnnnnnnnnnnnnnncttatctccccatgtataggatgctgccttggtggcactgttgggtatcttctgtgatcacagtcccccagtctttggacagaagctaggatgccatgctagtgagtttgtctctgtggggtcaggcttaggccacacctgtcatccagaaattcttgtcagtagcactcctattattcagcaatgtcccagggctggtttattttgtggctcttctccatactgagtttctgtgggtgacatgtggactggagtctggagtcccgttgcccctctcttcttcccctgccaaagcactagccagtgtgtggcccaaagccacagttccagccattccaaggctgtgtctctcctgaaccgaaagctctaaccaaacagagaggctcttggttctttggagttcctttgctctccccggcacatgggttcttcattctgccccctcttcctggccagtccaaacttgctgcatctataaggcttggctcaagtttcaaagcagagactcccatgctaccctgtcctctctgggggtgtttgttctttctggtctgaggtcagagctggaggactgatagctaccaactgccttacaggtgaaatcgccctgtggtctctggtggtcctggctattgagcgatacgtagtaatctgcaagcccatgagcaatttccgctttggggagaatcatgccattatgggtgtggtcttcacctggattatggcgttggcctgtgctgctcccccgctcgtcggctggtccaggtaatggcactgagcattgggtctggcaaggcttttgcccagttcccattcagaacacagagcctgtgggctggttccaagcattctataacatggccttccccctaaaaacatcctggtgactttcccaagccaaggtctaaggcaggggagaagggaggggcagtgatggtacaatgagtggattccatcgctgaaccccatggcaaggggaaccctggacactccaagccttcaccttggctgagctcctaatcctcagctaagccaaggccaaactacaatcctctttggttgagttctcctgggtatgggacagctctctctgaccttggacctcagccctatgggaagctgaactttcccaacatgcatggtgtcattgtaactccaggaactgctcccatccagctccaggctaccatctccaaatgtaggcaggacaagagagggtagggacagtggtttggtacccagagcatcagaatctcctttcttgtcttacatcccttccccacctccaggagtccatctagtgacccttgttgagtcagagcccatcacaccatgctggcctcttcccttatcttcatcttctgggcttgacaggcctctacagatacactcagtggacactctggggtttctgagtgcagcccagtctcactatcctcagacatcatcacaaaatccttgtttctaaaagccgcaccaagtcccggagatggctgcaagcccatccttagtgtagaccgcgttgctgttgctaggagacccacatctccaaactactgcattaacaggacagtcctcagccctcctccccagcaccttctgccaactgacttaaaccaccaaagggcagcaggctggtggcaaagagctgtgcggtcaggtggtaggaagcttgagaattgcctaagggcagagactgctgagtctcacctggcgatggggccaacaggtaatgacaccaggcttcccaaggccacagggactccagactccatgggccccacactatgcccagctgagcatctgttccccttcagctgtattgccccttgccccatcctcaggtacatccccgagggcatgcagtgctcgtgtggggttgactactatacactcaagccggaggtcaacaatgagtcattcgtcatctacatgttcgtggtccatttcaccatccctctgatcgtcatcttcttctgctatgggcagctggttttcacagtcaaggaggtatgagtgggggctctctaacgtgtgtccccaggccatgctgggtgtttagagctaggtgccagggtatgtatagaccccatgggctggacacaggtctgtacccctgtaggcggctgcccagcaacaggagtcagccaccacacagaaggcagaaaaagaagtcacccgtatggtcatcctcatggttgtattcttcttgatctgctggttcccttatgctggtgtggccttctacatcttcacccaccaaggctccaactttggccccatcttcatgaccctgccagctttctttgccaagagctcctccatttacaaccccgtcatctacatcatgatgaataaacaggtgcctgggatgaggccggggtgggggttgggggggagtgagagaaagaaggggaaggggaggggacggggcaggattgaggttccatccagactgctggcaggccatgagctctctggttgagcctcccagtctctaggtagcctgggagtaagccctccaggtgaccagatgacctgacacctgctccttggaaatacatctgacaaatcgttctggaagttttcttgataagtcagctggaagtcaggcacatgtacgatctaaaccctgaggcaggtagatcttgagctccaggtcagcctgggctacatggtgacgtgaaccccctccaaagcagggtgtggttgtacacctctttaccccagcattcaggaggctgaagcaggcaggtcagaagttcaaagctatcttagaccatacagtaatctggcggccaacctgggctacaagagagtctgtctcaaaacaaaaacaaaacaaaaacaaaaacaaaaaaccagaaaatgtcaagtagttccaaggccaggaatggaatgatctcactatttgtaaagctgaaaaagttgctgaaaatgctaggtctgggaggagggggaacaagctgctgttaaaagccatggtctctctgcagaaaaggtgtggtctctggacttagactccgggttcatgtcctggctctgttatgtccaggctgtgtgaccttgagagagtcagatgtctccctccctgggcttcggttttcctatttacaggaagggccaaatcctaaactcaatttgcaagagatctttcacagaaggtcctaagcattcacaggacaccgtggaatatcatttgatgaaaacccttgtgttgggttcctggcatctctgacggtggggaacatacacttagcaagctcccccagggagccagacttagtgaggggactggctgtgggtggtggggctgaggctgggcagggtggtggggcttggtcctgactggagccctctgccttccagttccggaactgcatgctcacgaccctctgctgtggcaagaatatactgggtgatgatgaggcctctgccactgcttccaagacggagaccagccaggtggccccagcctaagcctggccagagactgtggctgactataggagtctcctgtccccacccaccccagccacagaccccaccaggagcagcacccgttggaatgaggtcatgcagactcccgcagtgttctttgctttgtttttaattaatccatgaaagaaaaatgaggctccccactcaacagggacagcccaagaaaggacatccatccacccagactcccgacctggagtccccaattccccggggccagcgggatctgtatcccttccccgcagcttgtttctcaagaacatgacaagtgtcccagcttagggttaagtgtctaggacagaatggagcacacagtagctgattaataaaatctagctggatgaagggaggaatgattggctgaatgattggatatgtgaatgaggggattgatggaggggaacatgtacgtcctgaggtgcccaacctggcagatccagtcatatttggctggaatctataagcaattgtttttacatccctgccctggttgtcttccaccacccccagatggaaatcccaaatcccaggtcctgacatgtggctgcttcgaagacagagagatgggggaaggnnnnnnnnnnnnnnnnnnnnnnnnnnnnnnnnnnnnnnnnnnnnnnnnnnnnnnnnatgtttgtgtatgtatgtgagtgtgtgcaaatactttgtatataaacagcacagctagtagttgtgttacaaataatatcaattaatagaattaattaaccatccttattgtctctgattgttagtgactgcttgggaattggctggacccaggcactcagacagggtgtttcccccagctccagtagacttttaccaatgacccagcctttaggcctgtgcagggctggagcaggatcatagggatgacagtgacagcaatgtggctatagccattaggactgagaaagcattgtgaccaggggtctcagcaaggcctgggtcctgccttcagtgtggcatccttggtgcatgtcttccaatcctacttggcctgagacccagccctccttcttggcttctggaaacatttgttcttccacaccagcaaccaggtagcaatggttccaggccagcatggagttctaga

SEQ ID NO: 3340 - DNA, 1269 bp, Cricetus cricetus
ttccttcttgagcccagagccgccgccgccgcccccagctcccccgagtcgcggggagggcaccaggttactacttccagtggagtccagaagagggaggaggcactgcctccactccagcagctatacacacaatgcagagcatcaagtgtgtggtggtgggtgatggggctgtgggcaagacatgccttctcatctgctatacgactaatgccttccccaaggaatacatccccactgtgttcgacaattacagcgcccagagtgcagttgacggacgcacagtgaacctgaacctgtgggacactgcgggccaggaagaatatgaccgcctccgcaccctttcctaccctcagaccaatgtctttgtcatctgtttctccattgccagtccaccctcctatgaaaatgtgaggcacaagtggcatccagaggtgtgtcaccactgcccagatgtgcctatcctcctggtaggcaccaagaaggacctgagagctcagcctgataccctacgacgcctcaaggagcagggtcaagcgcccatcacaccgcagcagggccaggcactggccaagcagattcatgctgtgcgctacctcgagtgctcagcactgcagcaggacggcgtcaaggaggtgtttgctgaggctgtccgggcagtgctcaacccaacaccgataaagcgtgggcggtcctgcatcctcttgtgaccctggcactcagcttggagcctaccccttgttcccccaccagttgtgccttggcgccttgtctgctcccagctgtgccttaaggacaattctggcaccccatgccagggggactccctgaatgccttttattccttaaggaggtcacacagggaaaggggctttgggcccaccccactctggcttgaggaatatcccataggcacttccaagaggtcacctaagccaagtcgacctttccaagaggccaacccagtgctgccttccatttcctgctactgaccagttcatccagctttccacaaagttgttgctgcctattgtggtgcctcctctcaggttaagggctctaacctctctgcctttgctcttggagtaggctctccaagatattctctccctcccccaagggggagagccacaaaaccctgagaagaaaaatgccctaacctgccccatgtgcccaggcctgatacgtctgctgactgactcgagccccatgcttctgggggcctttcctaccccccatcagcatcaataaaacctcctgtctccagtg

SEQ ID NO: 3341 - DNA, 392 bp, Cricetulus longicaudatus
  misc_feature (56)..(56): n is a, c, g, or t
gggtccagccttccctgggcaaggaatctgctgccatgaagttcgagcgacagcanatggactctactgttgccaccagcagcagccccacctactgcaaccaaatgatgaagcgccggaatatgacacaggggcagtgcaagcctgtaaacacctttgtgcacgaatccctggcagacgtccacgctgtctgctcccaggaaaatgtcaaatgcaagaacgggaagtctaactgctacaagagccactctgccctgcacatcacagactgccgcctgaagggcaatgccaagtaccccaattgcgactaccagactagccagcatcagaagcacatcattgtggcctgtgaggggaaccccttcgttccagtccactttgatgctactgta

SEQ ID NO: 3342 - DNA, 437 bp, Cricetus cricetus
ctctttagagtcttggatctaagatgaccaagaaaagacggaacaacgggcgagccaaaaagggccgcggccatgtgcagccgatccgctgcacgaactgcgcccggtgcgtgcccaaggacaaggccatcaagaagttcgtcattcggaacatcgtagaggccgctgctgtcagggacatatccgaagccagcgtcttcgacgcctacgttcttcccaagctctatgtcgagctgcattactgtgtgagctgtgctattcatagcaaagtagtcaggaatcgatctcgggaagcacggaaggaccgaacacccccgccacgatttagacctgctggtgctgcaccacgaccgccgccaaagcccatgtaaagagatgtcttcaagaagacagaagaaagaaacgacttggaaaaataaaatgagtctttatattgc

SEQ ID NO: 3343 - DNA, 2131 bp, Cricetulus longicaudatus
ccacttggcgtgtgagtcgctgacgggaggatggacgggctggtggctcagtgctctgcaaggctgctgcagcaggaaaaggagattaaatctctgactgctgagatcgaccggctgaagaactgtggtcacttagaagattctccgagtttggaccagttacgagaagaaaatttaaaattgaagtatagactgaatatccttcaaaggagtcttcaggcagaaaagagaagacgaccaactaaaaatatgattaacatcaacagccgcctacaggatgtctttggctgtgctattaaggctgcatacccagacttggacaaccctcctctggtcgtaactccaagccagcagcccaagtttggagactatcaatgtaatagtgcaatgggtatttctcagatgctcaaagcaaaggaacagaaagttaatcctagaggaattgcagaaaacattaccaaacacctgccgaacaatgaatatattgacagagttgaaattgcgggtcctggtttcattaatgtccacttgagaaaggattttgtgtcagagcagttgaccaatctcctagtaaatggaattcaactacctgctcttggagaaaataaaaaggttatagttgacttttcctctcccaacatagctaaagagatgcatgttggccacctcaggtcaactatcataggagaaagtatgagccgactctttgaatttgcaggatatgatgtgctaaggttaaatcatgtaggagattgggggacccagtttggcatgctcatcgctcatctgcaagatcaatttccagattatctcacagtttcacctcctattggggatcttcaggccttttataaggaatctaaaaagaggtttgataccgaggaggaatttaagaagcgagcctatcagtgtgttgtttcactgcagagtaaagacccagatttcataaaggcctggaacctcatctgtgacgtctcccgtgcagagtttaataaaatctacgatgcattggacatcactttaatagaaagaggcgaatccttctatcaagataggatgaaggatatcgttaaagaatttgaagataaaggatatgtgcaagtggatgatggtagaaaaattgtcttcgtgcccgggtgttccataccattaaccatagtgaaatcagatgggggctttacttatgatacttctgacctagctgctatcaaacagagactatttgaggaaaaagcaaataagattatctatgtggtggacaatggacaagctgtacatttccagacaatttttgctgctgctcaaatgattggttggtatgaccctaaagtaactcaagtgacccatgttggatttggtgtggtgctaggggaagacaagaagaagtttaaaacccgttcaggtgaaactgtacgccttgtagacctgctgggagaaggactaaaacggtctatggacaagttaaaggagaaggagagagacaaggtcttaactgaagaggaattgacagctgctcagacatccattgcatacggctgcatcaaatatgctgacctatcccataaccggttgaatgactacatcttctcctttgacaagatgcttgatgacagaggaaacacagctgcctacttgctgtacgccttcactagaatcaggtctattgcacgtctggccaatgttgatgaagagatgcttcagaaagctgctcgggaaaccaagattgttttggaccatgagaaggaatggaaactaggccggtgcattttacgattccctgagattttacaaaagatgttagatgacttatttctccacactctctgcgattatatatatgagctggcaactactttcacagagttttacgatagctgctactgtgtggagaaagatcgacagacagggaaagtattgaaggtgaacatgtggcgaatgctcttgtgtgaagcagtagctgctgtcatggccaaggggtttgatatactgggaataaaacccgtccaaaggatgtaatccttagggttggagactgtttttaccaaagtggctattagtactgtttactttttaaacaatcaatgtggatacaaaagtagtaaaggaattttcacaactaaaaaaaaaaaaa

SEQ ID NO: 3344 - DNA, 615 bp, Mesocricetus auratus
  misc_feature (365)..(383): n is a, c, g, or t
acggcccggccggtccggcccctctttctgagccccgcggtgcgcgctacggagctcggccagcctgctccgtcctgactcaccgctgttcgctcctgctgaggaacaagtcggtcaggaagccgcgcctcagccatggtgaggtggggggcgtcgccacgcggcctggggcgtcggcggggctcgacttgctggggcgccgggagcgcagagcccgggagagggctcccgccgcggcgagggcccgggagagggtcctcatggcggttgtgtaggagtgggcctccacttacgggtcgctgtttgtttttcccgcctgggtgataacaggcatttaaagataccggaaagacgcccgtggagcnnnnnnnnnnnnnnnnnnnaattcgaatcacgctcaccagccgcaacgtgaagtcgctggagaagggtcagtacgatgctcggggtggcttggtgatcgggaccactcctcctcgggctcccggactgccacgccggctggcctggttctccatagactgggaacaggtatgtctgatgcataggctgggctctggagggtttggctcggtgtataaagccacttaccacggtgttcctgtggccatcaag

SEQ ID NO: 3345 - DNA, 1179 bp, Mesocricetus auratus
  misc_feature (1082)..(1109): n is a, c, g, or t
tcgagttttttttaaaaaaagttaatataaaattatagcaaaaaaaaaaaaggaacctgaactttagtaacacagctggaacaatccgcagcggcgcgggagggcgggagaagagatttaattttagttgattttctgtggttgttggttgttcgctagtctcacggtgatggaagctgcacattttttcgaagggaccgagaaactgctggaggtctggttctccaggcagcagtccgacgcaagccagggatctggggatcttcgcaccatcccgagatctgagtgggatgtccttttgaaggatgtgcaatgctcaatcataagtgtgacgaagactgacaagcaggaagcttatgtactcagtgagagtagcatgtttgtctccaagagacgtttcattttgaagacatgtggtaccaccctcttactgaaagcactggttcccctcttgaagcttgctagggattacagtgggtttgactcgattcaaagcttcttttattctcgtaagaatttcatgaagccttctcaccaagggtacccacaccggaatttccaggaagaaattgagtttcttaatgcaattttcccaaatggagcagcatattgtatgggacgtatgaattctgactgttggtacttgtatactttggatttcccagagagtcgagtaatcaatcagccagatcaaaccctggaaattctgatgagtgagcttgacccagcagttatggaccagttctacatgaaagatggtgttactgcaaaggatgtcactcgtgagagtggaattcgtgacctgataccaggttctgtcattgatgccacactgttcaatccctgtggctactcaatgaatggaatgaaatcagatggaacatattggactattcacatcactccagaaccagaattctcttatgttagctttgaaacaaacctaagtcagacctcgtatgatgaccttatcaggaaggttgtggaagtcttcaagccaggaaaatttgtgaccaccttgtttgttaatcagagttctaaatgtcgcacagtgctttcttcaccccagaagattgaaggtnnnnnnnnnnnnnnnnnnnnnnnnnnnntgttcaatgattacaattttgtttttaccagttttgctaaaaagcagcaacaacagcaaagttgattaag

SEQ ID NO: 3346 - DNA, 570 bp, Mesocricetus auratus
  misc_feature (2)..(456): n is a, c, g, or t
cnnnnnnnnnnnnnnnnnnnnnnnnnnnnnnnnnnnnnnnnnnnnnnnnnnnnnnnnnnnnnnnnnnnnnnnnnnnnnnnnnnnnnnnnnnnnnnnnnnnnnnnnnnnnnnnnnnnnnnnnnnnnnnnnnnnnnnnnnnnnnnnnnnnnnnnnnnnnnnnnnnnnnnnnnnnnnnnnnnnnnnnnnnnnnnnnnnnnnnnnnnnnnnnnnnnnnnnnnnnnnnnnnnnnnnnnnnnnnnnnnnnnnnnnnnnnnnnnnnnnnnnnnnnnnnnnnnnnnnnnnnnnnnnnnnnnnnnnnnnnnnnnnnnnnnnnnnnnnnnnnnnnnnnnnnnnnnnnnnnnnnnnnnnnnnnnnnnnnnnnnnnnnnnnnnnnnnnnnnnnnnnnnnnnnnnnnnnnnnnnnnnnnnnnnnnnnnnnnnnnnnnnnnnnnnnnnnnnnnnnnnnnnnnnnnnnnnntgatgaccagcactgctgtgtacccctcatccccatcctatacaagaccactgtgctcaaatttgaaaccagaatttctgtttaataaagtctattcttttcagtaaaaaaaaa

SEQ ID NO: 3347 - DNA, 833 bp, Cricetulus barabensis
  misc_feature (145)..(199): n is a, c, g, or t
  misc_feature (479)..(495): n is a, c, g, or t
  misc_feature (777)..(828): n is a, c, g, or t
gtgatcctctcaaggcacacctgttggggagggcctggtacaagggtgaaggctccagtctggcagatagaccttccacaggcaggtgaagcttccaaacactggatatgcaatccttgaaagagcgccagtgttcataaggaannnnnnnnnnnnnnnnnnnnnnnnnnnnnnnnnnnnnnnnnnnnnnnnnnnnnnntcctggtagagtgaggaagtagcagaggcaccaggtgctagggtaccagggcctcctgagaaggaacaggtgcaaagcagagcaattagcccagaggcatcagtggacagacaggctggatttgatagggagccaccaggattacatcacctgctggcgagcaggccccataagtctccccgtgcatgccgggcagcaaggaaacttggttcttcttcaaggagccagaggacacggtaattaaaatatttttttaaaaaaaatcaaaacatttcgaagnnnnnnnnnnnnnnnnngcctctcacatggtgttctggcactccacgttcgctctagaagggaagaagagggggtgtcacaggtgctgagagttggacaagcccagagtgaggcaggtgtgcactgtgtgagctggcagctgctaatgtctttggaaactgctaatttacccttctgcaccagccacaaaaggggaccactcaattatccccccaagaggctgatgtttagctcgagctcaatttctgtctctgtctctgtctctctctgtctctgtgactccctctgacccccttccnnnnnnnnnnnnnnnnnnnnnnnnnnnnnnnnnnnnnnnnnnnnnnnnnnnnatgaa

SEQ ID NO: 3348 - DNA, 630 bp, Cricetus cricetus
atggctgagacctgcaaaatgaaatacacagtgttccacagtcctttggggaagatcgagctgtgtggctgtgagagaggcctgcatgggatacggttcctcagcggaaagaccccaagctctgaccccaaagaggccccagccagtcctgagttgctcggtgggccagaggatctgccagagtccctggtgcagtgcacaacctggttggaagcctatttccaagaacctgcagccacggaagggctccccttgcctgctctccatcaccctgtgttccagcaagattcattcaccagacaggtgttatggaagctgctgaaggttgtgaaattcggagaaatggtttcttaccagcaattagcagccctggcaggcaaccccaaagcagctagagcagtaggaggagcaatgagaaacaatcctgtccccatcctcatcccctgccacagggtgatctgcagtaacggcagcattggtaattactctggaggagggcaggctgtgaaggagtggcttctggcccatgagggcatcccaactaggcagccagcctgcaaggacttgggtcttactgggacccggctcaagccatccggtggctccaccagctccaagctatctggctga

SEQ ID NO: 3349 - DNA, 732 bp, Cricetus cricetus
accatggtaaagattctgctgctggctttggtctttagtctggctcatgctcaggattttgcagagcttcaaggaaaatggtataccattgtcattgctgctgacaatcttgaaaagatagaagaaggaggaccactgagattctattttcgtcatattgattgttataaaaactgcagtgaaatggaaatcacattttatgtcattacaaacaaccagtgctccaagaccacagtcattgggtacttgaaaggaaatggaacctaccaaacccagtttgaaggtaacaatatatttcaacctttgtatataacatcagacaagattttctttaccaacaagaacatggatagagctggccaggaaacgaacatgattgttgttgctggaaaaggtaatgctttgacacctgaagaaaatgaaatacttgtgcaatttgctcatgaaaagaaaattccagtggaaaacattctcaatattcttgctacagatacttgtcctgaataaaggccttccgtaggtgagaacaggatggcaattaggcatcatatcctcttgatcatggaatcagcatcacaaataaatcaccatttcattctacatgaattgtcccatctcctgtagagccaggataccacatatcaaattcctggcttagctttcctttcccatcacatgatgtattacctgttcttatttttttgactgattaaataaattgtttcaagaagc

(The sequence listing continues in the following parts.)

What is claimed:

1. A method of forming an oligonucleotide array directed toward an unsequenced organism, the method comprising the steps of:
(a) identifying a plurality of template sequences, wherein the plurality comprises at least one consensus sequence for a gene expressed by a cell derived from the unsequenced organism; and
(b) selecting a plurality of oligonucleotide probes, wherein the plurality of oligonucleotide probes comprises a first set of oligonucleotide probes, each of which is specific for one of the plurality of template sequences, and wherein at least one oligonucleotide probe is specific for the at least one consensus sequence for a gene expressed by the unsequenced organism,
wherein the step of selecting the plurality of oligonucleotide probes forms the array of nucleic acids.

2. The method of claim 1, wherein the at least one consensus sequence is generated from at least two nucleic acid sequences of cells derived from different genera of the unsequenced organism.

3. The method of claim 1, wherein the at least one consensus sequence is generated from at least two nucleic acid sequences of cells derived from different species of the unsequenced organism.

4. The method of claim 3, wherein the unsequenced organism is hamster.

5. The method of claim 4, wherein the plurality of template sequences further comprises a template sequence selected from the group consisting of the polynucleotide sequences of SEQ ID NOs:19-3575, SEQ ID NOs:3661-7217, complements thereof, and subsequences thereof.

6. The method of claim 5, wherein the plurality of template sequences further comprises at least one transgene sequence.

7. The method of claim 6, wherein the at least one transgene sequence comprises a polynucleotide sequence selected from the group consisting of the polynucleotide sequences of SEQ ID NOs:1-18, SEQ ID NOs:3643-3660, complements thereof, and subsequences thereof.

8. The method of claim 7, wherein the plurality of template sequences further comprises at least one control sequence.

9. The method of claim 8, wherein the at least one control sequence comprises a polynucleotide sequence selected from the group consisting of the polynucleotide sequences of SEQ ID NOs:3576-3642, SEQ ID NOs:7218-7284, complements thereof, and subsequences thereof.

10. The method of claim 9, wherein the plurality of oligonucleotide probes further comprises a second set of oligonucleotide probes, each of which is a mismatch probe for a different oligonucleotide probe of the first set.

11. The method of claim 10, further comprising, after the step of selecting a plurality of oligonucleotide probes, the step of immobilizing the plurality of oligonucleotide probes to a solid phase support.

12. An oligonucleotide array directed toward an unsequenced organism, the array comprising a first plurality of oligonucleotide probes, each of which is specific to one of a plurality of template sequences, wherein the plurality of template sequences comprises at least one consensus sequence for a gene expressed by a cell derived from the unsequenced organism.

13. The oligonucleotide array of claim 12, wherein the at least one consensus sequence for a gene expressed by an unsequenced organism is generated from at least two nucleic acid sequences from different genera of the unsequenced organism.

14. The oligonucleotide array of claim 12, wherein the at least one consensus sequence for a gene expressed by an unsequenced organism is generated from at least two nucleic acid sequences from different species of the unsequenced organism.

15. The oligonucleotide array of claim 12, wherein the unsequenced organism is hamster.

16. The oligonucleotide array of claim 15, wherein the plurality of template sequences further comprises at least one template sequence selected from the group consisting of the polynucleotide sequences of SEQ ID NOs:19-3575, SEQ ID NOs:3661-7217, complements thereof, and subsequences thereof.

17. The oligonucleotide array of claim 16, wherein the plurality of template sequences further comprises at least one transgene sequence.

18. The oligonucleotide array of claim 17, wherein the at least one transgene sequence comprises a polynucleotide sequence selected from the group consisting of the polynucleotide sequences of SEQ ID NOs:1-18, SEQ ID NOs:3643-3660, complements thereof, and subsequences thereof.

19. The oligonucleotide array of claim 18, wherein the plurality of template sequences further comprises at least one control sequence.

20. The oligonucleotide array of claim 19, wherein the at least one control sequence comprises a polynucleotide sequence selected from the group consisting of the polynucleotide sequences of SEQ ID NOs:3576-3642, SEQ ID NOs:7218-7284, complements thereof, and subsequences thereof.

21. The oligonucleotide array of claim 20, wherein the array further comprises a second plurality of oligonucleotide probes, each of which is a mismatch probe for a different oligonucleotide probe of the first plurality.

22. A method for detecting the presence, absence, and/or quantity of expression levels of a plurality of genes in a cell derived from an unsequenced organism comprising the steps of:
(a) forming a hybridization profile by incubating target nucleic acids prepared from the cell with an oligonucleotide array made according to the method as in claim 1, or with an oligonucleotide array as in claim 12; and
(b) detecting the hybridization profile,
wherein the hybridization profile is indicative of the absence, presence and/or quantity of expression levels of a plurality of genes in the cell.

23. The method of claim 22, wherein the plurality of genes comprises at least one previously undiscovered gene of the cell.

24. The method of claim 22, wherein the plurality of genes comprises at least one transgene.

25. The method of claim 23, wherein the cell is derived from hamster.

26. The method of claim 25, wherein the cell is a CHO cell.

27. The method of claim 24, wherein the cell is derived from hamster.

28. The method of claim 27, wherein the cell is a CHO cell.

29. A method for comparing expression levels of a plurality of genes in a first cell derived from an unsequenced organism to expression levels of the plurality of genes in a second cell derived from the unsequenced organism, the method comprising the steps of:
(a) forming a first and a second hybridization profile, wherein the first hybridization profile is formed by incubating target nucleic acids prepared from the first cell with a first oligonucleotide array made according to the method as in claim 1, or with a first oligonucleotide array as in claim 12, and wherein the second hybridization profile is formed by incubating target nucleic acids prepared from the second cell with a second array identical to the first array;
(b) detecting the first and the second hybridization profiles; and
(c) comparing the first and second hybridization profiles.

30. The method of claim 29, wherein the first cell and the second cell are from the same cell line, wherein the first cell is modified with a transgene, and wherein the second cell is not modified with a transgene.

31. The method of claim 29, wherein the first cell differs from the second cell with respect to a culture condition.

32. The method of claim 31, wherein is the culture condition is selected from the group consisting of duration of culture, temperature, serum concentration, nutrient concentration, metabolite concentration, pH, lactate concentration, ammonia concentration, oxidation level, sodium butyrate concentration, valeric acid concentration, hexamethylene bisacetamide concentration, cell concentration, cell viability, and recombinant protein concentration.
